United States Patent Application Publication US 2022/0090207 A1 - sequence listing, part 17

SEQ ID NO: 228870 - DNA, 1266 bp, Homo sapiens
  chr2:176946010-176947276
  hyper
tccgaactgcaaggacctgcccctaggggcacgggtccgattttgatattgaagggatgattttgttggaatcgtttgccttaaatgagtgggtagagcaatgtctccataaacggggaaggggacgtttccacccctcccaacactatctaataaagacatcattcgtcacaactctaaattaaagaaagcccgatcaaaccagagggagacttccacactcctcccctaccccgtggagattttttcttttttctgcagtgtcgaacgctccatgaagggctcaccaaatcgcctaacctcccggctatctctcccagacgtataataaaattaataacctaaagttatatataaataaggacaatttcgttgcatttttccccgcaggaggttgcccttttttcgttgcccaagaggaaaatgttcaggaaactactgtctcaaaccaatcgattttaaagatacagtatccttttctccgtgtaacgatttatgcggaaaataaatctccaagctcaagagcaaatgaaaagtttcacctctggttcctgcttgaggaacaaagaccaactgggcttgccgcctaggggaaagtggggccgtgggtatgggcgagggggcatctggccaggcgttgggcacaatggagcaggggcgagtgctttcagcattggagtcaccattcgggggccttcttagatccgtcaggccggacaaccgttcggattcggtggccgggaaataaataagccaattcctttggtgactaccccccgcggatttccagacccttagctaaatctagccacccagaaaggggaaaggggaaaaagaaacaatcaacccagatgcccccggggaggccagagcaggcatgcactggaattgataccttgatggtggtttcgggcaggttgagtgccgcggccagctcgcaccggcggggccgcgacacatagttctcccggtagaactccttctccaggcgcgcgatctgctcgcgggtgaacgccgtacggtagcgccgcacttgatccgcgccagagccggagccacccagcgccgcgctcccgccgctgcctccgctgcctccatgcaggcttccgaggcctgagcccgacgccgacgtcgtggtgccggcagccgagccgctctctgcgtaccctggcaaacaaacgaccaacagcgcatgagtggctgtaggaccaacagcccggcgctggcgctgcgcgcggatcggggaagccccgtcaggaaggagag

SEQ ID NO: 228871 - DNA, 605 bp, Homo sapiens
  chr2:176947776-176948381
  hyper
ggggtctaccggctcgctcgggctcttagacacgagcgcagaaacattttctcggactcaggagcgagggcgggtgggcctggtgttccaggctccgcaggcctgagcctggcgggaaagctcaaggagcagaactggaaggcacggtcccagacatgcgtcccgcccccgcccgtgctagctcggtgtagcttgcctgtggagggtctgagaggggaaaaggcaccgggaaaggctggcgggggccgcggaggagcaaagaggatgggactggagagcgcggtgcggccggcgcggttacctttgccattgttttccttaagctgagcggcgccgaggcccccgggggagcgaagcgcggagcagcccacctccacgtcgctgctcatgtcggcctcagcggccgcctctgaataatggcccggcttcttgcggctctcggcggcggaggagatttcggaggagacggtgctttcgctgcccgtgtgctgcaggttgaacaaagtgtctatttcgaatttgcccttggcggggagttctcccagagcgctgtgcaggggggcagacggcaggcgcgggcttaggcgagccgggtgctgcgaatt

SEQ ID NO: 228872 - DNA, 1345 bp, Homo sapiens
  chr2:176949491-176950836
  hyper
atatcctagagttttgaaagcgctttcttgctacgtggccgcggaggtgcattgggcccgcgcctccaaacggaaatcattaggtcctctctgattttctaacaccgtctgcagagtgagatctgaactcgaagtccccggttttttacttttataatcctgctgatagaaagccttctcgcctacgcattttcctgaggggaaacgaactaggctggacgatttgatagcagaattcgacagctaactttaaacacagtggagatttacagcgccatacgggcgctccgaatccacgctcacgttgccagattttcccctccctcctcaaatagaattatttgcggcaaaggcgctggatttcgaggtcaaaagaggaaagaggagacagccttcttcccctacctccccgctgccctcccttcccctttgcttttcttccttctctctttcctcccctcatcaaccccagccccttacctgcggccacaggtattcccagcgttgggtccgggcgcagagagtcgccgaacagccttacagcagctctctgcggcctgggcttggaggctgagcctcttggcgacaactttgatagtcataatgacgccggtggcaaccattttaacgaagatcaatcttcactccaggccgctcctcatctcccgcggttgcgcccacccttccctgaccctccaagcactgtgcccacccgccaacggcccagccggagagagattcgcggacacaggcggaggcgagggaggacggggatgggacgcggaggtccgcccgtgagcttctgaagcggctgagagaccctgacaatctgggcgctgggcgcgggtcctgcatccccacatttagcctcaatccgaaccccaaccagggccccctcttctttctgccgacacacccagaacattggggtgtgttagggggcaagctcgagatctattcgcctatagctcttggcgctttccttttaaccttagacccgttgggggcgcatcaggaatgtaaggggaagcgaggtgtgaagtatatttatatacatatatacacacatatagtcaatgccaaaagtttatcttctgttcccctcggcgccaacttatttcaacaacgcgagctttgcttagaaaatcaattccacatctttaaggtaataaacggaaagctcgataggcaggcggtgcctgggggaacggggaaccggcggggaacgcagagtgggcatccagcgcaccgggactgggacttgacccagcgtccacctctgcccctgccccattggccacccagctccgagctccctgagttctcattgcgccggctttggggc

SEQ ID NO: 228873 - DNA, 189 bp, Homo sapiens
  chr2:176951108-176951297
  hyper
gcctttattgctgtcgtttggcgcccccatctgttttcctcgcggtttcggctgctgtgagttggttttcaagtcggagacgcagtcactggggactaaggtgaggactgacgaccccttcctctatcactcagcccgaggctctcccacatcttcccttcctctgggacccgacgcctctggtcccaa

SEQ ID NO: 228874 - DNA, 683 bp, Homo sapiens
  chr2:176952675-176953358
  hyper
gcaggtaataaaaatctgtccgggctgcccgaggggaggggcgccggtaaagccgtagctgcagcgaagccccgcgtctgccgctgccggagcctggctctcctcttacgcggggggctgcgggcaattggggccgacaacttgcggtcccgccttgggacgcatgcttgctcgagagctggggctgcagggtgcagtgggacagtaggaccgcgaaagcctgggcttcgagcctcgggctccctgtcttcaggcgaagtgcggtttccacgggtgcaggtttcgctgcataagggaagactcagatttcgagccctcggcaggccagcttctagctctctgtcccttccgggtctctccggttgcttctgtctttcctcctcccactcccgtcgcaatcccgcgccccacggaggaaggtcgtggtgcgggagttgggggatactttcttcctgggctcggtctacgcagacccatcgcctgcctcgagttcctgtgccctcagacgccacgggaaaacttgcagggacatctagcgccaggcgtggggaactgcgcgccgccgggccgggaagtggagccgaacactgcccctccgcctccctttcggctccccccttcgtgcttgggcactttcctcaccttcatccctttgccctgccggtaaggacaatgtggattcc

SEQ ID NO: 228875 - DNA, 1134 bp, Homo sapiens
  chr2:176956330-176957464
  hyper
cccttgaagtcagaccgtttctctgggctgctcctatcacaaaatccgaatttgcttggaacaagcgccctcttaatttgcccctctcagttctctgcagttgacagcttggaaaaggaagcgaaacaaaggtccctgggaaagtgaagttttcaattaatttggtgtgagaaacgggcgggagtgggtggtgactgcaaaatgcgaggccggtcggctgctggagagacacagaagtttcacggtgggaggctgagtggctttctcccccggcgccgttctcagggtctttctgcgggtcgaagaaggacccgcgggagctgagaggcccaggtcggaagcactcccggctggcccaagagtagaggcgaagagcgttgagtaggcatccatggacttttctttctgggacagattgtcaggctcactgcgccgatgcctgtctttcatctgtttaagtctctgccgccagccccaagggcgcttcatgggcattttccgaacggacagcgtgtgtgtataggaagggtctgctccaatgcctcttacctgtgtgaaatgcctttgccgggtaccagtgcacaaggtagggcaaattagctcactcggatttggggtctagaagtcgactaactgagggattcagcaacaggataaaaaaatgggcctgttttcacatcattctgatcatctctgtccttcgtcttcattttgctgtgcaactcggggagccgaggagaggtggcaaaaacagcggttgccgagacaaggcgcaggccttggcgcccgcctcagtcgcagacagggcctgggatgggccgtcgcgcaatcaactcgtgggggtggctgcagcgcgtacgcctgggtcgggggggagggcgggaatgggaggtggaccctgcaaggggcaggagaggggtgggggccggagtgggtgggtccagccaggcctgggccgggagccaggctcccccgcgttcctacccccacgtggccgcgcgcagccaatggcacgcccccggcgggggccctcggggcgggaggcggccccccgaccggcccaggccccctcccaacctgaacttcgtttttataaacgtcccgcgatgagctaacctgttggagggcaggcgg

SEQ ID NO: 228876 - DNA, 364 bp, Homo sapiens
  chr2:176958244-176958608
  hyper
ggtgtccactttcggctccggggagcctcggcacgaggcctacatctccatggaggggtaccagtcctggacgctggctaacgggtggaacagccaggtgtactgcaccaaggaccagccacaggggtcccacttttggaaatcttcctttccaggtaggggcgatggagaaaagggaccgacacgagggagggggagagagaaggagaaaagaaaggactaagagtatgcgcccctacttgggagtgggagttgtgcctgtgctccacacgtgaccagggttaacccagtggaaatttgtccagttcgtgtgaaatctgtaaattcctcctctgatttcaactgcctccgtcactgccctttc

SEQ ID NO: 228877 - DNA, 135 bp, Homo sapiens
  chr2:176959224-176959359
  hyper
cagccggacatgtgcgtctaccgaagagggaggaagaagagagtgccttacaccaaactgcagcttaaagaactggagaacgagtatgccattaacaaattcattaacaaggacaagcggcggcgtatctcggct

SEQ ID NO: 228878 - DNA, 321 bp, Homo sapiens
  chr2:176961517-176961838
  hyper
tcatatcttactggcgaccgtggacagctaacttcgattttgagggggagggacagagacagagaaacagagagagatatgatcgcgattcaatctttgcagaagaaataacccgtgcacaaggggccacaccatcccccaccttacacttcgggaagggtcgttaccgtttttgtggtttttctcaaaagatgtgttttcatcagaaacgggcacatttttcctttctcctaatcgccaacttcccctccattttttgtgagtcccacactccggagcttcactccatttcccctgtctatttctcgggtttcccatcgt

SEQ ID NO: 228879 - DNA, 468 bp, Homo sapiens
  chr2:176963190-176963658
  hyper
gccacccaattggtcgccataactcacacaataaagtggcagcgcggcggtcagtcttgccctccggcggcgcctgtgtggtctcagtgcaggagcccgcgatctaaccaattccagcttggctcggagaccgagggtcctgctgcaggctgagactggcgccggtcaccgggtctcccagggtcttgggatcagaggcaggaggggaggacccctagtcctctggccggactaggcaagagggccagcgacggggtctgagcacaccgctcccggctaagaactgctgcctttcccacttccctgtttgtcagacccgtgaactccctatccccggcacccctgggggcgctgaggcaaggaactctgctagccagctgcctccgaacgcccgctgttccccggccaggtggttctggctcttctgcctttccacacccagtcgggggagttcgtcctgctttgccc

SEQ ID NO: 228880 - DNA, 1695 bp, Homo sapiens
  chr2:176964048-176965743
  hyper
agagctcctggtgccgccggaccgcgccctctccggataagtcgagaggcgccggttaatggaaaatgcctccgctgcaacttaaagccggtagaagcaagccgggcccagaaagcctgcggaaaacgaatcgcaaagccaatcacgaccaagaagagtcccaggggacacttgggcagagtcaccctcttgcccgatgtccccagctgctgaagccgggcctggaaacccgcagacagttagtcttcgctcaacctgatttggctctgctggcagcctcgtccttcgccatcgaacattgcgggtgttatcataatactctgaagggggggaaaacgggtcggggggatgtaggcggtgctgaaatgaccggctttgaagaacctgcaggcaaagtttcgtccaatcgtctgagcctgtcctcttattcccggttgtaactaaatactgttgcgagcgcagccgaagccctttgttggagatgtgtgagcgcagtctctacagagcgggctatgtgggctcgcttctgaatctgcagtcgccagactctttctacttctccaacctgaggccgaatggcggccagttggccgcgcttccccctatctcctacccgcgcggcgcgctgccctgggccgccacgcccgcctcctgcgcccccgcgcagcctgcgggcgccactgccttcggcggcttctcgcagccctacctggctggctccgggcctctcggcctgcagcccccaacagccaaagacggacccgaagagcaggctaagttctatgcgcccgaagcggccgctgggccagaggagcgcggtcgtacccggccgtccttcgcccccgagtctagcctggctcctgcagtggctgctctcaaagcggccaagtatgactacgctggtgtgggtcgtgccacgccgggctccacgaccctgctccagggggctccctgcgcccctggcttcaaggacgacaccaagggcccgctcaacttgaacatgacagtgcaggcggcgggcgttgcctcttgcctgcgaccttcactgcccgacggtaaacggtgcccatgctccccgggccggtttgggccgggatgggaggtggggttcaagggagagtgtaaggggaggtgaaccgcctgggggcgggcaatagacagagtacgggctgggttgacgtgggttggggctgtgttgcaggcctgccgtggggggcggccccggggagggcccgcaagaagcggaaaccctacacgaagcagcagattgcggagttggagaacgaattcctcgtcaacgaattcatcaacaggcagaaacgcaaggaattgtccaataggctgaacctcagcgaccagcaagtcaaaatctggttccagaacaggcgtatgaagaagaagcgcgtggtgcttcgggagcaggcgctggcgctctactagccgcgcgcgtggccagggccgggttggatctgcccttttggacagaggccttgtttggggagggggatctggggctaaggctaaggcttttccttcggttccttctctgctggccccagaagccaccaagagatttacagaccaggccagttgggcctccttgctttcctcagtccctgagaagcccgtgagaaacgtgcggaagtaccagtgcaactctggctggccttaaggcttccacgttgggggactgag

SEQ ID NO: 228881 - DNA, 334 bp, Homo sapiens
  chr2:176968601-176968935
  hyper
aaacagttttaaaacgagaaaaaaacagcttcatctggcattcaatcagttgggaactcagagggcggcggggaaggggggacgcttttaaggcctgggggttctcccccagggaggcgggctgaggaggcttccgggatgccggcgggtggaagagaaatctggaaccgttgtaaatattcatgtggggggatgccccttcacccttcacccgcctctcccagctgcattcccccctcagtgatagtgggggagggcaaggcgactgccccactgtccttagacaaaggtgatctccccatatttttgttctccagtcgcttgacttaagaag

SEQ ID NO: 228882 - DNA, 882 bp, Homo sapiens
  chr2:176969197-176970079
  hyper
cttgggtgactcaaaatcaccgcatcgcgtcctggcgctgtgcggaaagctctttctcgcggagcggctggctgcgccccgaaggcctggtgcgctccctgcgtttcgggtggggccgcgcaggcaaggacaaggccacagagtcggggtcttcacggtaggttctcgagcgggacgcgcgggtccggaggctgcggttttccctgggtttggggaatgggggtaggaactaggagggagctggggccaaagagccaagcgggctgggactggaatgaaagcgctctgggttgtggagtgggtcggggggcaagggtccgcgctaaggagccgaaaggggccggccgcccccttcccctatgcaccggcgcgccactgcagatggctcaccctcccccgccaaatcgctgctcccgccggagctgccgtcgccatgtcgttgaacttgaatggttcgtcctccccttttccctcttcggcggtcagcaggctccatactgggggcgccgggctgcctgcaccccaccccgtgccgccagtagagagaaggtgcgagaattttgcgaatccccagacacataaagacccgggttgaagtcctcgcagctgccctgggtcctgagctaccgcagggccagtgtgcagcgtccagggagccattttaggagagagatccaggggcgtcgaccacgagcccgaaagggagaggcttgggcctgggatggagatggggaggcagataagtgtgctgggggtctgggttgaggagaagaatgtcagctggaatctgggcgggggtgccagctgcggggagggagcacacaagatgggcagttctagttgggggaggctcgatgccctccagtcgccacagacctattt

SEQ ID NO: 228883 - DNA, 1668 bp, Homo sapiens
  chr2:176971290-176972958
  hyper
cgaggccagcactcgcacccttggggtcagaaccggaaagagccaagtcactccactctgaacgcgctgggcagaaaaatatgtaaatcagggctccctgcgccctggagagtggcgaaattactcccgcccggtgaacaagaagcaacaagctcccaggcgggtgagctgcagagggtggcagagtcgcgggggagggagcggctgcagtaaggggggtggggttcggaacctcacaccctcacacctagttcctagcttctagggagcctggagccggggcttccccccctctgctcgctgcttctctcccttcccccttcctccccctcttccccctccttcctcctccccgccggcctcggtccgcgtacttaaagcggcgcgggagggcggacgcgggcgggcggcccgttcgggcggtggcagatgcgcccagcggtgacagcggccagcggcgcgcaggtgaccggcctgaggcgcagcctggtcagggagcgcccggggagagctggcggcagagggcagccgatccgcccccagcgcgcgcgtctcggcgccaggagccgtcccggggcgtgttggcgagcgttgatatagatataaggacatttctcttcatggcgtcacgtgacataattaccaccagaatcaatcaagatgaattgcacgtcagcgcccggtggggatttttgcttagttgatcctggcccaagcctcttgtgcaatcgatggctcaggttggctgcgcggggagcggccagaggctcgctggcgcgcacgccgcggagtcatgaacgactttgacgagtgcggccagagcgcagccagcatgtacctgccgggctgcgcctactatgtggccccgtctgacttcgctagcaagccttcgttcctttcccaaccgtcgtcctgccagatgactttcccctactcttccaacctggctccgcacgtccagcccgtgcgcgaagtggccttccgcgactacggcctggagcgcgccaagtggccgtaccgcggcggcggcggcggcggcagcgcggggggcggcagcagcgggggcggccccggcgggggcggcggcggcgcggggggctacgctccctactacgcggcggcggcggcggcggctgcggcggccgcggcggccgaggaggcggccatgcaacgcgagcttctcccgcccgcgggccgccggccggacgtgctcttcaaggcgcctgagccggtgtgcgctgcgccggggccgccgcacggccccgcgggcgccgcctccaacttctacagcgcggtgggccgcaatggcatcttgccacagggcttcgaccagttctacgaggcagcgcccgggcccccgttcgccgggccgcagcccccgccgccacccgcgccgccacagcccgagggcgcagccgacaagggcgaccccaggaccggggctggtggcggcgggggcagtccctgcaccaaggcgacccctggctcggagcccaagggggcagcagaaggcagcggtggcgacggcgagggccccccgggagaggcgggggccgagaagagcagcagcgcaggtaggcaccgggtactgggcaagcggtgggcccgggggccgcgggggagggggggggggcggaggcctccctctgcttgcgcctttttatgtgc

SEQ ID NO: 228884 - DNA, 92 bp, Homo sapiens
  chr2:176973290-176973382
  hyper
agcagatgccccggcgggcctgctcttgtctctgttccctcaggttccagtttagagcctgccttgccctctgcttccccacctccgtgcca

SEQ ID NO: 228885 - DNA, 272 bp, Homo sapiens
  chr2:176973442-176973714
  hyper
gtccacgcccgcactctctcctgtgcccgcccatatatcatcccccacgacgcaggcagggcctttcggccgcggcagagaacgtccccaacggggccagggcctggccctcgctcagtggcccgggcgggcgggcgggtgggggctgtcaggcagcggcctctctcaccccctggtctctttgccttgcagttgccccccagcggtcccggaaaaagcgctgtccctataccaagtaccagatccgcgaactggaacgcgagtttttcttt

SEQ ID NO: 228886 - DNA, 177 bp, Homo sapiens
  chr2:176974008-176974185
  hyper
tcgggacctcccagcgaccactgcagcctgcggacgaggccgggacttggccgagcggatcctaataaggggaaaatggtaaatgcaaacgtcccgttacaattttaccgccagtgtgctgtcgttccccctccccctctccgagtcctcgtggggacacggcggggtctgtaggaa

SEQ ID NO: 228887 - DNA, 340 bp, Homo sapiens
  chr2:176975915-176976255
  hyper
agaaggggattcctttggtattctagacatcggttaaaatgtcagtgccctaatagtgtgatcgttccatgagcttaaaactgttttttttctttctgtttccatctattttttaaaactgcatctaaacgtagcaagcttgtgtgcccaccacccaaggcaagccgaacccgagataccattttccgtttgcaggggcctggagatccacacgagggcgcgctcacgttccagaagccgcgtttgaccaagaggccgcggtaccttgtctgtccaacactggattctaataggcgacctcaaccccttagaaacaggcggcagctaaggtgtttgctag

SEQ ID NO: 228888 - DNA, 189 bp, Homo sapiens
  chr2:176976675-176976864
  hyper
agaaaaaaataagacgcatgggggactgggagaatcgttctgggagcccgcggccgtgcctggagtgcgcggctaccagtggcgaccgagtggcgccggcaggactgtgagttggtgtgcccaggccgggctgggctgatgcggacacgggaggcagcaggcactcgggggaaacgtttatacttcaag

SEQ ID NO: 228889 - DNA, 826 bp, Homo sapiens
  chr2:176980658-176981484
  hyper
gagggacgctttcgcggatagtgaactgctggcaaagaattgtctctgggctgaaagctcccagaggtccggccccgcagaggtcagggtgtggttcctctgagagccgaagcctcgtgtagccctccggggcgcataggaacccggagccaggcaggaggaccgagcgggaggacaacgcagggaccaacccatccatggggatccgggcccggccagctgcttggcctcccggccctcgcggccctttttgcctccgccctcctagagacaccttggccgcttcttagccccaagggatctttcctttggacccctggggtgggatgtctcagggcccgcggaatccgactcaccttcccgctgggctgcccgggactaaattaaccagcctgcgcccccacccgcttgtcctggacccggccctcttaagcgcgttctgcctggttgtgtgtggggggaatgcttctgtgcgctggcgccagggcactctggcttccctccccgtccgtgcgtgtccacttggaggcccctagagctgagactttccttccgccggttgggcccaggggccgaagcgggggacgcgagtggggcgggctggccgagcgagccctggagaggcggacaggagggcggcggagagcgctgggccggttgtctccagcgcgcactatcgcgggcgcgtagtagatgtcgctgttgtccgtgcttacccggccggccggccaggctctggagcacgtgacccgagaggaggctgcggctcaaggccattttcaaatctcattggcttggttgtcatgtggtcggcagaggcatccac

SEQ ID NO: 228890 - DNA, 596 bp, Homo sapiens
  chr2:176982119-176982715
  hyper
aagccgcagctctccgctgcccagctgcagatggaaaagaagatgaacgagcccgtgagcggccaggagcccaccaaagtctcccaggtggagagccccgaggccaaaggcggccttcccgaagagaggagctgcctggctgaggtctccgtgtccagtcccgaagtgcaggagaaggaaagcaaaggtcggtatgagcagagttgccaccccagcggggcgcgcagcccgggaacccggcagagagggagtgccggggtgcccagcgccgagccggagcccgacttggcaggtgctgctccgcctggttttagaggggtgatctcagccctgagatagtccccgcttctcccctgctgccctggccctctccgccagtcctggccccacgctgatggcgcccgggcagaggaaaagcttgccggttttatttttcctgagctagacctgaacacaacaaaagagcgcaaaggagacctgcggctcataaacacgaccacagagcctcttttctcctgctcagatttgcagttccagttttgccttgagcccaatgatcatgttaaggtgatccagggcaccgtgttcgtgttcaa

SEQ ID NO: 228891 - DNA, 283 bp, Homo sapiens
  chr2:176983748-176984031
  hyper
cccttacactaagcaccaaacgctggaattagaaaaagagttcttgttcaatatgtacctcacccgcgagcgccgcctagagatcagtaagagcgttaacctcaccgacaggcaggtcaagatttggtttcaaaaccgccgaatgaaactcaagaagatgagccgagagaaccggatccgagaactgaccgccaacctcacgttttcttaggtctgaggccggtctgaggccggtcagaggccaggattggagagggggcaccgcgttccagggcccagtgct

SEQ ID NO: 228892 - DNA, 1839 bp, Homo sapiens
  chr2:176986465-176988304
  hyper
ctttaagtgcgaaccgcgcgaagcggccctgcccggggagactcgctgaggcagggctgaggcggcgggcgggagcaagctgctctagcatttgggttctgccctgtggcgtgttctcttccagggcctttccagcatcatcggagaagacgaagcaccctggccgccactgtccgtgctgcgccaactcgcccggccgcccgcccttccgagggcaggcagaagcccctctgtgtcctccaccgccgcgccccggctcgcccctcgggccgcggcgtgtgcccagcctcacgtcggggtgtgtgtggccgcgcgggcgtgtgtgagtgtggcagggggagggggccctccgatctgctccatccgtccgttttattagggacacattaatctataatcaaatacacctcataaaatttttattgaaaggcataatatcattacagaggtcttccacctgttttaaacaacacgacaagctgtgagcaagcgtgtgtgtggggatgtgtggggaggggtgggtgtgagtagggagagaggcgaggggagaacagctcccctcgggcgctaggggccgccccgagggcccgcctgcctcgggcgacaccggcctggcgcccccgcggccgctccgtgtgccctggactcgccgcccgcggctcggaagctggagagtcagcgacggggcccgactgcgggaccgagggctgcaagaagaagcgaacaaatagtccccagcgcctcctctggatgcggtcgcgtctgtggtcctggcagccgctgggcgggccaggccaggtcgggccgggccgagccgggcacatggacctgggcctgcgggctctaattgcggcgcttatgttgatgattttttttttaatcacagcagcccccagtttagcggactgatttactcccggtattggtaaatatgatcacgtgggccgcgcgaccaatggtggaggctgcagcctgcgaactagtcggtggctcgggcgccggcggggagctgctcggcggcggacagtgtaatgttgggtgggagtgcgggacgcctcaaaatgtcttccagtggcaccctcagcaactactacgtggactcgcttataggccatgagggcgacgaggtgttcgcggcgcgcttcgggccgccggggccaggcgcgcagggccggcctgcaggtgtggctgatggcccggccgccaccgccgccgagttcgcctcgtgtagttttgcccccagatcggccgtgttctctgcctcgtggtccgcggtgccctcccagcccccggcagcggcggcgatgagcggcctctaccacccgtacgttcccccgccgcccctggccgcctctgcctccgagcccggccgctacgtgcgctcctggatggagccgctgcccggcttcccgggcggtgcgggcggtggcggtggtggtggaggcggcggtccgggccgcggtcccagccctggccccagcggcccagccaacgggcgccactacgggattaagcctgaaacccgagcggccccggcccccgccacggccgcctccaccacctcctcctcctccacttccttatcctcctcctccaaacggactgagtgctccgtggcccgggagtcccaggggagcagcggccccgagttctcgtgcaactcgttcctgcaggagaaggcggcagcggcgacggggggaaccgggcctggggcagggatcggggccgcgactgggacgggcggctcgtcggagccctcagcttgcagcgaccacccgatcccaggctgttcgctgaaggaggaggagaagcagcattcgcagccgcagcagcagcaac

SEQ ID NO: 228893 - DNA, 2547 bp, Homo sapiens
  chr2:176993196-176995743
  hyper
acccaaagagcccacgagaaaggccgagcaggagaggggaaaacacacacacacaacagagaaccattgcatttattggacattgaaacgggagcagagagggaaaggaagtgtgtggggaggcggttggtagggtaaagccagacagctttggagagagctgctaaaatcgggaatattttgtcgattcacactcgactgggccacatgactcgggcaacttttcttcatctctgctcacaaactaggctgagccttctctttctctgctttgggaaaaattcgtaactttgaggcctgcgcgctctctcggcagtaatttcacaggcttggcggaggaagtaggatcgttagcataagatgggccgcctgcagctgcctggaaccggcgcgatctgaacgccggctgggaggctcctggggggaacttgcggtcgtctgccctccgcactcctccgggaaccgcagccggccctggttcgctgcgcgccggggctgagacccgggagccgcgtcctgcccgaggaaatgtcaccctccccagcgcgagccctttttcccgcctcagaacgtttctgtccgctcttctatttactctctcagcaagcctaatgccccctcctgcattcttcagcctccccctgcgcccagggctgacgtctatcaagggtgaaatgatggaaactatattcatgggcatgatttccattaaatatcaattaacctgagagcctcggccaggcttgcggtgcgtcaagggtaaatgtacatctcatttccacagggcccgctcggctggaaaagaaaggctttgatttgctttgataacgccaggatctggggccacactcgcggcttttaattaaaccacttcgatatgccccaactcaaatgcacggtccggtccgtcaacacctcttgtccacgttccctgggctgcacccgcgtgtccagagctgcaaaagccacgggcaacctctgcttttgcagccaggggctcggggaggcagtcatttgctccgcagcctcctgggagtggcctccttggctcccccaagtctaaggctccgccgcggcccctccctgccggctgcgatccgcattcccgcggccccggggcacacggagcccttggcagtgcgtctttatgggccccctttaaggccggcggaggcatctcgggccgggcgcggcgctccgtccgtcggccgtagcgactgaactgcgcgcggatccctccgcggggctcctcgtccccgtcacgctgactttccgtgcagtgctgtggtgcgaaaatgcctcgccggtgcgcaccgggtcggcagcctcggcggcgggggcgagattggcgggaggggggcgcggggggggcgcggtaagaggtggcggcgggcagagggtgttttttttcttttccctccagagccggggtttgtaaaccgaggccagagtgtccccgtgggccgagcgcacttttttcttgtccgggtgcgctcagtcactggtgcctgagaggaaacagtggaggcagcggggcaggtcgcctggggcgtcggcgattatattgcggccgagccggggcgcgccgggaaaggccgggagggcggcggcgcgcgggggctgggcgaggccccgcgacccgcgagggaggcggcgcgaagccgaggcggcgggcgcaagagccgggcatgagcgcccagtagctgagcgcccgcggctgcctggcctcagaagcgacgcgcgagcgcgggcgggcggcagcagcgacgtagcccggcggtcccggcggcgagagcagccgccccacaggcccccgcggcagtgcggccgagtcgaggctcgctctctggctgcttagcgccgcccgcccgcccggggccgccgccgctgacgccccaatgagttcgtacttcgtgaacccgctgtactccaagtacaaggcggcggctgcggcggcggcggcggcgggcgaggccatcaatcccacttactacgactgtcacttcgcgcccgaggtcggcggccgtcacgccgccgccgcagcagccctgcagctctatggcaacagcgccgccggcttcccgcacgcgcccccgcaggcgcacgcgcacccgcacccgtccccgccgccctccgggactgggtgcggcggtagggaaggccggggccaggagtacttccaccccggcgggggcagcccggccgctgcctaccaggccgccccccctcctcctccgcatcctccgcctccgccgccacctcccccctgcggcgggattgcctgtcacggggagcccgcgaagttttacggatacgataacttacagagacagccgatttttacgacccagcaagaggccgagctggtacaatatcctgactgtaaatcgtccagtggtaatattggcgaggacccagaccacttaaatcagagctcgtctccttctcaaatgtttccgtggatgagaccacaaggttgggatgcattttttttttaagaagggagagggggagaaatctgctttcatctcacgttctggctttaaa

SEQ ID NO: 228894 - DNA, 869 bp, Homo sapiens
  chr2:177001061-177001930
  hyper
aggagaaggaagagaggaggcgggggagagagaaagcagaagaggaaaaaacatggcgcttgcgagctgtatgtgcaaaatccgcaaggaattgcagtaaattcctttttgtttgaagaaaatttacaacttggtaatagacctttttatgacctatttgcggtcgtcattggctgcggctggtcatgtgcaggcgccgctcgccttcacggcctttttcctgatttccccggcgaatttccccccgcattctgctttcccagagcctcaccccctctttttctaacctttgtctctgcagaggtgggctccagtcaccggctgcgggattgcggagtccgccgcggcctcggctcccgcccggcgcccggcctggccccaccgccgctcactcggtccgcatcgccgccacctccggagctggtggggagcccggcgagggagggcctggaaggggccctgggcgccgagtcccccgccggcgccgacaccgcctgccaggagcagccggcctgctcgaggtgactgcagccgcgcggttctggcgcggcttcttcaccaacatgagcgggtctctgcgtccgagagtgagcgcagccgggcagcgcctagtggattacagcagacgcccggaccgaccgccgcctgtagctcggcagccttcgggtaagaatcgccccctccccgctccccagcatgccaccaagaagcctggggcgccgacccccttgggcagctcagtccggctgctcccctacatttcccggggaagtggggggtcgctgtctaagccccttcccccaatcacttcgttcctagggcgtcccctggggcctggggtggagtccggctgggttcagaagtctaag

SEQ ID NO: 228895 - DNA, 178 bp, Homo sapiens
  chr2:177003832-177004010
  hyper
aatgtggccaagcacgagagctgaaaacaaagcgtattttcccgtcagatgtttctacaaataaatttcgccagagttctgttttctgaatcagagaggcaagggaaatcgaacaaagacagtatttcaccctgggctggcaggcagctgttagaggtatttacggccttgccgcagt

SEQ ID NO: 228896 - DNA, 105 bp, Homo sapiens
  chr2:177004525-177004630
  hyper
gcccgccacacacccgcgccagaggtccagcgcatgtgcagtgaaatggcctagcccgggaattcgatcggcaaagcacgggtgtgggggcgggggggtgggggg

SEQ ID NO: 228897 - DNA, 683 bp, Homo sapiens
  chr2:177005051-177005734
  hyper
ggggggcagcagctcggcgaagagcagtcaaataaataaataaataaacaaataaatgaacggacatataagggcttttcccgcctgggttcgcttaaataatgggggacaagcgcctctgggccacgagcttgttgtttgtcctgggatggggggtaggggatgagaggtggcctcaggtccctcttgctccttccagccgccccaggggacactgtagaaccagcctctggtgcggggagacctccgcctgccggaggaagtcccagcctcaggtttccggggctggtggtctccctgctctgctgtctggcgcctcgtccaggaggaggcgctgtaggacaagcgtctcgccggctgcggcgggccggggagggcgggagcggagggatcggtacccgctcctcccttcccgcgcactctacctccgcgcgccaagtgtgtggggcctcgaacaagggtcgacggtgctgcgccccgtcccccaaggggttcctttccccagactggcagtggaagcagctccgaggcctgggagcctagggccgttccgggttggcgggccacctcgctttctccgcgctcccggagggggcgcgatttcctcgtgctgcgcttgtaggagcagcaacttgaatcctgtgtggggcaagctgggcccaatccgcggatcccaaccagcc

SEQ ID NO: 228898 - DNA, 251 bp, Homo sapiens
  chr2:177017212-177017463
  hyper
agcttgggagcgcgcggggagggccgcgggcctcggggcgcgccaggaagtgagcggcggaggcgaggggcctaactagtggccgggcgctgacctgcctgtcctgtctgttttgtctcgcagtgaaccccaactacaccggtggggaacccaagcggtcccgaacggcctacacccggcagcaagtcctagaactggaaaaagaatttcattttaacaggtatctgacaaggcgccgtcggattgaaatc

SEQ ID NO: 228899 - DNA, 71 bp, Homo sapiens
  chr2:177042472-177042543
  hyper
cttgttgggccaggaatgtccgtggttggtgaggaggctgggagaaggcctttttgatggctccattgttc

SEQ ID NO: 228900 - DNA, 413 bp, Homo sapiens
  chr2:177042723-177043136
  hyper
gccccacccgtccttagacctgaggacacgctcgggagcgggctgacgtggaccccgtttcagggcgccccgggcccctgcggggaacaatagccgccgcctcctgggcggtctggcgggcgcgcggcacaaacgtccgcgccgccacgtgatgcgcgcgctcgttccgcgctctccgcgcctcagcgagcggccaggctgcgggcggggtgggctggcgctcctgatccacctggaacacttttgcaaagacagacggtgagttaatcaccctaccggctggcggccgcgtcccctctcgcccgcgaggaggactggagaaggggctggggtggaggttttctctgtgtgtgtctagggttgggggcaggagaggttagttctattaagagttcatcaatcacccggtgtgc

SEQ ID NO: 228901 - DNA, 247 bp, Homo sapiens
  chr2:177043316-177043563
  hyper
cctgggcgcagggcccgccgtcaccacctcacgtcggaagccagcactgctgcccgccagccctgccgcctgccctcggacttcccagggcgcccagggtcctcccaacgcgcctgcacccacacccgcccctgagccacagtgaccttgcattccccgccccctgccacacctcctgcgtgcccgagtgtcacccttaaataccgctctacacccagagagggacgaatacacctctgaagacagg

SEQ ID NO: 228902 - DNA, 222 bp, Homo sapiens
  chr2:177052673-177052895
  hyper
ctggccctcatcacgccgccacaaattgcgagggatagaagaaagctgcaaagtcacgttaaaaggaagcctagtcaaaaagtgaaaattttgtcccgccctaggcacacagcactcacagcataagatgtagttccatgagtcctaggaaagggggaagaaaggaaaaaaccaaacatctgctctaggtttagaagagggataacatcagcgccaagcaaa

SEQ ID NO: 228903 - DNA, 575 bp, Homo sapiens
  chr2:177053795-177054370
  hyper
ggcctacgaacctggtgccgcacctgccgcggcagctgggggcgcggactacggcttcctggggtccgggccggcgtacgacttcccgggcgtgctggggcgggcggccgacgacggcgggtctcacgtccactacgccacctcggccgtcttctcgggcggcggctctttcctcctcagcggccaggtggattacgcggccttcggcgaacccggcccttttccggcttgtctcaaagcgtcagccgacggccaccctggtgctttccagaccgcatccccggccccaggcacctaccccaagtccgtctctcccgcctccggcctccctgccgccttcagcacgttcgagtggatgaaagtgaagaggaatgcctctaagaaaggtaagtccgcgggccttggatggggccacctggggttggggacggagcctcccccgcggaaatgcgctgggagcgtggtgtcgctgcctttccagacagcggtttgggttttgtggaggagacgcgttcccgggcgaattccatggagtctgcctcgagtacagattcggaaaatgtgccaggcattga

SEQ ID NO: 228904 - DNA, 368 bp, Homo sapiens
  chr2:177133916-177134284
  hyper
ggtatccagtgggcgtttacaaatgttactcggttacaaaattctggcttacagaaaggacgctaaaaatctcccagattcccctgccagtcccctgggtgggagacgagtcgggtacttcgcttccacctgcgggcccccagcgcagagcctggaattggctggacggagctagccgcgccggcgccccgtaggacggcgcgggggcggggccggcggaagcgctcgagtgccgttgtcggctgcgccggaagtccctagccaggcctggcggtaaccttgggggcctcactgcagccgccgctgctgttggagtgggctttgcgagtctgaacgttggcggggctaggctcgttaactgccgagag

SEQ ID NO: 228905 - DNA, 250 bp, Homo sapiens
  chr2:178076955-178077205
  hyper
ctcaggcaggcggcgcagtcacagacactggtccccggcatttggaaacaggaaagatggtccgaggggccgaggagtttttcttgcaacctttaaattacaagcaagaaaaacgtgggttttatttcgggcacaggaatagaatgaattctgaaatggagaactagaggcctgcgtggggaatgagggacaagcgcgagaagaaagggaaaggcctttctctctggtgacgcgcgatcacaaggcgttc

SEQ ID NO: 228906 - DNA, 39 bp, Homo sapiens
  chr2:178128653-178128692
  hyper
agatggatgacttcgcaaagccgcgcccacagacggccc

SEQ ID NO: 228907 - DNA, 388 bp, Homo sapiens
  chr2:178417525-178417913
  hyper
gcaacagagcaaccggaagcggaagactgccggtttccttgtcgcaagaaatctgttaggaacaaaaagggaccactctcgtcagtctctcaatttcagcttgatcttcaaatactctggactgcggagtggcggcattcaggaggggaaagactactccgggccgttcagagactgaatctactcgtcccggcatgcaccgttccagtggttccgcggcgcgggtcgtagccgcgctgcatgctgggagacgtagtcccggctgtacctaccgaaccggcggcccgtgggggtgcagggtaactctccttccctgcctcttaaagatgaggggcgctcactgtgtctgttatggcaccgtggtctctggcgcggcggaggaaggttt

SEQ ID NO: 228908 - DNA, 354 bp, Homo sapiens
  chr2:178483338-178483692
  hyper
ccgcctcggcgtagcgggcatcgcggatgagccggtacactagcgcggtaaactccccgtcggggatctgcgcgccgctcagaccagccataaccaccacggctgttatgcgtgcggttaccacggcaacagggcaaccgggcaaccggaaacggaagacgacgggttactttgccacggaaggaatctgttaggaataaaaagggaccgttctcgttagtctctcaagttcggtttgatcttcaaatattctggactgcagcgtggcggcagtcagaaggggaaagacgactactccgggccgttcagagactgaatcttcccggtcccggcatgcatcgttcctgtggcgcc

SEQ ID NO: 228909 - DNA, 502 bp, Homo sapiens
  chr2:178937351-178937853
  hyper
cgccgaccccaccccgtggtcctgctactcctgctccgcacaggtgcccagcactgagctgccgccgctgccccggctcctgttccggaaacccgagctatcgctgctcctgttctggctgccgccgctgctgctggaactgctgctgtaaccggatgagtggaccgctgtgacagggaggtagggcaggacacgcccctgagtgaggcacggagcctggagggaggagagaagaggagggagccgcggacgccagaccagccaaagtccacggcccaggctgccaggcggttcctggaagagtctctggacggccggaatcggcgcctgggtacaggactcctgattggaacacgattagaagagggaaacgcaccttgttccttccccgcttcttgctcccttacctccccaaccctccctactcaccgcgccccttaatccgttagcgtttcgaggaggcccagcgggagcccagtgggagtccgagatacaagtgttg

SEQ ID NO: 228910 - DNA, 41 bp, Homo sapiens
  chr2:179059426-179059467
  hyper
tgcttggggcgggcgccaaggtgcccgcatcgcggcccggg

SEQ ID NO: 228911 - DNA, 563 bp, Homo sapiens
  chr2:179278307-179278870
  hyper
atttattttagttcctaagccgcgcggtgctcccagcttccgcgcctctgggcggcccacacccctccccatcctctcctccgcgccgccgtcttcgttgctcttgggtggccgcggcgcccgctccctctgaattcgccgggcagggatacagccgcccggggcctcttgctcgtgcttggttttccggaccttgcttcctaaagggtctttaggggttcccggactcctccgcctgggagcctctatccgcctgggagcctctatgcgccccgcaaagcccccggcagagccgaggggaggcttcattggcgacctggtggggcctcgcggccctgctccctgacgtcagcgccgccgcggtgatttaacagcttttgttttgggcagaagaacctatgggcacaaaaagcaggaacgagtagcggtggctgaagaacgagcaggagcttgaatttcagttttcttatgaggaattttccagaaaagatatcttcactgtgaaataactaaataaatgcccactcagtacagtaagtattgatatcgtcctatagcatttg

SEQ ID NO: 228912 - DNA, 509 bp, Homo sapiens
  chr2:179343485-179343994
  hyper
ctcgctaaacccgcgtattttacagcaggtttcctcagggttcggtgacaacattcgcattttctaaaatgaaactggcataagacgaaataaacagcctgggatgtcgtagagtcagggaatatggttgtcatttctggaagcaaaaggcttctaagacccctagggaacgagcagatagatactggggggagggagaggcatgctggaaaaggagcgtaaaaaataggctggcggtggctttctgggtgcttcggaggtgtccttgaagcgcattctcaggtcggaatcttgcattcagaggttccaggctgagtcgcacaacctgaaggccagcccgatgcaacgaaactgcggtaccgcaactcctctgcctggctgcaggcgtttccgagagccgacctccacaattcagcatcctccgctggcttgcatttcttttccccgccactcggggccgcccttgattcgagggcctctggtagtgcggggaatgttcttttgacttt

SEQ ID NO: 228913 - DNA, 1571 bp, Homo sapiens
  chr2:180725140-180726711
  hyper
gcacataacagtggcgaaacagatggtcctccccctccccttctcctcgtcccttccgcagtcccacagtgtcctcccacccttccctgacaccttcaccagcgcttagtggccgaggccgcccgtcagggctcccaacaagtgcaaacttcggggaccttctctctgctcctctgcccccatctcatctgggttctgctgcagaactctcccacgaccccaagcttcgaccgctaccctcctcacacacctcggtcccctaactacccatttcccggtcattgagagaaagacaaaccccaaacttccagcccaggtgacgaggcgctgcggctaaacatagcggggcactctcctcgtcctttcccctctccatccgtccttgggaattggagcctaccctggggaacagaggagtatgctcctgtggcttccacgacctaatcctaactccagggactcgcaggagttaggattaggtcgtggaagccacaggcgcctgggcgccctcctctacaagtgggaccttgagacaaagtgcaaactctaccgggaggggggctcctggccattccctcgggcggcgcgcccaggtgcaggctcgctctgcggaggagggcgggggccgggcaagcagagggcgcccagtccgggggcgccggtctgggctgggcgcccagagcttacctcggcgcgcgggccgcgggcgcgtggggcagtggctcctccagccgggaagctgttgctcacgctccggtggttgctgcggtcccgccagggctgcaccggggcttcgcgcagacgttctcccgcgatctgctgcagcccaggcggtggcggtggcggtagcagcggcggcggtggaggtggcgcgggcgacagctcggcccggcgcggcccctgaactgtccaactcttgcccgcgccgggcttaagcgcccggccgctgcccccgcgctgagcgcctgcgcaccgggcctcgcccaggtgaggggcgtgtgcccggagcccgctgggcgcgcccggcccggcccggccccgccgcacgcccgcccccctggcctggccgaggaccccggggtttggacgtgccaacgccactctcgcgcgccgaagctgtgacggtttactaagcagagacttgcgaggcacacagagagggaatgaggcggaaccgttcgggggctcgttgacactgcagagcctcccgcagcatcgctgccttaaatcccgcctttccaggcgtgcgcgcacagcgagccagaggaggctccgtcccgacctggggtcccccgcggtcctcagcccgggggctcgggtccccgaagagatccttggcaatggcagaggtcccaaagcctagatgccaagccccgcgatggggcggatgcttccaatattagtcaacccagagtgaaactctcttcttggagatcgtcagaccaactatttgtttttcctctttgaccacccctgggctagcagagcacagctagcagcttcggcatatttggcggagccgggaaggcccggagcgcaagaaggcatcgcagcctcgcagcagatctgaa

SEQ ID NO: 228914 - DNA, 58 bp, Homo sapiens
  chr2:180871766-180871824
  hyper
tgcggggactccacggagttcgataattacctagagctccaccgcgccgccattacac

SEQ ID NO: 228915 - DNA, 113 bp, Homo sapiens
  chr2:181844777-181844890
  hyper
cttcctccagcttacgcgaggggcaagtggcagctcttctccgcctgcgtgcctggcctcgtcaacaacacccattagtctcccgtctcccggggcggcgggggactcccaac

SEQ ID NO: 228916 - DNA, 173 bp, Homo sapiens
  chr2:182321357-182321530
  hyper
gcaactgagtgggtgcgtgaaaaggggggatcatcaattaccagctggagcaatccgaatcggttaaagtgaatcaagtcacagtgcttccttaacccaacctctctgttggggtcagccacagcctaaaccgcctgccgttcagcctgagaggctgctgctagcctgctcac

SEQ ID NO: 228917 - DNA, 113 bp, Homo sapiens
  chr2:182323030-182323143
  hyper
acagctccagctgggtgagttgggtatgggaccaggagttagtgacctcccgaccccccatgtggaccccaccatagggcaagtcctggaaagattcacgttgcctgttactt

SEQ ID NO: 228918 - DNA, 636 bp, Homo sapiens
  chr2:182521311-182521947
  hyper
cccagttgggaaggaggaggcggcgacttggggactcggtaacctgtccgggcagtgaggcgagcacggggaggggaggcgagaaaaggggagggtggagcaaaagctcgtgggtgtaggccttgggccggggagagggaggaagcgcggagggaggcgaagacgcttggggccgggcactcacccgccgggcgctcgggctgaatgggccgccaccgcagtgctcgctcgctcagcaccacgtcacaactgtccctcccgatctcgaagatgccccggagcagaatccgctcggccgccgcctccgtctgctgcggggacgttaacagcgccggaggcacagcggcagcctccgggggcgcctcttcctcccggccgccctccagggcactcacccggttcctgcgcctcctccagggcatggcggagtcgcaggctgggcccgagccaggggtccggggaggcctttggagaaggaggtggagggcgcggcagccccagctctagccgcgtccagcgctgccacagcaacggcgcgcagggcagggacccaggagggaggcggggccgcgcctgacccagtccagcaccctggcctgccagcctcgccgcttcgccactcaccacaaaaagacc

SEQ ID NO: 228919 - DNA, 394 bp, Homo sapiens
  chr2:182542630-182543024
  hyper
tgagaagattgatccgtggctttgggcccctgccagtgtcgctgcaggatagtgcatggtaaaggcataatttttctcaaactcggcggacggttcgtgtttgaaagagaagttgccattgatgctgagcggcgggctgaggggtccatcaaaggaagggctggtgcaatcagtcagagggctttcaaagaagggctccagcgctgcgctgtaggcgtgcggcggaggcttaacgtggaagacatgggagctgtccatggtaccgtaaggcggactgggcagcccaggcgactggtaggagtaggggtgtacagggaaggaagcgctggccgtcggcaggtgggggggcatgtcctggttctgctcaggcagaaaagtccgaggattgagttgc

SEQ ID NO: 228920 - DNA, 172 bp, Homo sapiens
  chr2:182544331-182544503
  hyper
ggcgcggcgcagagcgctctcccacgcgccggggatcaggtgcggaaggctcctctctaataaacagcccattgaaagggccgcccgctctttattggggcttttcaaagttcgcctcaaacctccctttaaaagattgagtaattataatggtcagcgattggcaaccgcg

SEQ ID NO: 228921 - DNA, 1419 bp, Homo sapiens
  chr2:182545195-182546614
  hyper
accctggggcctccggacgccgcgcctcctgcgtgggcgaattcctcgtgtcgtggccgcgcgggcgctcaggttatatagcccagttagtgatgctaagcgcgggcggggccgctagctgaggggctagcaggtctatgcgcctgacgcctgcgcacgcgtccaggctgtgcgctccccgttctcccctcctccccacttctccccacgccttgctcgtctcccgccctcctccgacaaccgctcccctcaccctccacccctacccccgcccctcctccttcctccccggcatgcgccatatggtcttcccggtccagccaagagcctggaaccacgtgacctgcccatttgtatgccgcggagcgctccattccggcccctttgtggccagaagaaagtggcccatctgtcgccagttagagactccgcggacctgtttttacccgcaggagagattaaccctttcaggcggcagaagggacggggatagaggggggaggggatttgagggaaggaagggaaaagctaatgttaactaggtctagatcagagcgagtggcctgctttcgcgccggaagtaggacagaggtgaaagaggcagaagcggggagactgaggcacgcagtgaagagtcctcgctcctttcgatttcttgtcctgacactggcatccagagcagcatgactccttgccctctctgaaaggcccatcccttggcttcttctccttggcagacgctttgatcattggcgccaaaggatggcttctcctaatctccgtcggcccctctaagcaaacatatacgccatataaaagcggcttcatctgtaaacgcagcgttgagattagttccccaacctccctaaccggatcgtcctctcccagttccttcagtacagaaaagttgtacctgccattctatccctaccatacgtgcaattcttcatgtcctgaccttcagctacgactgttcctccagaccctctcactacgtcagtccccacctccatccccaggatcttgtcctcaaagcgagctagttctcgcgaggaggccttggttccattggcctttgcgctctcttatgtgggagctggggacttctttgacggttgtattctgccttttaaccatggccactgggttgctggaaagggcaccctcactcagccagtccagggacgcttctggttccctggccagcccgccctggacggcctcggctctctagtccaggcattgaccacaagtacggtggtggacacctcgccacagccggacctgcgctcttgctcccctcagtctcgggtctgtataagatacttgattcagacaagcgttttcaaagagaagatgcaatgggcctgtgctgaacgggtctttccgatctctttctagaaacgcctttagcacaac

SEQ ID NO: 228922 - DNA, 260 bp, Homo sapiens
  chr2:182547284-182547544
  hyper
ttcagtgttgggctaaaactcgagggcgtcggagtactagcccttagaagatagtacacagcccgacgtttgcggcagggccaggttaagtactgcccctcacccggcagctgccccgactggcagcacactatgccgcaggcatatgcaactcgtgcctaggctctcatttttccaactttggggagttccggaggagaactggggacggagtgggagaaaggactccagctagcttcgaggtcaggggtagcctagag

SEQ ID NO: 228923 - DNA, 1676 bp, Homo sapiens
  chr2:182547747-182549423
  hyper
ctctaatcccactgcgcgttgttcgctcaggcctggagatttgtacaaaggaaaggccactccaggatgtttcagagacagggctgaggttgggtctcacggtagctgtccttgggcttcccatcccgcagcgctccgatgtgaccctcctctgcgcggaaaatttcgacccggggcgccggcatcgcgacgctcagccagtgcccgcgaggctcccaggagatgcggggtagtaaggccctaaaaagaggagcctggacacggcctggattgaggtgcgttttgtttggggttgaaggcgcgagaaattggggcgagagaagagagtcagccggatcccggagaggacagagctgaaggcgcggcggggcttagcactgaggaccttctccgcggccccgctcctcctccttattttcttctctttggacttgtttggacggttgcacacttttccccctcctgattccctaagttttttgtctctcccctcgctgcccgttagctgtactcccccagctcccgtccctactgggcgctgcaggctacccagcggcacgcgaaccgcacgcgcggacaacaaaagcctctttcatgactcactgccctcgagcaatgccccaaatctgccgcctcccgggtccccgctctgagcgcgcggcgcgggccgggcgtcccggccgttacagcggcagccggagcgcccgcgggaaggggggcgggaggaggcgtgtggccaggggtggggagaggggagtgtggcctgggccgggcggaggggaagggggaggcatgtgggaggatgggggtggggaagggatggaggcgtgtggcccggacgtagggggtgggaagcgtgtggctggaggcgaaagcggggagcgggaggtcgggggcgaagcattcacagggccaagataaagcgcaggggccgggccggcgtccctggcggtgacctgtttctcagggaaacagatgctcgctcttgcaaagggaggtttgcgttcaatgaaaggatcaagtgtggccagggcagcccggccgacctcgagaggttcccgcgtcctctccccgccctgcctaggagtggggtgtcggggcctgggcgcgggagagcggagtgagggggccgggtggctgaggggcccgcgagaccgtggggctcaggggccgcaggaacggagggctgagagctgcaggtcctgcacaggctgggtagctcggaggctcttgagagcttcgggggatgaaggggggttgatgcgggttctgaccagaccgccgacgcggcgcctccgccccgggggaggcagttgggctcccgggtcctggcctgaggctggagctgcccaggctcgacaggcaggcgacccgggagagccaagagcaacgagagacgctattaaaatgcctcgccgtcgccccgagcgcaaaacccatcctccccaaatctcctgggcttgcggcataatcttaattaagataattgattcatattgcacctgcgagaacggaaaaaattgatttcaacccccaaccccacaaatcgcttagagctattggatggagcacgacgcgactgtgatttagggagtgatttagtgccgggcttccccagctcggcctgcctgggcctttttatttattatttatgccctcccggtcccgacggggct

SEQ ID NO: 228924 - DNA, 227 bp, Homo sapiens
  chr2:182549862-182550089
  hyper
gcgtgagcagagggcgcacacctgtttcccggggatcgaggaacagcttgctgtccaaaggggatcgcagggccagggaactgacaagcacacgctatttgccaacctttgccttaatagaaagaagcaagcaaacaaaaatcctcggtagctgtgtgtagcttcaggagtggagagccgagacacaccgacggcgccggagcgtcgcaagaacaatggttgctgca

SEQ ID NO: 228925 - DNA, 292 bp, Homo sapiens
  chr2:182607563-182607855
  hyper
ttcctagatcaaaacggttaattctagatagttaaaagttgaccttttagagttctgagattcattgaggtccataatcagcatccatctgaggttcttgctgtggtctcttttctgcatgtaattattttccttcgtatgtttgcccttttgattatacgtggaattttgaggttggtcgcttggtggcactgtagttaatagcttgattttcttgtgtatttttccactgccttcatagcttttgtttttaaattgcaattatgtgaaatatgtgcgacttttaaattct

SEQ ID NO: 228926 - DNA, 204 bp, Homo sapiens
  chr2:182756163-182756367
  hyper
gtctatattcaggcgactctttcaagtgtatgtttcagggtgcccaagcagacacttgttttctcgcgggggatgttttgtgagacttggcctccccacttacgttctatttttaggtgagggaggaggaggaggagaggaggaaagattattaacaaactaatcttgcccattccgcgggcagtagtcgggggctggcctgct

SEQ ID NO: 228927 - DNA, 168 bp, Homo sapiens; identical to SEQ ID NO: 198597
  chr2:182757468-182757636
  hyper

SEQ ID NO: 228928 - DNA, 404 bp, Homo sapiens
  chr2:182818945-182819349
  hyper
gggacccctccccccgcgccccactacccgctaaccgcctcccgccacacacacacacacacacacacacacacacaccccgcgcgcgcgcacacacacacaccccaccccaccaccccgacctccacatacattcccccgaccccctccagcagtgaagtctaagagcaccgcgaagtaatttaaattttcgagggaaagcacagcgccatctgtcggacatcatgccaattactcttgttaagttcctacctgacggttactttatactttgaactgctaggtactccttttggcctaaggacacagtgaaaaatgtaccgagaccttggagagccacgaaccaagaaacttcagaaacctctgatatctgatcaagagttaagagacgtcagaatcatcac

SEQ ID NO: 228929 - DNA, 138 bp, Homo sapiens
  chr2:183580827-183580965
  hyper
ccggagccggagccggatcccgcgcacaccgccacgtcaacctaaacctacaccgccctctccaccccaccgccgcagcgcccgctgggcccgcagcgggtctccccaggcagcgtcctccacgcctttcccacaatg

SEQ ID NO: 228930 - DNA, 1006 bp, Homo sapiens
  chr2:183731181-183732187
  hyper
tgcagcccgagccccgggcacccggagcaggcagagagcagccagggcaagcagcccggcccgcagcagcagcatccctcccgggctgccgcagaccatgatcccggcaggatggggcagggtgcagccgcgcagtggacgccaaaaggcccgctccgccgtctccgcctcccccgctgcaagtggacacaaggatctgggagcttctcctcccccggcaatcaccgcttccttggatcaaattcccccaatggggtcccacgagctttaccgagctccagccaccgcccctgccgcccaggctgctctttcccaacgtctaagccttcggaagcagcaacatctatttattcctctccctctggcagaagcatcagacttcgcagatcagtcagataagagggacacgagaggaggcgaggaagacataaaaacaaaagtagaattcagctgagagctagttggagctctggggtgtctcctcccctagatcacgcacacaaaaagatgctaaagaaagcattaaattccccaaagtgaggaggacagaggggttggggggaaggagggaggaaaagctcctaatgggagagaagggtgcagtaagagtttacaagtcctgtgtgggctaagagctgcggccgccgctgcggctgcgaccctggctggcaggagggacgctcaggaggagccccgcagggacgtctgtgcctctgcccgggcggctctgcactttcctacctcccgcctgagagggagctccgcccctggggcagtctctgccctccagtgccggctgctcttcccgagaatggagtgggcgcccggggaagagaaggcctgggagtcgcaggcggtggggtgcgaagccgtgcgagtgcgagaccccaagacagcgccgagtcgagcgcgccctcacactagggaacccgtctttggccccagaaacgagcccctagcccctcactgaagagcccaccccaattccctacggaaaagtccccct

SEQ ID NO: 228931 - DNA, 61 bp, Homo sapiens
  chr2:183902297-183902358
  hyper
cactgctgccatctccgtaagaatatggaacactcaagttttcctacccacctagaatttc

SEQ ID NO: 228932 - DNA, 163 bp, Homo sapiens; identical to SEQ ID NO: 198602
  chr2:183988919-183989082
  hyper

SEQ ID NO: 228933 - DNA, 530 bp, Homo sapiens
  chr2:185462255-185462785
  hyper
gggagggcacagccgggctgatggctgccttggacccttgaaaaccaaccagaaagtctgtctccagggaatgctgcagacccggttccctactttccgtgacaaacccattagttcgtgtgcagatttttccattcaggtcgcttctagggcgaacgcttttgttcgctaccactctgtagtgcgagaggaactagagaggcatgtaaagcaagcttgaggcagcagcgcctttgccgcaaagcatccctttcccctcagctttagcaatttaggaagaactgaggttctcaggggaggtggggtgagaggattgccaggaggagggacatataaatcaggagtccctgcttttaccctctactcacttgtactcgcatcgccacaactaccctcccccgaaactatcatcaacacaagcacttacggtatctacaaatgtgtgggagcaggggtgggtggggggcatattttctttcctcgcctttccctaagactgaacagggtaccagcctccataccaaacacac

SEQ ID NO: 228934 - DNA, 79 bp, Homo sapiens
  chr2:185463745-185463824
  hyper
catcaagggagttttccggggccctctcagcaagaacgggaacaaaactctggtaatcgcttctgttttcctctctctc

SEQ ID NO: 228935 - DNA, 391 bp, Homo sapiens
  chr2:187350702-187351093
  hyper
gccccatcgtaagcgaaagtggactgagaggaagcacaaacgcatggactcaaccagctcgcccagattcaccctcaggccttttgccatctgaaaagggcctatcggatgcgcgacatcacgagtgacgcgtagtcattttcccacgtcccgtccctgccccctcctagtgggacgcagtgggcgcgcacgcgcagctccgcttccgggagccgctcctcgctacccactatgctctgcgacatcgacctgtcgcaaaggccgcgtttgcggggccaatgagcgactcgctttccgtgcggtgcggcgagtgaggccccggtcttcctcctcgtcctgccgcagggccagaacccctgacggtattcagctgcgcgtaagtctggccggt

SEQ ID NO: 228936 - DNA, 210 bp, Homo sapiens
  chr2:188418956-188419166
  hyper
tgtttttttcaaaacggagttgaggttattttgtttttccttccaggtattgaagacaggatttatcttctctacttcttcttttagaagcagatcaagaaactggcgattgaagagtaactgaaagaaacgcaatctgatcttactagcagtgaaagagcgaggtaagaatttgactattatccagcctaaagtcgctgctgtctgtta

SEQ ID NO: 228937 - DNA, 1328 bp, Homo sapiens
  chr2:189156402-189157730
  hyper
cctccacccacctccggttccgcgtgcacgcgcgagatagtccagtgggcccacagataacgaccatcagagattaaagaaggaaagtcagcgagcttgaacacaggcgtcccgtgtggaaatgtccaaggagaccgccagaagtgcgcaagccggagtcggctagagtttccttctcaccgagagggggagcccggcgttcccggccgggagcgacccggagtccccagccccgcgtcccagctgccgccagcgccagttttggattcggcggattaggaagaggagggaggggggagagagcgcgaagagggaggggaccgaagctggagggtcccgagtccagcgccgtgttggcgtagagaaactttccctctcggcctcggagacggcgccccggccgtgccggagtggagatcgccaggctcggaggaaccggcagctctccacgcccctgcccgaagcctgacccgactgcctctctcagtgaggtacggagatttatctaggctcttccctggctgcgaacccaggctccctccaggtagcgtggaatcgcttagaagctgatatcccgaggggcggtgggggtggacagctccggccaccagtgcccgggaaggagggcgcggggctgcgcgtagccgctggccagcaggttgtaaaaaattaggacagctaaatgctcagggagtcgtccagcactaaaggaggctaagacctgttgacgcctgctatggcagcgcttgagaaatgactgggggagtccagcgaggtcggggacgcagcggtctccgggctccagaaacctccttagccttttgtggtaactttggtccggcggcggggggccggtgagcaggaactggagggaggcggtggggaaaccgtggatccgtccggctgagggtgcgtggatcagactgggctgagcaggcaagtcatcgtcgggtcacagcgaggcgacccaggagcgaacttccagggcagcctcccttttgttggcgctgggagagaatgtgggcatgggggtggggaggcgcgaagctccgaggccgggccgcggatactttaaagctcagagctgggagggcccaaaggaaggggcggcgtccacatggttacccttctgctgcgcgggtcaagtagcttcttctggagggcgcaaggcgcggcgggggtgatgagcccttgggttctcgctccgactgctaaattcgcttggccgggtccaccttctcgtggcctcactcgccacacggatcagaatccggagcaggcagttctctctattctgaggctcctgcggctgccgcgctgacttccct

SEQ ID NO: 228938 - DNA, 132 bp, Homo sapiens
  chr2:190305689-190305821
  hyper
aagaacagaagaacggctaatgagaggaacaaaaagctgtacaaggaagagaaagctacctttccacccaataactcaacgctgcgaccgagaaaaccagggacgcgagaggctcgcgtcatcctgcagcgc

SEQ ID NO: 228939 - DNA, 111 bp, Homo sapiens; identical to SEQ ID NO: 198608
  chr2:190306062-190306173
  hyper

SEQ ID NO: 228940 - DNA, 1336 bp, Homo sapiens
  chr2:190445060-190446396
  hyper
ttcctccagaactcgtgtagagttgcttgtctccaaagccccacctgggtttccaccatatgctttcggtcaacgacactcaccacagcatcctctctggcggttgtgatctcccgccctggtcatgacactaggcgaccccgctggctcttctgcggctgctatcgctgctgctgctctcgctgaggtgcttgttaacaggagtgcaaggaactggagatagcacctctaaaaacacaacagccttgggcaaaaagactacaacgacgactttggcaaagaacaaaagaaaaggggcccagggattttcttttttccttctttccaaacttagctaacactgtagctgaagttggaaaggcaaagccttatggaagcggtttgggaggctcagcaggtcgtccgagcctagcggacgccctgagccagctctctccgccgccgccgccgccgccgtgggccgggcccagctcttataccgagtcgggggcggagctccctgcgacctccgactggggccgccccgtccccttcagggccgcccgggcgtccccgcggcgcgagacgagctcccgtcaaccttgcgcgccgggccgtccccgcgcccttgcccggaggagtcgcccaccccgggcgcaagcgtccaaccggccgcagacaccctgcgcggcttgcggggaccttcgcctcgacgcgttccactccccgggttttcctgctctccgggaagccgcgagggcaacctcggggggcggccgtggggctgggaaaaggaggaaggcgcgtggagccggcggggcggcgtagggagattctgcgcgaaactaagcgtcaggtgctggaagaaagcgctgcgcaccggctaccccgcagttcagggaaagggcggccgccggacggtcgcagtgcaaagctccagcgcgagcttggtgggtggggattccttttttaacgaaaataatttttaatacaggtatctaaataaatataattcatgccacagaggccgctttcctggccgtcccattccggcccgcctgcagcagagaatgcctttccttccccggactgcatagcagggcttccctcaaagaaccagaatcaaagggcaggaagggggcgcaaagatcagagtccatccctcttgagaggagcaaacggaggcttgcaaaggtgaagtcccgcagcgagttacagacctacccgtatccccaaactggggcctccaaatccgtcctggagacagaatgaggatgctgcagccccagcaaacccttcaccatcattccttctccctctgtaccctctcaccccgcccccacgcgcgcgtcccttc

SEQ ID NO: 228941 - DNA, 313 bp, Homo sapiens
  chr2:190526051-190526364
  hyper
agccatgcgcaggcgcgaaactcctccccaggccagacccggcctgcgcatgcgttcaagtgagcgcgcagacgctattggtaagactcgcgggaaaagaaagggtgagcgcggctggaagcgcgcatgcgctgtggctaatgccgtaggctccttcagggctgagccatcccgcgtgtcttgcgctcggtggaaatgcccagccgagggacgcgaccagaggacagctctgtgctgatccccaccgacaattcgaccccacacaaggaggatctaagcagcaaggtgagtgtgagacgcgacgaaaaggctc

SEQ ID NO: 228942 - DNA, 322 bp, Homo sapiens
  chr2:190649067-190649389
  hyper
aggcccggcgctgcgcagcttgcggaagctttcccggacagactcgctgccagcggattggctgcgagcagcgccaatctcacgttgcccccgggcgaggcgggactcagtgccgcgctctctgcacccgctctgccgcgcgcgtgcgtgctgggtgcgggtgcgggtgcggggttgggcctgcgcatcgggtgagacgctggctgcttgcggctagtggatggtaattgcctgcctcgcgctagcaggaaggtagtgtggtgtgactaacgggtatttattatatcctcgatggctcgagggccccgtcccctctactcgt

SEQ ID NO: 228943 - DNA, 183 bp, Homo sapiens; identical to SEQ ID NO: 198614
  chr2:191208157-191208340
  hyper

SEQ ID NO: 228944 - DNA, 93 bp, Homo sapiens
  chr2:191273656-191273749
  hyper
cgacccgcgccctcgccataaacatccctgggaaaaaggaggaggtgagaacctccacacagccccagtgacaaggacgcggccacttgtgtg

SEQ ID NO: 228945 - DNA, 248 bp, Homo sapiens
  chr2:191514202-191514450
  hyper
tgggggcggtgtccgggggaagcgggctccgcgcggccgccgccggaaggagagggcggccccgggctcgtgtgggcgattcccggagacattctgtgtgccagggcggcggggagcgcggccctgactcgtgcattttccctccgagaaaggttggggtgccgagtccgttttgctaacggggctgggggcgtcacacggcgctctgggggtgtgcgatgtgggttgtgcgcgccggccccagagtt

SEQ ID NO: 228946 - DNA, 390 bp, Homo sapiens
  chr2:191514824-191515214
  hyper
aatgttgcaggatctcggggaaagggatagttgagatggaatatacatttgtcgattctgcagaccaagctttgcagcgagtgatcgggaggaatcgtagacttgcatgtacttacacctcgctccctgagattcgggaggcacggaaaattttgggatggctgttaatttaaaatttcatctgaaagagtcgatttggagtaacttgtcactaccagttggtttgccagtgacgtgtctgccaactcaaagagtgcaaagatcagaagctgaaagaggaattctcagatcttgtttaaaaatattttggcagttttaatagataatatgagattgcataggaacagaggagccgaatttaaaatagattagtcacgtaggaaatgctta

SEQ ID NO: 228947 - DNA, 556 bp, Homo sapiens
  chr2:191745041-191745597
  hyper
gtccggggctgctctcggaggagtcgccagacgccctgacctgggggccagatgcgagctgggatcggctgagttccgacagctcggccagactcagccctgccaaacctgctgacctcactgccctcggctgcgggggatctcgcccatgagtctccccaacagctcgaattcccagagtggaggagcccactgcttcataaatgcgagaacccagagcccctagtacccaactaggctagcctcggagttggcacggcgtgcagaaagtggctactgagcagccgggcctggctcacccgcttcacacgtcagtttgactcctctccccgccccccaccaatcccccgccctactctccgcgcacccagagccgagagaaatttgactgccctaatcgccaatcaaaagagaggtcgaggatttgagccaatcgcagcgggcgaaaggggcgggccgtcggcgagcgctgaaggtctctagccctcccctgcgctttagcctcagtgcggagccttaggcggagcgaagagaaccggtcgcggcaatcctagcg

SEQ ID NO: 228948 - DNA, 436 bp, Homo sapiens; identical to SEQ ID NO: 198619
  chr2:191745657-191746093
  hyper

SEQ ID NO: 228949 - DNA, 80 bp, Homo sapiens; identical to SEQ ID NO: 198620
  chr2:191746519-191746599
  hyper

SEQ ID NO: 228950 - DNA, 252 bp, Homo sapiens
  chr2:191878927-191879179
  hyper
cccggcccccttccgcccccaccaatcaccgggcggctccgcgctcagccaattagacgcggctgttccgtgggcgccaccgcctccctctgcgggccgctgctccgcccacgcgctggggtatttccgccggcttccggcgggggccgccggctgggtgagctgcagcccagtcccgtgttgccacgctgggaactggcgttctgtttacatatcttagagaacgatcagaaggacgtgctgtgtttgcag

SEQ ID NO: 228951 - DNA, 862 bp, Homo sapiens
  chr2:192015070-192015932
  hyper
catgaaaactgtgacgttgcttctgaaaactcagtgcctgtctgtcctttttgcgtgcatttcctagaagatcccactaaaggggcattttgtcccaccgtctgtgagctggtggtgccgctttggctctgtggcctgtagcttgcaaaaggagatgacctgccctaaaatgtcactcgcgcccatcaaagccacagtcaccggctgccgtagctgcaagcttttttctgaaatccaggtacgctaatctaaagtcagacatcacagctctagagaagctggctaagaaagtgaagaggggctcactttcagcctccgcgaggacacacctccgcagccgccgcagctcccctggcccccgcagggagattcgcccgggcaccgtggcgcgggcctgcggagcggtttccgcggagaacccgtgccagggcgcatctgtgggtcgtggagtcgggcgcttccttctataataagcctcctcaggaaggttaaaatgaagcaattgtcaaaacgccaagggaaagcaaagcttcagagtatcctgcataataagcatgtcctccttacaagaggcagccagaaggtgtggtctggccacttacctagcgctctctcagcacaggtcccaggcagtgctcaagtccaaagtcagaagcgcccctcacagtccctaggagaaagccgctgacgccatcatcagtaggggatttgcatttctcctcccacttgaggctttcctgtgcgtcagtgttcgagtctctgggactttacttgggtcagttcccacccactctattctagaaatgctaacacgcagaaactgccaggctggagccccttcaccgggcgtcctcttccctct

SEQ ID NO: 228952 - DNA, 402 bp, Homo sapiens
  chr2:192110626-192111028
  hyper
gccccatgcctctcgtacctgtgggcagagtcgaatctcggctgtcctcgtgttcacccacagcccctccattcctctggcccacagctgtttcctggccccctggaaagacacggtgtggcttcctccgggcaggaaagcggagggagaacaatggggcgtcctggggagtggggttcaggtgcggtgtgccccggcggcggcgggggaggaggggcccgggacgctgtgggcctccctgcgcgtgcagctgcgctcgcctcctttgttccgccgcagcggagggggttgccctgggtctcgtttcctgcccgggatgggattgattcacggtcccagagagggaaggggaagggggcggggctggaatggaaaccagattagagacgggagctacgaagg

SEQ ID NO: 228953 - DNA, 54 bp, Homo sapiens
  chr2:192542863-192542917
  hyper
tcgctgtttgggacgctgggtgtgcggtgttctgtctccgctcccgtttcgctg

SEQ ID NO: 228954 - DNA, 1161 bp, Homo sapiens
  chr2:193059731-193060892
  hyper
ggagcaggatgcaggtcccgggagggaggggtcgacgaggaggtgcaaggatgcaaggaggaggcggccgcggaagccacagatgggctcgctcgccaggcgctggcccgagtggggctaggcggggatggctcaaatgagaagctcgggcttcagggtgggctacccgcacactcatataccattcgcctcactctccgctccaggacgccccctaccgaaggcggggtccggactagcgcccctcttccgcgcgtgaccccgggccgcgagtgcgggccgcggctgggtggcgtctctccgagctggagatggtgggggcggaggtgtcagaggagcagcagcagcagggcagagaggggcgagtcggcgcgggagagggcgtcctgctggcgaccggcgctccagcgtgcgggagcgcgccgcctaggctgtagggggatgcaggctgggaatgtcgcggcggagaggccagggacgtttctctagggatttacaggaaagagggtgagaggcgatggtgttagaaccgctcttgccgacctggaagcaacagcagcatctcccacaagagcgtgcaaccccaaggctgctcgccgaggcagctcagccatcccggcaggcgctctccttccttctctcttctcccctctctcctcccaggccccccgcagctccgacccagcccaagcgttcgcaggtttgaatccctctcctcatcacccgctcctctccagcccgtagcctattagtgtgtccacctgggaggtgcggtcagatgtgtttggaaggtcagattggtcgggacaagtggtctgagagaaagagaaaggctcctctgcatacgccgcgggtgggttgccgggagcatcggccgggcagcggcgtccgggaaggggagagcgggctccatttgttggcccaggcagtgaccctgcgttccttactcgggtctttgccggatggccggtgacctggggcgacgagagaaggtctaactcggcaggagtctctggctctgcgcgtttctttcattctctccagcgggaagggcaaacggcatagcgggacccgccttccgtctgctgcattcttcaggcagttagacacactctttagcctaatggaattttagtcgccagtaacgggaccaagagcttt

SEQ ID NO: 228955 - DNA, 215 bp, Homo sapiens
  chr2:197035747-197035962
  hyper
tggagggcgcacggggacacacggacacgcacagacacagacacgcgccccgggctgaggagggtggtgggaggaccgccggccgccccccgcgcggagccccagggaacccggactccagccgcaaagcggagaggcgccagcagcaatcagccacctcaggggcggcggagtccaagcccctctcagccggaccgtaccgcctaaaccctcct

SEQ ID NO: 228956 - DNA, 208 bp, Homo sapiens
  chr2:197458361-197458569
  hyper
gagggacagccagaccttggccagcgggacctccctgaggaaggtgcggaagaacggggcgggtgcggctgggcggaggacgagtcccgaggctgcggcggagcctgagttgctctccttctgcgaagtcgaaggacaggaggattcctagaggtgtcgcggagggtggaggagaccctctgaggtcgtgcagacaacactgttcctc

SEQ ID NO: 228957 - DNA, 90 bp, Homo sapiens
  chr2:197664294-197664384
  hyper
ccttccaagtagtcgatgagttccggactgaaccctgacatgtttacagggtctgtctgtgcaaccccaggaaccgggacagagaaccgg

SEQ ID NO: 228958 - DNA, 695 bp, Homo sapiens
  chr2:198174653-198175348
  hyper
cagaccgtagcccaccgcctgtgagtggaggctccgagccgacttcacctcctcctcagagggaccggcccgatccgaaagggcggtctccaggggtccccatcccgcaccacgcacacagcctggcgcaactaaagaggaagtcggatgtcacatccaacggataaataaagacagcccggccacacaagagccgcattctgggcaggactcctgctaggtttggggaggggtcccagtctgcgatcctttctccctcttcgtgcagcgtcctcctccccggggcccgggccggcggcgcccacgcaacgcggcgcggtgcgagtcccgagagcacctcgagcccccggccccctccccagccccgccgggcccgcggccgccgcactcccgcacgccggctgcccagcgcccacgggccctgccccagactcgggcgcgcagttccgacggcccagggcggggacggcgcggcggaggggagctgccgccgcgggctctcggaggcaccggcggccgcacacagtcctccccttcgccgcgagtaaacagctcgcgggcgcgctccagccgcgcccccatccccccgccgggctccgcgccgccccgcgcccgcgcgtcccgcccgccggcgccgccgcccgctacctggtcggtgagtttgagcactgccattcttccgctccttcgcgcgc

SEQ ID NO: 228959 - DNA, 121 bp, Homo sapiens; identical to SEQ ID NO: 198630
  chr2:198175715-198175836
  hyper

SEQ ID NO: 228960 - DNA, 414 bp, Homo sapiens
  chr2:198299572-198299986
  hyper
tggccccgaaacgcgggctcagctcctacgaaagaaaccatagaaaaaggcagaatcctaggaaaaaaggcttttattaggctagcaacgaagaaaacacgtaagcagggaaagaccgcttaccttcgtgagtcttggcgatcttcgccattttgtccactcgaacacacagacggaactggcgctcccaagaacttccgctcgtcgccgccgccacggagaaaaatagctgggggctgcactctgcgcgtgcgccaaacgggagcgcgctccgtcgggtgacacgtgacagaactgccacctagagggaaccgcgaggtgcattgtgggtgggggaggagacacggttgggccctgaagtcgcctgcgtggtgacccaggaaatccccgagccgagccgtaaggtccttaagt

SEQ ID NO: 228961 - DNA, 297 bp, Homo sapiens
  chr2:198364582-198364879
  hyper
accgcaatgagcccgtgtcccctccctccgcctctactcccgccccgcggcaccgcgtgtgcaggcagctcccacccacttcccgtcagcccgggccctgcaatctgcacaccctgcgcgcgagccccgcccctccctacccgcgcagggtgtgctagcgcgctcagccctctccggccggcttagtctagttcccgggcctcgctcggttccagaactttccagaaaatgccgcgctccctacggctcaagggtcaaatcgcgtcatttccgggaggggacgaaggggtagttctt

SEQ ID NO: 228962 - DNA, 217 bp, Homo sapiens
  chr2:198569898-198570115
  hyper
ttttctggcaagccgccgtccattggcggcctctggcgccgcggctttcggcgtgcggacggcgcaggcgcgggcggggcggggccgggcggggagggcggtgagggccggcgctcggggccgcgtttcattggctttccggccggaagctgcggcgcgacccggctgcgcatgcgcctctcacacgtgctgtcagaacgccgcctcctccgcttgc

SEQ ID NO: 228963 - DNA, 235 bp, Homo sapiens
  chr2:198670177-198670412
  hyper
ctccttcaacgccaaaccttccttccttatccggaggttcccagactcagctgtcagccacgagacgcacaagtgactttttctccccactgacggcagaggaaaagttccgctctgcgtctttgcgttctgatggatgctttccctcattttctctgcaagcttcactaaaccgttgatggagggaggaagggagaactctggataaatgcagacccaccggatggttgtgcat

SEQ ID NO: 228964 - DNA, 737 bp, Homo sapiens
  chr2:200320441-200321178
  hyper
agatgagaggcgacgggggcattatttggcaacctggaattcacttcctgtaatcctacaccgcgacagcgcctaatcaacctgaaccctgacacccgggccattatcactgggccgcgggctgcgcgcctccctgctccgggctgttacctcccacggccttggccacggcgccgttgggcctcccgcgggctcccatggggctgccgttctgctccagccgggccaccttcactgggggaggccccttgacgtccgggctgccgctccgccggtcggggctgtcccgcagacacgggctctcgctccgccgctccatgctgctccgactcggagacaaagttcccaccggcaggtcgcaataaaacgcacagggacctagggagggggtggggggaggaagggggagggagaaaaaagagggaaaaccgctcatacacgtgatagacgttcaggccagtggcagagcgctgcaccacagccacacaaacttcctcccacgctgcccgaggggcccgagccgggaagccggtcccaaccttacactgggcggcccccaggaagcccagcgcctcggttcggcgactctgcccagtcgcagctccccagaagtcagccctcggggtcgcggccggggttggcacccaggggcgcctagaagtggtccattcattgggacggggttggcataaaccgttcctgggtgctacagcctagcccgtcccggggtcagggtt

SEQ ID NO: 228965 - DNA, 47 bp, Homo sapiens
  chr2:200321661-200321708
  hyper
gaagccgcaggtctcgacacccctggattgggggggtgggggggggc

SEQ ID NO: 228966 - DNA, 109 bp, Homo sapiens
  chr2:200322457-200322566
  hyper
cggcggcggcgagccggggctgctggttcgcagggcggctagctcgcgaggaggcgcggccagagcggtgggaccggtaacaccaagagccgagaagacgcagggaccc

SEQ ID NO: 228967 - DNA, 3251 bp, Homo sapiens
  chr2:200326712-200329963
  hyper
cagggtgccgggcgcgggacttcggctctcgcctgggccatcccgggctctgagggcccggcatccatccccaaggtccatggctttcaagttcggtcacccaggcagagagaccctgccttttaaagagccctggaaagttgcgccgcgttttccctcaaccctggaacacgcagggaaaactatgggaatcgcccgcgtcaaaagctttcgacggcttctaggaacccaagcgggcctgcctcttcccctggagcttgccctcctgggggcgggaggagggcgggagggaatcatttctttcaaatgaagcccacgccagctctgaagccaatttccgccgcggactgtccgtggagagttggcgaccaacactttctcggacggcataaccgcgaggggcttagactggaaatcagatgcgccaagaggacaagagccaggggccagaataccccagtgggggacgcgccttggaggacggttcgcccagggtgggcttcagccctttcccagagtgctccgggcgtctggggactgaccggagcgcagggcgggggacacttacttcgttatccgcacgccttcctcgttggcatcagagccggacaaatcccaacccgcgccaggcaaagataaatgactcctggctcccccggcagctcagggggtctgggcgggggcggagagggaaggaagccgtcggccgccggaggtagagactgtggaggtcctcctcccggccccaagcgaatgagcccctgcggcccgagcagagagatacgcctcagagggacgactgatggggaaggatggtgggcaacgagtctgcgctaggcggtgagcctagcaccccagaggcccgagggtctggggctagtggggccgaccgttcaggagccgggtgggcgggaagggaattgccaaggtcggcccaggagctgcctcaggcgaggacggggagctttctgcactgggcttcccggggtaggagatgggcgtcgggtgtgggcactgcctgccctgggggaagaaagcgaggagataggtttcagagctgggggagtcgttggtgggagatctggtgtcccttcggcggccgcgggccgggggaccggggaagacggagggtcctgcggcctggagcaccaccctaccacaccaggcaacgccccccggggcgcccttcattcttttgcagagcccagaacttaataggtgggtccccttctgcaaccacgctgcgagagaatgactgccctgctaatctagtttacttgtagaaatcgactgtaaaccgggacaacaaggcaagggtgggggaagaaaaggaagcgccgaaggagccgccgctgcgtccccgcccccagctcggagctgccggggttggggccccgggtggcgctcccgacccgccgcgttttccttagggaaacaccgagtgaggcagaggatctcaggcccaaggtggctgcgaagagccccgaggcctcggcttggcgtcaatgtcccgccaccctcgagcccgggtcactgcccgggtcccggcccggagccccagcgtcctctcccgacagcgccaccgcgtgggctgaggccgaaaccttcggcgccggctctgccggtcgcgtcccggagccaacccttccgcgtcgcctgcagtccacgggttaaggatgtggcgggggatgggcaggtccctggcccagggtaccaccgggccactcaacacaaaaacgccctggcgcgtgcaaaatacgaacgcccacagtttgtcccaaccccttgaaatgaaaagtacacctggaaagcccaagatagcacccggtccgcaccccaaatttcaggcaggccagcaggcgtccagaaatccgctcccacccctcgtaggggcaggcaagctcaggcagccgggtgcaagggggcccaaaccgcagttgcctcccgaacgctttgaggctatgggcccacgccggtcttgaaccaagcggagagggcgaaaaagcccgctgcgggacccacggtcccagacacctactggagccagggacgaggggggcagtgtatccggcggcccaaactcgtaaggagtgggggccaacttagagggcttcccgagctggcgcctcgcctgttttctcggtatcacgaatcccctcggacaccgtttcagtccgtcaagaccttggcctccgggaaaggcccaagtgactgtgacggcggcgactcgggctcagttctcccccaccccgtggtgccttccctccccgccctacagccaagcccagaggaacagggcatcgcctcgcgcggtcccggagccacatccggacttgggaaccccgtgtcgggcttagaggacttcactgggcgggttggggtttattttcaataaattcagctgttcacatacacccccaccaccatttccacgcgcgcgcgcgcacacacacacacacacacacagagggacttgtcaactattgagacagcgacccagaaaggtgtaaattcacctggtgcccacccaattgcaaagctcccagacccacacaaaacactagcgagccctggaggtctgagacgccccgcgcccgactcacggcgcgaacaccagcgctccggccgggtcgcaggggccggtgcccagcgggccggggtctggcgagccaggcagcgggccggctgagctcctgcgccccgcggtcgcgtggcctactcgcctactcccttattattggctgggacctgttcctttccaaagtgtgatgcccggtgtcctaccctaggccacgcggagctctctcccggcgtgtcgggccctgcgcccctgcccagtggctcacctcggctcgctgcgcccgccttcgccccaagtgcccaggacggagcgaggggctgtgggtcggcgcagggacgctggctgctcacctccaggagccgacagaaggtgccttcggcgtcacgcgtccaaccctggggctgatttaaataactaataagctcagagaaattttacgaggggaacttttccttttagtatcaataaagcctagtaattgggtttgttggttacctaagctcgagttcgactttctcagtctctctctctctctctctttctcattcagaggcaacgttttcaaaaaccggcaattgcgtgtgcgtttggggtgtgcaagtgtgagtgtagatgtgtgaaagttatttgtttcagcagtccttgtctcgagagcaatcatcattgtagc

SEQ ID NO: 228968 - DNA, 47 bp, Homo sapiens
  chr2:200330761-200330808
  hyper
gtggtgggctccccttagttcgtctcgttttatgctgtaagacccaa

SEQ ID NO: 228969 - DNA, 542 bp, Homo sapiens
  chr2:200331853-200332395
  hyper
agacctcaagtcaggtctcccggccagactcaggcctttctaatacaggcgtgaagggcgggacgcccagagccctcttgttggccggtggctaaggagccaggtggataacttctgcggattcggctttcaggctgctggagctctccccagcccgaggccttagcccagcgcaatcccttgtccagaccggccagtttccgcgtggcgaaaaagggggaggcaagtgtgtcttttccaaggagcttttatccaacagcctcccctccccccaactctcagccttaggtgccgggcttcagccgaagcgtttttcaaatttgtcatcattggaaacctcggacaagtggagtgtaaaattttgagggtttccaggtaggctctgacttcaggcattcaatgaaaggggaagagggctgagggcgggggagagagacaagcacagagggctccctgtagtcggcaggaattccctccctctgcagcccagctgcacccactagcacacactagtcttgccttctcccggctttggaagaatc

SEQ ID NO: 228970 - DNA, 1169 bp, Homo sapiens
  chr2:200333430-200334599
  hyper
actgctctacccctcgcaggcccgcctctgggcaggcctgaggtggccctggagccccgccagcagcccccgcccctcaggccaagctctggccctggcaatctctgcactttgtcatcacgcccgagtatttgacattcgcaattatctgcaaataccctgatcagtttgtatatgaaacactttttttcctgccttaaggttggaatctggtaagtttcagacaagtggttgcagggggagatgacccaggggaccgtgcgggacagggccggtgaacccgattccgcgaggcgggcgtctcgaagggactggtctgcgtgcctcaccgggttccccagcctggctccgaggaaaggccgcgcggaggcgagaaagggcccacatctcgagtctccagtctctccttgaaaagagcaccccctaatcccggaggaagggagggtgaaggaggaggggagagcccactacaggcaaggcaggaaggttaatcattttgttaaccggaaagggtgctgccccgcctggccgtcgtcaccgagcgtgtcagtcacccgctctcgatttcgccgcagaattacctgctcaaagagccaccccaagaagccctcagctccgaggtcttcccgcccgtcgtctgcgggaagtaaacggcgtcctccctccaaagaagtggatgccccttcgactctcctccgccccccggcggttcctaaatctaggaaagccagccccggcatcgctcactactcctgcacctcagctctgggatacccgctcagtacagacagaccatcaaccaaaaaagaaaagaagaaaagaaaagtggtggtgggggtgggggtgggcagggagcgtaaagtagcgagatcacttatttgactcttctgttttcttaggaacctgatcctggcccccggcagagcataagggcccgaggccagggacctagaggccggaccaagttcgcgcgaggtgttcacagcctaggcgccccgggcttggcttcgtactctgcaacaagccaagctcccttgccacgagtatatcagcaacttcagaaataaacaccagcgaaaccccttcccacattagcttgttgctgtgctactgacactgggcttagtcgatgttcacacctattacatttttccggaaagtgggaggag

SEQ ID NO: 228971 - DNA, 316 bp, Homo sapiens
  chr2:200334887-200335203
  hyper
agctggagaaggtcgtcacagtctcccgtggaatcttgttgcctgagagccccataacggaaagggctaagacgactcttccacacacaggtcgcagcccctgccgcggaggatccccaggaagatgctggggacgctctgagcatcggcctttctttacccccgactccctggagcttggtctcgggatgccaacttggggcacggaggcgacgggctgctccgaagctggagggtttctgcttgggtcagagggatcacgacctcagcagagccaggagaggttgggtgacacccactgcgtattgcacttgac

SEQ ID NO: 228972 - DNA, 410 bp, Homo sapiens
  chr2:200335505-200335915
  hyper
gcattgcgctaacacgcgcacgggaattgcacccttgccggagcctccgcaccgtgcgcccttcaaagagctggcgaccccgctcacgtgtaagcaacctcccactttgaaactaattcgcacccgggtctttcaccccaaaggactttgctgcggacgctgctctgacccaagacgcgggagagaagtcccaaaggctacagccaggggctgggggactcctctgctcaccttagtccttgatttcgaaggccccaattaactatctgttgtgtcagaatcggcgagtgcaaagtagctgcgccccgctgacgcgctctctcctgggtccgggtatcccagggcatccggagctggggagggttgtgcggactacccaaggcacgcgcagataccgggcagggaagaag

SEQ ID NO: 228973 - DNA, 403 bp, Homo sapiens
  chr2:200336131-200336534
  hyper
gtttacagaaccggcgtttcagatgtttatttgcaactaatttcttgtgctggaaaatgcttgttacccgggcggagcgcttccgctctgcgcggtccggcccggcgggcggtagctcgctgatccctccggcgaagcctccaaggagcgggcggctgggagaggttgtgccacccgggaccaagccatcggcgctgctccggactcccggtagggggagccgccgcgggcgccaggccggattgtgttctggcctcggggcggccctgctgccagcggccgggactctcagcacagagctcgggaggactccacctgctctccagataaggcgccatgagcagagaagggaacagacggccaagctccctcctaattccccgttgttgcagagcaaagaaga

SEQ ID NO: 228974 - DNA, 243 bp, Homo sapiens
  chr2:200523981-200524224
  hyper
aattgcctacacttggggaacgcggcgccccggccgccgcagagccgagccgagccaggcgagcccccgcggcgcccaagcgcgggccccccagccgccgccgggcgcggcatttttattcaagcgagataacggagcccggccgcgcccggtgcattgtgggaacggcccgcggcccgttttcgggaggaggcggagggcgcgaagcgagctggtggatccgtaaagaacccagccaacccc

SEQ ID NO: 228975 - DNA, 79 bp, Homo sapiens; identical to SEQ ID NO: 198652
  chr2:200604747-200604826
  hyper

SEQ ID NO: 228976 - DNA, 566 bp, Homo sapiens; identical to SEQ ID NO: 198653
  chr2:200715514-200716080
  hyper

SEQ ID NO: 228977 - DNA, 111 bp, Homo sapiens; identical to SEQ ID NO: 198654
  chr2:200820437-200820548
  hyper

SEQ ID NO: 228978 - DNA, 178 bp, Homo sapiens
  chr2:201170705-201170883
  hyper
caggcagaaacccacggctgaagcccacgatgcccatgtgtaacttggttattacacacacgtttggagcccagtgtgcagacccgcagcgcagaggaggcggcggaacaccccgggttggtcgggtttccaagggctgacccgagctccagcactttttccgcgcctgatttttcag

SEQ ID NO: 228979 - DNA, 55 bp, Homo sapiens
  chr2:201171095-201171150
  hyper
aggtttggggaaaggcgaggaagtcggtctggagcaagcaagcaaagtgcggaag

SEQ ID NO: 228980 - DNA, 166 bp, Homo sapiens
  chr2:201374886-201375052
  hyper
ggaggccacgtcccgggcacgccacgccacgccacgccccgcccccagattcgtctcgccccagtgggccgcctcggagtcgggtgggtcttccatcccggaggtaagggaaacacacggtagagaaggccagggctgaaccccaagggacggtcttgtgtgttca

SEQ ID NO: 228981 - DNA, 34 bp, Homo sapiens
  chr2:201390687-201390721
  hyper
cttcaggagacagcggaccgccaccaacacaggg

SEQ ID NO: 228982 - DNA, 600 bp, Homo sapiens
  chr2:201450485-201451085
  hyper
acttacaatgtttgctaagacgcaagagggtgtgacacagacgctaagcgccactggcgaggagatgaaggggtcgtcttcatcttcgccggatgatttccgcccacatagagggcgccagtgacgcccacacacgtgctggtgtcccgggaagagttcctggcaaagagctcaggaacgttggatcttaatcaaggctttctccgtcggggtggatgggttggactttaggctccagcaagccccgccccactcggcgggtcggtgccgccgggtcccaggtgcccgctacttcccagaacctccgcctcccgctccgggccctcgaaccagcgcggacaccacaatggaccgggcgtccgagctgctcttctacgtgaacggccgcaaggtgagcgcccgcgggcttcctctgcccccagacctgcggccagggccggggcagagaggagcccctgccgttcgtcccatcctttcgtgcccgccgtttaaggcactcaggcacggactggctttctcccgtaacagcggctttgccttcgcattcccacccctgcctccggggcagctaaaggctgcgttttcagggactgtcctgga

SEQ ID NO: 228983 - DNA, 140 bp, Homo sapiens; identical to SEQ ID NO: 198657
  chr2:201727376-201727516
  hyper

SEQ ID NO: 228984 - DNA, 250 bp, Homo sapiens
  chr2:201729265-201729515
  hyper
ccgctccctcctgcgtcttaccgtcctggacaaagactccaagtcgaaggagacaaagcttgtaacgcaatcacgggaatcacgcagctgactgcgtcgcgcaccaacaacaaaatggagctgacagctgctgcgtcgagactcgtctcgaaaacactgatgacgcagcgagcgcgtctccgccgcggggcgggtcatgcacggggcgagcaggcggaaagggcgggcgtgtcgcgcgcgcgaccatcgt

SEQ ID NO: 228985 - DNA, 149 bp, Homo sapiens; identical to SEQ ID NO: 198659
  chr2:201828571-201828720
  hyper

SEQ ID NO: 228986 - DNA, 233 bp, Homo sapiens
  chr2:201936491-201936724
  hyper
tgtctaaggattccgtccccaagcaaggacaacatattatcttccccgcccttctcttttctacagtatctgttacctcagtcagattgaggatgcacatatactgggaaaataatcgacttccagcgtccctcatgtagtctctacctgattcaggaatctctaacccagtatcggaacgttaagcggcttctccgctttcctgccgtgagaaactcgaggtgacaacctcc

SEQ ID NO: 228987 - DNA, 42 bp, Homo sapiens
  chr2:201980840-201980882
  hyper
gtggaacttgtgtcgacatccacccccggttactgcatactc

SEQ ID NO: 228988 - DNA, 249 bp, Homo sapiens
  chr2:201983185-201983434
  hyper
taggtggtgggggcgcagcggctgtccccactcagtcctggtggggtcgcacgtaacggtcctgagctatgcataagccgtttgaccacgcatggagaattttaccacccagagacacgcgagtggccctgtgcaagtttcaactgcgcggggggcggggaattccgcagacaggattctagaatttatgtcttgtgtggtaacatttcagccggtgggtggcggggattaggcgtgaagcggttcagc

SEQ ID NO: 228989 - DNA, 79 bp, Homo sapiens
  chr2:202315793-202315872
  hyper
gcagaggataaggcgctatgagaagctgccaagcctcagatgtgcagctgggctgaataccgacgccagcgcctagcgc

SEQ ID NO: 228990 - DNA, 244 bp, Homo sapiens
  chr2:202316090-202316334
  hyper
tctgtcgtccgcccgcgcttcctcaggaagcccctaatgcagcggcagcctgaaagcagcagccgaagctgctgccgctgctcccactgccagcaaccgcccgggcgtggcagggacaggcgggcgacttcacaacatcatcactcggcgacctcggttctgcggcgacaccgggtcaatggcagcccccacacaattggggaagccaaaggagagccactctcccagcggcctccacggcccc

SEQ ID NO: 228991 - DNA, 769 bp, Homo sapiens
  chr2:202897429-202898198
  hyper
cgagaacaaaagaacgtttgccaatcagaaaacgctacccgagaacgaggataaccccgctttgtgttttgaaaactctttaattagcctggtttctaagacgcattaaaacattcctacgcagattctaaatggaggatcaaatggttgcttctgcaacgaagatgggatcccgaaagggcacacgccgcagaaccaaggcacacggggccactgagacgcccggcgcgtcgtacagagtgttcctgggcgctcggtctcaggttacttctagaaccagtctccccaacgccgtcttcgtttccttaaaacctcgctagagtcaccccagttccccagactccaggccgtgcgcgcgggcggggtggcctgagcccgggttccccgctctccctgcttcgggcccttcctccgaggggtccttcctcccgccgtcactcggccccctccgcccgactcgggtttctcctcggaggcggcccctcctcctttttataactcgggggaggggagaggggactgtggcctcgcgtggactctttgggtccggggggaaagaggcgatccgcaaggcgcacccccttctcgtcccgtcccaaaccccacattgaggacccggcgacccgaaagccccgccagagccagcctttgcagtcctaacgcgactcctggtcacgtctctccccgaaggggcgctgcgcggtcctcgctcccctcaaacgccgctggcgaaggcgcccctgctcaggaatgcgcatctgagtgcacc

SEQ ID NO: 228992 - DNA, 320 bp, Homo sapiens
  chr2:202898961-202899281
  hyper
accggaccaggcgcggggggcgtgcgcgctgcggtgcgccgggggtccagagtcttgggcaaactttgaagggtgccggagccgcttgttgctcctcgcggcggagggagccgcaccgttacgtccccgcggggagagcgaggcggccctcctcggcgcccccaacccaggctgacgagttttgggcccccggcggccctgcgagtgcagggcggcggcgtctgcggcgccttcgcggcgcgggcacccaggcggcagcgccctttgctccacgccgcccacggcccggccccggcgccgtgaggactctcatgcgtcgg

SEQ ID NO: 228993 - DNA, 216 bp, Homo sapiens
  chr2:203131608-203131824
  hyper
cggtttgggctgtgcgaagcttgcgttgtctattagacctgataatgcagttgtgtagatcgggcagttcagtatttcagatttgaagcttaggggaaaacatctgggctggtgatgtcagtttgaggtttggttgttttcgtggggaaagtttgacaagttcgtcagcactgaaatggttgaatggtaagacattcgtatcgcaagatgctgttg

SEQ ID NO: 228994 - DNA, 223 bp, Homo sapiens
  chr2:203776773-203776996
  hyper
tttgcttgactaacgccttgccagtttttttttctcatacatattcccaaccagaggctcactcggcagaggtttttcctaaatctcgcctctaactgcggcttttagagagaggcgagaggcggaaatacaaagaaaagaacggatgagagaggaaacggtcgacggtggccgatagtggtcctactgtcgtgggactgctctgcgcgctcccggtggggcg

SEQ ID NO: 228995 - DNA, 123 bp, Homo sapiens
  chr2:203879447-203879570
  hyper
cttcaggtcaccccgcccatccccagcctacgcgaccattgaacagctgccgcccaacggctgggtaaatcctcagcggccgaaatgattagcccagggggcagccccgccccctgctcctcc

SEQ ID NO: 228996 - DNA, 74 bp, Homo sapiens
  chr2:204192792-204192866
  hyper
ggctaacaaaggccgccgggaggtgggggcttctccagccgctccagcggcgggcgggcggcggaagggttaac

SEQ ID NO: 228997 - DNA, 35 bp, Homo sapiens
  chr2:204399768-204399803
  hyper
cctcacggccccgcgcccagccggctccctacccc

SEQ ID NO: 228998 - DNA, 1142 bp, Homo sapiens
  chr2:205409782-205410924
  hyper
ttcctaacaggccctcggggcactcctgcatctccgcacccggcagcctcgccccttgggtgtttttggtgggcgtgactagaagcacctgctcctgggctccttttgcatcttgctgcagtcccctcctgtgaagggcgcagctctgcagtctcctcgctcttccctcgggtgttctttctgagatccggtttcaatcctcgagcgtgtagccctcaggtccccttacaactccccagagctccgtgtgcatgcgtgcgagagggagagagccagggagagacccaggtgacgagacgaggctcccgggctccagttactggcccgcagggccggggcacgtcgtcgcccagcgtgcggcggggcccgggagcgccgcggcccctttaagagccgggcccaggccgtcgccgggaccgcaggagcccagagcgcgggcgccgcagaggagttgggagccggcgcaaaagtttcctcccaactctggccccgtgcgccgccgccgccgccgcccactccagcccccggcttggggccggccctgccaacgccgccagggccagggccagggccaggaccagcgacagggcagggccggcagtttcgctttggtgggcgcggagcagccgcctgggccgggcaggagtaggagcgggaggaggaggaggaggagccggtgccgcggagctgccgcgtcccgggccgccgggcacctgggaggtaacccctttccgcggccgcccctccccgattcccgccacctgccgcctggccaggtggaaggggcgctgccgcgagcctccgggcctcagggtgttccggggagcggcgccccgggtctctgggcccacccgccccgggcgtcctccgagagtgggggctgcgcccgcggggtcagacacctgttcggcccggcccggcgtggtcgccgggggccaggatgaaagtgaccgtgtgcttcggcaggacgggcatcgtggtgccctgcaaggagggccagctgcgcgtcggcgagctcacccagcaggcgctgcagcggtacctgaagacccgggagaaggtgagcgcggcgcggaggagtggggcgcggctgcagccaaggcacctgccaggtgcgacccggtggcgacactcaggggatg

SEQ ID NO: 228999 - DNA, 301 bp, Homo sapiens
  chr2:206546945-206547246
  hyper
cgcgggggcgatcgggagatgcggggcgggcgaggggtggtgggatgggcgccgccttaacttcgatcctgcggcggcccgagagaagccgtcgccgccccgcccgagctgggtgccgcggcactctgctctgcgccgcgcgtctccgcggctgcctctttaatcaggaacacagaaggggcgggccctgagccggcgcgtaatcggatagctctgccgcggctctgacatccacatgctgctcggcctgaaaaggcagtggggagccggaggggaggcagagatcgcgagcgaggcacca

SEQ ID NO: 229000 - DNA, 1555 bp, Homo sapiens
  chr2:206549958-206551513
  hyper
gttcggggcaacctcggacccggggtgggatctcagggtgggattcgaagctgggacctgccagggacctccagctccccaaaatgcgatctcaagccgtgagctgctcaggctttcaggcggagcaaagcactggcaccctgggagccggcagcgggtggccagggcgaggccaagccacatacctctgactcacccggtgtgcgccggccgggaagggggcctggttcagccgccgccgccggcgacgagaaccaattctgggaaggagcaagatggggcagaaggtgcgcgcgggggagcaactgagcaaataacacggcggtcgcggcgcgcggcaccttgggctggcgcgtggctgggaggccgcatgggcgacgcgcaccaggctgcccctctcctcactgcgccgcctcgccagaccgcagtgcagccgctagcctgcctccctccctgccccgggcgcccccgccagtcccctgcgctccgctctgcgcggcaggctcgccgcgacccctagagagacggctttgagtggcgggaggccgaggccggctggcttgggaatccaagcgctggcccaactaggtgagaggaaactggggtgggatttcggagaggagggcggagagaggcgggaaggaaccagcttgagccccaggaatgcgcgcaacttgcacagcctctagaagcgccgcgcgcccagcgcccgccggtgcgcaggaacaggtgaagagcacgcggcgtgcggccatccacgtggtggggacgtgatagcccctcagctctcctcctagccctccctccccttccccgccccccagcgccttctctaacgccgcatcgatttgtttgggctacgcagcagaaacagagcccagcgatccataaacattctattaagcaaaaatattcccagcgaaagcaaaaccgaggctgaagcctccgcgaagttggccgcctccaactactccatgcttgtgccctcctcctcctcctcctcctaaggacacccccagggaaaagcctgcggcatttcttcaacgctgccctatgccggaaagttaggtctcggctgcagcgctggtctctggagaagcctctgcctgcagccgccggcgagttcccgcctcccctccccagccgcctcgctctttgcttttccacgtgagaaaaagaaatgttcacggccgatgcttcattttcactgattgatttctttttaatatcaacacaagttaatggaggcaaggcgcgctctgattgaagggctgcccccgcccttcgactcgggctggctgtgccgggggtctttcccaccgggtcgcaggcgtccagcggctgggtggcgggcgccggtagccctagtgtttggaggtgggggagggatttggaatagacttgtcgcccctctgggaatcatctgggttggggaaccttcgggaatcagctttccagaccaagttttaggggatcttgcccatatgcgttgcggcttctgcggctccggctgaatttcttctaaaagataggagatccacgctcaggtttattg

SEQ ID NO: 229001 - DNA, 188 bp, Homo sapiens; identical to SEQ ID NO: 198666
  chr2:206750390-206750578
  hyper

SEQ ID NO: 229002 - DNA, 265 bp, Homo sapiens
  chr2:206948632-206948897
  hyper
aacctctccaaacacgcccacactggggactggcagtggggggtggcagggtctattaacatttcaatgtcaacactcaagaacaacaaggaggtaagcatagccacgggaaacatcctgtccctgaaaagcagaaaatcgagatttggaaatttatgtttatcactttttttttttttaacgttcagagctcagggcaccaaaatatagctaaaattgaatccatttaaacagaaaacatacgtgtgtgtgtatgaatatatat

SEQ ID NO: 229003 - DNA, 224 bp, Homo sapiens
  chr2:206949799-206950023
  hyper
gtttcaaaatagccgagtgcgctcccccacgccctggggggtcccgggcgctaggaccagggctccccggagagacagcggcccccagttcgggcctaaaaggaaactttctgggccgcggctgcacctgactcctcaccgcccctccacccgaccccacgcccgccaggccgcccgccccgccccgccccggcctggccgtccggagcgcggaggagggggat

SEQ ID NO: 229004 - DNA, 152 bp, Homo sapiens
  chr2:206950964-206951116
  hyper
ctcctctgccctccgaaacgacaactttcctaccatcttggaggcagagcaaaggggggccagggggaaaagtgcacccgctcccgataaagtacaaatttttacttctcatctctggaaaaaagtccacaccggccgtctacacccgcgcc

SEQ ID NO: 229005 - DNA, 252 bp, Homo sapiens
  chr2:207139026-207139278
  hyper
aataggcatggaaacggaaacgactagctctcttagccccgttttcttttctacattcatacgttgctttgaattggcaagcagtttttatttggaccctcaaacgctaaaaccttggtctctacttcgcgtcccaactgtgcttatgagtctagtcatttttgttggaacgcgatagatttcccaagctccggagtggggccctgaccagggaggaagtgtccgctttaagagcttctggaggggaggaag

SEQ ID NO: 229006 - DNA, 186 bp, Homo sapiens
  chr2:207140118-207140304
  hyper
gctggccccagacctaggcctttcccagcctcgggcgattatagtttatttgaaaacgtttgatttttgtgttaatgattcttttactaccgccgtgcaacagttgtgtaaatgtggtcgtgttacgccatcgtttttacttgctcctaagaagggccttaccagctcctgcgattatctcacgcg

SEQ ID NO: 229007 - DNA, 753 bp, Homo sapiens
  chr2:207506661-207507414
  hyper
tatctcgaggaggcgccttatttcctctgagcccttgctgagtgtcgagaggcagctcatgtccctcctccgaccccaagagtccacagtcttccctcacacccctttattctcggacgaggcccgtgtggtgagcgggaacccctgctgtcccctggaccagcgcggagctgggccctaactttgcagttcccgccgcatcggcacgcacccgcgaggtgggagcgggaagcccagccgcattagaggctcaattccggcaggtgcagagtgggtgcgggtcaaggccaatgagagtgtgtgtggccaagcccgctggtttcctgaaccgaaattctccggggagggagagaagaggagggtgcgggagacggacttggaggcgagaggtggcggcagtttccaggagctttgacgtagacttggagaggcgccgagcactcccactgcttaagtagaggcacggtagcctccaggacgcggaagctggggacagccactcgctcgggagcagcctgagcgtttcctctccgcgtactcgagggaactctctccacgcgttcgagggaacccggaaggggccaggcgggtgagtgcggagggaagcccttgtgccatctgggagtagagccgccgagtcaggaggtgagtggggcccaaaggacagagtgggtccctggcagctccgccctgcggagggtgaggctgcgcaatcaagtgcggggccgagactcagcgcggggctcgtagcgg

SEQ ID NO: 229008 - DNA, 168 bp, Homo sapiens
  chr2:207629920-207630088
  hyper
gagctgttgtcggcgttttgagcaatctgcgggcggacgcggggatcactcacccgcgatgacgaatttggccatggtcgagagagactcagaggcagggaccgcggcttcgcggtttcctggcaaccacgcagccaagggcaaggcgcaggcgcactacaaagtctg

SEQ ID NO: 229009 - DNA, 37 bp, Homo sapiens
  chr2:207630392-207630429
  hyper
agcttgggcttagcggcagcccgtatcacatcctaga

SEQ ID NO: 229010 - DNA, 497 bp, Homo sapiens
  chr2:208029821-208030318
  hyper
tccctgtcagcaatcgctcctaacaccccaaaccaccttcccacccggctcctccgaaccccagaagttcggcaggtctctgataggggacagcaaacccgacaacgtgtgcgcagggatgtgtgttggcgactgaaacgcaggcagctcgcaccggctgctcagctcggcactctacgaggttaggggtgggtggagaggtaagcgcagatgactgtttcagaaaacattttcaacaacagacagccaaaaaggaagaaaaaaaagtcaaacaaacaaacaaaaatttcaacccagagcccacaccaacgcagcccctgcgtctccgccgccaccacacgatttacacaagtaatttaaatcattcacctgctgccaggtctcctccagggatggtaaagctgagaagtagccggtgtcgtggacaagttgtagctcctggaatatactataactagccaacacgtccatgctgctgctgccgggcaaaacgggag

SEQ ID NO: 229011 - DNA, 1359 bp, Homo sapiens
  chr2:208030651-208032010
  hyper
atctatttctgcagcgctgttcgctcctaatgcaatctttgctctttattttgggaggttgcatttttttctctcgcgatcgcttctcttccccccccttcccttccctccccaccccccaccccatccttgctagtttgtagtcttccccctcccttttctcctcctcctgctcttccccctccccaaactccctccctccgttcggttctccgcgcagccgtgggatctcgaggagggcgtccattaggccgcgtgtgaccatgtaaggtaaacagggggctcatgaagtcactgaggaccaatggggagcccggagcagagcctggggcggggcttggccctggcggcgggcgcggattggcacgctgcggatctccctgctgccttacaaggcggtgcgaggcgagctatttttagagggctatataagggggctgaggcggccgcccggcggccgggcagcgcgagcgcaagggacagggagggtcgtggcgacactcgcgccagctcccgggacggctgggctcgggctggtcgccgacctccgaccctccactagatgcctggcagagcccggcgcgtccggagcccgcgcccctcagagggaaggggtcgcgcgtcgccgcggcggccctgaggctgacggtcgggaggtgaaaggccggagtgcggggtcaggacgcctcctggagggggcgcggcgcagggggccgcggggaagccgccgagggcgcggagcgggaaggaaggacagtggccaccccgcctccgcctgggcacggggcagggacccgcgcgaggcggtgccggggaggtcctcacgtactcaaaaacaagcagaaaaggcatccagggccccttcccgaactccccacgggctgccagggtgcagagaagaagcgcctgaggaggaagtgccacacaatgggagagaacaaaggggagcggagcgagaccgcggcctgcgcccgccccccgcttgcgcacagtccccgccccgccccgcgggcgccgccgccgccgccctccctcccgcgcctccttctgaccccgagcgagagacctggtcgggagtccggcggctagagttgattgcaaggggcctgttgctcgactgtgcgttaaagaggctagagggagcctaggtagacgtggggcgcaagctggagccggcagcttgcgagggggcctttacgtgatgaggctcaccatggggtctccagcgaggtgtctgcagagcttcgatggtgagaggaggaactcgatttctcgttttctggagttgggatgtagacatagagagatctgttacatctgagatgaaaaccctgcacaattcacgttagggttggccaa

SEQ ID NO: 229012 - DNA, 469 bp, Homo sapiens
  chr2:208575825-208576294
  hyper
tggaagacaggagcggagcactgagttacaaaaacagttaacaatttgggtgtaaccaagtttagtgagcaaacgaaagctgtcagactcggaagaagagttgctaatggagcgaactctttactaataacggctttctacagagatcattgacacagcttccagttacaaatgcccgtgcgcttccagtaggaccggaaagctcccagcagccagcgatgaatgaaaacccgagtctgggatagcggcgtgaggggctgggcagctgccaggcgggggcggggcagcaggtcacgtgcctggcttcgaggcgggcgccggagggggaactctgaccatgattggttcctcctaaccaggtgaccgcaggtcgcgttccggttggcaggcaccggccagggccagcggccttcagtcggtaggcggcggcggaaggaggaggagctccagccgcgctctctcccggcag

SEQ ID NO: 229013 - DNA, 226 bp, Homo sapiens; identical to SEQ ID NO: 198671
  chr2:208633317-208633543
  hyper

SEQ ID NO: 229014 - DNA, 101 bp, Homo sapiens; identical to SEQ ID NO: 198672
  chr2:208633756-208633857
  hyper

SEQ ID NO: 229015 - DNA, 274 bp, Homo sapiens
  chr2:208635444-208635718
  hyper
ggattacaggtgtgagccaccgcgcccggcccgtttacatcttaagacaagatctcactccttacaacaattctgaggcaggtacttcctacaggtgaagaaaccgagactgagacttggccaaggcaaccgagctaatcatagttcccccaagaaagggcgacctcggcaagcaagttcacctccgtattccgatcacctggcacatagtagccgcccaaatggcaaccctgggattcgaacccaggtagttggtcagcggcactcaccatcg

SEQ ID NO: 229016 - DNA, 243 bp, Homo sapiens
  chr2:209120080-209120323
  hyper
ccggggagcggggcgcgctggggctgcaccaccccgaactttgtaacaatctagagcaccacagagtgtttccaggtcggcacaaaagcgaacgggacagggcgccctgggcggcggcagcttggccggcccgctgcctagcgcgcccccgaggggcggtaatggaacgtacctttggctgaagaaagagtgctcccggccagcgcggggtcgcctagggggttccgcgctgcctaatgcaaa

SEQ ID NO: 229017 - DNA, 118 bp, Homo sapiens
  chr2:209130875-209130993
  hyper
catctgatccgagcgtcggccgggctgggaggagccggcccccgggaaagatttcggactgggggacaggaaaacagagggcggagtcttgggggggggaagcgagaagccgcatcaa

SEQ ID NO: 229018 - DNA, 785 bp, Homo sapiens
  chr2:210636324-210637109
  hyper
ggacactcctgagtgcagctcggagcggggaaagccgaattccgggggctgaagaggccgcgcaggggacgagcgcctgcgatgcggagcgtggacttcttgggccgtacccctgcggctcaagctgccccggattcgcttctccggccgtgcagcccggcgcgggccgctgtccacagtgggaggtgctgaaagcagggagcgggtgcgggggcggcgaggcggaccgctgctccgagcgcccccctcctcgctccgcggctcctccagccctcccctcctcccgcagccatgttccacgcgcggggaggggtggggggaggggagaggcacgggggatcagggcggagagagccggctctgcctcggggaaggaggggatgagagttgggagcagcgggaggaggcggcggcggcggctagcgaggagacagagctgggtcctgcagtaggactcccgggagccaccattatggtgaagaggaagagctccgagggccaggagcaggacggcggccgcggcatccccctgcccatccagaccttcctgtggcggcaaaccaggtgaggggcgcagagggcgcaccgcgggccgccctgggctgggggcgctcctggggccgcccgggtcgccgctgccgccgccgccgctgaggccgcgccacagcctgcagctccctctctggggctggaaaacaagccctctgcaccagcttaaaaacacgcattaaaatatgtatatatatgtatatatttcagtgaagtttgacgacaagcagattggc

SEQ ID NO: 229019 - DNA, 235 bp, Homo sapiens
  chr2:210867113-210867348
  hyper
agtactgcgaggacgttaagatccaaacagcacaagaaggaaggtcaaaatcaggtgtacgaggcccgtgtgccccgccccgccccaggcggacggctgacagcgccccaccccaggaggaggcgggacttcctcaccgcagagtggctgcttccggtagaatccggaagcctgtacggagaaggggcggggccaaaactgcgcgcccaatcggggtgacgctctagccttgccg

SEQ ID NO: 229020 - DNA, 96 bp, Homo sapiens; identical to SEQ ID NO: 198678
  chr2:211035494-211035590
  hyper

SEQ ID NO: 229021 - DNA, 847 bp, Homo sapiens
  chr2:211089497-211090344
  hyper
gctcgaactgggacacagatcgcagcccgcgctcctgcagccgggcccagggggtgaccacctcctcccaaaacgcaggctcccgggtcccactgcaggccgctgaactagacgggttggattggggctccggaatgaacttctggagaaatctttcggctttccccgacgtgggctcggcggtctgttctcggggcggcacggctgacacccctttttcctccgcccagatgctggttgcacccagtccgcgggatccaggaaaggaggccagctctagcccggcgccggagttggggagcactcccagccgcgcgcgcaccgccctgcttcaagccagcgacaggagtgactcgctgccccaccccacagcctcccggcctgcagccgcggaagtcccggctggcactcaccgcgcggcgggcagctggcgcggcgcacggtggccgcccaggacgcgtagggaccctcggagaaggcgtgcggccatgtccgaaacacaggggcggcggggcgacggaggcgactctgcggctactcggcgactcggggcagggtccccgggagggaggacgatcagctgaggcgtccacctgtggtgtcctcccaaaaaagcgctcgcgcgcgcccttccggagccccaaccacgccacaggctggtcgcgagggaatacgcccgtcttggctgtcagcaataggattttacagcgaaactgctgcctttgcttgcagcattctttcttgtttatcgaagcagctctgagcctttttagcgtcctgaagcgctttgagtaacggatgaaagctatggagcccccaaatacgcgcaaatacctaaccataaaaa

SEQ ID NO: 229022 - DNA, 92 bp, Homo sapiens; identical to SEQ ID NO: 198680
  chr2:211341442-211341534
  hyper

SEQ ID NO: 229023 - DNA, 2933 bp, Homo sapiens
  chr2:213401042-213403975
  hyper
ggaggatgaaaaacgaagtcccccggggcatttacagtttccaatggatcaccttagtatgcgtgttgcaattataccagggatgcacccgagagcttttctttgtgcggccctttcatctggatcactttgtgttttgaacaagtgaggctcgcctttgtgcccccagaatttcaagtacagagtcacacacggaacaacaatggcacgctaatcctcgcgctctaaatgggctcacttgtgggtctgacaattcgcccagggaaacgagaagagacgaagcgagggcgcgagctagtgtcgcctgagacgaggaagaggacagctgcagaactaatttggattacattccttgcagaaattctgaaaagggcttttcggcatagctcaactcggagccgcacagttaataccaaattgctgcggactcggagcggggtcccccagtggcagaggctgaaccagacagcccccagtaggtcgcctcgtagaaattcctctcggctaagcctgcatgtcggtcgccaatgcctttgaatgggtcaatgtgcataatcaacccattgagggaaaatatgaagggactcgaagtggggagggagataaaaagagatgtatctaagaggccgcttggaatgtcaagtccgtgttggtgtgattccggaggtggctggagcgcgggacctggtatgcgtgaagaatttcggagtaattgggagggtgcaaacggccagcacaaacgcctcacatgtgccattcgaaggtcattttgaaagactcgataattgtaacttgttatttactaggcaaaggaggcggcggcggcggcggcggcggagcgggaaaactacagctagccgttttcttggtgaggtcagaaggacaccctccgggggcctaaagcgctccctatcgccactcccgggggctttatcacctcaagctacttcccacgctccagtcaccatccctggatggtttcggaaatctctctggctctccaaaaggcaccccttggccacgtcaagacaccggtcctcctcagacctctcccgtcccactttcatccccaggaaactctagtgtcagaaactttgagctccattgcactgcaggtgctgtcattagtcctgcaagccgtggcgggccagccccgccgcgctgcctctcggggtcaattagccctttgcctgcccaggtacctggggctcgagctctccagcaagcagtggccgcgcacccatcgccgctgccgctttcgcctcgggtggatccagtgacccgcaggctcggcagcctggccgggcagtaaacagacaagtttgaaggactccggccaatagcaagttgaactacaggaagaactcttcccggagccaaacacggcaaccgacgggaaggccgggcttctggctcaagtgtgccaagcctttttttttttttttaagaggtcaggcaggcgagtaagcgcccctcaagtcaatggggagagggctccgggaagccggcggaagaggcccagaactccgggccccggaccgaggcgcgcccgcctgctgcactccggctgcccgggctgggcgcgagttgcgtctgacgccacaaggctcgggcgactgggggcgcagcggtcgccagcagcacacacaggtgcaaagcccgattttctgagcgccgctctccaccgcccttcgggctcggctcgggagaggcccagccagcaccgccccaggaccgcggccccggcggtgcgggttctgccctcggggacccgacagggacagaagagtctcctctgactggggatttgggtctcccatgtcccgaacaacaggcgccaccagaagggatcccgcttaggctcccaaacaaaacgctcgggaaagaaaagcagggggttaaggagagaaaagagggactcagagtgatttttcacgataaataaagcaaacgcacacatacagggtaagtttcaaatggaaagaggggtgaccgaaagcccagggaagaggccccggtcaagcggtccctccacgcctcccgggatgggtgaagagggcaggggagccactcgaggcagccccgccggcggctgcaggttcggcgaccggagtgccagaaggaacccacctgactgagaatcgctgggctggacggtccccgccgccacgagaaggctcacccagacccaaagtcctgtcgccggcttcattttttggaagtctcagatcccgtgctgacaattacatgtccaaatggcatatccccctttcgggcacgcggaggagatcccccagccgggcgcgcgtgggggtgcgaggggggcgggcgcggcgcgcgcggtgtggcgactcccagggcgggcgaccgagtccgcgcccgcgggtccagggccggggcccgaggagggggcgagtgtgagcgcgtgtgtgcgcgtgtgggagtgtgctcggtgtgtgcgcttggcgctctgggccggactgtgcagctatttccccgcgtgagccttcgcttgctcgctccctcctcactttctctctctctcactggttggtcaacaataaaaaaggaaggggggcgaaaggtttccaaaaaaagttgattgcaaagaggcggtaggtttccggcctctccccgcagccgggctatgttctgctccttcttcagtttccttgcacctccagtccaaatcgggaggggagcggggcggggggagcttctcgcttctccccggatcccgtccttctttttcctctcagctttcctcacacttgtccggcggctgcggtaattaaagctccgagcgtcatttccagcgctccgcggtctccagctgcagcccacagagaaattaataagactccagaaaaaaaaaaaaaaaaggtgcggggggcggtgggaataaaacaaccctccacgcaaccaggccggct

SEQ ID NO: 229024 - DNA, 598 bp, Homo sapiens
  chr2:214148842-214149440
  hyper
ggtaattcagagacgacaacgaagtgggaaagaaattacagggtcaaagcgaaagaaaaccaagctgcttgggtaggaaggtgcaatgcaagccaattgtttactgtatcttgtccgctcccagagctgcgcccgagctctcgcgttaactaggcaacatcgttgccacggtaactgggaggcgcgggagggcgacagctccctggactcccggtaacccttacgtgcccggggctggtccgtggggcggggtgagagatgccggaatctcgcgagagctcccgggggccgttgggtagcgtcttcgctgttgcccttagggacggctgtgggcctgctgggggtgggggcccgaagcgccagagatggctgctcagcgagggatgcccagctccgccgtgagggtcctggaagaggcgttgggcatgggtttgacggcagccggggacgcgagggacacggcggacgcggtggcggctgagggcgcctactacctggaacgtatccttcccgtggaggcgcggcccgctgcgctggcgggtaatgggtgttgggacgaaggcgagggcctcccactggcggcgccttttgagccttg

SEQ ID NO: 229025 - DNA, 53 bp, Homo sapiens
  chr2:216176512-216176565
  hyper
ttgccccagaggccgtggagtggcctcactttggggtcgtgggcagatcgctg

SEQ ID NO: 229026 - DNA, 53 bp, Homo sapiens
  chr2:216300254-216300307
  hyper
tctctcagtaaagcgcgcacacactcgcacacacgcgcgcgcacaaaacttca

SEQ ID NO: 229027 - DNA, 784 bp, Homo sapiens
  chr2:216300982-216301766
  hyper
tgtgggttcgcagcgaacaaaagagatgctgatggcccgccaggactggggcaagacaactttttttcggtttcctttgcggtcatcaaactttttaggggatgggggaagggatgggaagcggctgggaggaaagggagtggctggacttgtgtgaagcgaaggggttgcaagacgctcccccttcccttttcttttttattgggggtggtggtagtgtttgaggacattgcgtcacctctcttcggggtggagggggggaatctctgcttataggagtgtattttgtgaggaagaaaacccataaaatatccacgaccttgcagctgttaagaatccagacttttcagtcccagggcggggctgcctttccccccatcccgctccctttctttggactaaagggtactgactcgggactcccttattttgtcttcacagctccctgttcggacttcttcccttctcagcgctgtgcctgtctggctctgagaaagggccagcgggcgaacggggagcaaaggggaacagagacctttaatgagcttctactaagtaccgggagttccgcggggcgctttgcagatcccggggaagttcagagaatgaagttttcttttgcaaggacaaagtaacagtttacttttttacacatgcaggaaagccttcctttcctggggatgggacgcccgtttccactgaaagtgaaatcactgtgaacaacctgaaaattggaaagttggaccagctgtggggagagaaaggtcttcgtgtcctttcccac

SEQ ID NO: 229028 - DNA, 445 bp, Homo sapiens
  chr2:216946187-216946632
  hyper
tctccctggtggtcgtaatttcgcccacacctgccccgtctttgctctgcagctccacactccctcagccccgccgagagctcctggctcccgtctccaggttaccccaggtcaccacagccacctctctgcaccagcggcccgctcacgtacccagctccaggagctccttcacgatggcttttccgatgcccgtggccccgccggtgacgatggccacttggccctgcagcaaaccaggcgccaggtagctcctgcccttagcccaggaggccatccctgcagcggggtgccagagcagctgagcgcaggcccttctgggtctcagggacattcgaggcgggcgggcggacagggcggtgctcgagcccacgtgaccaccagaaccccgcaccctccccggcccggccccgccccgcccgccggccgcggcaaagccgcatcc

SEQ ID NO: 229029 - DNA, 601 bp, Homo sapiens
  chr2:217236413-217237014
  hyper
gggggtgggggcggctggggagtgaggagggggagtaataaaaaatgaaataatactagtggaataattcggttctcaggcaagagtgcttctggagggtgggggcggaggagggcggctgccgggtctgctcggcagctctgcccccgctacccccaccaagggcggcctcggcccgctctctgcccccccaccccgccccttcctcctctccaccgcctctggctggctaggctcgctgttgctacctctcctcgcagatgcaacgaggtaaggcttgtttgcggtgccagctgaaggtggggaggggggagcgaagcagtgtggccgaggtgggaggcagccggcacttggctccagcttggtcctcgcgactccccaaaaccgtatataaatatatctcttataaaagccgagaggaagcaaatcagattccaggctgctgccaggtgttgtctcgtcttccgccgttgctcagcacccgccgctgcccccactggctcgattcccaaaggggtggtgctggaagggaggtggcggggcggcgagctgaccgtccgagaactggaaacaaggttcttgcagcgagggaggctctcgg

SEQ ID NO: 229030 - DNA, 40 bp, Homo sapiens
  chr2:217277057-217277097
  hyper
agctcccgtttctcgccaggctcccggcccgaactacaaa

SEQ ID NO: 229031 - DNA, 41 bp, Homo sapiens
  chr2:217363378-217363419
  hyper
tatggttgtttgtcgccatagtttgcgaatctgggtaaacc

SEQ ID NO: 229032 - DNA, 247 bp, Homo sapiens
  chr2:217497759-217498006
  hyper
tttgtgttccccagcggttagcccagtgccggccacaggggaagcgcgcaaacgaagtcctcgcgaactgaactgagagcagacaaaagcacgcgctcttctccaccgccacgccggtcctacccaaacccgcgagttatccgtattctccttcaggagtcatagtcaggccagaagagtgcggagggacggggcccgggaagagcagggaacccccagagcccgcagccaacgcggaggtgggcga

SEQ ID NO: 229033 - DNA, 678 bp, Homo sapiens
  chr2:217498225-217498903
  hyper
gccgcgctgccgaccgccagcatgctgccgagagtgggctgccccgcgctgccgctgccgccgccgccgctgctgccgctgctgctgctgctactgggcgcgagtggcggcggcggcggggcgcgcgcggaggtgctgttccgctgcccgccctgcacacccgagcgcctggccgcctgcgggcccccgccggttgcgccgcccgccgcggtggccgcagtggccggaggcgcccgcatgccatgcgcggagctcgtccgggagccgggctgcggctgctgctcggtgtgcgcccggctggagggcgaggcgtgcggcgtctacaccccgcgctgcggccaggggctgcgctgctatccccacccgggctccgagctgcccctgcaggcgctggtcatgggcgagggcacttgtgagaagcgccgggacgccgagtatggcgccagcccggagcaggttgcaggtaacgcggtctggaacaagtagttgggagaaacttggagggcagcggagaagcccgacgggcggctggaccttacggacggttttaggggcggcagagccgagaccttggaccaaatcaagggggactgttgctagcgggacgcggaagtcaggcccggggaggggaactggagttagagcaagtggaagagccctggcgactcatttggtggg

SEQ ID NO: 229034 - DNA, 87 bp, Homo sapiens
  chr2:217499272-217499359
  hyper
tctccatagggaacgagcagggctcttgctaccacgttgaatggaaaaataaaagggaggcatttggtaggcgaggggtctcctagc

SEQ ID NO: 229035 - DNA, 1001 bp, Homo sapiens
  chr2:217556788-217557789
  hyper
actttttggggacccgcccagtggttgtccggctaaaacgccctttccaggagcgcccactcccatcccatctgttcgggaagaagatgtcggcaccagcagcggtggagcgccgccaacccgcaacagcagccggccgggcacctgccttcggcggggtggagtcggagaggagtgctggggagggggcgggtagaagaggcggcttcgggttggcccaaaggcactcagaaggtgggggttgagcaaggggcggcagggaattctacaggggatcttgcttgggactgaagtgtcgtgtgtgtgtgtgtgtgtgtgtgtgtgtgtgtgtgtgtgtgatgcgccctccgtgctcgcctagcaattgcgcgcgcgtgcgctctgcgtgtacacccttcacactagccacatcacactacacgcttggtaaataataagtggagccaggatgcggctgagtgacaccttacgttctttcggtgtgactggattgttacccagggcggtggctcccaagccgggaaatcaattaatgttttccttctccgctaggcttttccaaatccacatcccccaagatgaaggcgggcaggaccgcctttgaaaagtggatcttaataaaaataatctcacaagccggtctctggggttcccagagcctgcacatcctccccttttcctctttttgcaggctgcaacctgcaaaaagatcgactttttgcaggtttggagatcgactacctcttgcaaagctagaggggctggcccctgcgccactcaaaccctgcagggtttgcggggactgaggctgaacacaggaagctctccggcctcctggcaagcgcggacgcactcctctcctgcactatagtgactgaaatttgcacttcagaaaactcatgttagggtgctcgtgagtaacggaaagggacagggagggagaaggggattgcccccgtaactaaactgtctccgtaactaaactacgccaaataaacatt

SEQ ID NO: 229036 - DNA, 104 bp, Homo sapiens
  chr2:217558008-217558112
  hyper
ggggcggcgcaacccgggggcggggcaagcggaggcgaggctcccagtgcgtggcttttctgtctccgccccctgaattttgcattctgcgtttccagggcccc

SEQ ID NO: 229037 - DNA, 59 bp, Homo sapiens
  chr2:217558852-217558911
  hyper
ggggatttggaccttgtgaccgaataagagctcagaatcagtattcggacagagtaggg

SEQ ID NO: 229038 - DNA, 423 bp, Homo sapiens
  chr2:217559571-217559994
  hyper
gcccccggagatttttttgtttttgtttttgttttaaaatttctggcaggtagagcaggtgccctcccccagacacttgcaaaaatgtagagagaggtggagggctggggtgcctgcgagcaggtcccagttgcaagaattaaagccttgcaacaggttgggggaagcagggcagcgccaggtgcacgcagtgagcggaggccggagaaaccctcaagcctgagcgggtcagaattataggggaaaaaaagccacaaaattgttcacccccaagcaaccaccgaaataatgagatcggatgcagtggagatggcgttgggggtgggagagaaaaatggatttatctttaaaatttttgcttaaaatctaaaatacaccccgctttctaaccctcagctgccagcggtgcgcggcgccgcagaa

SEQ ID NO: 229039 - DNA, 241 bp, Homo sapiens
  chr2:218767428-218767669
  hyper
ccgctctgctccaccgggcggggaggggaggggaggcatggggaggaagccaccctggacagtgaccccagtgcagaggatgggggacgaacagctgggactgtcatcccctgatgaatcactgggctgccctctcactgacggggcttcctgttttctgcaaagtttgggggcacgtgacccttgctggcggacagcagacatgcacggtgacacgtctgagtgtcggtacacacagaca

SEQ ID NO: 229040 - DNA, 334 bp, Homo sapiens
  chr2:218899131-218899465
  hyper
atataggtgcaggacggagccgaggatagaaaccctcgggcatccgttgtgctggtttttagatgcggttcctggggtttgtgaaaacagccgtcctcccaggcccctgctccacttccctaatactagcccctggagcagccgagcctggagaaacgaggacccggcatggaaagaccccaggctcaaggaggcagagcacagccagggtgggggaccccagcccaccggggaaacccgcccggcccattgctgcgcacaggatctcactggtggtctcacatccatccttttgggaatgggatcaggcctggggggtcggcactgatgacca

SEQ ID NO: 229041 - DNA, 63 bp, Homo sapiens
  chr2:219157359-219157422
  hyper
cctctcagagccccgacgacgcctcactaataacacaggggtattttcggatttaaaggcaat

SEQ ID NO: 229042 - DNA, 87 bp, Homo sapiens
  chr2:219232221-219232308
  hyper
cgaagttcctggaccggaaggtgaggggaggctccaccagcctggggttcccattcccccatgggccttaaattcattactgatctc

SEQ ID NO: 229043 - DNA, 40 bp, Homo sapiens
  chr2:219261657-219261697
  hyper
ccctgtggcaggatgcggtgaagggcgctgcccgtgacgc

SEQ ID NO: 229044 - DNA, 124 bp, Homo sapiens
  chr2:219263990-219264114
  hyper
agggcagagagttagaatttcacgtcctacagaccgggggcacctcgccctggggctgcggggggcggcgaccgtcccattcaagagcgtgattctgaggtttgcacagctgtttcgggccagc

SEQ ID NO: 229045 - DNA, 222 bp, Homo sapiens
  chr2:219523966-219524188
  hyper
cagtacctccttccgagagttcccagcgcccaggcccaccctgatcccggggctcgaaaaactttgcctccagctcgctccacccgcattcccttcccagttccgccccgcagccgctcactcacctccagacccagagccggcgggagccgcatctctatggtcggccgcggctggaacggcccccggggcccgctttgtgcgaccgcctccggctcagcc

SEQ ID NO: 229046 - DNA, 899 bp, Homo sapiens
  chr2:219646295-219647194
  hyper
aaatatcctgccttggcagacgcggcagggaggtgcgtggagggagaattgaattaaaaaaaaaaacaacaaaacacgaatatttagatttctttgttcagcggcccccctccagggatcagatgactggcccccctcgctccgaactgactccgggatcaatccggaaggccattgggagaagccgagggcagcttagccacggccggttcccgttccctccaggacgcgagggtcgccttgggtggggaaccgcgaccgggcgaggacctatcccggtgtggggcttcccgatttcgaaagaatctcgctgcacccccgcccagagttcagaccaagcgaaaagttatttgagaggcctcgggggcgcggggtgaggagtcgtggcggaggccttggtcggggcgccgtggatatccccgagtcaccgcgtccctctcctgcagctcccgcgtcgctgggaggagcgagggagcgagcgggaaggggtctagctggcctttgctcggccctccccagcgcccggctttgaacccgccctgcactgctgtctgggcgggtccggggactcagcactcgacccaaaggtgcaggcgcgcgagcacaacccatggctgcgctgggctgcgcgaggctgaggtgggcgctgcgaggggccggccgtggcctctgcccccacggggccagagccaaggccgcgatccctgccgccctcccctcggacaaggccaccggagctcccggagccgggcctggtgtccggcggcggcaacggagcttagaggagattccacgtctaggacagctgcgcttcttctttcagctgttcgttcaaggctatgccctgcaactgcaccagttacaggtaacccgcgggggcatcgcgtcctggggatggg

SEQ ID NO: 229047 - DNA, 1597 bp, Homo sapiens
  chr2:219723487-219725084
  hyper
tgcccactgccagccgaatggcatgatgaatggagctgtccctcttccccacggagcctttgatctccccctcgtggggagggggccaggggcatcaaagacatttttgtggcattagaaaatctgataaacgccatctcacctgcagctggctctcccaccccttctacccgggccaggttgggggaggaactcgaggcagggactcttggacacgcgaggccgggctaaagcgaattctgacccctcgatctcttgaaagtctgcgacctccattctcccgctcgcttacaagtgccagcgcttgcgcgcacgccctggagcggctactcttgccctctcatttcccccacctccccgccctagaacgcgggcttgagaggtgggatggctgggggagcgagagcggaggcccagggcttcctcccttcttcaaggagaggctgacgaaggggcatgaggcatcgaacagggacacggaaagagatgacccctccagcatccgcctgtcgggcggtccagtttgacaaccctcgccgaagcaccccgcgccccaggccaacttcctctcttgcctccgcgccagcatctccctccgcaccgccccccgccccaaactccctcattcctgggaagttttctctctttacagtcaacaaacctgtcaaacgtctcccttccagcccgtcccccattcctcagctcctctttctcccccctcacccctctctactcttcttcccagcccttccttgcccccgactccaggcggccgcgagcggcggggggctccaagtccgagagaggcgaggcgagggggcgaagcgggcgggtcccacagcccgaagcgcgctggggccccgccccggcaccccgctcccgccctccgctgcgctccgcgccagccgccccggggcgcacggctcgctcccgagagtcccgctgcctgactgtcgcaactgccacctccctccggccccctgccccccgcccccgcctcggccccgctcccctcccacctccgcccccggctctgatttcttctcccgagcgagctccgcaggagacacaggcgctggctgccccgtccgctctccgcctccgccgcgccctcctcgcccgggatgggcccccccgccgccgccggatccctcgcctcccggccgccgccgttgcgctcgccgcgctcgcactgaagcccgggccctcgcgcgccgcggttcgccccgcagcctcgccccctgcccacccgggcggccgtagggcggtcacgatgctgccgcccttaccctcccgcctcgggctgctgctgctgctgctcctgtgcccggcgcacgtcggcggactgtggtggtgagtccggctgtcctggcgcggctctggaccctggagggtggggaccccgggacccaggacagactggggtgttccgcagcctcccggctctacctgctctccgagcccagctttctggcctcggccgggggcgtttctgaactccacttcgacgttcctaaccctcgggaacattctattgtgtttcctcctcccgggttctctcccaccccccgccaagttatgcgctcacccagctcac

SEQ ID NO: 229048 - DNA, 38 bp, Homo sapiens
  chr2:219725693-219725731
  hyper
aggtctccagagccgcaaaccctcgcccggaatagctc

SEQ ID NO: 229049 - DNA, 177 bp, Homo sapiens
  chr2:219735642-219735819
  hyper
gcatgtcacagctcccgctgcgggctgagtggggctggtcctcctcccttccaccccaagcccttttttgggttacacccctgacctgctattctctgctttccagggctgtgggcagccccttggttatggaccctaccagcatctgcaggaaggcacggcggctggccgggcggc

SEQ ID NO: 229050 - DNA, 57 bp, Homo sapiens
  chr2:219735999-219736056
  hyper
tgctttctccctgctgtgggacccgaggagaggagaactggttcgctgaagttgcct

SEQ ID NO: 229051 - DNA, 35 bp, Homo sapiens
  chr2:219736656-219736691
  hyper
tgtgggggagtgcgcacgggcggaaagatgggctg

SEQ ID NO: 229052 - DNA, 85 bp, Homo sapiens
  chr2:219744551-219744636
  hyper
ataaactatctcaacggccacttctagggttaaaagtctctctaacgcctcctcccaggacgtgccaccccgggcgctcctacgc

SEQ ID NO: 229053 - DNA, 107 bp, Homo sapiens
  chr2:219748349-219748456
  hyper
tggcggcatgcagccgcgaactaatccccgcgggccgcggcagacggctcccggccccagccgcgccgctctcagagggcaaccccctccctgccccgctctcccgc

SEQ ID NO: 229054 - DNA, 327 bp, Homo sapiens
  chr2:219757351-219757678
  hyper
ctgcctggttgtgggaccctcgctcccggcctcagcgtttgcctctgtataatgggagtgggtttcagaagcaggccaggctaagcgctgggaggggagtggggctgcgcgccgtgtcacccctcacggtgcctccctccgcaggcagtgatggagaacatgcggcggaagtgcaagtgccacggcacgtcaggcagctgccagctcaagacgtgctggcaggtgacgcccgagttccgcaccgtgggggcgctgctgcgcagccgcttccaccgcgccacgctcatccggccgcacaaccgcaacggcggccagctggagccgggc

SEQ ID NO: 229055 - DNA, 121 bp, Homo sapiens
  chr2:219757978-219758099
  hyper
agcgtctgcaagtgagcggcccggggtcccctgggccctgatcgaggtcccctcctggagcctggccctctgaggcttacggtcttggcaaggcagcatcgccttggctcttgggaagagg

SEQ ID NO: 229056 - DNA, 255 bp, Homo sapiens
  chr2:219761613-219761868
  hyper
ctccctaggctcgcggtgtatggaagctgggacatcccatgattcctctctggaccttgtccttgaagttagggttggcgcataggaggtctctccctggagcggctaacccctgctggtgggttgggaggtataggatggtgaggaagccctttgccacttcgcggctgcgcactttggaatgcccccggttactgtggtaaccagggcagccgaggtgtgtcctcggggctgggaggcgcccgcccccccacc

SEQ ID NO: 229057 - DNA, 232 bp, Homo sapiens
  chr2:219762326-219762558
  hyper
agccctgcaattaagcccctcgcccgcccctgcgccgcccgcccgtcctccgccaggccgggtctgcgccgccaattgcagcagcacgcagcagctgattacccctaccggagcctggggagcggccaggggtggggacagcgggcaggtcaagggggcagggtccctggggttgtccctggccccggggtccttcactggagcttctgattctagcgcagcttctccgccc

SEQ ID NO: 229058 - DNA, 183 bp, Homo sapiens
  chr2:219763162-219763345
  hyper
gggccttggggcgcgtagccccagttaattgggtgggtctcgggttcaactcatccgctgccctttgacttgggaaccacccgccctctgcctcgcacggcgcccaaatccgacttcacgggcccattgctttccgccggccgcggccttgctggccctctttcctccgtccctgtgtgctta

SEQ ID NO: 229059 - DNA, 435 bp, Homo sapiens
  chr2:219773632-219774067
  hyper
ggacttaaaggagccggtggccttaagagtccagtcgatgctgccacgtgatgggcctgggggaaagccccgatcccaagcgccaacagagcagccgacctcagccaacctcaaccaacacgtaggcgaggatgcccagggtgagcgccagcggcgagaagacgcgctatcgcgagatcggtgggacctacgcgtttacaggccggaagtgaggggcgggcctaagggggcgcgctccttttgaaacctgagacggagacctgcggagggcgagggctggttggaggtcgctgtcctttctgggaaccaagcaggggtcgcaggagggcggggatgggtcagcggggatctctgagtggggttcggctgagagaggccacagtttcatctttgggaagctaccctgggccggccacgcgccgtgagccggactgg

SEQ ID NO: 229060 - DNA, 31 bp, Homo sapiens
  chr2:219824037-219824068
  hyper
gtttatctgctaccgcgacccagtgcatcag

SEQ ID NO: 229061 - DNA, 464 bp, Homo sapiens
  chr2:219824277-219824741
  hyper
atcaggagtgcaactcgggagcggattggccgcgtgaggcggggcacggcgcgacgaaaaaaggggcccaaggggtggggctgacgctgcagctggcgcagctcaggattagagcagcggagccgcctagcagccaccttcccccgccagtccgcgcgcccgggccggggctaggccccccaccgccgggtcccccggggctgcagtagcagcggcgccgcccgcggctcccgctggggcctgggcgccggccccgctctgcaggatgggcacagtgctgtctctttcgcctgcctcctcggccaagggccggaggcccggcgggctgcccgaggagaagaagaaggcgccgcccgcgggggacgaggcgctggggggctacggggcgccgccagtgggcaagggcggcaaaggcgagagccgactcaagcggccgtccgtgctcatctcggcgctcacctgga

SEQ ID NO: 229062 - DNA, 40 bp, Homo sapiens
  chr2:219825941-219825981
  hyper
cttcagcccattccccctcggttttatccatttccttgcc

SEQ ID NO: 229063 - DNA, 120 bp, Homo sapiens
  chr2:219826729-219826849
  hyper
accggaatcctcccggtagggtaccagggactgagttgggcctggggccgtgtccaaggtgccaatgatgcgggccgacagagcgggccgcactgtctgtctgtccgtctgtcccggaaa

SEQ ID NO: 229064 - DNA, 546 bp, Homo sapiens
  chr2:219827639-219828185
  hyper
cctggcttcaacagagtgcccgcggctccgaccctagtctggccgtggccgagaagatccggaaagaacccggggggacctgccaagacgaggcccgggttcgctgtccgtggtgctgaatggcgcgctcgggcggggtcggggcttgtaagggcaggaagagttgcagactcggcctcaactaggtcttccggataatttgggaatagggtgtcatctattctggcggcgagttatagaagtctggctccagaacccaaaaatgtcggtccccacttgccctcccgggacgacaggactcgattcccctggcctcagcccagcgcccttgtaacctgcctggagccggaaatccccagtccagatttgtgaattgagttcccggagggagggggagagctggcggaagggaaggcgggagcagccgcccattggctggaatttggcgcagtcagcgcggtgccgtcatctctcttggtttgggaggagggagggaggatcactagggtcactccgcggctgtcggctgtcgccatagtaaccaga

SEQ ID NO: 229065 - DNA, 650 bp, Homo sapiens
  chr2:219845551-219846201
  hyper
gggtgaagggcaaccggaagggagtgaggtgagctggggtcgcctggcagggtgggtatgaggcaaggcggctccctcgggctgagcccaccatccaggcctctcgctgcctgcgggcggcgcccaagcccgcgccaccctccttctcgggacgttttccttggcagttctctgctcaggcccgagatgagcctctccctgctttcccctaaccacgggttctggcgcagcaaagaacagagagagaggaggcagcggagagctcaggagctttaatggggctgaaagggtcagaaacacaccgggagtttctcctgggagtgtggggacaggaggaagggggccgtgtgtcacggaggacggtggctttcaccaaacctgctcaggtcccaggaaggaggaccgtgagaggcctccacgtgctgaggtgggagcagttccttggggaagagcaaaagtgggaaaagatttggcactcgttaaagagtagtgatattgaatggggcttctaggagccaggcggaaatgcactggagtggtggggagacaagagaggtccacaaatcccctccgggacctggagacctagaagaaaaaaagtgaaagagggcgcacatcgccctcctcaggggactgcggggtgggacagg

SEQ ID NO: 229066 - DNA, 104 bp, Homo sapiens
  chr2:219846981-219847085
  hyper
tggggaggggggcggtcagccacaggcgggagcggggaggcgggaactggggaagagtgctggcgggaaactgacccaccccggcaggaaccggcactggggga

SEQ ID NO: 229067 - DNA, 569 bp, Homo sapiens
  chr2:219847265-219847834
  hyper
ggaagcattgcctccccccacgtgagcgcagcggcgcaccaaggcacttggctttccaaggcgagcaaggacagatatccgccgccactctccatctcagccgggcgcccttatttagggaaaagacgcacaaccgtacagggcggccttgggcagaatgatcggactgccccatcccagctggaccacatccagaggtgggaagggacaggcgtgcagcaggacgaccccaaccactgctggacaaggcccagctagtcccgagtccccaaagacgtagttggacaggctactcctgaggtggagtggtggctggctcccttgggacaccacatccgacaggagtaggaacgaacagtggccccctatacgtgacaggaggggcaagctctcatgggctcactatcctagccaccttcgggtgcgcaggcctctgcgctggccctgagaatttggcctcttattttcggaacaggcgggattccctgcctacgaaggtgccatagttctcggggcctgatgaacaactctgaggaggggaacggaccgagcagctgttgtgcttggct

SEQ ID NO: 229068 - DNA, 408 bp, Homo sapiens
  chr2:219848914-219849322
  hyper
aacctcgcctccgccgcccagcgcgccggccatctcacctttctgaaccgcggggctcagcggcccccagctcgggttcttcccgtccttgaagagaccgtctccgacgggatctgcaagcagcagaagaaaagaatcaggagaaccccgggcggaagttgtgggcttgacaaaagggccccgggccaaggcttaaggggggtgctgtggtccccaggcgcgaggctgggggcccgggccacccggctcctcctcccggagcctggtccaggcgcgctgcgcggagcccctccatagagcccaagtcaggaaacgcgtccaggaaaaaggaaatccgctttccgaaggggccggctggagccttataaagccgagcggggaactgcgccagccgagctggagcgcgaa

SEQ ID NO: 229069 - DNA, 114 bp, Homo sapiens
  chr2:219856513-219856627
  hyper
acatggctgtgtgacgacagaggcactcactcacacgtgtggacgatggaatgtgggggaaccctgggcactcaggactgggatggcctcagcgctgtccgtggtgatgatttc

SEQ ID NO: 229070 - DNA, 943 bp, Homo sapiens
  chr2:219857983-219858926
  hyper
tagcggatgaagaacccgggggctggacccggcctagctctggacccggctgccaggggctcgcagtcttcccgcgctcccctcccttccccaccccagcagagggcattcaccgggtgggtgagcgcggcacgcgagggaaatggaccggctgcgaggctgcgcgcggccgggcgggccgagctttatacctgggccttgtccccctgtccgcaccctttccctcgggggtggggtcgctgagtcagcaggcaggctgcggtcggctctggtctccgctggggagccgaggcctctcccgcagccgccgctgtggccccagcccgcgggaaagacaacagaaagtgctgaggcgcgcaccccgcgcccgccgcagcccaggctgactccgcgctttctttctttccagcctgagccaggcagggcacgccaggcctcggggcagaacgcgccctccctgtcccggccctcggggacgaagggacctggcctcccctgggcctcgggctaagaccgcgctgctgactcgctgagcggaagttcttcccagagtctaatcgccagccttcctcggccctagtccaggcctctcttttgggcgatgctaaggcggaggtagagagggctctgcccaaaggattcgcttcatgtgctcagtcctctttttcctgggggatcggtccatcgcggcccttttcctcccaagcgtgcgttcccagatcctgcgccgcgcccccggggtgtcctcgggcccgggaaggagaggaggcggtggtcaggactcgccacgcggcggcgccgggcgctggaaacgaccgcccgagggccgcgcggtttactcagtgtttaggcataatagccacctagggagtggctcgccgcgggaggtaggaagaatgttgggctttagctcggctcaaccggtgccgctgcgggtctccca

SEQ ID NO: 229071 - DNA, 1450 bp, Homo sapiens
  chr2:219866570-219868020
  hyper
ggcggccaccgcaggtgcgcacctggcccgcccctcctttcccagccaccctccgcccggctttcctggcccctccgcccggcccagcctagcttggcttcgtccccagcccacgccttggagcttgtcccggagcccgggctccgtgtgctcttatactgcctgttcagtccccgcccccagacacacacactcacacctgtccaggcgcccgtttgctcggggcaaatattgactcatggaggcggagcgctcccccctcccccgcccgggctctgagaccggagcttctccgaggccttggtggcgggggcggaggggagggtgctggggaccctgggcgcctctggaacaacaccagatgtcacttttccacccacctgcctctgggagggaggagccgagaagcagaggacagaagctcccgggcgggggttaggaggaaccgagaggtgggtatccatcctcgtctgaggactgattcacagtgggagtcgcttagcagggtctgtggcccgaaatccagtggtgacctcgacccgccccagcctagttcctggccctccgcggcgtgcctcagttcttcctccccagcctcttgggcactcggagctcggcaaatgctaaggggctggccctgggggtgctaagcctccgagcaggcgcggcgcggaaaggtgaggggtggccgccctgcccagtggacacctgcttcgctggccaggcctggcactcagttactgtgcaccaaggtgcgctggggcaaaggccagccaggccccgtccggagcgccctccactggccagacccggtccagcggccggcagctagcggccaggtctcagtccagctgcagtgtgggcggagaggtgcatcctcccgggccctaagttcccgccgcgcctctgcagtccgcccgggctgctccctgccatccttccctctcagagctcgcgcgcgcgttccccctcgtcggggaaataaagtcaaggtagatacagaaaaaagactagatgcttttactggcggtggagagggggccaggcgtgacccctagcggcatgtcggagaggctgggcgcgggcatttacggaaggtcggtaggaagtggcaccaccgggtggagtacctctgcttgctgcgtcggcagcagcgtgtccggggtcagactcctggaagacaaaaagtcccaggtaggcgtgggggcgaggcttcgggcagagcctggctgcccccgtggcccctctcgcgcggtctgcgcggccgctggtcccggcgcccttacctgggcacgcagaacggcggcagggcgatgacgcgtggccgcgaggtgagtaccacctccccgcggctcgcctccaccaggatgttctggatcatgttctccagcagcgcctcctgcaggttggcgaaggccgggagcctgcgagggggcgggggctagcatga

SEQ ID NO: 229072 - DNA, 198 bp, Homo sapiens; identical to SEQ ID NO: 198707
  chr2:219906102-219906300
  hyper

SEQ ID NO: 229073 - DNA, 477 bp, Homo sapiens
  chr2:219922758-219923235
  hyper
cacctttcagcgcccggtccctctgtgcctccaaggcaggagggccagccagcggccgggagggaggagtggcagcagagccgactgcctgcggccggcctgcgaggcgtgcaaggcccgaggtgcccagtaggtgtcaccgcagcctcagggctgaggcctggggacgacaggctctggaggcgcggcaggtgcagagcgtctcggtagcttcagggggtgtgttggaggggaatcgccggcctgcctggatccctcgagcaccaccgaggattcccgccgggaccctcttataatcttaaaccggcccacaaccccgccagagatgacagggccagggaaccagaaaccggcggattagcgccagggccgcccaatggggggccacatgcaacgtcttcctctgcaaggcgcaaaaggggctgacaatcccagacctccaggacctctgcaccggtgccccgcccctataccgta

SEQ ID NO: 229074 - DNA, 2369 bp, Homo sapiens
  chr2:219923708-219926077
  hyper
cccgcacctatgcccgcctgcagccctggttccccgcctctctccctcactgccaccgccccctctcgggtccagagcccgggcgtgcgctgtcaatgattgcccagcccgtggcccggatccttatctgcattcctcggcgcccggcccggcccggccaccagccaaccttcggccccgacactggccggccagccccggcgccagggtgcatgctgagggccctgagtctagctgctcttcccaacggatctagaaagccaggggcctgctttcagggggaagcctcgggagaccccgaaggaagggggtgaaggtctctcccctcgcggacctggctgctgggaaggaatttgcgcctctaagcttgggtggagcgcgggtcctactccagcatgcagagactagcgtcagccctggtccctgcctccctcggcatctcagcccctcttttccactccttcccgtccccaccaccaagcccaggaatcccctaagctcagtcccagagcccgaaggccccaataacccacccttccaccgcagtagcacccctcagctctccggacagacacgtgggctcgctgggcaggttccttttcccacctccgcctcccgattcaactcttcctcgctgttcttaaccccagacccagccgggacgctgctcctggaaggggcagcccgtagaaccaagagcgcacagggaggaaaggccgtggtgaccctacgcacccagagattctttgcctcaggggtgccgaaaagtttcaaaatgaaaggggcacagctgtgcagaaggttaggccgggagggactgcgtgggtcctggaggcgcaggaggcagccgggtagaggtacctccgggtgcagcgtctggctgagctgccagtactttggggcagaggagccgccgccaacctgctgggctgtggggcttggcagcggggagctcttctagcagtctcctccgggcttggggatgccgacactcctgcctggacccctggccagcccatcttgggcaggaggcagcggggcttggcgagaggggcaggtgccagggagcgtgccagccagtcgagaaaatgtgccagggggtgggtagggccgggcaggtggccgtgcttcggtggcggcgcgctggtagggcggatcgcgctcacctgggtcatgaggcggtcggcgcctgtgttctcctcgtccttgaagatgatgtctggattgtaattgggggtgagctccttgaagcgctcggagctgcgagcgatcttgccttcatagcgtccgctggcgcccagggtcttctcgggcacattggggctgaactgcttgtaggcgagcggcacgagtttgcgtggcggtcgccggcggctgcccaccacccgacccggcccgcagccccatgccgccggcaccaccagcagcagcaacaggaccaggcagaagtgcagtcggggccggagccgggcgggagacatggccggggagcccgggggagcggcgggcgaggtctcctggtgggctgatgggcaggcgcgtcgacgggagcgctgcgggggctcaggcgtccgggtggctccggggggctccaggcgggggcgccatgggcggcgtggtgcggccagggccggcgggactcaagtgcggggcgggggcccagggcccgagctggtggcggcgcgctgtccccctcggcgcctcgactctgagctgccgggctcgccggccgccaataaataggccggcccgtttgttttggcaacgcggcggcggcggggggcggcgggcggcggggctgcgggccgccgggctgggctgggctggccgggccggcgggctgcagggccccgcggttagcaccccggcccggcggtcaggcggctcgggcggagcgggagctgctgccgtctgcggcgcagcccggggccgagtgagaggggaaatggaagagatccgggctcgggccccgcgcagaccgcaccctacccatgtccctgcctcctgtgcgctcgacagcgaacctgcagcaagggcagcacagcctcctccccctcgggcgggcggccccggcactagccagccctcgtcccgctcgcgcctccgccgcgcgtccgcccgcccgctgccctctgcgccccctgcgctgcccgagtttgccctccccgcctggacgcgccccaccccgccctggcctcgcctaccggctcttcgcggctctggggtgccccgccaggcgcaaacctcccggacaggagctgccacccccacggagaccgcaacccacggcgcggccggacgcgaggggcggggggcagtggccggaccgcacagccgcctacggtgtcccctgcggggaagcaaaccca

SEQ ID NO: 229075 - DNA, 36 bp, Homo sapiens
  chr2:220025698-220025734
  hyper
cgtcttggagtcacgctggccgagtggaaagaatag

SEQ ID NO: 229076 - DNA, 138 bp, Homo sapiens
  chr2:220042082-220042220
  hyper
tgaacaagccaggcgtagcaatggagaagttaatgtgaataagacgaaacgcacaacaggaagttgttcccagttgctttttaggagagatattatacatactcagcaatgcatatgaaaagcgtctgaaaggacaca

SEQ ID NO: 229077 - DNA, 53 bp, Homo sapiens
  chr2:220042710-220042763
  hyper
cacacggggataccggggcagcaccacactccctagccgccctgcctactgtg

SEQ ID NO: 229078 - DNA, 112 bp, Homo sapiens
  chr2:220093844-220093956
  hyper
gtggaccagggcccgtggagccccggccggctgggcctgggctcaggggttcctgcggatgttgcagggatcgagtcagccttacagctgatagcccgggtgggttggcttg

SEQ ID NO: 229079 - DNA, 327 bp, Homo sapiens
  chr2:220094205-220094532
  hyper
gcaaggccagacacggggcctgggattccaataaccggtctcacgtcttacctcaggaacagcgacccgggtgattccagaggctccgccggctccgctcggctcggctcggctcggcgcgacccgcggcgctaggccgggtgtctgccactcactgtcacccgcagccaggctggccaataagcacggggggcggagacacaacggccaattctcggcttcagggacgggactaaagtctcgaggcgggtcttggacagtcagcggcccaatagtgtgctctacgtggggcggggctcaggtgcggacgccgccggttgtcctctt

SEQ ID NO: 229080 - DNA, 34 bp, Homo sapiens; identical to SEQ ID NO: 198712
  chr2:220118641-220118675
  hyper

SEQ ID NO: 229081 - DNA, 101 bp, Homo sapiens
  chr2:220143826-220143927
  hyper
aagcatggatcatcgctcatgtttataagaaagtgacagaggaacctgggggccgagcggcttgtttgtgggctgccccagcctccgtgcgagcgcttctc

SEQ ID NO: 229082 - DNA, 134 bp, Homo sapiens; identical to SEQ ID NO: 198713
  chr2:220173086-220173220
  hyper

SEQ ID NO: 229083 - DNA, 411 bp, Homo sapiens
  chr2:220196349-220196760
  hyper
gaggagaagggaaagagcttcgggaaggggagctgattctctgaggcagcgttcccaggactggtgggaaggagtggtgacccgctcgggctcggcgtggacccggagcgcgcctggcgctgtccgtggtgctgagaggtggggaggccagcgtggcggcggcgctgggcggaatgtgggcgagacatctccgcaaggcttggcggtccttccccacggccctcatcctctcattgccaccaggcctcctcccacagctgttcctgaatccgctgcattggcctctaaaaccaaaaatcagggagagggggcgacagactaggagtttgcgctctcttccccatgcgctctgcgcaggagttctcgagtgtgcgcagtctggcacgtgagtcagcgcggggtctacgcgga

SEQ ID NO: 229084 - DNA, 204 bp, Homo sapiens
  chr2:220197351-220197555
  hyper
cctcccaggctcggcgcgctcactccccggccaagtctcagtgaaggtagcggccacggccgaggggctgagcggggctgcagcttcccaccagcccgcgactccgaatctgtttaaccctcctcggcagttcagccaatcgtgagcgggccctgcccctgcggtcgcctccccagctccttcccctaccgcctccccaccctc

SEQ ID NO: 229085 - DNA, 523 bp, Homo sapiens
  chr2:220223334-220223857
  hyper
ccttgacccctcagcgcgtctcacatggcccggatctcggtcccttgggcactccctcttgcccaactccgaattggagttcttgtagttctagtttccaccccgtcttccgacgtttaagaccccgcttccaagacgccctctggctttctcttcccatcccgcacacttccctagcttctgagctgtgtgcacccaccaacccgcagccctccctcaggatcgcccctgcccttcccccaggtttcctcctgacggtggggactaatggcgtcccagccccccgggcggctgctcagcagcaggaagcagagaatcagaggcacccccgctgggccccgagccccatgcgcgcgcaggggcccccgcatcttgttgggcgcgcgctgccccgcctgcaccgcagcgaccgcggccagagccaggccaggcggctctgcgcgtccctctctccgcagcgcggccagtcggaggccggctgcagcaaggtccccaaccccggctctcccgtgtcttggcgtca

SEQ ID NO: 229086 - DNA, 406 bp, Homo sapiens
  chr2:220283282-220283688
  hyper
cgtgttcccgcgggcgggtttcggctctaagggctcctccagctcggtgacgtcccgcgtgtaccaggtgtcgcgcacgtcgggcggggccgggggcctggggtcgctgcgggccagccggctggggaccacccgcacgccctcctcctacggcgcaggcgagctgctggacttctcactggccgacgcggtgaaccaggagtttctgaccacgcgcaccaacgagaaggtggagctgcaggagctcaatgaccgcttcgccaactacatcgagaaggtgcgcttcctggagcagcagaacgcggcgctcgccgccgaagtgaaccggctcaagggccgcgagccgacgcgagtggccgagctctacgaggaggagctgcgggagctgcggcgccaggtggaggtg

SEQ ID NO: 229087 - DNA, 638 bp, Homo sapiens
  chr2:220299485-220300123
  hyper
gctccctcgcaacccgagccggggggcctaaaaatagcccccaggcgcaatcgccggccgccccggtgaccttctgggtagcacaggccgaaggcgggcgggcagcaggaaggcaggccgccggccccccagacttgtctcctagggcaccgtcccgcgggtgcccccgtggccgcccagttccggcgtccccccagcccagctctcagtggccatgcagaaagcccggggcacgcgaggcgaggatgcgggcacgagggcaccccccagccccggagtgcccccgaaaagggccaaggtgggggccggcggcggggctcctgtggccgtggccggggcgccagtcttcctgcggcccctgaagaacgcggcggtgtgcgcgggcagcgacgtgcggctgcgggtggtggtgagcgggacgccccagcccagcctccgctggttccgggatgggcagctcctgcccgcgccggcccccgagcccagctgcctgtggctgcggcgctgcggggcgcaggacgccggcgtgtacagctgcatggcccagaacgagcggggccgggcctcctgcgaggcggtgctcacagtgctggaggtcggaggtaaagggcaggtgggggccgcgcccggcaggggcg

SEQ ID NO: 229088 - DNA, 667 bp, Homo sapiens
  chr2:220348585-220349252
  hyper
gtgaggcggagccccggggccggcaccgccgagcgggggcgcccctcgagatccccgtggccaggcttggggcccgtaggctacaggagtctccttccctgtctgccctcagcgaggcccagccatccagccctgcacggcccagcgcccccaaacccagtacccctaagtctgcagaaccttctgccaccacacctagtgatgctccgcagccccccgcaccccagcctgcccaagacaaggctccagagcccaggccagaaccagtccgagcctccaagcctgcaccacccccccaggccctgcaaaccctagcgctgcccctcacaccctatgctcagatcattcagtccctccagctgtcaggccacgcccagggcccctcgcagggccctgccgcgccgccttcagagcccaagccccacgctgctgtctttgccagggtggcctccccacctccgggagcccccgagaagcgcgtgccctcagccgggggtcccccggtgctagccgagaaagcccgagttcccacggtgccccccaggccaggcagcagtctcagtagcagcatcgaaaacttggagtcggaggccgtgttcgaggccaagttcaagcgcagccgcgagtcgcccctgtcgctggggctgcggctgctgagccgttcgcg

SEQ ID NO: 229089 - DNA, 697 bp, Homo sapiens
  chr2:220361398-220362095
  hyper
ctcttccctaccaagccacacgtttaggggtctggccggtccagggggcaggtaggagatggtgcgctcgcggtaagggctgtggccgggcctgtcttaggaactctgggccctgactcggcccgcgggtaggtcccggaaggagctgcgcgagaaggggccgccgcgggtgctggagccgctgaaggacgtggtgctgatcgaaggcagcgcggccaagctcacttgccgcatttcggctttcccggacccattcatccgctggagtaaggacggcaaggagctacgtgacggtcccaagtaccgctacgtcttcgaggaccctgacgtggtggcactggtggtgcgcgacggcgagctggcagacctgggccagtacagcatcaacgtcaccaaccccttcggccagtgctccgactcggcgcgcatcctcgtggaaggtacgcgcgccccgggcgcagcgccagggcgcagaccagcaccactcagccagagcccgcagcccggtccagctgcgcgtgtttacctctgggcctagctacagggtccccgccagcccagctctgggcacggcctggggcgcatcgccgcgccagccaagtgcgtccttccctacctcgggatccagctccacccgggctgagcagtcagctgtggacttccatcacgcggctccgggtccccaaggtcacacagc

SEQ ID NO: 229090 - DNA, 323 bp, Homo sapiens
  chr2:220362304-220362627
  hyper
gaggctaatgatttgctcaacgtcacactgcgagtttaaatgcatctgtatttagtgccgggtattagccggtgaggtgatgccctgcctcatctccgggtccttcacggggtttcgctcccctttccttccgctagtcccgacgaagattcaaaagggacccgacaacactaaggcgcgcaaaggcaccaccgtgacgctgactgcggagatcctgggagagcctgcgcccgacgtaggctggaccaaggacggggaggacatcgaggaggatgacaggcgagggccgggacctgcggcacggccagggcctggggctggaa

SEQ ID NO: 229091 - DNA, 261 bp, Homo sapiens; identical to SEQ ID NO: 198716
  chr2:220377745-220378006
  hyper

SEQ ID NO: 229092 - DNA, 94 bp, Homo sapiens
  chr2:220407985-220408079
  hyper
tggtagggcaagacgcgcggctcccaattctccccggcgccttcgccggccccgggcttctcgcgctccgctccgggctgcaccgagttgggcc

SEQ ID NO: 229093 - DNA, 1399 bp, Homo sapiens
  chr2:220416369-220417768
  hyper
tcatacttatctcccgggcacagctcggccccctcccgcagccagcacacgtggccccccgagcgggacacagtcacctccagcaccgcccggcggcccaccagaacggtcttctcgcgaggggggtggcggcacatctggagaggcaatgctgggggtagggggcgggggcttaagttaatagggacacgcatggcccccaggaggagagatgcatcttccctccctgaagtctccactcctggccttagccctctatgccaccagtccgttcccttgcacctcagacccaaagtctcctcttgccggggaaacgcgctgccctctgtgacccggcccaggagagcccctcggggggaagggaagagagaggcagcgttcttggggccagccccaagtccgtcagtcccatggcaggagagacaggatgtacactctctgtcgctcccaccccaggtgcttaccctccacttccagtagagccagggactgggcgggccccgcctggaagcggacttcaccggcgtcctcggcgcgcagctcgctaagcaccagaatgtgtttcttccctgggggtgagggggtcgctagcgaggccggagccacctctgaggagcgttggggacgaaggtgggggcccagcaggcccctgggtcggttcggacgccgttagtgtatgctagggtgggcggaacagggatgcggagcgggaagcctagaggtccgggactaggggctgggggcgggggaaagaacagggacgaggctcacagggccgtggggcggggcccgtcggagccaggggcggggcttgtcccggtggggcgggatctgttcgagcctgggcggggcagcgaggggcccgaaagggtaaccaggcgggcagaccttcctgtcggatgcggacgcgggctccgggtctcagcgggcggcctccgagctcccagcgccccgtggtctcgacctccgacacggtgcactcgaacgtagcgccgtcgccttcgcgggcgctcaccgaccgcagctcggagagtaccgccacagtacgctctggggcggagcccggggcgtgagcggggcggggcagagggcagttaccggtcacgccccctccacgccccctttctagaagcacgcgcggtcatcagggtccggggaagacagctccgcaagtctcgcgcccaaagcagtgcccagcctccacatcaccccgtacccaccgcgcacggtcaggcggaccggtccggcgcgggccgtccccaccgcgcagctgtaggtcccggcgtccgaggggccgcagcgtcgcagctggagaaggcggcgcgtgccgagggcctggagccggagccgcgggctaggcgtaagcgcgttcccgtcctaggggcgggagttgcagagg

SEQ ID NO: 229094 - DNA, 66 bp, Homo sapiens
  chr2:220435990-220436056
  hyper
ggggcaggggggggtgcggagggcgagccgaggcccggggcggcggggtcggggcgcggctgggga

SEQ ID NO: 229095 - DNA, 128 bp, Homo sapiens
  chr2:220436236-220436364
  hyper
gcccgctgcctggcttcctgctcttaggagcctctcttcccagccccctcccacagcttgggcctcttccccctcctccctcccacctccagccgccaggtccccagccgcccgccaggcttgggcct

SEQ ID NO: 229096 - DNA, 441 bp, Homo sapiens
  chr2:220462404-220462845
  hyper
gggtgcccagctccgggccaggaagcccagggaaccactgcagccaccaccgcggtcaggagacagcccccgcaccgccccttttcgattcgtttgcatgatctacggcgcggtttccggcggcagagacatgttttccggtcgtcccttggctcgattttcttccggggcgggacttcctttccatcattgataggcgccgggcagctgagctggtaggaggaccagacggggaggttcggtatgtctgaccaggacttatgttcctcgaaagggcggccaggaggatgctcttcctctcttttctttctcgcctttttctccgcatgacgcctcggtttgcgcggacgccctgggcttttggcactaccgcccacctgaggctcttccgcttcctctttccccccccaggctccgccccccagcgtcccgtggccatga

SEQ ID NO: 229097 - DNA, 96 bp, Homo sapiens
  chr2:220492611-220492707
  hyper
cctcccccagggctccccgctaggccccctcagtggcccctccttctcacctgggtctcgggtcccctagtgagcgagagcgtccccagccgccta

SEQ ID NO: 229098 - DNA, 273 bp, Homo sapiens
  chr2:222435182-222435455
  hyper
ataaccctagggaccgaggggcggcgacggccgagatggcaccagaaccaccagaagccacgtcggaaggagatgggagatccagagggcgagagagggcccctttcctcccaagcgatgtctgtgggcaggtgtataaatctctcagagcctccgtctggagggctccgggtaccggctgcccagccaaggctaagttggtttttggctccctccttcggaacagagaaaacgatagattacacagggatggatggacggatgtctggagag

SEQ ID NO: 229099 - DNA, 240 bp, Homo sapiens
  chr2:222435635-222435875
  hyper
cggatggacggacggatagatagatggatgccggaaaggagaagaatgagagacggatgtgagactagatgcacgcaggccagagcaccagcatacgctggaacagagcacgagcatacactcgaacacacgcgcacacactcaggacatctgcgcacagacatacaatcctccgcgtccgcttccacgcaggcattcgcgcacctacatacacgcagttgcacgcgcgcgcacacacac

SEQ ID NO: 229100 - DNA, 53 bp, Homo sapiens
  chr2:222435995-222436048
  hyper
ttcgcctctccctgggtttctcagaaactaaatgatcaccgcccccccgcccc

SEQ ID NO: 229101 - DNA, 760 bp, Homo sapiens
  chr2:222437488-222438248
  hyper
cccgggctgagctgcagactcgcgcctgccaccgccaccctctgccaccttgccctgttttgtctttatggcgcttccccctctgaaatactctttgcggggagttttgtggctctatcactcgcttcttccctggctccccagatgcctggagagcggggacctacttggtccccaacgtccagtccgcagcagggctccgtcactgtctccagagactgaacgaatgactttctagcagtaaggaagtccccgctggccccgtccccctgcacacgccgtggacctcgcccagggcccaggacgccccgagatggccttgggcagggaaccagttgtggatttcccgggggcagggttgggggcagtccctggaaccgggcctagcccgtctgggagcggtggggtagaagtgaaaggcttaagtgtgggtgcggggacttgcagccgcacagacaaggcagaccgggactgggaagctgcccggagcggctgctgcgactctccgctccgacctagccggggcagccctccctgccccgggagaagacggcgagcaggaggacccgcagagccccgcccggctgctccggccccgggggcactggcaccatcgggctgtggtcttttcccgatgcccgagccgtggacgcggccacctaagagcggtccggcgaaggcagcgcagccggtgtcccagggaccggtccccaacgccactcggtgcatttccccaggcgctggcaggggcactgattcc

SEQ ID NO: 229102 - DNA, 459 bp, Homo sapiens
  chr2:222438480-222438939
  hyper
gcaatccgcaaccccgcagagaggtggtgcgtgcgtttgggcgagcttttcagccaccgccaagtctcgtgcactagggctactcctaccgtggggctgcggacagcgctcaagaggtcctggagtctgtcgtgactctcgcctgctggatttcaaaagatggaatcggaaagcgtttcaaggagaaactcctaacaaaccttccgggggttgcctgagtggctgctctcggaaaagcggatcctaaataaagcgggagggttatagggcgacgtcgaggagaggacaggtctcgagtcactgctacagtttcaggtcactgggctccgcagcagatcgtgttttctcccgtggctcgagagctgcgctggtttctcatgcaaactcagagccgagctaatgacatgagcaacttttacttttacacaagatgagcacgcgtgccgaggcgctgggcgg

SEQ ID NO: 229103 - DNA, 204 bp, Homo sapiens
  chr2:223104740-223104944
  hyper
gccgtctcacagcacgaggtcattagaaggaaaataagctcctgccaggttggggctaatcaaaatagcacaaataaaccctgacactcaacaactccccgagtgcctgctgccctgggaggagagtacagattggttatgaatatggccggccacgggggcagtacaggagggcctggccgtgtgctccgttgctccggagtt

SEQ ID NO: 229104 - DNA, 31 bp, Homo sapiens
  chr2:223154159-223154190
  hyper
cgcctgaaccgccgcgcgctgactggttccg

SEQ ID NO: 229105 - DNA, 456 bp, Homo sapiens
  chr2:223154494-223154950
  hyper
taaatagaacacggcgtggtgttctaatagaattcaagttctgatacttccaatattttttaaatggatgatatttctttgctgagttttgcaaggacttcagaaaatatgaagttttctctatagaatcgaaacgacattgaagtcaaattcgtgatcctaacaaatggacttggaaagtgggctggtctgtccacttgaataaaggatccgatgccataaacctatgatcttatacccaatgattttaatctatgggaaagttcgtcccccgccttcccctcctcccaaccttggaccaaaatggcccttcctgctcactaaccgggaaagaaacggcccttcgttttccttgatttcagcagtcccttaatgataagagtgctcttttcatgatttcactggaaataaaatactccaaatacctttaatgcttttctgcgttttaaactgatt

SEQ ID NO: 229106 - DNA, 390 bp, Homo sapiens
  chr2:223155738-223156128
  hyper
ggcgagctaagcttcgagccggccagagagtaggggagggggcggagcggcgcggcgctttggcgcagagcacaggagtgggggcccagcccattgtggcggcgcccgcgggcccgctaggccgagccgggggaggaacagaggcgcccattgagcggccgctgcgcagggcggtgcccacagccccggatgcctcggccaggacttggctcccccggctgcctctgctccagtctcagcgcgggccaggggctagggggattggggatagcgggcggggttcgtgttagtgaaccgcccagccctctcctttctcctgggctatggagctggagggatgtatccagcaagggtgcatcatgcttagcgcgcgcccgttagggagcgcgg

SEQ ID NO: 229107 - DNA, 678 bp, Homo sapiens
  chr2:223158775-223159453
  hyper
aagggaccttgatccgagctgggcttggctgccgtcagatcaccaatgtcagctagccgatgccctccaagtcacccagcaagtgcgccgcccaaggcgccaccgcttacctcgctcgctcaggatgccgtcgatgctgtgtttggccttcttctcgctttcctctgcctccttcctctccaagtcggcctcctcctcttcacctttcccgaatttacttctcaggatgcggctgatggaactcactgggggcgggaggaggaaggaagcaagggagcgcacatggttgagacaagcagggctgtgcgggaaggaccccccacccccaaacaccagccagggccctagagccgctgccctgcactgctcgcgggtgtctcctcctgcatctctggacatcctcatccttctccagccctctcatcctgccactcaaacccccctccctattatctgtatctcggtactgaaagacggaggctgggaaaaccgtgcctccaagttagggccggatgccatctttgtccctcgattctgggcaggaagcatttcccttcctggactccgaagaccgggctctaggtctgcaatctaagagaattctcccaccagcccaccgggtaccctccttcctccccacctgaatgcatggatcctgcggttcgccttaagggagga

SEQ ID NO: 229108 - DNA, 682 bp, Homo sapiens
  chr2:223159732-223160414
  hyper
cctctcgctggccccgtgcttgcccctcttctccctccgcctcccccaggctgccgtggcggggggctccggaccgtccctgagactctcggaggaaatcggggccgttgtggaagcctccacggctttgcgcacacggcaaagtccctcccggcgcgggccccatctcccttcggttggggttaccaaaacatttgtttctctttaaaagggaacatcaatattaataaacgctctgcctccgcctcacgtttcctgccctgcctcctcgacagaaatcttctttggggcgtcctcagcggtggtctcgccaccctccgtccccaggacaagcagctcacccctccctccataaagtgccaagaacaccgggttggcaaatattgcagggcctcgggagaggccacctcccaatagctgagatcgataattggggtgattacgtctgggtcgacgtgccggggtaatagcgactgactgtcgcgcctcggggagaggttaatgggcctagtacctgacggcacggtgtttcgatcacagaccgcgtccttgagtaatttgtctcggatttcccagctgaacatgcccgggttctctcttttgtattcctcaattttcttctccacgtcaggcgttgtcacctgctttaagagaacaggcgggcaggcgttggtacccggta

SEQ ID NO: 229109 - DNA, 550 bp, Homo sapiens
  chr2:223161526-223162076
  hyper
cagggcgcgtgcacacgtacacacacacacgcgcgcctttacgcaccttcacaaacctcagaaataactcattggagagccccagatgtcagccgttaccccccgcccggtcttccccaacacaggggaccacagtctgggagccaggagggcaaggcccgcccgctcaccttgggcttgctgccgccgatggcaccaggacgtatggagccagtctcctggtacctgcacaggatcttggagacgcagccgtgggacacgcgcagctggcgcgagatgacgcagggccggatgccgtggtgggccatctccacgatcttgtggcggatgtggttgggcagcggcctgccgttgataaaaacaccgccgagctggttgacgcggccctggccgaggggagtggacactgtgggaaggtgaaaaagagaagcaagggaaaagtcactggaggaaaataaaaagcaaagaacagcagcacgtaatttcgcagtcttctgtcctatcctcatgttacagcaccgacgctgaaactgctcgacatcggactccc

SEQ ID NO: 229110 - DNA, 1243 bp, Homo sapiens
  chr2:223162677-223163920
  hyper
aatcttcaagtggacggaaaggcgattcctaaacaagttatagaaacttctagatgctatttgagatacatagaattctaatttatttaattattctaaaaattccaatcacaatggcgcggcgttagccaccacaactttgcagggcaaaaaaaaaaaaatacttcctgaactaacatatgtttcacaagtgtgggcgcagccgggacaatttcgagacaacttcgagacaatttcgaatggacaaattgcggagaagttgcttctgccgctcagaagccggttcacctccttctccaccgcggcatttccaaaacaacagggacaagtctccccggctcgccgcaggcctgaccgcccagctccgccaggatttgcagagagcagcgcgctccatttgcagaaaggaaatcgagtaggtcctcgcccccgactggtgcttcttggggtgtggggtgcccagggaatgggcttcctggaagcaccaaaggagcctgcggagcctggggatggggtgaggcagccggtcccaggccctgggatccaggcggcgcgctgaggccctcccttaccttccagcgggaacccgctacgcgggtagttctgccccgggcccggccgcatcatcctgggcacagcgccggccagcgtggtcatcctgggggcagcttcgctcggaaattatatccaggtgaaggcgaaacggaaaggcgagtgcggcgcggatgaccctcgggaactatccggagcgtggagagcccctccccaaaacggctggagagagagggagggacgcggggaggggggctgtcggttcctagtccagaggccggagctggaacccgggaaaggggaggacggggaggccccggagtccaggatcccgagcccagggcggaaaagtttggtacgagtctgggcaaatgttccagcgactggggtccctgaaaagggggctcagagagccacggcgagccggggagcctggtgaggctggagcgcggcctgcctgagtctcctcctgtggtgacaccgagtgcggggatccgggctcgggagcatttattagttcttttacccaaagcttggtcaggagccctgagctgcgattggccgacgggtagaccgtcccgggtggcggagacacgcgctgattgggcaacagcgaccactttctcttcccatctctggtggtgccgaggcctctgctggccccgagggggacccgcgctgcgccccttgc

SEQ ID NO: 229111 - DNA, 461 bp, Homo sapiens
  chr2:223164447-223164908
  hyper
gcacaggcagccgtcgctaggcccaagcactcgttagttgaaggctgggggtatgggggagggtgcagaaaaaaacctggctcctcttcttggtgtaaaaaccgctctggcaagctgcggttctaaatctctacatatagatccccgatgcgtcgacagagatgtgtctgtatgttaaagttttgcccgggttcagcgtttgttctcaggaatttattatggcattcagactaaactgctggaaaaataaaaggaacgaagtcttggctaggagctgaagtgtccccagcaggatatgacgccaggagtgttgtaaagactgtctgtccttagagaaggtaccattgtgcatagccttttatttataacttggtaagtgccagcgaactcgcctcctttacacccccgagtgccagccccgcgctctgcactgcgctttattcgctcgagcctattcaggg

SEQ ID NO: 229112 - DNA, 2148 bp, Homo sapiens
  chr2:223165484-223167632
  hyper
aagccacttctcagcgatagcattttgagagctagactttttccaagttttcttcttcccaaaggttaagcagagtcgacagagcactttctggggtcagcggtaattgctgtgtgaaggaggtaccagaagtgtaatttcaagaaggcaaaagtaggctcaactctcagctaaaataaactcttggaccccgcgagcagttaaagaacatctagagctgagtctcatttgtttttgagccggaggcttggtctccaagccctcccagcgtccacccgtctctctcctgccgggagttttctctcctaagagccggcagatgctggagggaagcgcttgctgcaagattccttctcccggtcccgtagattgcagagtccgcgggaccgttgaacggaggtactgccggctgagctgggtcttaagtgcccatgggttcataaactagctgtcacttgctataaacatgtacaaatggaggccacaaggatgtgggggtgctggggacctaaagctccggaatcaggaggcgactcattttctctcctttccggcctctttcttttctgccgagcgctctgagattcatatgtacccagatgatcagcccggcccttctcaccggccagtggccagaggtccctggacacccggagaggggtgggagggcacccttaggctctggacagctgggccacatccaaagacttaatgaatctaaatttcttgtggcctgtgtccccgaagtccgacctgggatggccaggacagcaaagttggctgaggctgcctggcctagggcgcccgcacgccgccaaacctaacccggctcagagccgtgactccgcagaacagggcgcaacaggtctcaggaatgccgggtgattccagccactctttctctgtctccgagtcttgggcctcccctttatttctttctgaagtctctccggagcccaagccaccccacacccaaaccccgcagctggatgggagtccaggccacttccctatccgcagccggtgggccaaggagtcctggtgccaaatttggccgcggtacaggcgctaattggtaaagggatgacccagcggtggggcttggaaggcgagggcccgcgccctgcatccttgaaccctggtttgggaggcagtgacttttacctgggctaacaaattacccagaaagcatcagtgggactctccacaacggtgttgtgaacgagtgtagggtccactcacgctctgtgcacgttcgaaatgaaacgggagccttgaagacgatatttggataatttgacaaaaaaaaaaaaaaggtgggcgggggagatagcttctattgtcccctctgcgcctctgcccccagtttcagagacactacaggtgaaaataacagcgggctggctgtccaggcctgagtggagcgtgcccttgttagcttgaaagttctccctcgcagcccgtttggatgcgtgcgtctacagcccagtcgcactttggtgaccggcctgggctgtgaagcaccctttagcgaacagcctccgcacttggggacactggcacaagggtttcatggcccgtggacttctcagggcctctgagggttgacttcatactcagccagacacaggtcttaagaggaaattatgatctatgcaaaataatgtccctgacctagtggggagcgggggtggtgtctgccacccagacctttttcctcccgtctgaagggccgagctctggcaggctgacacggtcgagcagagaagttcctggccacccgcccggccccaggcgtgattctcaggatgcagtaaaagttgggcaaacgccgagaaaccctcaatcccacagaaaggctgccgggggctcacggggaggacatcaaaacgccaggttcgtgatcatgagcttccggtccggatgtgatgatacaggattggtgaatgcccgggttaaacccgtggtccttcgcagccgctgcctcagtgacagtcattaggccccccgcagttatttgtcaaaagcattggcgccgctcttctccccatcgaaaaatcagtcgggatgagttcggattaagggactagatgaggatgtggacatcccattgaaacatggtgtaggccagccgaagtgggtttgctc

SEQ ID NO: 229113 - DNA, 962 bp, Homo sapiens
  chr2:223168006-223168968
  hyper
gaagacagattcttcggtaactgctctttggtgtgtgtattcggggtgtgtgtattcggggtgtgtgtattcggggtgtgtgtatgtgtgtgtgtgaaagaatctggtgtgtgtgaaaggggtaagggttgaaggaccttatttagctgggggaccgtcttgtattgggagcgggcagcctaggccttggaaagaccagaaaatctgatctgtgcggaggcaggtgaaggctgtgagtgaggtgggggcgggaacagagctggaggaagtgaataaaagaaaccttggggtccgttggtttccttgactcgtggagcaaaaaagtaggcgagtgaccactccaggaactcctgcctccgggcgccggtacataaagagctggggctgtgtgtcctgctcttgggggaggagggtactgggaagggggaactaacaggtctttctttcgctcggatcaggactggactccttctgactccacgcggccccagctcctgaaccagcgcagtgagcctcagccgcttctcaaactgggtctcagaaaatttctcctcgagatggatttcagcggcaggaaagaggggccagtgacgcgaggagcaagaaaagagtaacatgggagatgaatgttcaaacccagatctcctcgctgagcctggaagctcgccaccgtgggatcacgggaaccagaggcaagaggctgcgaatgagtccaacacccgcgttcctcgagttttaaaagcacacctggggccagagactgcacagccaactaaacggagtaaacgcaacaggtggaggaggcagagttgtcaggggccaagcccggcgcgatctggccagttcttggggagcgcggacctgggactgcagagaggcgttttgaagagtgctgcgcgcacctgcctctcggagatatccaactccacccgggcgtctcctgagagcgcacagtccacaga

SEQ ID NO: 229114 - DNA, 1156 bp, Homo sapiens
  chr2:223169338-223170494
  hyper
gtacgtttgggagcgagggacaggagaataattttgatccagaaccttggagattggagaagcaggtggaaaaattctaaaaagatgaaaactgaccatctccgacacagaaacccatcgaaaggggccaccgagacccgttgattagctggagggagcatgcggcagaagtgcagacccctcgctaacccgccaacctccaagagccctcttgcagaaagctgcccggctccccacggtggccctgcgcgcgcaccatcctcgcggtctcgcttcttcgccccggaaaactctatgaggggcaccccagcctcagccgggttaagacaagtagccccaagaggaaggagcctcagagagcctttcttcctgttcttcttcgtcttcttttttttctaaacgaaatctaatactatctggctgcaaaaatatattatcaccggctctcagcctaagagactaacatttggatatgtaggaaatgtaatctgcatggctaattgattctcagcgtatcagtttaaaggataaagatcgatatctacatgatggatattgtattaataggggcataaataaaggtcgaagagtcgttaccaaaacctttgaagccgcttttcggctctcgggccctccacgcggccagtgggtctctcccacctccccgcccccagctgctgctgggcagggagcatttgcttccccctccaacccgggaccagggtggaggagtctatggttaaagcgaaagtgtttcactgcggcaacgctggggaaaggaggttcttttttcctgggctgcagcaggtggacagtaaggcccgagaaaatgtaatattttaacaaaacgcaccactccccgaaacacacgtatacgacccacacagggacacaaacaaccacacatgtacacacacacacacacacacacactcacacacacacaatcacgcagggcggggagggttctcagcgttccctgagcgccctttggccttagagacagggaataaattcttctttccatccctcggccccctcccagagggcagcgacgaaagccctggccgagcacaaggatcggtgatctgggctcctggaggtaccctctagatggggtaaggacggggaaggatcaagaggttctgcgggaagt

SEQ ID NO: 229115 - DNA, 73 bp, Homo sapiens
  chr2:223170974-223171047
  hyper
tcgcctggcactggctgctcagccggcgcgcagggaggcctttccggaaacaccggctggctgcgcgctagca

SEQ ID NO: 229116 - DNA, 1151 bp, Homo sapiens
  chr2:223171227-223172378
  hyper
ccctctaaaaaggagcctggggcgaaatgacagagggaggcagaaaacctcctgttgccccaggacgccccgaaaaactgctctgggggatggggcggggaagaccttagaagttgtcagggcgaccaactcctcccaggtgaccaggttgccataggaccagcacactgctcaggagtgagttttggggagagagagggatcctccagttattgccatagagaaccaggaaagttcgcagcctccgggtcgcaagtgggaaagttgactggagattgcggttagagggggtgggtgcaaactcagggtatttccgggtagccccgcagcagtcttgtccgctgaaggcaggttaccctgggctttcaagggaaaacgccttggggcggggtgtcctgtgcgaccacctctctcagcaaagcagggtttgacctcttggcctgaccttgctccctagtcccaccctatactagtaggtcctaacctttctgcgctttgagcctggaccatcgtcccttcaagagattctactggataaaaaaaaattataaaagctggatcaagcttggcgtcggaggtctggccctcagctggttcccaccctaaaggactggcctgcccaccctcacgtcctcgggcgcccttggctcgagggcctttcggagcctccgcgggaagcagaaagtcgcacctcacactgagcctttccttcgagcgctctgccgggagctactgagccccagcacgcagccttgggcacccggtggcgggcgaaggaacctgccccattgtgctgctgggctgcactagcggagacgagagtgcgtgtgggagtggcccactagcaccacccgccagggtttagcagcgcctggagcacctccctcttccctgctgtttccttaatgctggagctgggcacactccgatgtcccgcattctcacattcaatcattcattctccctctgaaagttctcaggctcctttgctcacgggtcgtctctggacctgagacacctgcgaaccttgcggatcaccagattgttttattgttcctctcttcccccactgaatcgtcggccgggctagtcttccagtttcgcctggagtcgattgcactctggcgcacgtggcctttcacttactccac

SEQ ID NO: 229117 - DNA, 65 bp, Homo sapiens
  chr2:223173017-223173082
  hyper
gctgtcactgttgacgtgccagaggtatgagcctcctcccttccggtgatcgtggctcaaaaatc

SEQ ID NO: 229118 - DNA, 1920 bp, Homo sapiens
  chr2:223175904-223177824
  hyper
gggattacagatgtgagccactgtgccctgcctaaagtgtttgcttattttaaacaacttttttttttcttcccggggaacatttattagcctatattgccatgagaaaacaacttgagacacttcagcctcaaccctcctcctctaagtcggtcgggacaatggcaggcggaagatgaagatataaagtaagaattctaagcttctcgccttcctgttacagccgatctgctctgcatttggaatgcggcgtctttgcgggcgttctgagtcattcctactccgctgcaagccccgcagagaacctcgccttcttcccgaccgccaagtctgattgtacagacttcatagaaggtctggaataaggactgtgttgctgcagaggccgggtcttgggcccctgggcgtgaggacgcaggctcggcccctgggaagaaatgtactaacgcacctcaagactcctaaggtgtttccaagtcccccctccaactttcgtgtccaggtcacgctgccccgccctcggacaatgagagggtgtgtcaagatgctctttgcatctttggaagccgagggggaaataggagactttcgacggggagcaggttttccggagccgtttggggctgagattctcgaacccctgctgggggccgaaagcgccggagaaacctgggactaaacgaaggcgactccccgcagggcgcaggcaccgcacccggcgtttgttttattcttaatttacttttttgggcacctctgctattgttacaaataaatgcgaacgcggagctttcgggcgggctctgggagcggcccgtgggcatcttggaatattaaaaacgtcatccggttgtaaataacctactccccagcccttgaaatccgggacgtcacaggtgaggctgaataccaggttcgcacaaaggcaaaccaaactcagccgggatgccgagtgatggggttggcaagatagtgtggcctctggttccctccacgcgtgataagtgggatcatgacagcgtccttgtgccttcgatttgtccccaagccctcctctgcctttccgatctcaaactaacccgtaatggagctggcaagtgggacgaacgggacagcctaaagcgtcgttggcccggccaagaggggctcaacgcctgtcaccccgggcggccttgggtcctttgcagtcggagaggctgcaggggaggaggaagacccagccagctccagggtgcaggattctgcccttccacccgagagcctcccccggtgtcccagtggcagtggctgccccgggctgcggtcgcagagtaagcaggggctccagtcctcggtccgcgcgccctgccccttgggctcagctgcgagccaccgccggcgtgcgcacccacaaggagagaaatggaggtaatcccccgcttcccaccgactgccggaagctcggcctctgtgcaaaccgaagtatacctgcacccaagagcgtggaaataatttacacgctgaatggctactattaaaaaggatctttttaacagatctcctggcgagtattttaaaacaggactctgcgctagatcagctcgcccgtcggcagctgtcagcgaccagccgacaagctgagattcccctttcagctgtcactggcgatgacacccacatctatcactggcgatgttttgttaatttaacctcgagacttccctgattatccgcataatccgtcctcaaatcccctcgttgtcactgcattttgatgacacgggggacttggaaagcacctattttgtgggggatggggaagcccacagaaaagccccctgatgggggaaggagcaaccgccaccccgcccatgtgagaaaagagcccagcagccaaatgccggtgcaagtatttacttaaccttcctgagaacgcaaagg

SEQ ID NO: 229119 - DNA, 155 bp, Homo sapiens
  chr2:223183522-223183677
  hyper
agtttccctctctggcccagcgcgaagggcgaggggcgacagaagcccgagggacagaaaaccgaggctcctcagtggccgagttgggagagagtgtgagtccaggagagcccgggggcagcagggagagggtgcagaagctcgagcgcaccgag

SEQ ID NO: 229120 - DNA, 289 bp, Homo sapiens
  chr2:223185166-223185455
  hyper
ccttttaccccagcagtcccccgccccctacgcggggtggtggcaggaaaccggttcctgagttttccttctttctcttcctcgacacgacctccccaccagtgtgtttctgtttatcctcctcgcccgggggctgggtccctggcgaagcctcgttttcacccacccacccccaagccagagctcaccagtgatgtaatgcgggacccgcgcggggaggggaaacggcagcctcaaccgcctggcagcggcggtttcttctcttcgtgaaaatcgtgatctcatctct

SEQ ID NO: 229121 - DNA, 1345 bp, Homo sapiens
  chr2:223288951-223290296
  hyper
tcccattagtgttacgtctgccgggggaagaaggtggggtggggggttgggggcgccgggagaagagaggcgcagttcggagatcggcactcctccgtccagttacaggcggtcctgcccccgtggccgcccggggccgcccaagccctccgggacggagagaaagggggacgcgttgcgcaaggtggaggcagacacctgggcgggcgctaggacccgggcggcgcacctgttggctgggcccggggccccgcccgcccggcctccgcccggagtgcgggatcggcgggggcgaggcgggagtggcggtgccagcggagggcaccggcccggcgtggcagcggcggcggagcgcggccccgggcacaccatggccgagctgctgcggagcctgcaggattcccagctcgtcgcccgcttccagcgccgctgcgggctcttccccgctccggatgaaggcccccgggagaacggcgcggaccccacggagcgcgcggcgcgggtccccggggtcgagcatctccccgcagccaacggcaagggcggcgaggctccggccaacgggctgcgcagagccgcggcgccggaggtaaccatgggcaggtgttcgccgggtacggggagggggcggctgcggacgtgcgggtccctgcgactccgccacgcggggccggccgggccgagagggcgccgtccccggcagtgacccggctcccgccgctgcgagcggacggggaggcctggccttccagtaaccaggatgccaccctccaacgctgccaggggcaaccgggtctattgagatatccccagacgctttcaatgcagtccatttagagacttcccactttcaaaagtagttaaattcacgtagatgccagcaaatatgtaagagttacgtaatggaacggaggagcggggatgtccttggcacttccccggggagacgttcttagactcccccccacccccgtattcttgcatttccgcccatcccccttccctgatgcgcacaaatgcgggtgcagccgggctcagcgcgctcctcaccgcgctgcaccgccagctctgggcacagaacttggggctcacacagctcctagagagatttacaacctccctgcactacccccggcgatgatgtcttaacagcaactctcgcttgccctcccccagagtctgggggtccctcctgcctggtgggtcttttatggaccgacaccagtgacttctaacagatgcttctgggagggaagctcgctacgctcccgctaggtgttcaaagcgtggttatacaacccactgcggcttggggggaaccagcgtgcgtcgtcgtcgcagtgca

SEQ ID NO: 229122 - DNA, 361 bp, Homo sapiens
  chr2:223520612-223520973
  hyper
aaccccggcctcccggagccaaaaccttcaggaaggcatgaatgtcgccacattgcccttttggagggaggccctgcctccgagaagaggcgtagggcccaacgtatagggccgccactcactgtaggtgcggcccagggcttggaagagcagatcacgcttcacgctgacagtcggcatggtgtgtcgaactcactgcgcctgcgcagcgagctgacccgggcttccctagcgaagcgcgtaggacccgcctcttcttgtgcgtgttgtcttgaatatcgccattctgctggcaacagttcctgttctctttttaacctaaaaacactcatcatgccattacctcgctgattaaatgtat

SEQ ID NO: 229123 - DNA, 658 bp, Homo sapiens
  chr2:223536121-223536779
  hyper
gcggcaggagcccgcgctgcccggctcgggctggctgccagttgacccctctccccgtccctcgtgtcccacgcggcgcactctcgccaacgcccggcgcgccagccaatgcgcccgggccgctgtagctgctccggggccagggcgctgggccagctctggcgcccggcgcttgtgattggctgcccccagcctcagcccagcgcgccctcccacccagggcgcagttgggtccccgctcgctgcctagcctctgccttttcctctccgcccagccagtgcccagcgcggggcccggatccggccgggcacttcccacaggcgccgcagagcagcgtgggtgcaggctgcagtggctggcgccgtcctcgcccggccaggccatgaaggtagagtttgcaccgctcaacatccagctggcgcggcggctgcagacggtggccgtgctgcagtgggtcctgaaatacctgctgctcggtaaggaccccgccccccgggccgcggggcttgggctccatatcctccctcgggacggtccggattccaggacctgcatagaaccttccaaccctcgttcccctgtcggccagagcaggcaggtcaaagagggcatttggagctaacgtggactctggtttcctcacgagaacctcatcgc

SEQ ID NO: 229124 - DNA, 136 bp, Homo sapiens; identical to SEQ ID NO: 198736
  chr2:223725610-223725746
  hyper

SEQ ID NO: 229125 - DNA, 171 bp, Homo sapiens; identical to SEQ ID NO: 198737
  chr2:224702620-224702791
  hyper

SEQ ID NO: 229126 - DNA, 244 bp, Homo sapiens
  chr2:224821706-224821950
  hyper
aggcttttggaggcgtgctgggtcaaaaatagaagctcggtaaatacttgctcagtagtggcctagaacactaaatataaattaaaaatgttttctttttttgaggatttaaatgtttccttaacctgaaagcgaaacagatttttgtttgttttgctgtaacgagagaggaaggaacaagagagtgacagggtgaagcaacttctcccagaaacttttgggcgcaaacgccctcaagtccgga

SEQ ID NO: 229127 - DNA, 937 bp, Homo sapiens
  chr2:224903207-224904144
  hyper
tgcagtcactcatccgcctcgcaactcccgtttctacagatgatgaaaatagcaaagacctgctcgctcgggttaaatcggctgccagaggccaagttaaaggctttccccacaccgcgcgtcacctccctctgcccaggcagaggtaacaagtaagagtgcgccagtctctccccatccggcggcgcgcagcctaagtccggggtaggggttgccggcgagcagctggaaacctcaggttcagggtcagggccggctcggatggccgggcaggagccacgccggccccggtgctcccagctgcgggtatcactggacgccaccccggggcggccccgccttgccctgcccgggtcccgctcggggctcccggcgggcgggaccgggatgcccggcgagcacccagccccggccaaggcggcccgcgggaggctgagaaagttctctgctccccgacgtcggcgccccagggtcccgctggccccgcagcttcccggccgggcgcaaggtcagggagcagggccggtggcgcgcggagccccggggagcgtcccccgccgagggcagcgccggccgcgcccgggactcaccgcgcagcctgtactcaccgcgctcgctggatccccagggggcggccgcggagggcggtgcggccgcaaccggagcgggagcctggtctcggcggcgcggggagtcggaggacgcagccaagcggcggcggcgaggagggtcacagccggaaagaggcagcggtggcgcctgcagacgccgcgcagcccgggcagccccacagcgcaagctggctgccgcggcggcgggggctttatcggcggcgccgcgcgggcccccgccccttcctgccgcccccgcccccggcccgccttgccccgccttcccgccgcctcctttgtgtggccgcgggccgcagcgtccccgc

SEQ ID NO: 229128 - DNA, 52 bp, Homo sapiens
  chr2:224904324-224904376
  hyper
gggaataccagggctcgtaccgcgtccctgagacgcagggcatgtcgtcttg

SEQ ID NO: 229129 - DNA, 53 bp, Homo sapiens
  chr2:225450598-225450651
  hyper
tcttgaggaggagcgtggggtgctagatgtgtaactacgtcccgaactggttc

SEQ ID NO: 229130 - DNA, 315 bp, Homo sapiens
  chr2:225906071-225906386
  hyper
tgttgttcccactcgcttcccgtttccactagagttgatttgtctcttgccacctctccccggcagtgtggacctactgcaacgcaggaacatctgggttggtatggataggatcctagcatcagatgctggctgctgccccagggacttcccgcggaaatcacccagcacttagaagccgtttcaataaggaagtaaccagtaaagcattgctggtgggagaaccccgcgaaacatcttagaaaaatatcagaaaccgctggagacctaatgacccacgtctcctccagcctgtgttcctcagccctttctgga

SEQ ID NO: 229131 - DNA, 152 bp, Homo sapiens
  chr2:226895456-226895608
  hyper
taaatatatatgcgcgcatttttctcctgcataaaggagtcaggccgatctctttctatttgatcttaatccctctcccccgccagcgtggcccaggagcacccctctctttctaataaacggctggcagagcaagccgttcacgcagtccc

SEQ ID NO: 229132 - DNA, 359 bp, Homo sapiens
  chr2:226895881-226896240
  hyper
gagaagctaccacccggccagacaggggaggctccgccctgcccctgcacccgccgccctctccccggccgcacgggagcccggatcccgcaggcatctgtgttcgcaggttctgccgtttgctttcgggaaggcgagcattgttttcctctggatgcaagcttttgctgacccacaccccccttccccaatgcctccgcttcccttcccccttcggggacttgggattgccctgcagactccctggacttgagcgttttggtctctggctgcagtgtttgtgagagaggctgcggatgcgacccagctccggctcagctgcgcgcgtttgcaaatgcggctgcgtccagacagggcat

SEQ ID NO: 229133 - DNA, 228 bp, Homo sapiens
  chr2:227700355-227700583
  hyper
aacctgggcagaggcgtccgttgggtaggcggccgcgacccgctcgctgcttctcccctagtcttcgggtcccttgaacgcaggtcgcttgtttgccttacgcgtagtcagcggccagtggctatttatggcagtaaggaatattatccacatttcacatggagcttagaggacagggcgagggtccacactctccttactgcgctctgccgcggtcctgccccgctg

SEQ ID NO: 229134 - DNA, 1044 bp, Homo sapiens
  chr2:228028700-228029744
  hyper
gccccacctatgggcgccttacctgtggggacgcccgcagcgccaggagctgccgccttgccaccccacgggacgcgcacctccagccccaatccacccgcgccccgctgcctcttcgcggcgctctcgcagccaagcccggcggccgcaagttggaggcgggctggaggcggggaacgcggaccgccgcgggcgcggggaacaagcggggcctcccgagtgcagacgcccggcgcgcctcccgcttaatctgggcagggccgctggccactccctccaccctgcgcagccacctccccaccgcgcagccacctccccaccgcacacccccaaacgccccacctccgaccgcaccccacttccccgcctgggcccccggaccttgggagcatcacctccttaaccccttaccctggatccgcgcccacctgcccctcaggcgcccagccctttctcgcctcctgggcacgatgcccgggtagaagggacactgcctggtaagttgggagggagggggtatgagggcgggacctgagccacgtcttccctcccttgaagccacaaccaaaaagcctgggtggggagggacgaaccgcgcgaccgagccctacaaaacccgccccggccgagtggcgaggcgagctttccagccgggctcccagagccgcgctgcgcaggagacgcggtggcctgagagcctgagggtccccggactcgcccaggctctgagcgcgcgcccaccatgagcgcccggaccgcccccaggccgcaggtgctcctgctgccgctcctgctggtgctcctggcggcggcgcccgcagccagcaaggtgagtgggggctgcgcgacccccacccccgcacttccatccctcctccacgcgtccgggggacgcgctggccccacccgcagcggcgcggtagtggagcggctgccgggctagtggcgaggctgagggcttcacgcaggtcccgggacaggcagcgagcggaagggagcaagcggggatgccccggaacaggtggaatgcgcggggctggggga

SEQ ID NO: 229135 - DNA, 33 bp, Homo sapiens
  chr2:228582802-228582835
  hyper
gcatatgcgaatccgggcgtccagacctttcat

SEQ ID NO: 229136 - DNA, 258 bp, Homo sapiens
  chr2:228736216-228736474
  hyper
acctccagaacactcgccccccgcgcgccggagccccgggtcgccaccaaccgcccgcggagccagacctcccagctctgcgccccaggaccgcgcggtgcaacctgcgcatgcgcacccgcgtcccgctgctgtttagccgtttccaaggctacgaagcccatcggccggggataagagagcaagaaaatgaagctcaagagcctcctgctccggtattacccgccaggtacgcaccagcccggccccgtcatcccc

SEQ ID NO: 229137 - DNA, 128 bp, Homo sapiens
  chr2:229044816-229044944
  hyper
aaatggaaagacagcggtggtcctttgaccctgttccgctggggcagggatcgggagggtggggattgagacttcacttaagagctgcttcaaggagtgcacagaaaccacagcgggccttttctgaa

SEQ ID NO: 229138 - DNA, 816 bp, Homo sapiens
  chr2:229045944-229046760
  hyper
tccaagctgtgtccgcggaaagtccggctcctggctccacctagggcagagcagacctccgtccctgggccttagaggcgggcacggggctgacccccaacccgtgccactccagcgcacaggccccactcagcatcgcgccctgtggggcagttgacagggtcccctgtagctccagcgaggctgggccggacttatttacaagtgcagtgacccctgtctcctcgctgggagccccgtgcaaaccgaagcgctctggggcaagttggtgagcgactcacaacgcggaacggagtttgatcgacatggtattgggcatagaaagaagcgggtcttaccttggtaccgagagcagggagttgccatccattgttggtgggcgcccagagaagaaagacggaaagtgcaggcgaaggataagtctgtggtgctaggacccagctcccagagtgccagactggcgcgcgccaggagagaggcgcgcaggctggggcggcggcggcgcccacggagactagctcctccctggccagcaagctctgtgcgctgcgaccgcccgctgtcccctcccgccgtcctctctgatcttgcaggagcgcgtggccaacgctcccacctttctgcctggctcctgcctcctgcaggcgggccccagtctcagttgctcgaggatcctgctctatcgctcattcgtgcccagaagcataggtgactccgacaaaattcctctctccccaaccaccatcgtctcccctccctttctcgctggcgtacagtaggtctgagccctgaagttgttcacgcactttcccacat

SEQ ID NO: 229139 - DNA, 431 bp, Homo sapiens
  chr2:230135734-230136165
  hyper
ggcgctccgtggccggctgccacatcttccagccctgggttttggcagaggagacgctggcgagactgtcgatcgcgccggggggcgaggggctggggtcccgctttacatctggggtcggtgtccgcgggatgtgcgtcctggcgctggccaccgccgccgggtgggcgtagggggctgcgagcaggaggaggcgcggcgctcagctgccggcaacttgtgggcacggccgcgcgccggctgtcctggcgcagctgcgagaggactgcgcagctccgcccgggcccggcgagcgcgcggcggcggcgggggcggccgctccctcctcccccgccgccgccgcccggacctgcgcgctctgagcatgcccggggcgggcgcccaggggccgcgcggggcgggagtgcagcgcggccgactctaaatcctag

SEQ ID NO: 229140 - DNA, 208 bp, Homo sapiens
  chr2:230578998-230579206
  hyper
cggcccgggcgcagacaggggcgcggcgggcaccgggttggccagggagctgcctcggggccccgctccgagcagcagcagcagcagggccagcgcgggcagcagctgcgcaccgggcgcctgggcgcggcggggctgcatggccggccgggagggcgcgggagccggagccaggacgcagtgacggcggcggcggtggcagtggcga

SEQ ID NO: 229141 - DNA, 155 bp, Homo sapiens
  chr2:230579415-230579570
  hyper
gggttgcaggaagacgatgcgggaccccatcccccaggagtgggtcgaagtcacgggtgtgtccagaagcagccctggtacagggagccaggcgacgctggggcaggaaaggggctggagaggtccacgagtgagggaagcggggctttgagggg

SEQ ID NO: 229142 - DNA, 91 bp, Homo sapiens
  chr2:230786754-230786845
  hyper
ccgcctccctccccgcctgctctgacaccctcggggaactactttgtcctcgggctccggttacgggctcgtccgcgggaccggcaccgct

SEQ ID NO: 229143 - DNA, 907 bp, Homo sapiens
  chr2:230932490-230933397
  hyper
agccccgaaatggccgtccccggtctctcaccccatttcagcctctcttgaggagcctcaatcggaagcgctaagggggcccagcctctgcgcgccctgggtgcgggatcgtgcccgcggggtccggcctcgcgccccacccttcgagcgcccgcccccacccgcgctcggtgctcccgctcccttggcaccccgagaccacatccccacttcgggcaccccgcatccctcggcgcgttcggaagccagcagcccaccggggaagctgggccggctgcagcaccacagcctgtgcagagaggcatccgcaccccgcgaagtccctaggcgcagccccgggtcccccgctctgcgcctcatcactgtccagttcgagtcccaaacgggcctagagagcagccgggcagcgaggctgggctccgggcagaacgcgcttctccagccggacgggggtgcccaggatgacgctcgcggggccccggccagcttgagcagcaaggcgcgcgtccccaagctccgcctggcggtctgccctgaaccgccggttaccctgcccgcccgcagctcccaagcccccgcggcggccttggcactaccacctgccccggcacagtctcgccctccaccgcccgggcagcctttcccgagcctgccttgggctggggctgccccttcccgggggtccctgggggtgcagcggccatctgaaacctaggctccgatgcccccggcgtcgctccattccccaggcccgcggcgcgcgcggcctcggatactcaccgcccgaggcccgctgggctgcggcctcactcggctccacgcccggatcctcgaacttgctgctctgcttggagccccctgagctgctgggtgtagagatttgttgcaatgtcgcctatcatcctgg

SEQ ID NO: 229144 - DNA, 69 bp, Homo sapiens
  chr2:231191862-231191931
  hyper
tgagtcagtctgtcggccgacttcctgctccgggtcagggcagccacactgcacgcaggctgggccgac

SEQ ID NO: 229145 - DNA, 360 bp, Homo sapiens
  chr2:231280683-231281043
  hyper
gagctggccctgctcgtcccctgggccctccttccctggtcctgcaggtcttgctgcttgtcaggcctctcctccaaccctctgccacatttcagaaaagctgagaatcccttggagtgaaaaaggaggagaaacacagtgtccgtagcccagaaggaggttaaatactttcacttctcttttccccatttgggcggagccctttctgagtcagtctgtcggccgacttcctgcttggggcctgggcagccacactgcacgcaggctgggccgactgaggggctcagaggccaggctctgaggcccacgcagggcctagggtgggaagatggcaggtgggggcggcgacctgagcaccag

SEQ ID NO: 229146 - DNA, 40 bp, Homo sapiens
  chr2:231693364-231693404
  hyper
cagcggcccggagcctcagactctccgggagccaggcggc

SEQ ID NO: 229147 - DNA, 300 bp, Homo sapiens
  chr2:231902081-231902381
  hyper
cctcttcctcccacccgggcccgcgatgcgggctgcgcccaggggcgcgtgcacacagaggccccgcccgggggcccgggggtccggctgggctcggccctcgggggcgtgtcctctgtgccggggcgccaccgccccgagaggcgggcagcgggtgcgcccgggccgcggcggccgcagagggcgggcggcggccagcatggagcgcgagctggaggcgctggcggcccggcttgcgcgccctgccgagccgcccttccaggcgttggtggaagcggcggggggccgcgggcaggtgct

SEQ ID NO: 229148 - DNA, 241 bp, Homo sapiens
  chr2:231902830-231903071
  hyper
actgccccggcctcccggcctcctgcctggccgtccaggcggccgcctgcagggccctgcaagccgccggagccgggcaaccaggtgagactgcgcggggcccggctgggcgcgggcgggcggtggctcgggcacgtcccccaagttggacccctttggccattcccttattgagcaccgaggtaaactgaggctcagagcagggaggtgcctagagccaggcctcgcagctagcggagag

SEQ ID NO: 229149 - DNA, 153 bp, Homo sapiens
  chr2:231921281-231921434
  hyper
aggtggcactgcgcgcaatgctcgcacctcccctcaacaccctttctctcagcaatggcgggtgatggtgggggtcctctctttgcagggctggccattctaatgcctgacctcaggtgcagaccagtgttccgttgcgcgggactcctgacc

SEQ ID NO: 229150 - DNA, 239 bp, Homo sapiens
  chr2:232063175-232063414
  hyper
cggtcatccagcgcgtgaaccttcaccactgctgggctgtggaccctcacttccgccgccaggaagtttcggggtcgcccaccttccctcccaggctgctccgcgtcggcggcgccccgcgcgattggctgcgccgcccccacgtgacgccggggtggcggcggcggttgcccgggtgacggctgcggaggtggcggccgggctgggatagcgcgagtgtccgcggccgagcagcaggt

SEQ ID NO: 229151 - DNA, 252 bp, Homo sapiens
  chr2:232260770-232261022
  hyper
ctccccggccccgcggccctggacaccgctccaggaccctggcggctgggaccccaggtcttgccggcagctgggtcccctctcccttccagacccctgagggccccctgcgtccgggccactctcctcctctcggggcttccttccgcgggacctcggaccgccgcccgcccggcccctctccgcccctcccgggctttccctacgaatggagcggacccggcaggtggagcgcccgcagcccagggcctc

SEQ ID NO: 229152 - DNA, 44 bp, Homo sapiens
  chr2:232329225-232329269
  hyper
gcctgtggaaaggcgacgacggcgccctcgtgactccgcgccga

SEQ ID NO: 229153 - DNA, 135 bp, Homo sapiens
  chr2:232379208-232379343
  hyper
gtgagtcttgagccggggtggagggggggccgcacgtgctgcgcctgcgcgtggagcggacattttgctgcggtctagcgcgggaggcggggttttgggttcgctggtccaggtgcgcgcggtgtcccaggtctt

SEQ ID NO: 229154 - DNA, 459 bp, Homo sapiens
  chr2:232394891-232395350
  hyper
ccggcgcccctggccggaagacacaaatgacccgagaagttgcgaggctccccggtggcggggacggggggcaccccgacggagccctcggacccttcccgccctaggacgaccctgcccgcaccgagccccggcccagctgccgcgccctagcccacgccggcgcctgcgcacctaccatgcggcccgcggcccgcgagaccccggcttccaccctccgagcgacggacacagacgcggcgcgggagccagtggactgactgacagcggccccagcccgcgccccgacgccccgcctgtccggccgggaacgccgccagggggcagtgcagtccccgcagcccgggcggcgccccctcccgcactggcggaggacgcggccgttggaggcgacacctccacaagcagcgtggaggcgacacctccacaagcagcgttatctgacggaaccctcacaac

SEQ ID NO: 229155 - DNA, 121 bp, Homo sapiens; identical to SEQ ID NO: 198749
  chr2:232478346-232478467
  hyper

SEQ ID NO: 229156 - DNA, 55 bp, Homo sapiens
  chr2:232479181-232479236
  hyper
cgagccgcctccccgcccccagcctcccctgccccggctgcccccgagtcctgtt

SEQ ID NO: 229157 - DNA, 48 bp, Homo sapiens
  chr2:232571124-232571172
  hyper
cctctgtgaagggcggccccaggtctgcgcggcggtgaagacagactg

SEQ ID NO: 229158 - DNA, 309 bp, Homo sapiens
  chr2:232572332-232572641
  hyper
tgaggctgtcgcgacggcagtgaccgctcgggacagaccctaactagaaacctagaatgaggggaccgctatgccgtgcggggcccgcgggctgtcccactcgagggctggagccggcatcgcgcatcgagtccgcttgatacatgaatccgtgtgtgcttgggacggtgcccgcttgtcgactgacttggccgacggacgccggacctgatggtgggcaatcgaggtcgcctgcccacaggactaggggtgccctgccctgggagggcgcgagggcatggcagagggacggggcggcccaggtgcccg

SEQ ID NO: 229159 - DNA, 177 bp, Homo sapiens
  chr2:232573066-232573243
  hyper
gcagcgcgggacgcgccggggcactgccgctttaagcacgcttgtccattgttcggaatcgagccaatgagcgagcgcccgctccctgcgctcagccaatagcggccgggcatgggaagccgagcgccgcccactaatctatattaaagcttctggcgccgcgtgagtcccccactg

SEQ ID NO: 229160 - DNA, 234 bp, Homo sapiens
  chr2:232646071-232646305
  hyper
gccagtaggagcgcgcagcggcttcgcagggggactgttaacgtcaatgggaagggccctccccgggaagtcccataggacacaatattcatctggtgttgttgcctagagtttgtcccagcggagggttggcttcggatctgcagaggctttagggacctgctccagccactgagcacactagccgtctgagacggcagctgagttgcactgtgcgacgcgacagagactaca

SEQ ID NO: 229161 - DNA, 62 bp, Homo sapiens
  chr2:232651383-232651445
  hyper
gctcctcactccacgcctgcggccctgcttggagcataccgcccaccgtgaggtctgctgca

SEQ ID NO: 229162 - DNA, 278 bp, Homo sapiens
  chr2:232790121-232790399
  hyper
agggggcgccgcactaacatcccaggccgctcatggagccgattcggtccagcttgaggccgaagcagcccttggacaagcccttcttgttggctcctttgtatttgcgcgcgttggggtgctcttgcagaaggcgagcccacgctgcccgcgacttggtgtccacgcgcaggtcccggagcagtcgcgaccggtcgcccttgagattggcgcccccgcccccgggagccttgtcgcccttcttctgaccgccgcccgcagcctgcggctcggccagc

SEQ ID NO: 229163 - DNA, 1287 bp, Homo sapiens
  chr2:232790819-232792106
  hyper
ccagcctcccacgcctctcccaggctcggcgtccccacgacagcacccaccttcggcggcgccccgggcttggcttcggagggccggagggagagcagcgtgagcagcagggcgcaggccagcagctgggagagatgcatggtgccgctggggtcgaggggcgcacacgggcggcagcgagggcgcgcaggtcggcgggcagaccagcagggggatgcggagcaggctggctgggctgcagggcgagcagggtcccagtgctgcgcggcgccggctgggtgcgctctgagcccgtgactctgctcgcgcctttataatccaacctgccgctgatgtcatcctcccgcccaccgggccgcccgggccaatgacaccacgcacgcggccgcgccgagggccgggagggggccgcgggggctcccctcccttatcccaccccggagggatcccgcggctcggcgggctcgctccaggctgcacttggagctgcagagctgagcgcacaggggaactccatttgcagcgagcgcgcgccctggcctgccgagcatcggtgcgcctggtgccctgtgcacccactaggtcctcatcgcactcactctacctggaagggatacgtagccctctttgcaggtgcaaagacaggctcagaggaatgaagtcacttgcccaaagtcatacaggcataaagttggcgctgcccgaaatccacgcagccctgcttgtcgccaaactcttccctgggcacctgacagccgcgggatggcattgcagctccgcctttcacctgccggtcagggcgggagcgcagaccacagcgacgtcgttaggttggggaggcagaggatggggttggaggactggggtgggaggcgcagggagagcggggttcgcctgggccgcaggggggagcgcaagtcttccacactggagagtgcaggggtgtcgccagcctgagtgtttgagcgcaaggcgggaacgaggggactgcgagcgcggaaccaagatattcatgctcatgcgtgtgctccgcggcatcgtatgctcgccagttactgctctaggttcacgttcagccggtttcggccacacagaacgtcccggggtctgactccgctggtgaactccctctgtgggaacaatgcgcacctgaccttgcctgcacccacgcgaggatccgctgctgggggaagcccgctccagtatcctgtgcactttcacaggctggggagagagcttcctagccagcggcccagtccagcctctgccagccgtgacaggtggtca

SEQ ID NO: 229164 - DNA, 662 bp, Homo sapiens
  chr2:233283355-233284017
  hyper
tgtctcagcttacccctgaaagcctgcactttccctacctgtcgggggcacttgcgcagtgccgcactgacccttggggttcctggctttggcgccagccccagccctcacggagatgtcagcccagcccgccggcgcgtccctccctccctgccctcactgccttccagagggctgggaaattgcggctcccgcggctcggctgaacacttcagttaacccagggaaattacttgcgccttcctcccgcgctctgccgccaagcgctcccctcccctgctttccctttctctcctcttgcgcaccctcctcccacgcgcagggacccctagtcagggccacgccccgggtctgcggccgctggctgggcgctcgggaatcgcactcaggcggatgacgtagcgcgaggagttcctgtaatctaggctgatctagagagagaagagcgcggcggcactgtacacgccctgcaccttgtacagcagctggttgaggtcccagctggttgaggtcccgcgacccccggacgctccgccgcgccgcccaggtcccagcccccgcagtcctccatgacctctagcatgggccgaggactcagtagctctatctcgcgcatgtcgaggcacgaacggaaaaaggcgctcaccttgcactgggccgcg

SEQ ID NO: 229165 - DNA, 712 bp, Homo sapiens
  chr2:233285252-233285964
  hyper
ggggaacccgagacctgtccgtctctatcccctttccgctccactcctggcttcaacaggttctccctagaacccacacttgcgcgaagtttcacccacgctggggcgcgagctggccgggcgagcccagagccatgcaggcgcggcgcgcagtccatggagcctcagagccgagcctgggagtcgcagccggcggatggacgcaaacaaagccgggaggctccgcgcagcggctacgaaggtgacggaagtggccgcggctgcagggactcaggcgccacctacccggcaggtgcgcgccggagcctggcagaggcggagcgggtcgggccgaagccgctgcctgagcaggagcgaagcggcgctagcggccggtgtctccccgctcccgctgccttctctgccgccgccccagcccgccgcccgcctgcctgcctgcccgagggagaggacgcgccggtggctccaccctcctccgcccgtcccgcgctcccttccttcctcctgcgaccctctggctacctggcagcgcggcggcagcggggacctgggtcgggggccgcggagacaggcttccgagggtcgtgcgcgggctgcggtaggggactccggatccagtcgcatcccgggactagtgagggtagcgggtacacccggcaggagtcccctccgatcccgtgtccccactcggaaccgcccaccaaccggttgg

SEQ ID NO: 229166 - DNA, 187 bp, Homo sapiens
  chr2:233350293-233350480
  hyper
ccagcccgccggcgcgcctctccctcctggccctcactgcctgccagagggctgggaaattgcggctcccgcggctcctctaaacaccgcaattaccccagggaaattacttgcgccctcctcccgcgctctgcctctgtgcgctcccctcccctcccctctcctgctcgtctcttccctcctctcc

SEQ ID NO: 229167 - DNA, 457 bp, Homo sapiens
  chr2:233351380-233351837
  hyper
ggtgcagacctgggccacctgggctacgggatgcgcgtggccgccggcctcctcgtgggcctccgcatggccctggggccgcagctgcgggaagggcggaagcaggctcaggaggcgccgcagccggatggggctcagggtcaccgcgaggagggacacaggcctgggtgcagaggccccagccgcgggcctcattcactgcggaaaccagggactatgagggttcggcggggccaccacccccgggtgcacagtggagtcttcccccctgtcccctccctgcacacacttgagggccgcagggttgggagggctcttattggaagcaagaggcgccaggcaaggggcctggcacgtagtgggccttcattgaaaggtcgtccctcttccccttcgcctttctcttccacgacctgccccagccaaggccgggtggagtgggggaagaagcggaggc

SEQ ID NO: 229168 - DNA, 131 bp, Homo sapiens
  chr2:233352077-233352208
  hyper
actggacggccctgatggagaacccgagacgggttccctccccccactcccaccatctctgtccccgccccgagccactcctggcttcaacaggttctccccagaacccaaacttgggcgaagtttcaccc

SEQ ID NO: 229169 - DNA, 815 bp, Homo sapiens
  chr2:233367696-233368511
  hyper
agggaggtttatccgtaggagtcagcccagttgggtcaaactaaggacccagtgcagaccccgaggcccagagacacaggtgtgcgcacaaacacgcactctgcggaaggccggggcgggcctggccgctgcgggactcctggcccggcgcccttgacgtcagcggctgggccgtgacgtcacctcaccgcccccgccgcgctcccgcccccgcccgcgggcactcagtctccgctaatggcaggcgacggggaatggcacatctgtcttgccgggaattagttcattgaatcaggcggcccgagctgcggcagcgaccttagccctggccccagggaggggtctgggcgggcggcgtgggggaggttcaggctggagggctgagtgcggggacgggaggaggggactcacctggactcgcgagggggactgagcgctctccaaatataggtcaatgtcccgctcagcctccctcccccagcaccgtgaggaccgaggcctggggcctggcgcccgcctggtggacctcgggggcaggctggggaccgggcccctgcgggacgcggcgcggcaggacgctccccgcgcctttctttctgcacctgcccctcggggtgggtccccctctttaccctcgcttccccccgcgggtgccgataaaggcggctaattcccgagcccggggagggagggggcgactgttccagtcaacacttccccgcgctcttccccgaccctcccagagcgttcccgctgctcagggcgaggagcagctgcggccagtttgtcctagcggtttaggaggcagggaggtt

SEQ ID NO: 229170 - DNA, 677 bp, Homo sapiens
  chr2:233388481-233389158
  hyper
cctcctccagccgcgagcccagctgcagggagcttctggcctgggaccccccccaggagctgcaggcagacgccgcccggctctgcgccttctatgcccgcctgtgcccggggtcccagggcgcctgtgcgcgcctggcgcaccagcagtgcctgcagcgccggcggcgatgcggtcagttctgttcacccggacccggacggggggcagaggggagggggcctggccagcctctgaccgccgctccgactcctgtccggtccgcagagctgcgctcgctggcgcacacgctgctgggcctgctgcggaacgcgcaggagctgctcgggcctcgtccgggactgcggcgcctggcccccgccctggctctccccgctccagcgctcagggagtctcctctgcaccccgcccgggagctgcggcttcactcaggtaccccgcgccctccagcccagcccagccctggcccggccccacccgcgcggcacagccactttctccgccgaggcggtaccctaaccctgtgcctccccaggatcgcgggctgcaggcactcggttcccgaagcggaggccggagccgcgcggagaagccaacggtaatgacgccccctgccgaccttcaggaggggataggctgagggcctggacgaggtcggaagcgcttctactgcagct

SEQ ID NO: 229171 - DNA, 84 bp, Homo sapiens; identical to SEQ ID NO: 198757
  chr2:233414992-233415076
  hyper

SEQ ID NO: 229172 - DNA, 270 bp, Homo sapiens
  chr2:233497774-233498044
  hyper
agcatgttttggaaacatttcgttccaatgagtgtttgaaaagcagctcccccgccccacgctccgggcgggcgcctcccactccctgaccccggggagggtgggcaccactcccagacgcgggggacgcgtgggtgtcgctcgggggcgctcgcctcccccacccagcctgtcccgggccgcgagcgcttccagtcgggttacttctgggggacaagaaaggcaccgtctgaacggtcgagacgctttttcccgctacggttttccccg

SEQ ID NO: 229173 - DNA, 40 bp, Homo sapiens
  chr2:233499064-233499104
  hyper
cgccgcgcctcacctgccagctttcactgtatccccccaa

SEQ ID NO: 229174 - DNA, 83 bp, Homo sapiens
  chr2:233499284-233499367
  hyper
cggggagggggggcggttgtgggaaccgaacttggccgctggcaccggtccggcgggggctcgttgcggtcctgctctgtgag

SEQ ID NO: 229175 - DNA, 99 bp, Homo sapiens
  chr2:233562009-233562108
  hyper
gtcacgtgacgtgcgtggcgacgtgtcggccatcttgtgttgttgaggctgaggactgactggggttctgagactccctgtcccggaccgcaggtaacc

SEQ ID NO: 229176 - DNA, 99 bp, Homo sapiens
  chr2:233562462-233562561
  hyper
gagctggagggctcgccttcctctgcttgcttctccgcgccagacacccgcccagtctcggggtggcccggtaacagctgctgcggccagacagctgct

SEQ ID NO: 229177 - DNA, 1233 bp, Homo sapiens
  chr2:233740542-233741775
  hyper
gacccctcacacagcgctaccggcaacttgcttaacctagaggtggggggtgacgtccctgtcggccccgtcacctggggccccagcacctctccttggctttgcagacgatgttccacaggagcccgtgcccacgctgtggaacgagccggccgagctgccgtcgggagaaggccccgtggagagcaccagccccggccgggagcccgtggacaccggtcccccagcccccaccgtcgcgccaggacccgaggacagcaccgcgcaggagcggctggaccagggcggcggtacgggcggggcgggggagggaggggagagggagaaattaggaggggcggggggcggggggcgcggggagaagggccggccaggcgggggctagcaggtgacatggtcctccgtcctccgcagggtcgctggggcccggcgctatcgcggccatcgtgatcgccgccctgctggccacctgcgtggtgctggcgctcgtggtcgtcgcgctgagaaagttttctgcctcctgaagcgaataaaggggccgcgcccggccgcggcgcgactcggctgcactcctcacgcgcctgtatgtccgcgcgtgcgtgtccgcgcatgcaggtgtgccagagcgtgagcgcgcgcaggcgagcgctcagggcgggggtgcgcgcggggccgagggtgggtgccgtgcacgcgcgcgggtccggaggcgcgcccgaattccccgcaggggcgccggggcgtgcgtgagcgcacagcatgtccgagcccgcctgcgtgtggcgtgcacctgagcgcgcgcagggccgcgcggctcggcgtccccgtgcaccacggctggagtgcctcaggagcgcgccgcatgtgcgtgcccggtgcgcgtgcgccggggccgccagggcatcggagcgggtgtgcggccagcggtcttagcccgtccgggggcaccgtcacggtcagggccacgccacgggcggccccttctcccggcgccgcctcctctgcctgggcgcgggccgaggccctcgccgcgctccccggggcctgcctcccatcccgctccgctggggttcagagcgttccgtgaggaggtaagcgctagggcaggagaggccgacagagaccccggggcccgccgctccttgaggccggggttggggagggcaggggccgtcggctctcccagccagaggccgcgtggttttgggggacgtcttgactctgagtcctgca

SEQ ID NO: 229178 - DNA, 321 bp, Homo sapiens
  chr2:234159999-234160320
  hyper
tgttcctaaactgcgattaaaaataaaagtggggggagacaggccaagaaaaaaaacacgaaaagggttgaaaagcagcaaaagaaaagtaagcagtcaggcggaaacggcccctttcctgcctccttcccgcccggcgctgggccttgcgcagggcccggacgcccccaagcggccacctctctgcagctgacgcttccggctacaggctggcgtcactagcgagcgccctgcgtaggcaccggctcctgagcccgtgcttcgggtgagggggcgggtcttccggccctctcgaaaatcatttccggcatgagccggaag

SEQ ID NO: 229179 - DNA, 794 bp, Homo sapiens
  chr2:234474813-234475607
  hyper
aggggagcggagggcggggaagactgccactaaaattatcaagcctaaaggccttccagtatgtatccactaatcccatcgttagccctgggggcctaggtgacttccccaaggtttcacatcgagtgtggcggagggtcacttggagatgagaaacgtaaagcgcctagcataggtaccaaatgacaggaagcgctgaaatgcaattatttttcttttcctcagaagaaaactaaaaaaacacaactcgagagtctagcctcgagctcgttgtctgcattcctgaattcccaactcctacggccggccgaggccctccaagccaccacaggcccaggggcgcaaaaaggcagaggtccccgtggcccgaaaccactgccccgactccaggagagcgccgcgtcctcaggcaggcctgggcagcctctcgcctcgccctcctcagactgggccaccaacactgtccctacgcttcccacgtccctcccaggatccccgggcgccagccgcacttactgcctaaagcccagacccccgccctggccaaaacgcgaagcgaacgaacccgccccaactgggcgccgccatgttggcgagggcgggtctccagaaagtgatttatggatcgtggactatgcttcccaggatgccccgctggagcgccggcccctcgcacggggccttatgggaaatgtaactcttctgctccaagagtttgggaactggagcgggagcgggagcgggcaaggtgagctcgcttacaagtccgctggtgagttcgcgggtccactcgg

SEQ ID NO: 229180 - DNA, 90 bp, Homo sapiens
  chr2:234763372-234763462
  hyper
tctccggccgccacggccggtggtagttgtacaaacagctgtgtgcttattcatcagcggtgctgtgcgagatccggtgggatgcgtgtc

SEQ ID NO: 229181 - DNA, 216 bp, Homo sapiens
  chr2:235404345-235404561
  hyper
tccactccccaccgcggccccccgacctggtcagtagctctggcgttcagacaaaaggtcccctgagctgggggtggggggcaggtcgagagtaggccggtaaatcagacttcgcagctccttaagtcaccagtcctgcatttgggtgcagagattccgttttaaaaattcgaagcatcgctttggttcgctctttgttcgcgggcgcgggttctc

SEQ ID NO: 229182 - DNA, 516 bp, Homo sapiens
  chr2:235404621-235405137
  hyper
ctcgctcgctccccggtcgctccgggcgcattaccgcttcttcttctgcttgagggacttcctgcgtttcaggatcatctcatagagcttgtccatgccctcggtgaggccctcgccgatgatggcgcacgccggctggacgtgataggtggtggccgggataagctcgtgcagcgccagctgcttctcaatctctgccaccggcagcgacttgggcaggtcctgcttgttggcgatgaccagcagcggcgtgccctggttctcggcgaacttggtcaccttgtgcagctccgtcttggcctcctccagccggtccacgtccaccgagtccaccacgtagatgatgccgtccgtgcagcggctgtaggacttccacagcggccgcagcttctcctggccgcccacgtcccagaagtggcagctgatgcccttggccgtgccgttgctcagcttgatcttctcggtgttgaagccgatggtgggcaccgtgttcacgaactcgttgaacttgagccg

SEQ ID NO: 229183 - DNA, 424 bp, Homo sapiens
  chr2:235859955-235860379
  hyper
ccaggcctgttttacgcgccgggggcccagaggcgcccaggtcagacaaagtgtaaacgattccgaccagagcccttcaatctgcattccgcttcgcaggaaactctcctccttttatgattttcagccggactgccttccctgttgttagtttgtaactttcgctccggcccccgcagcctcgcgcctgccttccctccactgtcctcagccaaggtgtagtaaagcgtctccgaacgcggcgcgaccctcgcccacgcccgctcgcggggggaccgcaccgccccaggggtcctcgctaggggttcccggagaaggggtgggagatgggggtgcgggggggcacaggagcgcgggccagcacccagacctgctcggtaccggggacccagacccgaggatgccgggcggccaaggccccgct

SEQ ID NO: 229184 - DNA, 928 bp, Homo sapiens
  chr2:235860739-235861667
  hyper
cgcgcccccggctgggccgagccgctggccgacgagcggagcctcaggagccggcggggacgccatgcgagccaggtaggcaggcggcggcggggagcgcctcgggcggcagggccctgggggccggcgggggcgcggggtcgtgctcgggggctttgcactcccttgcgggcgcagatcgtgccgcgggcgccgatcgtgccaccgccgcctgagttcggggctgcgcgggtgcctgggcgtggggcggcttcggggaagcctcgcgcgcccctcgccgctcccccgggcgctcgggtctccctggtgctggtgggcagggacccggcccggggttccgggcgccgagccgcagccctccgcgtgcgctcgggccgccccccaaccccggctctggccacttcccggcgggcggccctgcggggtggcctccctgggcaaccggacgcgtcctcgggcgcaaatcggggggcgcgctcggctcacgggggccgtgggggccacgggagggcgtggaggggtcggggcgcccccctcgagcggcgctggggaggagggaaggacgcgcggtctccggttaaacttgttggtgacaatgcatatttcaacttcttcggagatccctcctgtgaggatgaaattgaaaactccggtttctggcttggcgatcgggtgaccgagcagccgcgaggtgacagcgccggcggcccgcgggcggggaccggctgggatagaggcgcgttgttctctgagcgatgtttaccgagaagcccgctccgcggcacgggcgggtgtcagttgggaccccaaccctgggtcccgcggctcctagcccggggcctgcggtgtagacgggggttggggacaggcccagctggccctgaccgggtgtcgggcgcccagagatgccgcgcgggaggagccgcgg

SEQ ID NO: 229185 - DNA, 355 bp, Homo sapiens
  chr2:236402218-236402573
  hyper
agaaagttaccaaacgcgggaaggggaggctcgccaaccaagcgaggccgtgggacactggcgagtcgcagaggctcctggagccagccgcttggaaacaaacaacaacgcggcgggcgaactcccgggcagcctcccccgtgccggggcgcgggggccgccgcgagaacccgggcaggagctggcaggcgcggggcctggccggcgggagggtcccgcaccccggcccagtgtgaacaccccgcgcacccccctggcccggcccgccgggggcgcggactacaagtcccaggaagcccagaggcaggcgcggggcggggcctggcgcaattccccgggatccggcgcgctggga

SEQ ID NO: 229186 - DNA, 1404 bp, Homo sapiens
  chr2:236402753-236404157
  hyper
ggcttgcaaggcgcctgcgactcggtcccaggtcggcgggcggcgcacggcgggctcgcgcgggggccccggcgcgccgggcggcgcagtacgcagcgcgcggacccacgccacggccaggagcccagagcagcgcggccacactgcccaggggtcggccctcggccccggcgctcggagcgcggcggctgcctgggctttaatggctgctccgcggagcagcgcctagggctggaaggcggctgcggctcaggaagtcacccgagcaagcctccttcggggccggccgcacccgccgcggcgcgctccatgggggcgcgctccccccgggcggcccgctgacccgggacgccggggcccgctcgctcgccggccgcgcgtcccggccatgaactgagcccgcgggccagccccgcgcctgctccgcccgcgcctttcttctcgcgcctcctccgcccgccgccggcgggcccggctccccgggggctgcggcgccccgggctcggcggcccgcgggccccggggcgcggggcggcggcggcggggggcgcgcggctccgggcgcggcgcctgcaccatgaactaccagcagcagctggccaactcggctgccatccgggccgagatccagcgcttcgagtcggtccaccccaacatctactccatctacgagctgctggagcgcgtggaggagccggtgctgcagaaccagatccgggagcacgtcatcgccatcgaaggtgagggccgggccgccttggggcctcgggaaggcacggacgcccgcggcgcggcgggggtgtgcgctgtgtgcgtgcgggtgtccacacacgccggccggggcacgcggctgctccgccgagggagcactgcggcgctgcttgtcttgcaaggccgggcgagcgtcgcctgcgccccgccgcgccgcgagctccgccaggaagatagatcgtcagcgttaatttgatcgtggacaatagagtctctcctgcgggaaagtggctcggtgcctccgcgtcctgggctgccggagcgtcccggcccagcagacgcctgggggcagccggcggggtcggcgccacccgacccctgacaggttaccaggccaggcctgggcgtcttgctggacgttgaagacgtgttctgagaagtgctgccgctgggggcgaggcccgggccggcgtgtttgggcggtgcagggctgccctccttagtgtgtttgcttaattcaggggtgcagttgaacttagtggatgccgagagccagccctagccgcgggagcatcgtgtccaggtgcccctgtgcaaacgctggaaccggtagtgtgctttgtaccaaccaaaagtccggggttggattagaggaagaaccctaccaggagggcagggcgtcctccagcggaa

SEQ ID NO: 229187 - DNA, 1536 bp, Homo sapiens
  chr2:236577970-236579506
  hyper
cctcatttaaacgcgcagcaggtgagacatgcccctcgttttgttcttgcaggccaagccccagagtgggcgtggttttagggtgcaggctggtgctgggctgggcccctcggaggctccggtccgcgctgcgtcgatccatcccggcgcttgggcctgcacgccgccgcgctcgccgccgccgccgccgccgcgctcccgggactcggccagcccggctgggcgcgcggcccgcggtcccttgcacgtcggcccccgtcgcccgccccgccccggcgcgcgtttccattttaaaccgccgcccgccgcccgccacccgccacccttcggccgcagccggtgcagctgtccgcgcgtcccggagcccagggagtggcggaggctgcggaaccgccgagctgtgcagccggagcgggaggatgcgcacgggccccgcgtcgtagacaatgaagccgcgggcgccgccgcctgccctgggccctgcgcaccgcggccgcacctgccggcgagagcgctctagcgcctgaccggccgcctcgcttggccccgccggcccatggctcggcgccccgggcccggaccccggcactcgggcggcgcggcgcacgggccggcgggtgccaggggcgccgtccccgcagcctgagtgcggccctcgcggtcagcggggggcgtgggccacactcccggcccgcctgccctccccgcttggcccggcgccctcccggcccgcgggctcgctggatgcggcggggccccagcgcgcgggcgacatgtacttgttggacggcagtggcgagcccgcgtcgccacccgcggacgcgatgccgcgcgggacgccccccagaaagactgtctaccgcatctccgtgaccatggtcaggaaggagcagctggccgcgccgggctccggcggcccggacccacgcccggttcggcggccccggcccgcgcgctccccggacgcgcccgggaggcttgaggaggaggccgaggaggcggagggcgccgaggaaccggagggtccccggccgcgcgcttgggatttccgcaccttccgcacccgcagcaccgggcagctggaactggggcggctccggccgtgcgcacgcggcctggaacccgcggacctggccggcagcgccccggccgaggaggagggacgcggctcgcccgcgtccggcagccccgacgtggagggggcccgggccgcgcccctgcggcggagcctgagcttcaggcactggagcgggcctgaggcgccgcaaggccggacactgggcggcggaaggcgccacagcagctccgggagcctggcctgggcgccgtgcgacgaggccgcggccgggaccaccctggagcccgcgaccgccacgcagcccgcctcggagaagcgcaacaccctggacgtgggcgaggtgctcagcaagaacgacgcgctctcggacctggagcgttgggaacgcagtaagagcaagaaccgcacgctggacaacagcgacctgcagcggctggagcgcgcgcgggcggcggccg

SEQ ID NO: 229188 - DNA, 393 bp, Homo sapiens
  chr2:237068294-237068687
  hyper
cgggccctttaggacgaaggcggccacaccagagacgcaccggcatgacaaaggccgccagggacccagtggctgtgaaataaagagatgaaggctttgggggtgggtgcccggagtgacgtccgcccccccaccccgggcccggccctgcctcaggcttttgcctcgggcccaggccgctctcgagccgtgggcgcgccctcggggctcggcccccggtttcggtctcaggcccccgggagtatcaggagaacaaggtcgcccgagatgggccgccgcgccccccgacggcctccctgcctccctgagtgtccgagccgccaggctggtagcgcagccgggcctcctgcctctctccctcgaggcccacggggtgcacggcttcctgcagga

SEQ ID NO: 229189 - DNA, 686 bp, Homo sapiens
  chr2:237072477-237073163
  hyper
ccttgcggcccccgcgccaggccagggcgcgacccgggcgccatcccctccctgccaggcttcatggcgctgggcggggcgcggccaggagcctctgcggctctcggcgccccgcagagccggccgacgccctcggaggactggcccttctattttattgggctcgaaaaccaagtctgggccattttccgccaccggaactgttgggaacgcggcgggaaagggtgactcggtcgctcccagccttcaccctgcgcctgaagtttgggtggaggtcttggtccccaggcccctccgccgtggggaggtgacggcctgtaagtagtaaaaattaagtcaatattagtactaacccatggcgggccgcgcttccccttcttcggctgagaacctcgccgagggccgagcgccgctgcatcgcagcggctcaccggcctcccctccttcccccactcgaaaggctgaggctggcgaagccccggcttctctcgcgcttcgggctgctggcttggtggcaccacgctcacactcgctggcccgctgaacgcccctgggcctgtccgccgcagtatctggcggcgcgcttcggggtccggcagcgagcggacagggctctgagcgcagggccggggttgggacaggagtgggcttggggaccaggcacgccccaccgagatggggaggcg

SEQ ID NO: 229190 - DNA, 542 bp, Homo sapiens
  chr2:237074883-237075425
  hyper
gctgcccgcggcgccgctgctcggcggggtctcctccagcgcgtggcccgggtcttcctccttgtgagctgcctggccagtcagattgtcatccgagctgtagtccacatcgctctccagcgagaagctctcctccttgcccttcgggtcgtcttccacctttgactcgtctttcccttgccctcggacagccccgactgaaagcaaaaccaaacggcattttattacatttcgcacactggccttcctttctccttcccaccgtcatttggacattccgcgccccccgccccccaccctttagcggattgtctttctatgacattaacacattgtgatttcctggcctttgaggggtagaggaggggtggggggagcgtgagaaagctcaaaggagaggaggcagtacaggcgacggccctttgcccagaaccatcactcaaagggccgccatgcctcccccgcaccctcccagcctcggcagcgtcaggagaagtagcaggaggcgcgaggcccaagagattgcccgctttgtccctggg

SEQ ID NO: 229191 - DNA, 473 bp, Homo sapiens
  chr2:237075813-237076286
  hyper
cggcctcggccaaacgcatcgtcagatagatatgtggcccagggcagcagctggtcgccgggcgctaaacgccccccctcccgagaccccgcttgttgggtggctctgaatgtcccccggaggcccagcggcacagccgggcctcatcctccagctcctcccgcgggggtcgagcgggggcgcggcctcgcccccttggtctcccgcgggaacccggcgctggcccgcccccgcctcctcccgccccctcgtcccggctgcgcgcgccgccgactcaccgagcgaagcctgcaccgtctcggccgcggagaaggcgagcagcgagccctctttggccaggaagcctttgccgtcctccgcgtcagcctgcagcgcctccgccttgtcgaagttaccgccgccgggcagcggctgcggcgcgaacttgcgggccgctgccgcctcctggtgctggggcgacgcggagaagccgc

SEQ ID NO: 229192 - DNA, 148 bp, Homo sapiens
  chr2:237077306-237077454
  hyper
ttgtcgaggccacctcgaagggtagcctccggggcccgcacccccacggctgggccgggggcgctttatttcttttactgtatttgccatggaaccaacctgcctgcggctcactccagcgctgggtgctccggctgcgcctggggtc

SEQ ID NO: 229193 - DNA, 1165 bp, Homo sapiens
  chr2:237077634-237078799
  hyper
cgtgagcgatcccgtctctcatttttcatgacattcttaatcatcgcacctatttacacactttgccagcgcgcaccaaaataacaaccacgataattatgataataaagagagtcctttatctgctccatcctcggggaggaaggggggagttgctgtgcctccagattgtataacgtgagattatcctgatgaaagctttatgatgtttgctcaaataaaagctgcgttttgtaaataggcgctaattaagcacgttgcgaacgcaaggagtgctcaccctggcgccgccgcccggtttccagcgcgaggactcgagggcgcgcggttcctctttgctaactgcaggatggagccgatcccctcaggatgtttcccctgttctcgacaacggtaaagacccccaaatttgaaagtaagggaattttggggtggagggaaactagggacgtacttatcccctcttccattttcaaacaaaaaactttcagctcttgtcttccctttaaaaatggaatcacttcttgacaacggcagaccgtgcagagcgcaccagcgcgagcggggcttcctcgagtctccaaggcccgggcttcaacttcccgggtctagacgtcagccctgaaccgccaacagcaccgggttggggagaaggaaagaagggcattgttagttcggtcattaaaaatcagctcacgccgaggagctagtggttggggagttggcccgtgttggacgtgtgttatgtatcacttacaagcacatttaattgggagataaagataaatcgatctttatgaatttatcgacccgattctttgaagctcttttttcgcgttcttcctctttctctcgctctagccccaaggccccccgggggacgtcttaatcccagatcagctcctctgccaggagtcccgccggagacccactgcccacccagcagacctggaggaaagaggggagggtgtgtccttggcgccccgggacgctgggaaaactcgctggtccgccgccagccctctcctcctcctcgcctcctccctccctaccaccacccggacaaagacgtctcgatcgcgtttccccactccaggccgcagtaatagatcgctccggcagcaggcggtttgaaaggaattcattaggacgctgcctggattgc

SEQ ID NO: 229194 - DNA, 227 bp, Homo sapiens
  chr2:237079107-237079334
  hyper
agccggggcccttccggcttgccactgacatgccgggggaagctgttattcattttacctaggcaggtttgccatgcactttgctatttcgccgcaaaaatattgttctagggacttttgtcgcctgattaccctctgagaggcagggattcctttgattattttggtgattattctacatttaaagttcagcaagaagatttaggtccgtcgaattatagctgcac

SEQ ID NO: 229195 - DNA, 214 bp, Homo sapiens
  chr2:237079604-237079818
  hyper
caaagcgttcagagcgtggggactgcggataataaaagcctttagagtttttcctcggctcctcggatagatttatggacaggagcgatagatgcatggcttatccatcctccggattcctacctgcttagctcgtaacagcctcaaactgcagagtcctccgtgactcagctcggcccagtctacgcgggaaaatcaccgggcacagatgttt

SEQ ID NO: 229196 - DNA, 382 bp, Homo sapiens
  chr2:237080168-237080550
  hyper
cagcccagcccagcccaatccggaggaggaagcaccgcgaatggcgcgcttcgctgccgccgccagagtcgaggtaacgggtggtcgtggagagggtacggtgtggccacccgtggtctcggaggacgcggggaatcctgcgggcctcgagggtctggcgctcccgccagtcgcccagtcctaggcgacaggctggtttctcgggcaaccgagttgtttttatttacagggattttgagaagcccgatcgtttggtcattgccgcagctcttgctcctggcaatagttgggaaataacttgggatgggttttatttatggaagggcaattgggattcacacccagctaaccctgaacagtccctcccgagcccaggacgcac

SEQ ID NO: 229197 - DNA, 1354 bp, Homo sapiens
  chr2:237081299-237082653
  hyper
cttcacacctgcgccgccctctccactccagcgacgaggaacaggaggagccacagccgctcggcccgcgaggcgagccctcgtggcatctgggaatgggagggtgggggtggaatgctacacagccccggagcccctggggcggcgggcgctgtcgcgccgacggcgcacccggcgagcgttgcgtgcgcttggagcccgggactaccccaactccacgcggaactcggctcccccggccgggatccagatgtccgagggcgcttgcgggtgtcctagttctttttcagagcagccgtaacgattgaggctggggagttcaagaccactgggggtaactgatcgcccatcgcccttcgtcctggaagcccagcgcccgcgctcaccgcgcgtctctccgggagcacctagccaggcaaagggggattctccgtggggactgaggcgtacgcccgccccggggctcccggcttgggaagagggagcaccaggcgaaggccaggctgggggctcgggtccaagggctgcagctgtgcgggcggaggccgggggtgcgggcgggagtggtgtccccttgtgtcctgcccgggtctggctccggccggggttctggaggccgcgtccgtcggcgaaccccagcccttggagtgttggggagggagacgccggccgccaggcgcttctcacctgggtttatctcctcccatctgctccctcggattcccgaggccccacctttcggggacttcaaacgcgccctgccacccggtgcccggctttcatctcccgcacagcaggcattgtttgcgggacttcacagagatgctaatccccgggccgcgtgaaccgcggcctgggaaccgggcagagggcacggaggggtgagggggtgcgctttggcctgggctggggaccttcgggatggcctctcgggcagccctcctgaggagcccgggtctgctaccgtgcgggcgccgcatcccgcctgcctcgtcctggaaggctgcgggcacgtcgcaatgggcctgggctggacgcagccagcgtccaacacacggagaaggaagaagcagaggccagagacgatggccggcgcttagctgtgagccccatgagcttccaatgctcgccaggagaccgtgtgtctaggagaggcaggccatggaccctatgagtcttccctggaggctggaaccccccgggactcctggacaccccaaaccaagtccccagccgctgcctccacgacggccccgacccccttcagggaagtagtattttaaagaggatgcggtctgcccggagggcacgcatttaaccctttagaaaccgcgctggagggagcagaagggtg

SEQ ID NO: 229198 - DNA, 2071 bp, Homo sapiens
  chr2:237086405-237088476
  hyper
ctgggtgggcgcagcgccatccccattgcacgaaccgagacggaggtgcggaggccgtgtctggccctggagagtcctccctctgtcgtctgctctcagcaccaagtctggcatcgccagggcgccaggcacggccttcccagggagaagccttttctgtcatttttgattattttactttaaatatgtgtgcaaaaccttagctacattctcgtgggccagggataggcaacgcgtgcacctagacctcttgcttgcccccacactccgtctccccagggccaccccctcaacccccccatgccatcagagttttgaacaccgctggagatggcgggggggaggggggcgaatttggaggcgggacccgaactgccggccaaggaccaagggctggcctcgcccttcgctcccactgggcaccgttctcgccgcgggaccttgccttgagcgcgccccctgcgggccgcggtggggattggccccttggaaagagggaaataggctgcgcgcgccggggcgggagaggcgctgcctccagtcctcccgggtgggggtctcccctccgagatccccgagggaacccgtcccgtgcactaccggatttccggtctctgaccagctggggcttcatttctacgcgtgcttttactgctctcctcctcctccggcggttttttttttttttttttttttttgaaaggagcaaacatccccagctttaatgcggcccaattatctcgtttgcacgacttaaaatgtttctctttaactcatttcaatctagtaaatatgcttcagcaagtagctaatttctcagggatggcttcgcctcgccatttgcatataaagcgcgtcggggcccggccccttctccgagtgcgcgagtcccttcttccggtgcgcgggtggcaggcagccaggcctcctagtccagggaggtcgcctaggtttggcctagggaaggcggagtctggggtccgcgacagtgcctggggaccagggtggcagggagggcagggaaacttgggccggggagggaccaggaccttctgagccccccaactcccccgcctccccggcctccgccgtcccttattccgaggaggggcgcccgtggggtaacacgttggcgcgagggtcgggggcgcatttatccttaagtgcgtttattaaatcgcgtctggagatggatggacgtggatacaggagaggaaatctcagggctcagtcgagcaatctcctggctttaaattccgaataaaagtctcaaatattcccgggtcatgggggcactgtctcattaaaaccactctcgtcctgaaactgcaatgcagacattaaagtgcagtatttttcaattagagctgacgaattcaatcaaaattccatagattaggatgaaatgaggcatgggtcatttacaggggaatttaattgccgagccattagacaaatagtatatttgccattcccgcgttatccatcattttcgacatcaataccggggccgcatctccccgtcccgcggccgcccggcgtcggctgtaaacactcccttccctgtatcttctgattatatctgatttcatttagggccatgggggattataaatgttcacgcaatcaagttcattaggacttcaaatcgcatttctgattgggatcgctctgccgccgtcctcccagcgcctttcaaaccccagcgcttggctttcaaaacatctttttgaatttaaagcctcacatccttttgtcttccgacgccccctcccgccccacccctcccggcggctgcaagctcttcgggcctccttcccggggcaacagccctgaacccctcttgctgccagcgggtctggggagggtggggctgggctccgcaggctgtcggaaccccctcccacgccgcgcagccgcggggcgctcgtgtccctgaagcctgagctgggcgtggaggacaggccccgcgtgttcgcggatcgcgagtgggggccagccccgcacctcccgtcccggccgggcgctgcgggtagggggagcggagcggagggggcgcctcccacctttg

SEQ ID NO: 229199 - DNA, 59 bp, Homo sapiens
  chr2:237145137-237145196
  hyper
gtacgccttaaacacgtgccgcttgctgaatgtcaatcacacctcggtaaagctgcttt

SEQ ID NO: 229200 - DNA, 579 bp, Homo sapiens
  chr2:237145399-237145978
  hyper
agaagcagcaagggcgatgcggtttctgagagagccgcgcgggttcccagcactaaacgtgggcgactttccttaatcttcccccagagacagaaggccatgcaatgacaactccaagggcaggggctggagcattttgactaacagaaaagtcaggatgacacaatgcaagccgagaaaccccacacgagtcctgtgcaaagacaggtggccccgctgcctttccgagacccggagcacacgctgggagggcgctctctggggacgggggctgcgggacccccagaccccgcgcccgggcgcgaactagctgagcggccgctgggcctccctagaggccggcacagctccgcttccgagcgggcctggaagccccgcccgaggagctaaccatttatgtcacactgtgacaattattctgcataaaattatcattaaaaaccctaatttttcagcctccaaccccgccagtggccttttagcatccccggcgccggcggctgggctgtgatcaccgcgctcattacctcggcgtggcgcctcccgcgcgcgctcgcaatcaagcgctaattaaacccg

SEQ ID NO: 229201 - DNA, 247 bp, Homo sapiens
  chr2:237146289-237146536
  hyper
cggggcggggcggacgccgcgggcctgtcccgaggtccttacccgagcgaggcggccgtgcggcagaggtgcagaggcgccaggccctcggcgctgagcaggtcggggtcggcgcggtgctgcagcagcaggcggacgcaggcggtgtggcccccgaggcaggcctcgtgcagggcgccgcggccgccggggctggcgtctgggtctgcgccgcggccgagcaggtgtcgcacgcaggcggtgtggc

SEQ ID NO: 229202 - DNA, 310 bp, Homo sapiens
  chr2:237416056-237416366
  hyper
agaatcttctgcttcgggcaggaaaaggtgaggccgggtttgcttcgcaggcacggagcgcgcaggcgcagagaggtgtttcactccttcccgtcgcgacccagagactcgcgaacctcacttcggccactcaggtgggcgcgacgcggccctagcaacggaaacgccgcgcctgcgcattgccttccgcctgccccctccccccccccgccccccgcattccgcgcctgcgccaccgcgggaggcctgggtgggcgcagctgtgggagccggtcggagtccgagcgctccgtcgcggggcccggccgct

SEQ ID NO: 229203 - DNA, 97 bp, Homo sapiens; identical to SEQ ID NO: 198778
  chr2:237436060-237436157
  hyper

SEQ ID NO: 229204 - DNA, 51 bp, Homo sapiens
  chr2:237994047-237994098
  hyper
cccgggcgggggacgctgcccaacaagcaggtttgcggagactcacacctt

SEQ ID NO: 229205 - DNA, 59 bp, Homo sapiens
  chr2:238200162-238200221
  hyper
tctggatgaagcctccgcatctggtttccatctccctgcgccgcgggactgaagcccgg

SEQ ID NO: 229206 - DNA, 1135 bp, Homo sapiens
  chr2:238395041-238396176
  hyper
ccctaatgtccattggaattcggaaggacaggcaggccgggcggactggagacggcggctcgccttgggaccctctgagcttgcgggccccgctgagcacccaaaggccggccctagagtccaggagaagagcgcagcggcgcggagctcccaggcgttccccgcagcgcgtcctcggtcctggaaccaccgcgccgcgcgtcctggcttccacatctgccccatttgcccgcggatcttgactttttcttggcgggcaaggcctcggtctcctccccgcagcagggctgcccgcggctgcgggaccctcctggtcctgatgcctggcagaatcgaaggggtgagggtacgctctctgcagcagaaagccctgggcttaaagtcctatttattatttggcgttgccacttactggtcggtggctttggtagggcgcgtttctgagcctcagtttccccatttgtaaagccgaagtacatagcgctttccctgcagagttagaaatttcgacgatgtgccgcgcgctctagagcgcgctcagcaagcgggtcccaccgtgcccaaggcaggaccgcggcgcgatgtcacctatgcaaagtcgccgcaactcacgggaatcgcagctgtgtgctcaactttcccctccccgccgccgtctttctccccaaactggcttgggggtcgagtatccggggctctcccccgcactggcgcttcccgcgcgggcgccccaggtgtccgttccgttccgccctctgcctggcagggcatccagaggtgtccgcgctcccggagctgggcggagcggggcgcagcccacgtggttcgggcgggaggcgccgggacgtggccagttgcccgcctgccccggagagccaggcgctaaccagccgctctgcgccccgcgccctgcttgcccccattatccagccttgccccggcgccctgacctgacgccctggcctgacgccctgcttcgtcgcctcctttctctcccaggtgctggaccagggactgagcgtcccccggagagggtccggtgagtgcactgagaagagggaacagcggggccagggtggcgcccaggactcggggcttaggctttggggggtgcgcggtgtcgcgtgcagaccca

SEQ ID NO: 229207 - DNA, 197 bp, Homo sapiens
  chr2:238535951-238536148
  hyper
tccctcaggtcccgcgtgcccggccctgggcatccgcagcgtccccgtggtatcggacccccatcgtccctgacacctggcgtctccgccccccgcccccgtcccccgccccgccgtccctggcccctgcagtccctggcccgcgctgcggacctccggctctggcttcccccgggtccccgcggcccccgtccccc

SEQ ID NO: 229208 - DNA, 317 bp, Homo sapiens
  chr2:238583489-238583806
  hyper
tggtggaataaggacgtgcacgcacgtgctggctgttgaactgttgcctctccactgcaaaccctcccttccttgctgcagggccagagctgtgccctatcgggccctgcccccagagagagcctgggcagtgggaggagggagcccggagcacgctgcttcctgcctgcttcctgtttctgtgagcgtcaccccagcaacgggatttcaccctggctgcagttgttggttctgtttctagtgtttttcacacgcccagacaccaccctcaccagtccctcctgagcccccgctctgaggtccgggtccccactcca

SEQ ID NO: 229209 - DNA, 64 bp, Homo sapiens
  chr2:238876296-238876360
  hyper
caactcgcgcccggtcctcgtacctgcagcgggaagagtaagtatggacgcttacctacaactg

SEQ ID NO: 229210 - DNA, 233 bp, Homo sapiens
  chr2:239072228-239072461
  hyper
ggcccttcaggccgaggggacgtcgccctcgccccacccctgcgcccggcaggcccctggtctcgctagcacctgtcgttcagggctggacccacgcggcgggcgggtgaggggtccctggcgcgcggccaccgctcgctctgtgccaggtgcggtgcggcagcgggagcgcgcggagcccgaaccctgtacgtgtggccccgccgggccggtcgctgcgagcctcgccccgg

SEQ ID NO: 229211 - DNA, 38 bp, Homo sapiens
  chr2:239112200-239112238
  hyper
ggctgggtggaggcggcagcagcgacagacactcagcc

SEQ ID NO: 229212 - DNA, 296 bp, Homo sapiens
  chr2:239140082-239140378
  hyper
ccccaggggctggacgacctctctcgccttcgctttctcaagcgtaaatcgggcggcgggggctgcagagccttcatctcttcctccgtcccgggatgtcggagagacggcagcccagcctccgccaccgcaaagctgcttaacgggcagcgcgagtccctcgggcaccgttggaggccgttgctcaccgttgggcaagtgctttaagaagcacgaggatgtcgagtgtcaaatgcggcaaagggctcagagctcgccgccaaggggcgtggcctccgggccgcggcggcctctgg

SEQ ID NO: 229213 - DNA, 348 bp, Homo sapiens
  chr2:239148948-239149296
  hyper
tgctgctctaggaccactgatctgccgcgcgtgcgagcaggcgtccacccgtccgtccgtccgtccgtccactcattcattcacccattaattcattcatttccctccttcgccgatggcgcctccagagttgagcgctggggccactggccccaggagatgcgtccctggtgtgcagagccacagtcaagtccgcggtctctggacctagaggggtttcaggtcccggctggggtggctgccaagccccggggaggcagggtccattgggcagcggtggcggggcggcccctgagtttcttccggactcgtccagacgccgggccggacccccgacgccgccctccg

SEQ ID NO: 229214 - DNA, 149 bp, Homo sapiens
  chr2:239228861-239229010
  hyper
gtcctcaggcagtcgcctctaacgcgagcgaacaccggcttcccgaggccgtcgctcggcagaggaggggccaggcgcccgatcccagatcccctttccccgccccgccgcgccccgcctgctctggcacagccgcactcccgcaaatc

SEQ ID NO: 229215 - DNA, 773 bp, Homo sapiens
  chr2:239755490-239756263
  hyper
cgcccttgatcacgcggcttgcctgacagcccggctcaggcccgggcctaattgagcccgggtcacctgggaataggttcaaaggcatcaaagccgtaaaaaccacctccaggcccagagccagagcggcctggcgaacaaagagccccccaaccacttcaaacgcgctcgcgctcgccgtccagatggcccggggccggggtccgtggtgtcgctcaccgaggccgggccccacactccagccaccctgagcctcctgctcggagctgcccgcgggctgccagcgcagcggaggctgggcccggggcagcctcgtgcagctcccggagcgccctccgtcctctgctgacccgcgaagcgaaggcggagcgcagaggctggggccgtacaaggcgggccggcaggcgccccaacccgcgcccagcaacccgggtagggccaggcaggcgggcgcggcgggtaccgggcgctcccgcagaggctcgctgtggcgttgttttaaagctgttagaaggaaggttcgggaagggcgtcggggccggggctccccagcaagccagggtaagaaatggtccccgacacgcacgctggccgaagggtggcatctccacggatcttggcggcatgtccttgggcacgggcgtctccagggggccccgactgtccttacactggcggtccggacaccgagacccctgcccgcgcagctccccagaccccaggcctaagcttgcgggccgcggtgcagactagctgtgcgcccgggggcggcc

SEQ ID NO: 229216 - DNA, 594 bp, Homo sapiens
  chr2:239756466-239757060
  hyper
tcggggtgggggcgcgggcggcgggcgaggacccggcccccgggatgccctccgcgccggggccgaagggggaggcaaaactgaaagtgccgcgccggggggcgggggcggccggcgaaggccccagaacttgtcctgcccccggccaccgcggccaatcagcgcgccgccctagctcctgacaactatttagcaacccagcccagctagagtttccaaaaaagttagaataacttcctctcccggagacctcggttttgcacaagccggccttgaaatcagagcctttccagcaactccgagagcgtgtgctcggcgaccgcgggcttggccagcggcgcgcgctcggcgccccggcgcccccagccccacgcgcgccgggcgggcgccatggaggagggctccagctcgcccgtgtcccccgtggacagcctgggcaccagcgaggaggagctcgagaggcagcccaagcgcttcggccggaagcggcgctacagcaagaagtcgagcgaagatggcagcccgaccccgggcaagcgcggcaagaagggcagccccagcgcgcagtccttcgaggagctgcagagccagcgc

SEQ ID NO: 229217 - DNA, 1083 bp, Homo sapiens
  chr2:239757372-239758455
  hyper
gggtaggtgctgcgcgcgcgacgggcgccctccgctgcggggggcgggcggcaggggcgcaggggcattggggcctgctcgtgtctcctcggcgaggccccgcgggccgcgggggcttggatgccgtgcgcttttcctcttagcaaggaaggcgggcgggcgggacgctcacagtcccagggacacccctgagtgcagacttccacgcgagggtgtcagttgggaaccggcggaccggtgactcccccggcgggttctgaagatacttagacagatggtcgcagttttcattctcggtggtgtgtgggtgtccgtggttggcggtggaaggagcgagcatcagaaaaacctcctggggccggctggggactgggatatgaggaccagctgccctttgcgtccgccgcagcgcaggccgcccgcgaagctgcccgagccgggtgttgccgggcgaatggcttcgctttcttcctgggcaagggtagagcgcgtccgtcgggcggacactcagatctacccagctgctcgcgcctggggtccccggccgtcggcgccctggcctgcccagtgggcgtagaggtgcgggcctgcggctccagggtttgcctggggaggacgggaggaaactgccctgcgcttcggggccagagcagccacagggccgggtgtgcccgagaagggccctgggccgagagcgcagagcctggagcgctgaggcaggcgggtccgacgcagccgcgcggagccccagggcgcccgcaggcaggtggagctgacctaggaactgggagccctgagtcccaaccttgaccctggagtacccgggaggggccccgcccatccagccccgcagggatgggcgaggggtccaggctgggaaacgggtctgggggacagggaggctgtgcgcgccgggccctgcgcgaggagaaggctcgggggacacagctgccaggagcactccaagttctggtttcctctggaagagcgattagggcgtcctgcaccgggtccttttcaccagacaccttccaagtccctttagacaagctcgagccacggaggcgccgtccttaggctctg

SEQ ID NO: 229218 - DNA, 108 bp, Homo sapiens
  chr2:240874085-240874193
  hyper
agagcggtagagggcgctggacctcattcgtcctgtcagctgcgattgtctgtcctttgacaggtctcagcgcagcgttctcactgtgacctccgtgcagcatcaatc

SEQ ID NO: 229219 - DNA, 150 bp, Homo sapiens
  chr2:241172438-241172588
  hyper
agacccaaaggcgcgtctccctcacccgcctcgccgacaccagggggcgctggagctcagcaaagggcccggaggccgctctgaaactcaggccttaaaatacaggcaggatcagcctttggagccctccctgccggccgggcctgcccg

SEQ ID NO: 229220 - DNA, 80 bp, Homo sapiens
  chr2:241374397-241374477
  hyper
ggagaggtgaggtcgagtttcttggcgagtttcctgcgtgcagcccccacaccacaaaagcccccggtgcgagccggagc

SEQ ID NO: 229221 - DNA, 67 bp, Homo sapiens
  chr2:241375562-241375629
  hyper
tcttcccgacgcggctactcgcccccggcgcgggatcctgccgcctgcgccccgccgcccgggcccc

SEQ ID NO: 229222 - DNA, 473 bp, Homo sapiens
  chr2:241375834-241376307
  hyper
gggcgtcttctgcccgccgctcggcccagcgcgcctgcaggccgggagtcccagccccggggccggctgtcggggcgctgtggggctcggcgtggccgggctttcggggcgccgctgacggtggccgcggaccccttctgctctgtacagacctctctgggaggcgtctccggtcctgcccggggattctcgtagggtctccagcaaaggcagcctaggtgggttttataagctgaccccctcggggggtagtgcggaggggtggggagggagctgggcacttatccgcgggcggaacgccgccgcctcgtagagattcctgtcgaagaacttgtacgcgccggcccccgcctggcgcttgggcagcctcgtgccgcgagtccagctgcaggtggtcggcgcgttggatcccgcccaggggccgtgtcatttctttgtaagaacagcggccctcttggcgccccctaagccct

SEQ ID NO: 229223 - DNA, 222 bp, Homo sapiens
  chr2:241499837-241500059
  hyper
atgggacgcagagcggtccaaggccccggcgccctggtgaggcccaaacctcccgccatgccccggccccaacgagacccaagccccctgtcccggcccagcgcccgcgggggacccaagccccagcctggtccacctcggaggcctctaggacccgggggcgcccggcggcccgcccggctcccacaaatagactcctgggcgggcgcctgagcccccaaa

SEQ ID NO: 229224 - DNA, 2457 bp, Homo sapiens
  chr2:241758386-241760843
  hyper
cggggacgtgggcgcgcatcgggtccgcgccgggcgacgtcgcgctcgcgcccagcaggccccatgacttggcattccctccttcccctccccctcccgcccctgcggccggcagggcccccccaaccccacctaccggcgcccagcgccccgctcctgcggaccctccctcccggcggggatgctgccccggcccttcccagcgagagggcagcgcggctggtttgggggaagtcagcgtgaggagcggcttaaagcgggagtgcgaaggtcttcgcggccactgttccttcgtgtcatccgagcccgggcgccgggggcgcgccgccagcctagaccctgcggccccgcagcccctccctcgccgccgggccacacctgttacaggggcgctggctgctgagacgcaggcagtgctcgccggcggcccctcccaggtgctgggtctttctggaagggagctggggtctctggcgtgggagggggtgatgggcaggccggccgtgcaacgaagcgggtggccaggccccaacgccgcagcccccgccccgcccgcctgttttgctcccggctccagcatccgccctcccccaccccgggaaccggagcagctgcccgcgcccggccgccctgcgcgctctcccctcgggccgaggcgctgcagccgcgcaccctcccaggtgcggcgtcagcgtcctcagccccgctcaccatccctcccctcccccgccgtctgggcgcagcccctcccgcagccccgccggtggctcctctccagggaagcggaatagccggggaagggcgggggtatcccgatcccgccggccgggcgagccctcccgagggcgacccccgcccgcctaagccgagggtcccgctgcagccgagatcgcggcaaagggaccttttccagcggcacctgaagggcggacacccctgaatttcccccattgttctctgcggagatggaggaaggtctggaagtgaaggggcctcgcagtgcctgcgctttgggcggcaacaagggcgccgggccggagctccccgccctgggcgcagtgggtgcaggtgcgggctgcgggcgcgggctgccgggcgcaggtgcggggcgaggggcgcgggcgcgggaggccgggcgggcggcggccttacctctccggcgtcactggcggcggccccgcatgggcactggcatgggcgcgggctctcgagcccggagctgctgccgctcgccggctgctctgcgctgtgacggcgccgccgcgtgacgggctgcgcgcccccggcccggaccgccccgcgcccctcccgaggcgctggttggctgcgcgcggcgtccgagctccagtcgccagctggtttgtcgcgcggggagagggacgggcgacgcggccgccgcggggatggggctggggacggagggggccggggccgggctgtgacgtcaccgctgacaccgcggcgggccccgcggagggtgggggaccgacacccggctcggacgcagcgtcccctcccccggcgtgcccctgagacctcgcgggggagggacccggcggcgccccgtcccgaagccccgcgtgcacctgaacttgcccgcggacccctcgccgggccgtcccccaccctggcccctttcgagtgaaatcgtaaaacgtccacctgcccccgctctgagccagcgacagacgcatcgtggggggcgggcggggctggggagggagggctccttgcgccagggatgctggctccgggtgtaacaggtgcgcggtgaaatcgcatcttgtgtcggggccggggcgccgggggaagagcagcagtgacccaggccctccccgccggatgatgcaacccgcccgcggacccgccgcctcgcctctaccgcggctcgtggggaccccccgccctcctctcgccccacctctccaggcccccattgtcctcaccccagcctgtccagtttaacttccttggacccccaagtcacacgccgctcgggggccaccccggcaaaccccagcctgcgtcacccgcccccagccgccttcctagttccaggggctgactggtatctctgtgcgcgccaccgtcctccctccaccgtcccagggctgggcaacttcgacaaagcctctgggcagctcgcccatgggaacctccccgcactgcggtgcgggggtgcacggatttcgggccaccctgaaccccggggctgggtcccctccagcccagcccctgccatcgagcccctgccatgggcatcctggcgtcgcctggctaagcctccctggcgcccagcaggggcctgcgctgccctagcggcctcgccgttaaccatttcatccacactcctgggagagccggcttcacctcagtcccgacagctgcgtgcgagcgccttgcaggtggctgggggagattcacatccacttctgcaagacacgggccccccactcc

SEQ ID NO: 229225 - DNA, 544 bp, Homo sapiens
  chr2:241771578-241772122
  hyper
tatgaagtcccaggccaaggcgttgggtggaaccccagggtgtggaactgcaacagccccgcagtctggaaagaagccgccagcagcccgcgcggccccgcggttccacggggcctcgtccccgcccctgccccgctgtaggccccgcctgctataggccccgccccgctgtaggccccgcctgctataggccccgctccgctgtaggccccgcctgctataggccccgccccgctgtaggccccgcctgctataggccccgcctgctgtaggccccgcctgctataggccccgctccgctgtaggccccaccccgcaggaaacctcgccccgctggtggcgcgccctggttgccgtggcaacctcctccctccgccgccgggttgccggcttcgctagcctctcagcagcgccgttgccatagcaacggcgggtgggtcccgcggggcgagctgagctagggtgagcatcctgtggggtagactatggcggctgggcgcgtgcggcctgtgcggggcctccccggctgcggtgagagcggctc

SEQ ID NO: 229226 - DNA, 51 bp, Homo sapiens
  chr2:241938221-241938272
  hyper
gccagcgccccgtcccgcccgcacacctccgcgatgcggcacggcgtcgcc

SEQ ID NO: 229227 - DNA, 35 bp, Homo sapiens
  chr2:242041821-242041856
  hyper
gagctgtgctgagcgttcacggccccgcggggctc

SEQ ID NO: 229228 - DNA, 162 bp, Homo sapiens; identical to SEQ ID NO: 198795
  chr2:242088871-242089033
  hyper

SEQ ID NO: 229229 - DNA, 214 bp, Homo sapiens
  chr2:242089533-242089747
  hyper
acgcctccgaggtcgagacagtgacataagtcaactctcaagcccagggcgtctctccactctgcctagacgtccactccgtctgcctgcagctacggctctgtgcgtcccgcttcgactccctctgctttccttcccagcttctcgcctccagactgttccggctccgccgcctgaaattacctgctctgggggaggcgcggcgcgcggcctc

SEQ ID NO: 229230 - DNA, 334 bp, Homo sapiens; identical to SEQ ID NO: 198796
  chr2:242157713-242158047
  hyper

SEQ ID NO: 229231 - DNA, 84 bp, Homo sapiens; identical to SEQ ID NO: 198797
  chr2:242212408-242212492
  hyper

SEQ ID NO: 229232 - DNA, 53 bp, Homo sapiens
  chr2:242254481-242254534
  hyper
gctcgtgggctcgcggagcactccccaggtctcacctcgggccccacaccaga

SEQ ID NO: 229233 - DNA, 253 bp, Homo sapiens
  chr2:242448319-242448572
  hyper
tcgtctccgacgttacggcggccgcgcggccctctcccttgggctctgccctgcgcagccctggttcgagcgggccagtgaggcccggcgccctccccgcctcgccacgaggatccaccgcggccgcccaggcttctagccttgtcgtcacggcacggagataagcccgcgctggccacatcgcgaagcccctgttcgtactgagaccccgcccgggatcacgcgcacaggccagggcgcaccaggccttgga

SEQ ID NO: 229234 - DNA, 182 bp, Homo sapiens
  chr2:242481169-242481351
  hyper
gacctgccgggcaccgggcaccgtcgtcccccggctccaggagggtcctgtcctcctgcttcatcggccccaagattcctcgggtcacgactctgacccccgctcccagggcgccaggcgcggacagcggggaagcggcaccagggaagcccagggacgcaggcttccgctaggctgagacg

SEQ ID NO: 229235 - DNA, 363 bp, Homo sapiens
  chr2:242498019-242498382
  hyper
ccgctccggcctggtcgccttctccgggcgcatccagggaactcgctcggtcctccttaagcggggaagctcggaaagcgtctccccgactccgcccccagggttgcctttcccttagaaggccaagccccaagcccagcctctcgccagctgggagtcgcgcgctgcccacctcgctgcccaggcccccgacgccgcggcaggagccccccaagagcgcgggaagccccgtggacctggcgctcccggctcgggcgtggacggggcgggcgccggggcggggcgcgcgtcctcgcgggtctgaatggaagggtcgaggtcgtcgtcggcggcgagcagatcctgaagccagaactccacccc

SEQ ID NO: 229236 - DNA, 504 bp, Homo sapiens
  chr2:242498622-242499126
  hyper
ggccccggagcaaaccgccgtctccccgcggccccaccggtccctggcagcctcggggaatgtctgtagctgaattcgggctctgaaagaaggtggcgctgggtttttaaagatttggggcacaaaaaacgagagcggacccggcgccggctacggcccttcccgagggccacgcccagcccggcgccccgcgcgccccgttccccgcgccgcctccctccacccggctgagcgcttgtgcccgcaggtgcggcgccccccacccgcgtcgccgccatggaggtgctgcggcgctcctcggtcttcgccgccgagatcatggacgcctttgaccgctcgcccacagacaaggagctggtggcccaggccaaggcgctgggccgggagtacgtgcacgcgcggctgctgcgcgccggcctctcctggagcgcgcccgagcgtgccgcgccggtcccgggacgcctggctgaggtgtgcgcggtgctgctgcgcctgggtgagtgc

SEQ ID NO: 229237 - DNA, 456 bp, Homo sapiens
  chr2:242549627-242550083
  hyper
tgaggggcacgcgccgcaagtcctgcctctgctcccgggcggccccctccagcctccgccggccccgccccggaagcgcagccccgcctcaggcgccgcatctccgccctctcttgcgcctgcgggaccgggagggccgcgctcgccccccagcgccagggtcacgccaccgcgccctgtttggggagcggcagaggagtcagggcggaggctgggcggcgctgggcggtggggcgcgctcactggctgccacctcacctagcaggcgtcacagggctcactcaagagctccagcaagagcagaggcgggagcctcgccagcccctccacagaccacagcgaccgcgcccctcggcccggaggccccgccctccccactcctgcttccccagccacggggtcttctcccggcccctcatctacttggcagacgcctctcaccggcagcctctgcct

SEQ ID NO: 229238 - DNA, 203 bp, Homo sapiens; identical to SEQ ID NO: 198802
  chr2:242575608-242575811
  hyper

SEQ ID NO: 229239 - DNA, 43 bp, Homo sapiens
  chr2:242576795-242576838
  hyper
cggggacagagctcgcctctgccgcctcgacaactgctcctgg

SEQ ID NO: 229240 - DNA, 184 bp, Homo sapiens
  chr2:242626705-242626889
  hyper
gcttcccgaagcgcggggcccagtgcaggggctcagccggggctcctcccaaagctcacctggagcccagcacgactgcgttctggaaacgctgtgtttgacagcaggggcaggatggggggctgtgtagacgctggccacgtggcaattgtaggagaaccatgggatcgataaatgttcactg

SEQ ID NO: 229241 - DNA, 219 bp, Homo sapiens
  chr2:242640645-242640864
  hyper
tgggattacaggcgtgcgccagcgcgccggccttctccagtatttttgcatgcatcttacggcacacctttgcacgccatcttattaactatatcatactgccgcacgtgccttttcggccaaggcatccagatggtgcgggtcctgcctgcctcgagaggtggcagcaaaggagccagtgccctcactggtgctgggcggggcggccgctttcctcgg

SEQ ID NO: 229242 - DNA, 1993 bp, Homo sapiens
  chr3:238173-240166
  hyper
gaaaagcagattggcgacctgtgtgtgcaacatgaaccgagtgaaaccatcggggagggggtggggggcgtttcttttaaatgtcgcttttgcagataaacgagcagggatcctacctcttttgaccggagatgttgaaaagcacgaccaaagtttttggcttggtctcttgctttccacaacgagataaagtctgaagcctgtaactctccctgtcccgcgggagcgtgcaaagggagggaagataagcggcgtgggtgaggggtggcggcgcagaacccaggaagggagcagaggcgagagccagcctccggcaggagggcgtagaccccggtgccagccagaacggctccagccttcccgcggccagagagccagcggcgggaggggacgggcgggacctccgcggacagccccgggtgcggaccagcgggcagcggccggcgagaccctccctggatccgcccagagcttaccggaccctgcgcgcccccgtcccggctcccggccggctcgggggagaaggcgcccgaggggaggcgccggacagatcgcgtttcggaggcggcgcaggtgtgtcaggggtgggggtccgctggcatctctcgtgccggcgctgggggggtctcccgtggaggaagggctgaaggtgctccgggaggggtccactcgttatggaaaggaagcggggcgcggtcagggtccctcgtccgcagtgggggtggtccgggcccctcagcctgcacccgggaggagacgcccccttttcacgccccgcccccggtggccgaggccggattcggacagctcggggtcagtcgacggagcacaccgggcgcccgaatccgccgggtcccactcacgcccgccggccgccggtaggttggccctcccgcttccagcctccgccaccccatccctcgctgctctctgaggaggattccagacccccccgtagatctccgccctctctcgggtggggctccgaggtctagctggtctgggggtcagtcccggcctctgtctcccaccgcgcccctcgctcccctggacaccgcctggtgtgtggggctcagacccccccagtccactgcccctgtgtggctcctcctctcaggagaggattctagatcccagcccggggggggttccgaaaatgccgccagcctggagcggggaatccatggaccgtggggttgtggggttggggagcacgaaaacccagagaggggctagagctccacctccccagaccgccgaggggcgagagggcgcgccgggggccgtggttgccatggctcctggtagcggagcccggggggctggagatgccggtcgcggatggtcccttcttcctctttgtgcctctctctttctctcgctttttttttttttttggagtgtgagtgtgcgtggggaggcagcacggagaaagtgattaatttggggagcagggattggagccgggaggctggggaaagccagcccctccgttcccactctccgggctcgctgcgagccacagtgtctcagccaggggcagggccggggaactcctgcgaaaaaccacgggccggaggagcagcagccgcgcgggcccaggtacccccgccccagacggccagcagggtggagcgcagggtgggcgtttgggctgctgggcgggaaggcgggcggggaaggggtgggaggccggcggcggagggcaggtgtgcgtcggcagggctgggtggcccggcagagagggcgccccaggttcagcccctcctcgaagggcgccggcgtccagtcccgctcgtgggagccgcggagcagccccagggccggcgagcggctgccctgccaggcgcgtgcgcgagggcgcgctcccgcgggaacgcgccgtgcgcggggagatttgcgcgtgcgcgtggcgatggtaactggtgggccccccgggctcgctctaggcggaggctcccgggacgcccacgtggcttcgaattccagctcc

SEQ ID NO: 229243 - DNA, 2211 bp, Homo sapiens
  chr3:2139586-2141797
  hyper
gctgccaatctctacggttaccccgaggtgtggagttgcggcgaagggagccacttctgcaaggaaacagtagattcataatgtagaatgaccgtggcaacgtcgttcaaagcacattctttcgaataacaaggctttcgacatgccccacccccgcgcacaacacaccacaaattgatccttgtacctaatttacagcaactgttccctctgacctccccccgcccccgccccacattccaacctgaaagcactttgcgtggatgagacttcaggtgtgtaacgcagcctgtccagccagtgtcctccgcctaaggacaggcaggtaaaaacctaccaaagccccctcttctggcctaagttcaatgccacccgcccacccacattccccggttcagcaattttcagcccagacgcagaagcatctgtttccctggccagggcgccttaacgatcccccgaattccgcgtctcccggaggccagaggtttgggtacccaggaaggtcgcgcctcctcgtgccccgatactcgggttgtaaagggaggagacatcgcctcggcgcatccctggccgctgaacaacgcaacccctacgtccccgcacgggaatccggctgataatctcctcttgcctgagaatcgggccaggcgccctttactaatttcgcgcgctggggacctggggctgccgcctctcggccgcgcggggcaggtgctgcgtccccagcgctcgcctcctccggccgcgcactgagcatgcgcgggctccgggcctccggcgcgtctccccgtccccgctcgtctcccgcccgttcccacccgcccgcgcctctccccttccccgagcgtctcccccgccccgcggctaaggagccggcagcccgaactccggcgcgccaggtttttccagccgccgcgagcgccgggagggagggcagcgccgcgccagacggagcccggggttcgacgccaggattggctgcaagtagggagctttcgccgccgccccgggcccctcggactgtgccggcgccgcacccgaggctctcgccagcccggcgccccggtgctgaggtaagtgaggcggcagctgtgcgggtccggctcctgcgtgggcgcgcgatgccccggggacgcggtcgcgggtgtgggggggaaagggcagggtccgcgcgggttgcccgaaggacaggggcgcttcccggggctctgactcccgcggggccgggcagcgtctgcggggccgtccagctcagagcccggaagccctgcagggtcggggagcgggagctgaacgcctgagcgcggaggactcagggccccgacgacgccaccgtcaccccacagcgacccttcttctccttctcagccggaaaataagtttgttgcgctgcgaggcagccacaaaacaaggaaccgagagcccggaatgctgcgggaagccttcaagtcagctcctccgactggttcgggctactgccccctctccgtgcgccctggcctctggcgccgggttcccggcggggcttttcttctgacagcccagtcacagcccgcagcagagggacgcgaacctggggagtggagggacctgggactaaaggaacaggagcccgtagccgtggtggaaggagccgcgtggagacggaggctgatgtctgtggcgcccgctgggtgccgggctggctgctgagcgctgaggctgcggcggcgagcgacaggccaggtgcctgctcttagggaaggtacctggcttccccagtctctgccgcgggagcctgttgggtggcattcgtttccagcaacttctggggggtttccagtttctttcgagaggcaagacaaccgccccgtcccctccccgggcccagacggcggcgaactgtgcgccgggcgccccacagaccccaatccactcactctccttctggaacgcggggctcaaaatcttcgtgcattttctctcttgtgcttcgtgtatatgttttactatttatgaagggtgtggaggtgagggtaggaggacgtgggctcctgaatccctctgaaccagccagagagtcggctgcatggaaacatttcgcagcgaagctcctgcgaggaggcggcttcgcgcgtcgggaagatcaggcggttgcttgctggccagggtctgcagattcggtgcgaagaagctggcggaggttgtgtagggcgagtcagtgtgact

SEQ ID NO: 229244 - DNA, 459 bp, Homo sapiens
  chr3:3168311-3168770
  hyper
agttgtctcagatcgcacgggcatgccgcgcagatgggcttctgagcagctcagggccagccagaggtctggcgagaagggcgtaattaaacgaacccgcgccggtttcctcagggccccccggggctccgcttcgccccagcgggcctcggcggggctgggaaaccggctgaggttcgcctcacggtggggaggagcgacgggaggcggaagcccttcggtccgggccccgcccccgcactcgccctcgccccgccgcgacttcccattcgccgccaacccatgtgcgttggtgacgtcaccgcgttcaccagcccggaagtgcgcgtggcggcggtggcggctgcggcaacagcggggccggtaagcgggcgcgcgccgctcagaggggcagagttggtggcgtgagttgctgccccttccttcctgctgtgggccagaggcgccaccgcgcccggt

SEQ ID NO: 229245 - DNA, 280 bp, Homo sapiens
  chr3:3221330-3221610
  hyper
atgttgtgcgcagcgtcctgctgatctccttcgccggccatgtctgtttacccgcaaaggaggctgggacagggcggtgccgaagactccgagggagggcccgtgtcgcgcggctgccgcgcaccggggccacagcgccccctggcggccccaggggagcagacggcggcgcgtacccaagcctgaaagtgatggcctaggcgggagggacaattacaggcctgcgctccgtcccggggacagaacgccgtcccctgccatccacggctgagtgcccggc

SEQ ID NO: 229246 - DNA, 116 bp, Homo sapiens
  chr3:3840347-3840463
  hyper
gacgcaggttcacgcgcagtttccgaagacctattccgtccccaccctcctccccttcctcggagacacctccacttaacactgccttctcagtccctcgccgcctgtttaaacac

SEQ ID NO: 229247 - DNA, 117 bp, Homo sapiens
  chr3:3840643-3840760
  hyper
gcccgaggacgcgccctgtattttaagacgcagggtcggatttcaccccgaaacttggctcccacagccccaggccgaactgtgtctggttctcagcccccgagcccgagttctacg

SEQ ID NO: 229248 - DNA, 1058 bp, Homo sapiens
  chr3:3841720-3842778
  hyper
gcgggcctgagggggacgagggggcgcggctcacggagctggggaaaatgacgaagtcgggaaacgagaatatagtgccccgtttccccccgtcccccttgccaaaaaaaaaaaaaaaaaggtgtgggagagcgatagttgggaaggcaggccagatagaaacaggcaaaaaaaggcagtgaccggagccgagcctgctggatttcaggggccgaccaggggagggaggtgcccggggacggggagggaggagggctgccgggatgtgaaccggggaaggcagctggggctggagagcagcgcggaaagggggcccagggagctggaaagagggccaagaggagggcaaggaaggtggcgggcgacggggagaggaaagaaaaagggtgtcttggcggtggccttggtaagagaaaggggcaaggggtataattgacaaggcactgaaagtattgaagtcagagccttgggaaggatctaccgaactctcggcggtccacgcggggacagacctcagcccgtgagccttgagctccacgcggggacagacctcagcccgtgagccttgagctccacgcggggacagacctcagcccgtgagccttgagctccacgcggggacagacctcagcccgtgagccttgagctccacgcggggacagacctcagcccgtgagccttgagctccacgcggggacagacctcagcccgtgagccttgagcccagaaggagtggcagcctcaggacgtttgccaggtggcctggaatgtgagggaagcctcagccccgccaggaacagagctggcgctgagttcccggctcggcccgggtcagaagcgaggaaagtttgccggcgagtgtcctttgtgctgcgtggagaggggtgtgggcggccgccgactcggcgcttccccgccgcccgcccagggagtccctgcctggcaagctggggctcggggaaaagtccagcagcgagagggccgcgtgtcccgggacggttccaggggagcccgcgcggaaacgcggaccaggcgcttcggcccggatgccggatcca

SEQ ID NO: 229249 - DNA, 339 bp, Homo sapiens
  chr3:4344935-4345274
  hyper
tcctgagaagaaacgaactacaattcccatgaggcggtggggccacgggaccacaagtcccagcatccaccgcgcggcccaggactgtcagggtagtgggcgttgcgtgaggcgggtaaatgttcgcggaagcggcaaagacgacacggccttgtgggatggcggagtttaaggagaagcctgaggccccgactgagcagctggatgtcgcgtgcggccaggaaaacttgccggtgggcgcgtggcccccgggggccgcgccggcgcccttccaggtaggggcggggccaggcggcgcgggaggcgggcgcgcggctcccccacgtggtctcctcaagc

SEQ ID NO: 229250 - DNA, 67 bp, Homo sapiens
  chr3:4508823-4508890
  hyper
cctggctccctgccgctccacacagcagcgagagcagcagcagcaagaggacgagacccagctcagg

SEQ ID NO: 229251 - DNA, 313 bp, Homo sapiens
  chr3:4534777-4535090
  hyper
gggtgactttgaacggctggctccaagccctaccgaccccagccaaggaacaggctcagcagcctgaaagcctcgcaggacgcccctcccctgtccccgcacgcgtctatttagggcccagcccgggcgcccaggggattctgggacttgtagtccctccccgcagcctcaggcgccgccacgacccgctacttggactacattgcccagggagcttcccggcctatataagccacccggagccgctttaaagtgcagtaaccatgtggatgtgctgctgaagcgtttcctcaagctcgctggggtgggagga

SEQ ID NO: 229252 - DNA, 293 bp, Homo sapiens
  chr3:4535655-4535948
  hyper
cctctcttgcgctccgtggttgggagaataatgcatgtgtaggggccccccgtggggagggtttttaaaaacggaagaaaaccggagaagcggtgagggatgaagtgtggacgaagctcatgtccaatgaggatgcgggcttcggatacttggccttctcgccgggaaacaagtgctttgggatctgccaaacacttcccttagttccagcctcccgcacgttcgaagtttgtgcgtgcctagtctcaattgtcagttacatcctggaaataagtaagcgtagttacctggaa

SEQ ID NO: 229253 - DNA, 329 bp, Homo sapiens
  chr3:4909948-4910277
  hyper
cagccctatgttcccgcggcctttgaggggaaagggccagggcctagacgttcccctcccgcgtggttttcccgtcagcagctttcgtctgcaagggaaagcggcggccccacccgcagacagctgcgaggcaccgcgccaagcgtatgcgcctgttcccaggcactccctcctccgccttcacccttttgccacctccgccctccacccagccccgccgtgcgcctgcgcgccccggcccgtgggccagcgggcagtctactcacgtgggcctccgcatggcccagcgccgccaagggcaaggcggagcctcgcgatcgccccgcccc

SEQ ID NO: 229254 - DNA, 77 bp, Homo sapiens
  chr3:4910697-4910774
  hyper
ctatgaagctactgctgtggtcagggccccagtcgtcctgctgagtagcagactttgaaagacggtgtccaaggcca

SEQ ID NO: 229255 - DNA, 172 bp, Homo sapiens
  chr3:5018856-5019028
  hyper
ccccgcctttggccagcaaaagtacattctggcagggagggatctctgagccccgaagtgaggtcatgccagttagcagttagaaaaggaggcatttctcacacttgctaaagagtttgacgcttgtgaaatataaacaggaagcgggagctctccaaggcgacctgaagga

SEQ ID NO: 229256 - DNA, 81 bp, Homo sapiens
  chr3:5019208-5019289
  hyper
acccgaagcgcagtgggaagggcttacagtcatctctcaactccccgaacttgcagggcaggggagcgcagaggtcagtga

SEQ ID NO: 229257 - DNA, 293 bp, Homo sapiens
  chr3:5028396-5028689
  hyper
agcccagttctagcggcatccaaatgcgctcagagggaggtgcgggggaggggcgcgcaccccagcctaatgcccactgcggacaaagaggacttctgtttaaaaagcggggtgtgtgagtgtcagggggcgaagcgctggctccggggccaaggagaggtggcaggaggcaggggagcggaggctgggcatctggccgccttcagacagggcgtgatccgccgggcctgccgggatggtctcacccagcgctgacctgccccgcctgttgacacaacgtcacgtttccgact

SEQ ID NO: 229258 - DNA, 376 bp, Homo sapiens
  chr3:5137573-5137949
  hyper
gcgttttatttggacgctctgaatccgttttcccctagcacatcggcagagcagaccgcctgcctcggccttgtcaacgccaagggtgttttggacggatgtgtctatcctgaaagcttccagcctggctttgaacttgacttggcaacggatgaaaacctcggcgagcatccccagacaaccccgctgcgcgtcagagcgctgctcccgcgtcctcctgccggcagaagcccctgcagtgcgccccgcgaccaccagctggaaccaaaaggcggcgcgcaggcgcggagcccacggggagcccaggctggggcgcgtgtcagctccgcctgacctgccaccttccctaggcagcggggggcgggggtggggggtg

SEQ ID NO: 229259 - DNA, 140 bp, Homo sapiens
  chr3:5163864-5164004
  hyper
gcccaccaggtggcgatgccagcggcgggcgggcctggccggattggccgcgccgctcttgccgtgggtgccgacggcggcgccgggacgggcgtggggggtagggcgagtcatatgatccgctcggcttcctgggtctg

SEQ ID NO: 229260 - DNA, 645 bp, Homo sapiens
  chr3:6902463-6903108
  hyper
acccgtgcccagaacgtgggtgtgggtagggaggcttccacagtgagttagggtcgagagctaggctctcgcttgctccccgcaatccctagattccctggggaccacgaaactcccattccgaggaaacctccccccattccccagccgcccacccgtttcccccccttacctcagcacgcagcccctccctgcgtgatgatgcaaaccagtggggagggctggcgctgggaagggtggggagagaaggagagccagcgagggagggagggagtgggaggaggaggagagggagccgaacgaccatttaaagcgatagcagtccctgccctctccccagtgctgggctgttggagagagcgagcagcaagccggtgagcgcgagcgcggcgcgccggccggctaacccgagagcgcgaggcgccccaggctggcaggcgccgcgggacccctcaccctctctggtcgcccctccccggattcccccaccctccgtgcctgcaggagcccctgggctttcccggaggagctcgccctgaagggcccggacctcggcgagcccaccaccgttccctccagcgccgccgccgccaccgcagcagccggagcagcatggtccagctgaggaagctgctccgcgtcctg

SEQ ID NO: 229261 - DNA, 126 bp, Homo sapiens
  chr3:6903528-6903654
  hyper
ggagtgattggggcttcggggagttcggtctccatcatggtagccaacatcctgaggctcttccaggtagggatgcgctccctccggggcggagcacacagtggctacctgcgcccttaaccctaa

SEQ ID NO: 229262 - DNA, 369 bp, Homo sapiens
  chr3:6903907-6904276
  hyper
ccgaaaacaggctcgtaaaagtgccaggctcctaggagagctggttaggagaatggaataggaaagatgagacgatgcctggaaaccgggcatttcccaactccccagcttcccacccccaagccagcctgccaacctgcactcccttgaaaaatttggagacagccttaaggaggcacttcttaaatcgagggctccgtcttaacctagatgtggatgttaagtccgcatctccctcgggctgatttcccgacctgtagccagcctccgcgagagcccagggcgcgaggtgctgggaccttcctcaggtggagagatgctgcccgcagacgtgacccccggttggtttgctccgggcaatattttgca

SEQ ID NO: 229263 - DNA, 130 bp, Homo sapiens
  chr3:6904491-6904621
  hyper
ggcatgaaggcgcccgttgggaggcagaggggtgcgtgaagcggggccccgtggtcctcctgctccggtgccggagggagacggagaaaaaatgggaggaaggcggatccggggccgctgagcggtgggt

SEQ ID NO: 229264 - DNA, 832 bp, Homo sapiens
  chr3:8809352-8810184
  hyper
atgtgcacctgcggcgcgctggccaccaggcagccgagccacgtggcgagcactgccaggcggtcggtgcggcggcgcagcgagcgcagcggctggcagatggccaggcagcggtccagggacatgagcagcagcaggtaggtggaggcgaacatgcccaccacctgcaagtacttgaccaggcggcacagcaggtcgggcccgtagaagcggaaggtgatgtcccacagcaactgcggcagcacctgaaacactgccaccaccaggtcggcgatgcttaggtgcttcatgaagaagaagaggcgcgagtgcttctggcgtgtggtgcgcagcgccagcagcacacacgcgttcccgctcagcgccaggagcaggatgagacacagcaccgccacctccacgcgcgccagggcctcgttgcgccgcgggggtccggcggtgcggttgccctcggcccccggcggcgcggcgctggcgttggctgcctcggcgctccagttggctgcgagcgcgccctccatgaccctggcggcagcggtgcgccccggccttcgagccctttacggcttggcgcggctgggccggatccggcgtgtcggagggtgtaggggcgcccggggctccactcctggagactccacggacggatctgctgggtccaccctgaaacaaaccgggagggccgtgaggagaccgccgcgtttctcttccgacgcgggtagggcgtgcttgtcccattcccaggaacccaactcatctgaaacaacagggcacaaccgccggcctcgggttgctcagccgccaccccagaaatccccgttggaggtacctc

SEQ ID NO: 229265 - DNA, 539 bp, Homo sapiens
  chr3:8810834-8811373
  hyper
ggcaccccaccacctccactcgggtcccgatggctccaccggccctagccatcccgtccacccctgcttagcacccagctacctgcaccgagtccgcaggcgaacctaaagttgactccccccggggaagttgcacggcgactgacggccccagtgacgcgtgcgctcccggcccgagttgggatggcctgccggctgcacctaatgtgatgctaagctgaggtctctcactggagcctcggttggaatcccctcgccgcagcctggctggtcgctggatgggtacaggaggcgagcgaggagcgcctcccaggctgcgcgcgcggacagcgtctggatgcggcgctgtgcgctggggctgaggctgcactatcgcacgggtccgctagggggcgggcgaggccagccgcgcagacccctccggagcggagctggttcgcccagcgttggtcccagagccttaacaaatgggtttattttgcagtggtttaaaactgcgagagggagggaactcgtcaataacccgcccgtttcttcct

SEQ ID NO: 229266 - DNA, 185 bp, Homo sapiens
  chr3:9005099-9005284
  hyper
acccactagcctccggcgctccaacaccactcgaaattccccgcgctaccgcattacgtcagcagcccgcgacgcgccagaggcgggcgcggagcctgccggaagttgtagtagtatgtgggcggggcgccgcttaagggcttgtactgcgcatgcgccaggcttctgccgcacttaccttgaag

SEQ ID NO: 229267 - DNA, 67 bp, Homo sapiens
  chr3:9291320-9291387
  hyper
aggctggactgctcgccctgcagggctggctgagctctcccccactgctcacgtcactagactccgc

SEQ ID NO: 229268 - DNA, 276 bp, Homo sapiens
  chr3:9595255-9595531
  hyper
gctggggagcggccgggcccgagtagggccggggttgggggggcggctgccccgcgcccaggccggacgcgcgcgaggctgcggccgcggggaaagggtgcggggagaccaacctgggcacggccggaggcagcggatccgggactggcacggcctaggcgccgcggctcggcgctcccagcagcggctgcctcggcccaggcggcggcctctgcgcggcctccatcttgctcgggttctccccggggcgcgctcccgcgccgaggcgcgcgctct

SEQ ID NO: 229269 - DNA, 212 bp, Homo sapiens
  chr3:9691035-9691247
  hyper
aaggatcgctctgcgccgggggcgggccagtaatcgtaggcggggcgcgggtccagagctccgattggccagagtcggagtaaacatccggcgggacggggcggggccggaagtggaagtggaagtagaaggcggtggctgaggcggttccggaggttctagtgtcggagttgggtgcaggcaggtgccatgggcccgcttgaggcacactg

SEQ ID NO: 229270 - DNA, 543 bp, Homo sapiens
  chr3:9745531-9746074
  hyper
gcggctggagcgcacgcagggctggagcgagtgcagccgccgccgccgccgacaccgcggcacatgggccggccccgccgctgccgtcgcccctagccccagcagccctggtctcgcagcctcctgcggctctggtcgcccgaccagccatgtctctcggcggagcctccgagcgcagcgtcccggccaccaagattgaaattaccgtgtcctgccggtgagcgggccgcgctggggagggcttaggcactggcactgccccagccccagccagccgcggggctcagcctgggcaggggctagacccccggggagaggcgaaattggctggaaaatcacagctgatgacagggcgagtagctggtgggatcgagaagcggggggtcttgggcagccccaccccgaaaaaagggctcagcctgcgggttcagggggtgggtcgcagatatccggtaggagctcggccccaggaggacaaagttctggggcgagccctctttcctgggcccttggagacagtgtgggtgcgttcgcgtccagtcc

SEQ ID NO: 229271 - DNA, 204 bp, Homo sapiens
  chr3:9773215-9773419
  hyper
gccacaaaccgcccgacgaccccagatcccgagtacggtgacttcagtctccagaaactccactctaagatgggagagctagagaagccctgtggggtgtccagggtcctttctgaatcccggagcacggtctttcgagcctcagcgggcgggcggggatccgtggcgaaagtgcagctcagtagcgccgcggcgccacgttta

SEQ ID NO: 229272 - DNA, 49 bp, Homo sapiens
  chr3:9791601-9791650
  hyper
taggtgaaatgagcggtggttgagccctacttccggtggtgctgtggtc

SEQ ID NO: 229273 - DNA, 64 bp, Homo sapiens; identical to SEQ ID NO: 198812
  chr3:9811685-9811749
  hyper

SEQ ID NO: 229274 - DNA, 91 bp, Homo sapiens; identical to SEQ ID NO: 198813
  chr3:9812389-9812480
  hyper

SEQ ID NO: 229275 - DNA, 33 bp, Homo sapiens
  chr3:9834430-9834463
  hyper
gaaacgaagggctcgtccgcttcggcttgtcct

SEQ ID NO: 229276 - DNA, 124 bp, Homo sapiens; identical to SEQ ID NO: 198814
  chr3:9851463-9851587
  hyper

SEQ ID NO: 229277 - DNA, 55 bp, Homo sapiens
  chr3:9885761-9885816
  hyper
tcggaatggtgaccgggcgggactcagagcctgaggaggcggggcttttcctccg

SEQ ID NO: 229278 - DNA, 440 bp, Homo sapiens
  chr3:9904286-9904726
  hyper
caaaggatccatgggaagatcgggtggctcaggggagtgactccccggcttggtcggcgctttgaggccccggggacccagcggagagggctcgggtgaggcatctggaggcgctgaatggggccgggagccgcgggacccgcagagggcgcctgtccgtgtgggcgcagcagcgcctagagggaggcggccccggcagcccgcaggggtcaggctctgctggagcaggggcgtccctgtctccgcttcccagcgcaggctgggtggggccgatggccattaaagccccgccccccgcggctcaccgccgcctggccccgtccccgaggccagaaaagaggagacccgaggccgtcagaccgcctgtcaagggctgtcctggagcctggcaccttcccctcgctccccgtctgacccccagaggccgtgctgtccaggct

SEQ ID NO: 229279 - DNA, 275 bp, Homo sapiens
  chr3:9932166-9932441
  hyper
gattaatttcctgcgcgctccacaagaggcggggctgggcggggcgggggcgagagggaacgagggcgcctgcgcggagaggagtgaccatagagtcggtcctccagagacagaggggccggaagttctcttcacggagccgcgcggctgcgggggcgcaaatagggtcagtgggccgcttggcggtgtcgttgcggtaccaggtccgcgtgaggggttcgggggttctgggcaggcacaatggcgtctcgagcaggcccgcgagcggccggcac

SEQ ID NO: 229280 - DNA, 176 bp, Homo sapiens
  chr3:9957508-9957684
  hyper
tcccgggtgtctgcggccgcaacgcaacggacactggctggaaccccggaatgagccttcgaccctgaaatccttggggtgcctcgaggacgactggccgaaaagccgcattccctgcctcacaggccggaagtcccagcccagtccccgcgcgcgtccctcttcctcctcatact

SEQ ID NO: 229281 - DNA, 226 bp, Homo sapiens
  chr3:9975322-9975548
  hyper
tccgtttcagtggcggggctggcaaacgtcattccctagccccgcggccctttaaagcccggacaggtgcagctcggtgccgcctctggttggctggcgtggggtgacgtaatggcacatggcccgtcgccattggctgggcggcaagctccgccccctggactgcggcgcgggtgggggttgtgcgttttacgcaggctgtggcagcgacgcggtgaggagacgg

SEQ ID NO: 229282 - DNA, 120 bp, Homo sapiens
  chr3:9993710-9993830
  hyper
ggagaggctgtggggggtggcggatctctctgccgcagggactggggagaggccggcctgggggcagggcgaggccgttgcggggcagcctcggagctggtccatctcgggttacctctc

SEQ ID NO: 229283 - DNA, 86 bp, Homo sapiens
  chr3:9994070-9994156
  hyper
tccgagatgctcagactcggctaacagagcccggcgctgccgatcgcgagcccgcccacaggagcgcagccctgcttaactctttc

SEQ ID NO: 229284 - DNA, 137 bp, Homo sapiens; identical to SEQ ID NO: 198815
  chr3:10052429-10052566
  hyper

SEQ ID NO: 229285 - DNA, 33 bp, Homo sapiens; identical to SEQ ID NO: 198816
  chr3:10052882-10052915
  hyper

SEQ ID NO: 229286 - DNA, 223 bp, Homo sapiens
  chr3:10067934-10068157
  hyper
tgcttctctctgacgtcgcctctgggccttctctcgcccctatgcccggctagcacagaactctgctgcagcggtgagcccagcttattgccttcagctgggctgcccggccttccacttccggcgcggaagttggcgtcacgtcatggcgcgcctcggtggcgtcagagcggcgtcgggcctggcgggaaagtcgaaaactacgggcggcgacggcttctcg

SEQ ID NO: 229287 - DNA, 98 bp, Homo sapiens
  chr3:10157072-10157170
  hyper
gcccatctcactgcggacactgagtgcgcaacctgagcctggagcagttgagggagacggcaagaccccacgcgccgtgtaacgaccataacgcgcgt

SEQ ID NO: 229288 - DNA, 506 bp, Homo sapiens
  chr3:10183473-10183979
  hyper
cgcgtccgacccgcggatcccgcggcgtccggcccgggtggtctggatcgcggagggaatgccccggagggcggagaactgggacgaggccgaggtaggcgcggaggaggcaggcgtcgaagagtacggccctgaagaagacggcggggaggagtcgggcgccgaggagtccggcccggaagagtccggcccggaggaactgggcgccgaggaggagatggaggccgggcggccgcggcccgtgctgcgctcggtgaactcgcgcgagccctcccaggtcatcttctgcaatcgcagtccgcgcgtcgtgctgcccgtatggctcaacttcgacggcgagccgcagccctacccaacgctgccgcctggcacgggccgccgcatccacagctaccgaggtacgggcccggcgcttaggcccgacccagcagggacgatagcacggtctgaagcccctctaccgccccggggtccattttgcagacggggaactgaggccccttgag

SEQ ID NO: 229289 - DNA, 813 bp, Homo sapiens
  chr3:10206277-10207090
  hyper
caggtattaccaacacctagggagttgcctggcatacagtaggtaattaatggagtatttgatgagcgcatgatgcatggtgtagtgccgatggaagtggggtcagaaggcctcctgccgctgcggcagaattcccgtgtggccttctcccaccagggcctcagtttcccctcgcagttccgattctctggccggcgctggggtggagccggcggggccgtcgtgccgcccgtggccgctggggacgctggtgccctcccgccccgcccacttccccgccggtccgcccctggctagagaagccgcagcccgcagtgtccgacccagtcgtcccgcgccggagccggccccgtagcgtgccatggcctgctacatctaccagctgccctcctgggtgctggacgacctgtgccgcaacatggacgcgctcagcgagtgggactggatggagttcggtgagtgcggcccggggaggggaggggaccagggcgaccggagcccccagcgatcccgcctggagcggccgccaagctccctcgggcacccgggttcagcgggtcccgatccgagggcgtgcgagctgagcctcctggaccgggtccgccgcggacctcggcctgtcacctgaaggtgccgcgtggtctctgaggacgtctgtcgacgagcaggggccgccgccactgcgctctgagtccagagaacggtgggtacgggggccctcctgtcagcgctgctggctcggtgacgtccccaggtggcctctcatccagcccacaacagcctgcaaagtgcgagcctcgaccctgtagggac

SEQ ID NO: 229290 - DNA, 132 bp, Homo sapiens
  chr3:10289896-10290028
  hyper
gcgttaagtgaggcgcgtcagcggacaccacctgcctgcacatctggctggcctcaacttcccgctgttcgagcccacgtgagtggctccgccccatctggcttctgaccaatggacgagcttcctaaggcg

SEQ ID NO: 229291 - DNA, 203 bp, Homo sapiens
  chr3:10749742-10749945
  hyper
cgccgcccgcccgcctccctccctccgccgccgcctctgccaccgctgcactgcgctctgcccgcctccccctcccgccctccctgctcactcctccccgcgcgctccccctcggccctccccaaactcctcacggagagcgccccgcgggaccggagcgcgcggtcccgcccgcgtcctcctccgcgcgcaccagtggggct

SEQ ID NO: 229292 - DNA, 687 bp, Homo sapiens
  chr3:10857688-10858375
  hyper
gcgggaaggacgggcgctgcaggggctccgcgcgctcaaggtgctcgcgggctcccgggcccagccgggctgaggtggcgtgggcgccctgcgggccgggcctccgcggcgcgtcccagtcccagtctccgcgctggtctggcccggtccctcagctccaccccctgcctccccctcccgcccgctcgcgcctcctgaaaagccagctcgcccggggcggcggcgcagagccgggccggcgcacgaggcagccagcgcggccatgacggcggagaaggcgctgcccctgggcaatgggaaggctgctgaggaggcgcgggagtccgaggcgccgggtggcggctgcagcagcgggggcgcggcgcccgcgcgccacccgcgcgtcaagcgcgacaaggcggtccacgagcgcggccactggaacaacaaggtggagttcgtgctgagcgtggccggggagatcattgggctgggcaacgtgtggcgcttcccctacctgtgctacaagaacggaggaggtgaggtgatagtgaggagaaggggagggggcgccaaccgcccggtgggggcggggagccaggggcgagcgcgagaccccctcccgcgcctgcgtggagcggaacccgagcggagaacctcgactccaggcacctcgcgtgtgagctcgccccggagcgcggcccacct

SEQ ID NO: 229293 - DNA, 1012 bp, Homo sapiens
  chr3:11034492-11035504
  hyper
cgaggagtcgggagcgcagtagcgctgagcccgagcccgagcggccccgcgtcccgagcgcatcggagcggccgagccgcccggatgcagcgcctgtcccgggcagcgcagccccggccgcaggtaggaaagggcggccggcgtcggggcgcggggcgcagagcctgggataacggcgcaggaacggccagagccccgagccgctgccgcgagccgggccgggtggggggcggacacctcgagattcaagcccccgcgccgcaccttccctgagccacatgaaggagcagaggcgccgctcggaccccgacgtgcgcccaggccatccgtcccctgggacactcgggaggcaggagggctggaacagaggcgagagttgcatgccccttccctcccgcggtgccccactggccccgcaagttggcactggattctgctggagccgtcgaagctccctattcattccccagggcatggaggggacgcggagtgaatgacacgagcagcgttggggggccgtgcgccactttcccaatcctggggtcagctgagccgagttagagctatgcccctcatttgttctctgcgggctacggcggggtcgggtgcgacttgaggatgggacgtctctgggacagcccgagctctcagaaacgttggcttaaaagcacaccggggcttgggctgagtgcaccggagctaagcctagtgcaccagagctcgcgccgcgctctcccagccccgactttctccaagagatgtggggtgcgggcggtcccttagagggctggaggacggtgcctccttgctgcttcgggaactgcgctccccttcttgcttttggtctctgcgtgtactccccggcgcgacaccgctcaccacggtagcctcgggcagtgcccattgggttctgagcacacgtccccacgggtggcacccacagatgtcctgttctaggcttggctcggtcttcagacaagaaactcagaccgggcagtcccctattgaggct

SEQ ID NO: 229294 - DNA, 39 bp, Homo sapiens
  chr3:11313876-11313915
  hyper
ctggtaagggagacgctctccatcgcttcccccgggggc

SEQ ID NO: 229295 - DNA, 902 bp, Homo sapiens
  chr3:11684048-11684950
  hyper
ccggagatgccctcggcggcagacccagggccattgccactttttcaaatcgcacgtagaggatgtccgagggcttaagaaatagatttttctctgactgctaccagagacagttggaaatacaagacagtgggggaagcacctcgcgggcagtaggaggtaataaataacagttcggcgcggctctctctttttcagggcaggctgggggtcggggtgttgtgtaatcgctcccacagggagcggagcgcgaggaacaccccccagtgtcagcgctccccgggctgcacaggaagcgccagcgagacaaagagcccgcctgtgctcgctgacacggtgcccttccggccccacgcgggagagggacattctccgctgtttgggacgctcactcgcgagcacaaaaactcgctgtaactttggctccccctccgtgagctgcagggcgccgtggcccacagcagggtacagtagacggtgcaatccttaccagcccctcccccaaagaggctcaacttttaccggcgtcctacaagtccttcccctaaagacaatattaacggaaatcaaaaatacatacattttaaagagttaaaaatgtgaggcgcgagtacgttgcaagcaacgagcaaactttgaagggtttctacttcactgcctccccgtccagccccctccaccgccccccgcagcctgagatccgaacacactcggtgccgaaccgaacctaagaaacgccggcctttcaagtgccctacaccccggaggaggacagcgggcgcttagaaggcaggcacccagcacactgaggaggagtggccgggacgagcaacgggcagtaattctacaacgggacatctaccttcgtagcacagaatgccgatattgttgttcatcttgtc

SEQ ID NO: 229296 - DNA, 1126 bp, Homo sapiens
  chr3:12045467-12046593
  hyper
gggatgactcctttcgttctcacctccgcatagggaggctgacacctcttatccttccaaaaggagtggggtcggtttccttcgcctccatttcagctgggacacggctctttttctctccaaccaaaaagatggtggggcctctggttccttttccttcccctggggagaaggcctggctcccacgccctccccgcatagtcacgctcaggttgctggaggcctgggtcgccccctcctgcaagccccgagagtcgccagacgcgcggctaggtgccctccgtgagcggggcggggccgcctctgcggcgcggggcgggggctatctctggccccgcccctgccccgcccgctccctctccgcgagcctcgcgccgcgcgggttgcctggcccagaccgccgctgctgtctgcggggtctggtgccggggcctgagtctctgctggctaagccgacgcctcagccgcctcagtcgcctcaatctcgccttccgccctcgctctccctccgcgccaccggaccccgtagccccgcgcgcccccagacctttaagccagatgatgaacttcctgcggcgccggctgtcggacagcagcttcatcgccaatctgcccaacggctacatgaccgacctgcagcggcccgagccccagcaagcgccgacgccgccgccccccggcccgggcgccgcctcggcctaggcggcgcccccgaccgcctcgccgggaccggagcggacgccgccggccgcctaggcgcccgcgccgtaagacgcgccgaagaccgcgcccccccccccgcgcgaacaccgtcggtgggcagcagcttattcagctcgctgtcccaagcggtaaagcagacggccgcctcggctggcctggtggacgcgcccggtgccgcgccggcagccgccaggaaggccaaggtgctgctggtggtcgacgagccgcacgccgactggtaggtgccgggcgccttcgccctcgggggtcggggtccgccggcagccgcaggccaggagaggacggtcccaggtcgccgaggaaacgtttcagaccaataaaaaggagggtccccgaggtcccgctgggaggaggtgcgggctgagcgcgcgcgcgtttgcgg

SEQ ID NO: 229297 - DNA, 1343 bp, Homo sapiens
  chr3:12329041-12330384
  hyper
ggagccccacacctcggtctccccagaccggccctggccgggggcatccccctaaacttcggatccctcctcggaaatgggaccctctctgggccgcctcccagcggtggtggcgaggagcaaacgacaccaggtagcctgccgcggggcagagagtggacgcgggaaagccggtggctcccgccgtgggccctactgtgcgcgggcggcggccgagcccgggccgctccctcccagtcgcgcgccgccgcccccgcccccgcccccgcccccgcccccacccccacccccacccccacccccagccggcgcccgcgcccgcccccgcgccgggcccggctcggcccgacccggctccgccgcgggcaggcggggcccagcgcactcggagcccgagcccgagccgcagccgccgcctggggcgcttgggtcggcctcgaggacaccggagaggggcgccacgccgccgtggccgcaggtcagagtacgggtgcccgcggcgctcgggaaccggctgctggctgggcggggagtgctcagggagggggcgcggagggctggggccgagggtctgggggctagggccgaggaaacgggaactgacggggtcccagacggatgagagctggggagaagggggtctcggctgaggggtccggggctgaggcagggtcatggtccggcaggacccggactgacgggtcgcgggcgggcggctcacgggtgaccgggtgaaggggtcttgggctgagggcacccgggctgagggtcgcgtctaccggagcgcgcactaggggcggagggcgcgggcacagagagccgcggccggtgccgactcgagtggacgcgagccggtgcgtcccggcttccaggacagcccccctcgggagagcgccgggtgggcgcggagccggggacacggggacctccgcgtccccggcggaggtgcgcaagcgtcgggagccgctccgggggaactttggagcagggtgtctggacccggggaagcgaagatccgcgtgcgtccgtcctgaggccgcgcggcacccctgctgaggaggaggtcccgttcgctgtccagagcccaggggcgaccgccgcttggggaccgggggaccgttcagcgaggggcgcgcttgtagctggccaggccctgtgccctgacgcgttgtgctggccctacgcccggcggaggggctggggacggggactgggtgcctccgtgcctccgcggatggagcgcgcagccaggacccccagccgcaccccggggggctggaaaggcgaagtcgctgctttgtgggctcctgcaagtgccaggcgctgaccactcctcctgggag

SEQ ID NO: 229298 - DNA, 248 bp, Homo sapiens
  chr3:12525530-12525778
  hyper
cttgcaagttccccgcatgctgcagcgtacacaggtgcgctgctgtgatcctctttctacattgagaaagatgagatcagtttcctcagggccatttaataaagtcctgtcggtcgcctcaaacatcccatccaccgagggccgaagattctaggtctctcccacctcccacgtgactatgtgacatttgacgggtaactgcatctcatctgtaaaatgcgtcttgcaggatcgttctggcttccgta

SEQ ID NO: 229299 - DNA, 50 bp, Homo sapiens
  chr3:12598378-12598428
  hyper
gccagccaggctccgccccggaggcttggaagtgcgggacaccgagagca

SEQ ID NO: 229300 - DNA, 353 bp, Homo sapiens
  chr3:12851562-12851915
  hyper
gtgtcccgctgggcgccttccacgccagcctcctgcactgtctgctgccacagctgagcagcccgcgcctggcggtgcgcaagcgggcggtcggagcgcttggccacctggcggccgcctgcagcaccgacctcttcgtcgagctcgctgaccacctactggaccggctgcccggcccgcgggtgcccaccagcccgactgccatccgcaccctgatccaatgtttgggcagcgtcggccgccaggccggccaccgcctcggtaagggggcagggggcggggcctgggctggcatggtgggcggagcttagggtgagccaatgactcggtaaaggggcggagcttgggccgca

SEQ ID NO: 229301 - DNA, 335 bp, Homo sapiens
  chr3:12883131-12883466
  hyper
taaaataaagacacgtcaaaaaataatgccgcaaaaattctgagtatacatgttttaatagacaataataactaggaataggactgagaaatgtattctacctatccttgggactacgtagaaatttggaattctttctgagctaataagacctggtggagggaggaatttacttccgccagaagtcgaagccaatccgcttttgggctatttccgcccgcgtttcttctactccgaagtgcgcctcttagtggtcagaagagaacaagacagagacttcctaataatttcatcaccgaatttagacagtaaatagtaacgaaaacagctaacat

SEQ ID NO: 229302 - DNA, 249 bp, Homo sapiens
  chr3:13009357-13009606
  hyper
tggccacacggcgccgcggaagaagcacagggggcggggggtcaggggcggggcgtcaggggcggggctacgcgcaggggcggggccgagccgaggcgcggggtgcagagcgcaagggcggagtcccagacactgcatccaggtcccagcgcgcgaagcctctgttctggaaggaggactttgcgcagcccctccaacactggcgcctcccgggagccatgtcttcctctccagcgtgtaaccacaaca

SEQ ID NO: 229303 - DNA, 369 bp, Homo sapiens
  chr3:13323321-13323690
  hyper
gccccgggtgatcccgaagacagagaggcagaggggcaggcagagggcacagagcagcagaaaccccgccccagagacaccgaagcctcccagcccccttgtcctgccccagatgggcgcccgaaggtccacacggtgaggctgctccgggtttcgacaccgacactcatgggaggcaaacgggaacccggctggcgggctgcgagccggtagggacgctggggtccagggctgctggacagccccgccctgtacctctccccatccctcacttaatcctgggtccgaaatagccccgggtaatcccagggcgaggcagtcgggaattaaccccagccttgaagtaagagacagaggcgtccacagaag

SEQ ID NO: 229304 - DNA, 34 bp, Homo sapiens
  chr3:13324050-13324084
  hyper
ccagggagcccctgggggtctggcggcgggtgtg

SEQ ID NO: 229305 - DNA, 135 bp, Homo sapiens
  chr3:13324804-13324939
  hyper
accgcccctgggtcccgcgcccccgcaccaggcgtcgggggacagctccatccttctccggccgcctcgggcgccttaaatcggaagcgattccgtgaaatacatctcgaatccatcagcggacgattttaggaa

SEQ ID NO: 229306 - DNA, 1317 bp, Homo sapiens
  chr3:13460980-13462297
  hyper
cagcctgaggggaagcgccggcctgcctcgtctcacttcgcctctgtaaagcggcccctgggcttccctccaaaactcctttcctccagggtctccgttcctccccgcgacgctaggcgctgcgcttcgtttcacagactcacttcccacgccagggcgagggcggtcacagacaaacccgagctggggtcccagactcaagggaagtgcggcccagctgccccggcgccccctcccgggtcaggccggctcgggcccggccggcttgggccctgcggtcccagacgccgctccccaggccacccctcctcccgcacaacccagaacacgcgggtcacggccgccaggctgcgcccgctctgctcgcgcctcagcggcgcggaggcccggacggcgccatgacatgagcagtggtggcgacccacgcgcacccgccgctccgagtgctgcagcctagcgcccagcgagagcgcgccgcgcacctgccggctctgccggcctcccggcgcccgcccagcctctcagcgcgaaggcccagcccggcccacggcgcccgcccggcccggccgcgcgcctcaccagcggtagcagccctccgaggcctccagcgtgaagttaacgcgcgtggcccgcgtgaagggcagcagcactttggggatgttgagcttggccgcagcggcggaggggcccgccgccaacagcaccgacagcgtcagcagcagcagcccccggccccgcgccgccatcctcgccgcgcgtcacctcccgcgaccctgcgcccggccgcccgcgccgccccgttgccctccgctcccgcccgcgcgcgcgccaggccagcaggtgatgagcgcgggggcggggcgagggccgtcggcggccgccgcttcctgggcctgagcgcgggaactctgggggccgagctcgcggcgaccccacccccagcccggccctcgcgcagggacgcggggctgggggatgggcgcgcgcccgggcccccggagctgagggagaaggcttggggcgcgcccgcggggacccctggaccctagaagtcccaagggggagcccccggggcgccccgcagcacgcatcccgccctggtatttgcccctggcggtggagccaagccgccggctttggaccttgcgctctggcccggacccacggtcagcaaggaagggacacatgccccaggacatttgggatgcagaaaaccggcgcctgccttgtcccagcccatgcttcccagaagagggaccccgggctcgcaaagggaagccacctgctgaagcgctgaaggcccggggcccgctcccc

SEQ ID NO: 229307 - DNA, 198 bp, Homo sapiens
  chr3:13521510-13521708
  hyper
ggaacaggacatacggtggtcgcgccccttccgcgaggccggggtgaaacccgcttggccctcccgccagggggcggagcttccgaaccaggcgggattccaccgggtatttgcctgcggaggcgggacttcgggcttgatgggcgttgggggtggccttcctgcgggcaggctctctgtgtcgcaacactggcgggg

SEQ ID NO: 229308 - DNA, 208 bp, Homo sapiens
  chr3:13590435-13590643
  hyper
ctccgcagcgagcgcgccgggcggcctctaggagccgggtcagcgagtctgggctctgagcgagcggcgccggcccggccccctctccggcgggcggccgagaccccgccccggaggcggaggcggagtcaggggagggggccgggggccggctggtcccgcctctcgcgcctccgccccgccccgcgcgcacacagccaggggccgc

SEQ ID NO: 229309 - DNA, 156 bp, Homo sapiens; identical to SEQ ID NO: 198828
  chr3:13692028-13692184
  hyper

SEQ ID NO: 229310 - DNA, 113 bp, Homo sapiens
  chr3:13697028-13697141
  hyper
ggtctcccaggcgcgcccaagacccatccgcgccggccgcctgccctgctgcgtctgcccactgcccctggggcgcgtgatggtcccctcgacgctccgccctggcttccccc

SEQ ID NO: 229311 - DNA, 2815 bp, Homo sapiens
  chr3:13919666-13922481
  hyper
ggaggccgcggcgccggcgggagggcggcccgcgggcgggcggggcggccaggggaggttattttctgctgttttccctttctgtctcccccgccacccgtgtccctcctccccgtttctaattaaaaaggagataaagccgcacgcggcccgagtcaatcggctcgagccaatcggccctactggcttcctggatgctgaatgtgcgcggggcggcggggcgcgggccaagatgaagattaaagcaggggaaaaaaaggaaagccacccagacgcgggcgaatcaataacacttaaaacacaccggcaggctggcggtactggcgcgagccccgcagccgcctctccgccgctggtcgggctggcggcccctggtcggctctgcacgcacctgctagcggccgcggccggacaacttgcgaaatccccgctccagagacgtggactggggaagtgacggggtaggggggtagtagtgacaaaacacaaagggtctgccacgcacatcccctcgccgcagcccctgcggtccacccctcctcaaaagggatggtaatgggttcactgctgggggctggaggggcagggtgtgtgagacctaccaagcgggcccttcagcgccagaacctctatccatgcccagatccccccgcccccacaccgctccgagcctcacacgcgttgtcttaagtacaaagggtgaccggctttgcacaagcagctccaggacgcgtcccgagctgccccctcccaccttccagccagagcgcccccgagccccacctccacagaaacgctaggtgaagccggagggctgctcgcgcgcccggccgcctctgctgcccagttccagggggcggggtgtcccgcctctctctagcgcttgtctccctctgtgtctcagaccgcctctcgtcccacctttgtgtgtgtttgttgggggtgggacgtgctgtccccttggcccgggaaggggctctgggagtctaagggcccctggaaattgggtggtgccaaggctccgagcggcggtttatgtttttgccagcgaatgtccttcctcctgggtacctgttccctgtttgcacggaccggccccgccagccacctggggactgcccagtctctaggaacggctgtgccgcgcctcctgagagagttcgtctcgggctccggggactgagctccccgagattggctgtggtcctggcttgatgttcctgctagacctgctgtccctatgcccgggtccgaagggtccccgggatgggctgaacctttgcagcagctagccctcccccagagtccctcaggctggagcgtccctaccggctgtctctggtcctgggggattccagactcagacgtcctcaggatggccagtccccctgcctatatctcctggggtgtcctgcggggggcctttgtgcgtccaccgctcccacaccgcacccacccggcctctcagagaagctgtggaagttggccggcagaggctcgcaggcggcacacctccctccccgggccgtgccaactttgtcgaaacacgcgcggaaagggcgcaggcagcccttacccgatccggaggtagaccatgcccaggctgagaaagaggtggcccaggcagcgccgcgctttccggttcatagtcccgattggccgccggggccgcgggccgggctgtgctgatcccgcgggccggccccggcggggcaatcaacatagcccgcccgggaggcgcgagccgaggcgtccccggggccgtctgtcggtgcgcccgtccgcgcgctccgcgcctgagcctcgccaggagcacgggagccacggagcgggaggagggagggaggagcgagcgcggcgtggggcgacgccgggctgcgcgcgagcgaccggtgcaagtgtgcgagacgcggggagtgcgggggcgctgctgcctccagcccccgcccctccctcctttcccccgtccctcccccgccccctcccccgcccgcctccccggagcgcccgcccagcgcccctgcgcccgcgggacagggccgcctgcacaaggcgcgcgctcgcgcctttccatgcgcgctcccgggggccccctccctgctccggggtgcaggtggcaggctggggagcacagcccggttggaggcggtaggagcccgctcgccccccacccgtcactaacttgcagattgcagggcgagtgggcgtccagaggctgccctcgggtggagtggaccagactcggccgagaggcctagtgccttggtctgctgccctgctccctccagcccggaacagggagctggggctgacagggcacaccccagttccccaaccccagcttcaggggagggcgccccctttcgcggagcgacgggctgactggctcagtgtatttcttccctactcccacctattcgagagtggcggcagggggtgcccaggttgggcagcctcctctgggatcctgctgttagccgacagactgagtcgggctgaggcccagttgccccgcgcggaacagcagtggggcgcctgagccgcgggagcgtgaggggcgcagctggccgctcagagcgcgctcgcggcgtcaccaggcggacgcggcgggtggtgcacctcggcctcgctcccgggaacagaatgctttgagtgccctggccgacccgagggggctaacacccttctttggtgtacacctcatccagtgagctagggggagtctaaccgtccctggaaattgggtggtgccaagactccgagcggcagtttatgtttttgccagcgaatgtccatcctccgggtacctgttccc

SEQ ID NO: 229312 - DNA, 357 bp, Homo sapiens
  chr3:14166221-14166578
  hyper
agctgcacctttacgccgtgacctccctctcctctggcagggcgggctcctccgaagcccgcgcggacccgccccctcccaggcctgcccgccgcgcgcctgcctcggcgccctcgcaaccgcggccaggccaacctcagccggaaactacatttcccagcaggtcgcgcgctcctcgacagctctccaggcagtagaaactacatttccccgaaagctttgcagtgcgcaggcgcatcaatgaggtactgcaatgtcccggaccgtatagtttccaggacgtctcgccgcgcgcatgcgcagaaacactgggcacagggggaggtaactgcagtaagtcccgcttggccctggagt

SEQ ID NO: 229313 - DNA, 520 bp, Homo sapiens
  chr3:14219841-14220361
  hyper
ccacggcgcggaacgcgcgcagcaacctccaccaggcctccgcgtctggactcccgccctgcctctgggcctcctccgcccaccggcggcgtctcccgcgaagcccgctgggcctcgctctcaccctcctcctcctcctcacgccgggccttgctcttggccttggatttctggctgcgcagttcgcgtccccgcggctccccgccggccgcgcgtttccgagccatgttgcttgtctgggcaaattccacttcgcgagtgacgcacccggccgcgatgcgctagaacgccggccccgccccgaggcggtgcgcttggccacgccccttcgttggaggcctagtcacgcccctaaaggaagctccaccccatacccgtggccactaaaaaactgcgggaagcaggaaagagcacaacaggtttctctctatttccggtgtattgtatcctcacgtttccggagattgacgttgctcttgtgttctcgcgagaggcgggaaagggcgcagggtttgaaaca

SEQ ID NO: 229314 - DNA, 1098 bp, Homo sapiens
  chr3:14643706-14644804
  hyper
gcaggacccaggcgcgggtcctccttcctcctcccgccccctcgcggtcagacaacaggtacgcggggagcagcccgggcggccccgcgcaggggttgagccgcagcgctgctgtgcaggggcaggcccgggcagggggcagtgcggcgagtcagccccctccctggcctcctcgcaactttgagtaaccgcggactccggggtcggcatgggggtggcgccgggcgttcaaaggaaagttgggtgcgacggaccgcagcctcgggggccaaaggacccccaccgtgagcgcggccacctcccgacacccggcgggctggctggagggagcaggtgaggcacgtggccgcctcgccaagccagggctccctccaggagcccgacccgccggccgggccggtggatgccccctcgagggctcagacccttcgctccagcccccggcgggcgccctgccccgggtcccacactcccgcgccccgtgggccccactgctggctttccgggaccaggctccgctccgcagctcgcgtcctgaggtgatcctccaggctccccactttgggaccccctcctgcgcctcgggtgccggcgcctgtcttcgcctcccgcggggaccctccccggcgccccaggcgtgtgcgccccgggccagctcagctctgggtccgccctccgcaccccgcgccgcgcgcgcgctcaccggccgggcagcggccgcgtcttaccttcgtccggcagccgctgcaggcagagcgcgaggttcctccgccagccccgcatccccgcggccgccctgcggcccggcccggcctcgccagcccggccccggccccgcccccgccgggcagggcggcgcagcgcagcgctggggagggccgcgggcccagggagccgcgggcatggacggccgccgagggtgggggtgccggggcggccgccaggcgctccgctccggctcccgagcccgcggctgagcagctacgcttttcgagcgcgcgctttcccgggcgccgggggcgggatggcggtgggggcgggcgcggagaggacggctggaggggagcccgaaggcgccccagccgtctcgcaccctcg

SEQ ID NO: 229315 - DNA, 79 bp, Homo sapiens
  chr3:14693107-14693186
  hyper
ccttagcagttagcgtcaacctccgcactctatgacctttccaaaatgatggtgaacgtaatacgcaccacactctgac

SEQ ID NO: 229316 - DNA, 124 bp, Homo sapiens
  chr3:14851851-14851975
  hyper
cccccagcgcctcccgcggtgcccatggccacggcccctttaaatgtgcgcagggacgccccggccctcgcctccctgaatctctgaccgagcaggggaaaaaaaaatccttcctcttcgggag

SEQ ID NO: 229317 - DNA, 56 bp, Homo sapiens
  chr3:14852155-14852211
  hyper
ccggcggccccgccccggaggctcgcggctcgcgcccccactgccctgcgcgccgc

SEQ ID NO: 229318 - DNA, 35 bp, Homo sapiens
  chr3:14988815-14988850
  hyper
taaccgtgcgcgacgtccacgagtttttaggacga

SEQ ID NO: 229319 - DNA, 221 bp, Homo sapiens
  chr3:15140593-15140814
  hyper
tctgggcctccaccgtccgtcactcagccgcagccgccatctccatcggtcgctcggaactcggcaggtgcgcctgcggcggcgacgaaaccggaagacaagctggtagacgcctgtcgagcgccgagtcttcgagggcgcgaaaagggcggatacggattcgaatagtggagggcgggccggcggcttctgcgcaggcgctttccgaacgagggagggga

SEQ ID NO: 229320 - DNA, 155 bp, Homo sapiens
  chr3:15248302-15248457
  hyper
cgcggcttgcagccgccgctcctccacctgtagtcctgactggcaaatgcccaccgttgagccgctttggggggcaggtgttagatatgggtagttagtagccaattcttgctgtcacttgactctgatttacagctagcgggaaatggcctgtg

SEQ ID NO: 229321 - DNA, 242 bp, Homo sapiens
  chr3:15468806-15469048
  hyper
catgatggctagccgacccgcgttaatttagtcagccacgctcagggctcaccgtcatcagttcctaaattcacctgcagggctagggccaggcgcactcaccccacagccagccccactgggcctcggaggcagaatacgggaagaaccgcgaaacaaccctaaaccaattctgaggaccacgaattcggattatccgggagttcttttgccatggcaccgcccccgccacttccgctagg

SEQ ID NO: 229322 - DNA, 372 bp, Homo sapiens
  chr3:15642964-15643336
  hyper
cggcatcttccaccgaaaagctctaagcactcacgcagccggcaaacaagcggaatcatccagcaaggcaaacgcgaaatcggcagcacgccacctctggtactgcacctctgacggacaggagggcaaccaactgccttaaacaacgggaaggaagaggcggtctaaattcgtccacttcccgggagaggtgagaatgtaaacacgcgcgttctccaatcagaactgcgctctcttctcggctcctccattcgcgcgccagaatgccagagggaggcgggactagcaggagattgctgcctatgcaaagcaggtaagaagccgaactctgaggcctctcgccattgtctccgagtcggccagctggagcgt

SEQ ID NO: 229323 - DNA, 50 bp, Homo sapiens
  chr3:15901267-15901317
  hyper
cccgcggccgcgccgttccagcccgcggcagcggcggcatccaaactcca

SEQ ID NO: 229324 - DNA, 340 bp, Homo sapiens
  chr3:15901941-15902281
  hyper
gaacaggttgtggacgcccaatcgtttttctgcccgtagtcccaatccgaagctaagctgtgtggttttcccttgaaagctccccagccaggcttgctgcctccacccctttcgcatctgaagcattttgcctcccactcgagagaaatcaattttcttaaacaaacaaaaaaaaagatgtgcaggatttctaataaatagcatccttggatggaggagaagaggaatgactccctcatcctgccacacacacccccacgccaccccgcagctctgaaacggcttttctttcttagccagccgcacgctgttgccattccaggctcgtgtgggagaagat

SEQ ID NO: 229325 - DNA, 218 bp, Homo sapiens
  chr3:16306495-16306713
  hyper
ggactagcccttccggcgcataggcaatgacgcaactccgccctgcgcggccaaatggataaccggtagcggtcaccatggagatggctgaactaggggcggagacactgggaagactgaaagcttgctcagcggggtcgcgcaccgctcctcctattgggcggcagcgaccaatagaatgtggggctcgcccgcgctgctacgtcacgtctgggacc

SEQ ID NO: 229326 - DNA, 635 bp, Homo sapiens
  chr3:16553594-16554229
  hyper
ccaaacagcttgcttcgtaacccctctctggggtttggtgacatctggggtcacttgaacttcgttgggattcagctgttcagagatacaaattaggaatcccggcagcagagaggccctacccacaggcccagaggtcgctcacattacacccggcttccttcctggcaaggccttaacttatcctgagatgacacacgatggcaggggttggaagatgcctagtctagttgagcgcccagctcctgaaacagctgtaccgactacaagggttccagcacatgagttgctggaaactggggtgaccactgacagagattgagccagactttttttttaaaaaagtacttcttgtttgtttgttttaagcccccgaagaaactcactgacaccacccagcgtccctagggatcacccataaccacacagggcagctgagggcaagcacagagtcacagacagacagcagggagcgtgcctggttctacaaccttggcctccacgcggttcttgctgccaaaggcagcgacaccggaggtgaagggcaccagccctggcctaggactggggtgcgcgtgcctgacaacggggcttcccgaaatacacaaccacctcctcctcgcccagacccatat

SEQ ID NO: 229327 - DNA, 119 bp, Homo sapiens
  chr3:16926234-16926353
  hyper
tgttttccttccccaggtgccgagagccggggctccgccggcgccggagctgactcgtctctctcttctttcccctgcaggaatcttccgataattctgccgccgcgactttaaccgtg

SEQ ID NO: 229328 - DNA, 45 bp, Homo sapiens
  chr3:16926666-16926711
  hyper
ccacgggcgggcgcgctatgacagcggcggggtttccaacggaga

SEQ ID NO: 229329 - DNA, 67 bp, Homo sapiens
  chr3:16926951-16927018
  hyper
agcccactgctaacaggaaccactggagcatgggtgcttggggtggttgagcggggattggatgcaa

SEQ ID NO: 229330 - DNA, 227 bp, Homo sapiens
  chr3:18465498-18465725
  hyper
aattgatctgacaagtgattcgttggggggaaatcgtaaaaacaaagcaaaacccgttatgagctgtacactgtgatggtgctggggaaacgacgtggtgactgaggattctcttaaaaaaaaaaaaatcactgcggacaaggtctccaaaaaggaaaaaaggtctcttcgcgtctctccctccctcctgctcactcgggttcttcggtgtgaggacagaaagtcta

SEQ ID NO: 229331 - DNA, 294 bp, Homo sapiens
  chr3:18485178-18485472
  hyper
ggtttcccaaaccccggttctgccggcccgggagccttagcactggagcaataggaaaaggccaccgcgctcgggtctggacagcaggagggaaacacggtgtggactgcgaggctgcacctgtgatgtcccggcccctgctaagaggacggccctttcttctgcctcttgcccaactccaaacccacattcacgccagcagcctctccaggaccggcctcgctacagccagcgagggctcgaaatgaggagtgccgcggctttcaaactccgggctccaacttgagcgccccg

SEQ ID NO: 229332 - DNA, 139 bp, Homo sapiens
  chr3:18486937-18487076
  hyper
agtgtgggcgcttgggggtgcgcttggggtgcgcggcgcggttctcgtcgcccgccaaccctgccccctcacctctccgggggcccccaacacgcgcactcctcctcttgtcgcctgcggcttcctcttgttgcttgtt

SEQ ID NO: 229333 - DNA, 190 bp, Homo sapiens
  chr3:19188895-19189085
  hyper
tttctataaagttcgggctctgggtgtccccttgcactccccacagggctgtgccgcaggcttgggcgactttccccgcagaacgttggccgagagggagtccccgcggggggggccaggggggaggactgggagagaccactttcgttttctgagacgccttcagttcctggccgtccgccaggctttc

SEQ ID NO: 229334 - DNA, 104 bp, Homo sapiens
  chr3:19189374-19189478
  hyper
cggggccagtttcccggactaaaagaccctggtgactggggatgggcctcacaactaactcgggctgccctgcccctgtcgcgtgggctcgcaatggcaagtgc

SEQ ID NO: 229335 - DNA, 641 bp, Homo sapiens
  chr3:19189679-19190320
  hyper
actggctcccggggcgtgggagttgcgctcgctctcctttcccggcgtcccgtggagaccgggaggctcagcgcctctcccagctctcagcgccgccctcccagaccccagagacgtcggtcagggcgcggcgccccgggccactgcgggctctttccgggcgggcgacgtggggggcgaggcaccgcgcggcggcgcctggcgggcactgttgcccgcggagggacggtgggggggtttcagcagctggcgggggtggagggggcgggagagggagcctgcgccgggctgagcctggaggtgcggggcgggctcggggagcgctcttggggctcctcctgccacagccggggcggctggaactctctccctttctccctccatccttccacttcccctgctcggccccgccgtcaggccgggtcccccttccctgccgtcatcaggttccccttctcccttcttggcactttcctttcgaaccatccttctggacaaactttgatggagaatttcacaccacgctggaaaaatgccggttatgaaaggattactggcgccgcaaaacaccttcctggacaccatcgccacccgttttgacggaacacgtaagtcttacacttgaacgagtggtatggcat

SEQ ID NO: 229336 - DNA, 369 bp, Homo sapiens
  chr3:19988326-19988695
  hyper
tttcccccgaccccggccgccaggagcccagagaccccccagcctaaataacaatggcgctggagagggcgtggccgcgcgtacctggggtgggggaaggggagaaaggcggccagttcggatctgagccactcgcagggtcacgtgacatcctgcctcgccccgccccgcgaacaaacctaggcggggagggattcgggaaggggcgaggaagcggaaggagcaggcggactggcgatgatgggaagtgacgaagtggcgcagttcgctgcgtgcagcgacgtggcggcggggccggcaccgggcagcggaagtggctccggcggtgggacttgagtgtttgtgttttggttcgtgaaggagccggcg

SEQ ID NO: 229337 - DNA, 37 bp, Homo sapiens
  chr3:20227787-20227824
  hyper
ccgccccgccaggcgacgtcacgtgacgcacattcgc

SEQ ID NO: 229338 - DNA, 1169 bp, Homo sapiens
  chr3:22413369-22414538
  hyper
ctgccctcaaaacgcgtgtatctcaggtttttttaagtatttgttttaaaaagaagaagaagaagaaggaaatgaaaaggaagcaggaagctgtcccgctgtgtttctttatcccaacaacttcgccaggtttcccccgaggagggagcacgcctcgcacacacccaatgaaagacagacagcaggacgtccttaccgggtggcccagccctcgactctggacagaaccaggctgacctcgcccccccgcctcggcctcccctgccccttggttctcggcaatgagctgtgacctgagaccctccagctccgcgctcttcactctggccccgcaacctcacatctcttctccttggcaccgagaagaggctggggtgtgtggaccgatagtgcgggataccgaaaaggtggtccaaggtctgggcggtgcgaacgcccattccgcgccccccatgcgagccccagcccctcgcgcctggtatcccgcaggggcgcaaccctagctccttgcccggcgccccaacgaactccgccacctgaaccgagacacctctttttgcactcaacttaccgcggctgggctgagctttcggcgcccccaggagcttttctctccttcctcccaccgagctcttcattctcctgctggcggccgcccggcgccctggccctggcatccgggaggagcagccgccggggctggctgtcccgggagacgcacggctgcccgcctgcagcttcaacggcggtggtcgccgcgagccgtgagcggcggccaaggagaacggtctccgttgcgcagcgcgtgctgtccctccggcacgggctggaggtggcagtcagcgcgcctctgcctccgccgcgctcgcggcgctccgcacgagtcccgagccggcgtcagcccaggtgcaccaggctggggagaggtgcgagcccgcgcgaagggaggggcccgcggcctgagggtgccgggagagagcgagactgatgaccacgaaaaaagaaacctggagactagaggcgaggaactagctttaatggagtgagtgggtcgtgggtgttaagtggaaacacgaggaggcgaaatgcatctagaaactacagatatcggaaatgagcttgagtgagctgctttttgagtgaggctcgaaaagggggctgtcattttg

SEQ ID NO: 229339 - DNA, 43 bp, Homo sapiens
  chr3:23847466-23847509
  hyper
gttgctgcacttccgcttctctcccagcgagagagagacacga

SEQ ID NO: 229340 - DNA, 56 bp, Homo sapiens
  chr3:23958863-23958919
  hyper
ttcgagctgggcccggatcctggaggaggcgtggggctgacgaatggggcgcccgg

SEQ ID NO: 229341 - DNA, 69 bp, Homo sapiens; identical to SEQ ID NO: 198842
  chr3:23986035-23986104
  hyper

SEQ ID NO: 229342 - DNA, 52 bp, Homo sapiens
  chr3:23986898-23986950
  hyper
ctgctgtgcgctgcacggcctggggcccgggagccccgcccgctctgcccat

SEQ ID NO: 229343 - DNA, 150 bp, Homo sapiens
  chr3:24535351-24535501
  hyper
aagtgacaactgccgctaagaagggcaaaatccactaagaatgaaaattcccccaaatgagtccttctccgagggggtggaggtcacacagttggcacaattggtatcacaaccaactcgaggagacccagaggaagatgctgcgccaag

SEQ ID NO: 229344 - DNA, 133 bp, Homo sapiens
  chr3:24535681-24535814
  hyper
agtccctttaaccctcccccctggcctgccaaccttttccgaacccccatgtcacacaacttcctcatcatggaaacttccactgggttcggcgctgaggatgccaaactccatttcacaaggaacatgtcaa

SEQ ID NO: 229345 - DNA, 1436 bp, Homo sapiens
  chr3:24870654-24872090
  hyper
ggcgcggccgccgccgcctccggctcagctcacgcggaaaccccactgggccgtcgtggctccgcgcggttgcgggccagcgtggagaggcgggacgtggcgcccgggggcggggcctggcgccagggggcggggcgcagcgagccgggctcccgctgtctgctctcagcggcggcggcaggggctgagggcacagccagcgggcggcgcgccgcggactccaaggcagcccgccaaaaggtaaagccaggagagcgcgctggcgggtcttcctgttgggtggctgctgtccaagcccctagcgtccccggagccccaagctgggtctggaagaccagggcatttgcatggcatccagggaccggctgcctagcagggattttgcgtgtaccgcggcggggccgggggctgggggttggggggtctgcagcgggagcccgcgaccgatcccaggacatctggactcgcggacaactttgcgcagcagtcctcttccaagttccctttattgctattgtcttagcgcctgtctgacagtctccccggactccagctttgttctcattaggccaaacccgccctccccaggggcgtgaacccaggagtcgctggcaagttgcacctgccagccggatccgccccggctcccttcgcgtccctgccgggtccagcgctgtcctgcgcaccttagggctgggcacggcgaaacctggcgcccttgggagcagaggttctcgctccattcccctgtggggatctaagctccaggccggggtgtcggacctctgggttgcagcatgctttggggccgaagaaagggcgagaaaaagtttgagcattggctgggcctagggagcgggtagcgccaggctgcacatggcaggagttggagaagagtactaggggcttggcgccggacacagggacgcggccagggaccgagccctggaggctgaggctctaagcctggactgtcagccgcgaaggggttcttgctgtgtgcgcgctttggcaggaagaggctgtgtgtgattgtagagacgatgggcggaaaaacagagaagagagaggtacttggaatctatgtaattgcagtgtgccccagtgtgcacttttctccctccagatattttgaaaaaggtgtgcacgccgatgtcttgtaggtggactcccggaggtgggggtgggggtgggtacgagggataagttttacctagagctagagctggcgttgaaagtgaacaggtgacagaagacgtgtgtgtgtgtgtgtgtgtgtacgtgcgcgcgcgccgtggctaaggatgctcgggtgctggaccgcccgctgtgcctccacacccctccgccccgcccccttccagctctcagcgcggggtgagtttccctgacactccccgccggaggcaagcaggcagaggcgaagtgatggtcgc

SEQ ID NO: 229346 - DNA, 671 bp, Homo sapiens
  chr3:25469354-25470025
  hyper
tgtgggctggggggcgaggcggtgggcgggaggcgagcgggcgcaggcggaacaccgttttccaagctaagccgccgcaaataaaaaggcgtaaagggagagaagttggtgctcaacgtgagccaggagcagcgtcccggctcctcccctgctcattttaaaagcacttcttgtattgtttttaaggtgagaaataggaaagaaaacgccggcttgtgcgctcgctgcctgcctctctggctgtctgcttttgcagggctgctgggagtttttaagctctgtgagaatcctgggagttggtgatgtcagactagttgggtcatttgaaggttagcagcccgggtagggttcaccgaaagttcactcgcatatattaggcaattcaatctttcattctgtgtgacagaagtagtaggaagtgagctgttcagaggcaggagggtctattctttgccaaaggggggaccagaattcccccatgcgagctgtttgaggactgggatgccgagaacgcgagcgatccgagcagggtttgtctgggcaccgtcggggtaggatccggaacgcattcggaaggctttttgcaagcatttacttggaaggagaacttgggatctttctgggaaccccccgccccggctggattggccgagcaagcctggaaaatggta

SEQ ID NO: 229347 - DNA, 121 bp, Homo sapiens; identical to SEQ ID NO: 198854
  chr3:25824793-25824914
  hyper

SEQ ID NO: 229348 - DNA, 144 bp, Homo sapiens
  chr3:25825435-25825579
  hyper
cccggatccctttgcgctccggggccagcctaattgatccagctattaaggtggagaaaccgcatgtacctccctcctttccccacaaataaaaccaccttagagccttctcttcgcagattgtcaggacgttctacatagatg

SEQ ID NO: 229349 - DNA, 2094 bp, Homo sapiens
  chr3:26663871-26665965
  hyper
aacactcatttgtcgaattgattttaagcctccgcttttcccccaaggagggcaatcaatcccttgcacgttttgctcctttcaccagcttaattcagctctgatctcagtagttagaaaaataggagaaagaatggggccatagcctgctgcaagtagagctgtgtaagggggtgcgaggaaggcaggcgagagcagcagagggagttaatactcctacctcagctggtctccggcagccaacgctcagcccccgcctcctctctccattccggaccccgcaaccgcgaggcgagagagcagcgccggcgaggcactggctgggctctgactgtcacgttaattccctgctgctttttctagtccccagccgcctcgcccctcctccctcattcccagcctgggtttggaggcgatttccctctattgactgagccgactgcatctctgggcaagcggcgctttgcctctctcctgtctttgtctgctcttcctgcaaggctacggcgcctggagcagggtctgcagcggccgccgcagcaacgcgagccaagtcgtgccccgcacggccgcccggggccgcaccctcgctcggtggcggcgcccgaagacgccagccgcgccacgcactgcctgcgtcccgcgccccagccgccgcgcaccaacgccgccgccttcgccgggagccaagcccgccgggccggcccggtcccaggtgggcagctcggcttgcagctggttggaggtggcggccgctgcagccctggcagcgggcacacccctaagcatacgcacccaacgcctcctccctgagccacgaggatggagcagccaccccggcccgggactggcgcaaggtaaggtgcagccgcctgttgcttttcgcagagcgcgggatcatccctctgcccgggtacctaggccgtccctccaaggaacaagtagaggagaactattacaccagttctaagccgtgcctgtctaagcctccctgatcccttttgcgcagaccctgggagagacctcctcctggagagagagagtcgaccctcttcgctcctgttcagccggctgctatacaatagtctgcaaacttttgtgaccccttccctgcgcggtgctcaccccgtgctgtgcaacttgcaggtttagttcttgcccttcccccagcccctcttgccatatgcatctgcccatttctctctgtgtgttcttgccagtcgacttttcactccccgcagctctggctcctgaggcgagggtttgggacccagcagtgctcgtcctgcctctaggagctgggtagggacagagaaggtgaaataagagaggtgggacatggaggatggctgcggccacccctgaagcttcgtccagcgcgatgggagtcagtccatccttgcacacgccacccccaactcggcaatgaaacctttggagtggcttgcggctgtgcgccgtgggaactgcaagtgcagatatgggtgggtgaagtaagtggctcagggagggaaaggctgctcgtgcggtggaggaggaagctgagggtcgggtagatctgcccacggttgagggaaatgaaaaggtactgctaatgtgggcgagcggccagccctgagaggccatctgacgaagaggaaaagggatttgagtccggagggcgctggcctgggtatgtaaatacagatgggggaggggctgggtacctgggggcgcgtggagacaaggaatggagccccggaatgccgggcccttgggtacttgggaaggcaggctgctgagtgcctgggatggggcgatcttcctccccagaagcaaacaaacctccccgcgagaatctgaatgcgttggcatcttgggtggtgactgaatggtcagatcgtggactagggatgcttctccaagctctaagaggaccatagtctgctctcttctctggcacccgcttgcttctacgctccttcacctctgcagccaggtcggtagacccacgcccaccttccctgccaggcactcaggagtcaaggatgtttccacagccgcagtgtaggaaggggactcctgcctcccagggggagacgtgtgtgcggggta

SEQ ID NO: 229350 - DNA, 784 bp, Homo sapiens
  chr3:27410377-27411161
  hyper
tgaacctccagaggcgtcggagcagattggaagagacacattcaggctccatttaaccagaataattccgttatcaaaatggaagcgccaagaagcatcgttgatggcgctttcccaccatccatccgtccaacacaaacccacctgctttgaaaagactgcctcacgcagtgactcacttacccaccacagccgcattctctacctctgcctcttgtctagtgaagctggctcccgaggcttcggggccgctccacagggacctgaggacgtctccccggagaccctgactcaagctgctcgccggcacagccgagcaccggctcccgcctactcaccgcgcgggagggacggtccctccttcaggccaatctccttatcattgtccctgctgctgtcacctgctgctgcagaccgggggtcccgtccagtctcagcccgtcccgtcctccccccagcctattcccggtcccctcaacctcagggacaccgcggccagctgcaccgttggttttccaatcaaatcctcctccaggccaccaaccagcgctggccaggccaatgccgacaattcttcctccgccacctggggcgcctcagccaatcgggagcagccatgctgcgcagtgcagaacgccatagcgacggatgacgcctgccggggaatcgccgtagcaaccagagacgcgctagatccaccaccaagcttgcaagcagaagaggcagcaagtgatgctgaaggctgtgctgcagccacttcaccggaacctagagctacctgtga

SEQ ID NO: 229351 - DNA, 1714 bp, Homo sapiens
  chr3:27754003-27755717
  hyper
cctgaaataatgcattgcttcggcggcggtcagagatccatgtgacgcgggggcactttagggaccattgctgagggcctggttagcatttgggcagctgaatccttcccttggcgaactccatacgtgccctcggcgacacacagaggactcccagagttgaagaagggggtggatgtgtgtgtgcgcactcgcccacgtctcgtgttttacttttcatttaagtcgtaataaggagaaattcgatgaccagcaaggctggagtcccatcgtcttgttgggggagaggggggagaagaaaaaggtgcctgtaacttcagactgtccaagatatcgcttagctcctgcgcccggaagaaaatccagcgcaggtcgggttccggcgcgcggaagccctgcgaaccccaaatgtgtgcgctgagccgaggcctctaagcggtaggagagaatctgacctccgacattcttttcaagacacgcgccggtggaccgggtcctgggattggcttactcccgggctggaccttggggttcgcatatttgaaagcgtaaacttgaggaatgacggcggggtgatgggtattttatagagtgggactcaatcgtgctcagcaacagatttctccaaattcccttttaaaaagagcctcccagagctgtcgaaatctccgcggggtgaaagctaaacttttggagtcgctgtgtagccgggtagaggacacggcggcgcgagccggaaagataagtgtccaggcgaatgggaaaggaaagatcttaatttttgttcctactgttagctgaatgtccataaaaatcaaagggaatgcggggaagtttttattccagagcgtttccatgacacccgcagagatttaaaaaattacattcctccccctacgcaggtttaattcggaaagaagagactgcagaggagagggaagaccgtgagtctgctttcacctaggtttaaagcgaatcaaagacggctgtaaaaagggaaaccgggaccaaaaacagatttggagcctcgaaactctccattgaaggtttggaagatacgttgctgcagacttgaaaccggctccaaatccggcccaaacatgggctgaaaatatggcgcgctaatctgctgcttcccctcctcctcaagttctttctgactcttcccacctttcccagtttcccttccagacgtctgcggctccccactccacccccaggatagctactctacatcccgacaattcccagcttctacacccaggaggaggaattctggaaccacccagagcgaactcgtgccggggcggggtggggaccggaggaaggtcctgctccgaattctctccagagcagaaaagaattctagaggctacatgtgggctgctttccccccttcttccttttttccctcgcaaaccaacaaccaaaaagtgtttggtgatggaaagaacaccagtggaaaacggcaaataacagtatttccaactccgagtcaggtcctctttgcactgctttttcctgtttcattgcaatttattgattttattgtggttttttgtttatttggggcaagaacggagatgtgaaccaggacgagccagcagacccccgagccagtatctcctccctgggcagggaacaccgcctgcaccggtgcatactaggagaccctggcggagaatgtaaacaaaccgggcgccgagcccttgat

SEQ ID NO: 229352 - DNA, 1201 bp, Homo sapiens
  chr3:27755955-27757156
  hyper
aatctgctatatcccggcagtgattagcactttggggctttctagagggcagaaataggagagcactgttttcgaaattccatcgcatctcccaatattcggtggttggatgcagatgtaagggggctgttgggggtgtggggaaggcgctgaccaggataggggggctatgagtctcccttccggaatctaaatcagtcatccacagtacatatatcttaaaaagcacatcttcaacgcttttgtccttggctccccggtaaagttcggggcgcctttgccaaagtgttttgagtaggccgttcggaaacgcggagcaggagttcgagcccccaaggtcacgggtggcgcgggaagaactcgggccccagagggacggaggggaagggagacaggacagtcgaggtacaaggtcctggcggccttaattgggcgcagaaggggaggaggtctcggctgattgctcgcctcccagcagctaatcctcttagcagctgcatttccgcgctacacagttagcagaatgatcctcccagctagacctttaccccgggagggtccaggagggggctggaaaggtttgcaatctgggcctgaagccgtctgcagataagcctggcgggacgtctggctggggggacaaaggggaccctccaccccactctttggacctcccagggttcagccaggggatgggctgtccttcgtcttcccgtggagcgtgggccaaataaacggaactaagcgcaaggtgaactgctccaaggtcactgtttgcagagcggcagtgcacggaacgactggaatcctcctttgtaagtgccacgcccgtccctagcctgcgcctcagaccgagtccgggcggagtttgactgcagctactgaggccggcagccggcggcggcgggtgcgcagcgtctgggttcagaagaaagccgcaggtgggcgcagaagctgagctgtgtgcagccccccgctccgccgcgccccagggaccctgaactggtgggcgctcaaagggccacgggggttcccagggagcctaggtgggcctaaggatgggtggccccaagtaagcctagaaaaaagcccagagaacttagtggccaggcgctctgacagagcctggtctccaagagccagaagcggaggttttcgaggcttggttaagtctgatgtgggcaatcggcagcaatcttcc

SEQ ID NO: 229353 - DNA, 679 bp, Homo sapiens
  chr3:27762338-27763017
  hyper
atcagaactttctcgcgcaccgaacccgagccaggtctggctccagggcagatctaaccacctactccgaccgagcttccgaggccggcgctctagccttcatgcccacctcccggagacgccccgtggagaccctggcgcctaaaactgcgggagcccatctactgcgctcaggtggccagctcttgagccttccctatccgtggctccttgccggcatgcaggcatgcacaagcataccgccgagcaggaggatctaacgaatccagcttgtggacatgccctaatttccatttccgcctcctccaggtctgttcaggtgaggatgatgggagggaaaagcggtgtacagccgtaacattggcaccctgcaagagccgccggggcactgacacagagggacaccgcattggagatgcggtgtctacggagatttattgcgcgcggtgaaacactctaagcaccgcgcggaacaactgggttcagctccctcatcccggaccttccccaggaccacacgtcaccctttatccccgaacccaggggcccctccacgctgcgctcacctgccctgtttcgtaatgatcatctcagtttggtggcggtggaatttgagccacagaggccggttgcacaggtagacgtgggcacggaagccagaacctggaacccccaggcc

SEQ ID NO: 229354 - DNA, 531 bp, Homo sapiens
  chr3:27764422-27764953
  hyper
gtctgtaatttcgccggaatttagggggacaaagtttggggtctccatagcggtgtccacccttggcgcattagtcatctcagccctccgctggaggaatgagatggctggagcagattttagaggccagagagagaaagactcttcaagctgatagcttgcagggaagcgcccgtcccggaggctggggaaactggggcaagttggagacaggcccaaggaagtctctttcctcgtcggaagctgtaacttcaaagcacaccttcctcttgtcgaaggcaaactccctggccttcaacgcacagaaccactttttgtttgttcccatccttttacccagtgggaaaggtttgtagagaggaaactcgcgctaagcttttgggattccggggacggccagagcacattgccatcctggaggacctaagctctcagcttctaaatcagaagcttggacagggtactggggacaggacaagagtgaaactaagcgagctaacaccaacttcatactcacgccaacacaactgc

SEQ ID NO: 229355 - DNA, 635 bp, Homo sapiens
  chr3:27765182-27765817
  hyper
gctgcttgtttcttcgctgcgtttcctcagatagattcaagagcggggccgtcatattttatcgtttcattattacggaagcggggggcacgtttcgttgcggataaggagaagcctgaatattcgctgttaataagcaattacagacgccgccagtaatcgctccgggagcgcattttccggctgagatgtcgggactctgcttccccaaccgaacgcgatcacacgggaaactcttcgcccacaacagatgagatggccaaaggattgctgagtgcgcacacgcaagtgtagaacagtgcgaagctttccaacccagttttccaaccacagcagcaccaacatcggcatgtctggggtctccgagaacgaggtccttaatgcacttagactctccagggcatttatcacggttttttttttcttttttgatgtgtgtgttcgcgcgctcgcgcgctcgcgtgtgtgtggtggtgaaacccaggagtgcgcgaagattttcagggtcaaggcacagccacaggggagggggcaagttgagactagtgggctggggcggtggccttgtaggtcctgggacagagtggccaggagcagatcgccagaaagctggtactgagcgcgttctgccctgc

SEQ ID NO: 229356 - DNA, 619 bp, Homo sapiens
  chr3:27771454-27772073
  hyper
tttccttttctcctactcctcgctggggtttgcggtgcccctgcctcctgcatgaaagcgcgctctaaagctagggtttttggactttaggagcgcttctcgcctccccctagacgtttgaagccttccaattgagcaagggctgggaagcgagaaggctcctctggtctctccctcctctgagcgcgggacctcggcggacaccctaatcccgaaacactcctctctgggactgcgcacttgccagcacgacagccaactccgcctcagaggagtcttttagggctctgagcgagtggcgaatgctcccccggtgatgcactatcgctcccacccacgccctggtacgcgcagcccgggaaaaagaaaaaaaaaagtccacgtaggggctcaaacccaggcgtcaggcgctgcagtcagggaaggctcccttaggggctgggttcctggcgcttacgacgcagagaaggataagggcgatggtttcgcaatcccaccccctcctttgtcctcctccccacctcccagcctttggcggcttagatctccaaatgcagtctggatggcactcaggtattcgagcgccccagtttatcttatcaccgccccctacaaatac

SEQ ID NO: 229357 - DNA, 215 bp, Homo sapiens
  chr3:27772590-27772805
  hyper
tagttccttggagacgtcggagtttttgctagcttgacatcccgggctcacaactggcgggaaatagcttaaaaattatattgatgctttgaggcctttccttgcagctgcttgcgcccacaagctgcagtcctttccccggtcagcagccggctgtcccgcaccccccggcagagcgcagagggtcgaaagatttgcgccgcagaagacgcagc

SEQ ID NO: 229358 - DNA, 349 bp, Homo sapiens
  chr3:28282839-28283188
  hyper
gggggacggggctcggactttggcccagtcaccgagtgaggcacagtcccaaagtcctgcaggtccgcctccagtcacggccgacccgggtctgcaactggtgcacaagcctcctgaagcgaggctgcgcgcgtcctgcacggtcccgccccaaaggcacgcagacacgccccctttcctggtcattccccctgcgaagtcagttccactctagttacaggattggggcggggccagaaaggcgcaggcgcaacgggcggcggaagtaggagcctgggaaggaagagggaacgggtcctggcggtgctttgcaaagggcccgtgtttctgttgcgggaagctcccgggg

SEQ ID NO: 229359 - DNA, 1732 bp, Homo sapiens
  chr3:28616516-28618248
  hyper
agaatttccaaggctaccctcgccatctctatttaaatttatagacgcaacgcactgcctgccctggggtcaccaccgaagcctcctggtggagccctgccctgctgaggacgctcttccagcacagaactcaccaccaaaaagagacggcgcccagctggcgcccgccccgggcacattgcagtaaatgcctggcagcgacttctcgcttctccttcctcctaccccatcgaccctctgttgccgacctttacgccaaactccggcgcgccgcgagactcgcgtcctcgctgtccccgaggggccccaccccttcccggttctaacctgcgacctggccagaggcaagggtaggtcgacttcctgcccggaatttgccgttggcttctccttctctactccagttctttagtgcagggctgtgcggcgcggagccgccagcggcagaacagaccccggagcggagctctgggatacacacacgcgcagcccggagggactgaccccggaggcgcgctcggccgggagagggaggggaccagggccagcgcggaggcgggggtcacctggggttgggggtgggcgcaccagccctccgcacgctcctctctttctagtcctcgccgccaccacctcgcacaggtcggagatccctcctttccttggctcctttgcgttggggagggggtaaggctgagggtcggcgcttggtcagcgggcggggaaggtagatttcacttgcacctgagagtccctattcttgccagcttcgccgggcaaagcccggcgaccaggttggttcttccagcaactttgttcagaaggttggtagggaggagaaacgccaaggggccccaagagacgctggaaagcggctaggagcgtgggccgggctggagagcaagtacccaagcggccctgaggctgggagcgcggctgggaggcgccgccgccgccgccgccgccgccgccgggatgcgctctgcttagcgggactgccgggggcgcctgaaggccagcgctccaaggacacgcggccacccgctcctcgcgcaccccggcccagacgccgccagggccggagccaagcaggcgagcggagctgcggggagcgggggcgaagggtggcagaagggagggcgcgcgggaggcggcccctcctcggcgagccatgcgtgccacgggcagctgagtagctgccgggcgccgctgccaagtctccactccgcttttgtcttgccctccagtgaatgggaagatggagatggatgttgagggagtttctccgcgcccggagcccatcccccgctcccagggggctggcggagcctgccaggcgccgccacagccgccccagccccagccgccgcctcagcagctggctcaggatgaactgcccggcgagagtgcaggcgctgaggacagcgacgatcccgagacgagacccaacggcgagaaaggagagagcaaggtaggtccacagtgttggcgctgtgataccttttgaacaaaaccaaggagttgctgtcgtggctgtcactttaacccctccgctccccaacccccttccctggtttgtgtgggggtgggggtggcagatgtgaagaaggcttaagatttaagggaatccatgggcgatagtgactttccgaactggagggtatgtgcagaagtctgtcctggtttcagtgttcagcggtgtgtgcagagaaaagtcgtctggtacatgcgg

SEQ ID NO: 229360 - DNA, 161 bp, Homo sapiens
  chr3:29322328-29322489
  hyper
ccagcggcagcagcgttgctgcaaaaatcgcttgctattcgagatagccagcagagggaatcggaactttgcttgcagcaggggttgaagcagcctttttttttttttttcttggaggaaatactgcagccttctggactgcgtacgctgctccctggaga

SEQ ID NO: 229361 - DNA, 354 bp, Homo sapiens
  chr3:30647759-30648113
  hyper
agctgaggggaggcggcagatgttctgatctactagggaaaacgtggacgttttctgttgttactttgtgaactgtgtgcacttagtcattcttgagtaaatacttggagcgaggaactcctgagtggtgtgggagggcggtgaggggcagctgaaagtcggccaaagctctcggaggggctggtctaggaaacatgattggcagctacgagagagctaggggctggacgtcgaggagagggagaaggctctcgggcggagagaggtcctgcccagctgttggcgaggagtttcctgtttcccccgcagcgctgagttgaagttgagtgagtcactcgcgcgcacggagcgacg

SEQ ID NO: 229362 - DNA, 276 bp, Homo sapiens
  chr3:31574048-31574324
  hyper
cttgagctccgcccggactccagggggctcctccccctgctcctttcggctgggcgggcggcgggctagagagggaatgtcattgcttctcagagccgtggtgccgcctccgtctgctgcttctttcctggcgccctcgtcccgtcggctttcgccgccgccgccgcagctgcactggggatacggatggctagtggggcgccggggccatctgggttgagagagcggcgattgcggccgctgctgaggcggagactccccgccgccgcttcctcc

SEQ ID NO: 229363 - DNA, 42 bp, Homo sapiens
  chr3:32023042-32023084
  hyper
tgcagggtgggcacgccctaaatccacgccaagtcacccacg

SEQ ID NO: 229364 - DNA, 160 bp, Homo sapiens; identical to SEQ ID NO: 198865
  chr3:32148437-32148597
  hyper

SEQ ID NO: 229365 - DNA, 115 bp, Homo sapiens
  chr3:32433253-32433368
  hyper
ggcggctccgcgtctccagcagcggggcagggacccgggcgccccgccctcgccagcgcccgcccccgcccgcccccggcccgccctctgtatctggcccctgggcagctgcccg

SEQ ID NO: 229366 - DNA, 687 bp, Homo sapiens
  chr3:32442878-32443565
  hyper
caggctgcaggcagccagggcgtaagtgggtagaggaggggttcggggtcggtgtgagccccataggttttctggcactgcaggggccctagagaccccggccccgcaagcacgccaggaccctggaatcctaggggattccctgtgtgggccggtgtatttatttaaattcccgttgcagcgaaggccgcccttctgtcttcctgccagccctggcgcttcctgtgcagcgccactggacagccatctgtttcctcccctctgccatctgcctcgcgccgggcccagcgtgcggccctggaagcctggctcggccgccgcccgcgcacgctggccttctttgttactactttggctcagtggtttcctgggctcgctgctcattccctggcagggctcgcggcgtccgcggcgactcctgggatcggcaggggcctggcttccagcccagcgccggcagcagcccgggggctgcggagcggaaagggggctgggacgcggtcactgctccagccacccggcgctcctgggcggaaatcgcgagcagagcccttctcagcctcctgcagaaaacgcgcctcacctgacttgtgtttaaatcagcaagggcagtgacgcggctcttccttttcctggggcagtcactctcctccctctgctgagcccgctctctttagtttactttaa

SEQ ID NO: 229367 - DNA, 192 bp, Homo sapiens
  chr3:32612447-32612639
  hyper
gtggctgcctggccggcgctgaggggctgagcgtacgcgggcggcggggtgggccgctatgctgcaactgaagcccagtgatctgacagtatggaagtgctttccttccgctcatccgcggccctgggctgcggcaggggggttgggtgtgtcaggtgaaaagtgctccctcccacccttcagacaggtccc

SEQ ID NO: 229368 - DNA, 293 bp, Homo sapiens
  chr3:32726508-32726801
  hyper
aaggacagacgcgcgtacgtcccaccgcgtcagccctgtgaacatccagaggttccagccagagtacgtccggccggaggcggggcgcggaggggacgtcggcgtggggcggggccagtagcagttcccacgccggcgctccaggcgcggcaggctgccgcccccggaagtagtgggtaccgggacgccgtgaggcggaagctgtgtatggcgggaggctgtggcggtcccttggtggggaagctgttgctgttgctagacgacgggaactagctctcgtcacttcctcagcc

SEQ ID NO: 229369 - DNA, 2692 bp, Homo sapiens
  chr3:32857719-32860411
  hyper
agttctttaaaaaacgtaaaaagaaaaaaagaaaaggtgggtaaaaaccgagatctcccgggcagtggatatgtctcggttgagccagggattcagaatgaaatcttttcttttcttttttaaataaacggaagagtcgttctctgctcctcgctcagaaggtttcaaaggtcgtcacactgaagcccgggggcgttcatctccccagcggccgggagaagggaggaggttggagggcggagggagggagcacacaaaagcgggccgtgctgagagggctaatgtttcctgtttgcctggagccccctcccctgcctcccctcccccagccccctcccagcactcgggcggaagtgagtttgctcctttggagattaaaaggattccgaattccgatcagtcccaataaccggcgtactgaagagaagaggaggaggaggaggaggcagaggcggcaaagcagagaaagagggggcgcgcgcgcgcgcacgcaacccgaactgggggagttgtgcaaagccccaggaggccggggcacggcgggagcaaagctcggtaggcgcagcgcggccgaggccacccgcgtccggatcggcgactcctttcagaaagaagatgacgcgggcgcgagccggcggcgttggccacgcggctcccgagctcgccgcgcggggctgttgccggttccactgattccagcgcgcccgagaggagcctccatccccgaggctcgggatcggaggggggaccaaggcgagggcgaaatggcccgatgacaaaggaaatgtgatcccccttctctgccaaggtttcagagaggacggacgtgaggaggaggaggggcgcagggcgcgcgcggagctcggatagcattgcacgacggcccgcgcggagcgggtacatctaatatcttcctgccgatgaataattcagggcggcccgcggggacctgcggccccgcgcgctaagccgaaggggaaggagcgtgcgtgaggcgcccaggccaggcgaggcgggggcacgagggctccgggccgcgtggggcgcgcgtgcgtgttaagcgcgggcagccgcggcccggctgggcaggcgcgcggaagactcgaggcgcgtgggacgcgcgtgcgtactgcacgcgtgcggccgcggctgggccaccacgagctgcagctgctgcggggcccaccgccctgcaggggaggccgtgcctggctgtgcgcaagccccaagcgcagcacgccgggccacccaggagcccctggccgccgcgtcatgcggcggggcagccgacgtcgcgcggggagacaccggcttggcgacgcaccgctcccgcctttactagtttggggctccttcccctcccaagaacagactaaatccgtttaaagaaaagcaacgcaccaaatactcgtggaaccaaattctgctctcgccgggactgggactgcacagcgaactctccttttgggaactcctttcgtctatcgcgaagggaagcctcagctgctccagggagtcttccgacctccctgcccccgctcgcccctcgcctgtcggggcttgttccggcgttccctcttcggaaggcacgcggcccccaagttatccggaggaatctgtgtcgccgctggatagtggcatttaatgcctgcagtgtcgggggtggcagcgctcgggccggacgtggcgaggccaagcgggcagcgctgctctggtgccggctcccggattgcaggcctaatcgatgcatttttctgagtgagtcggtgactcccccacccacctcgtccgctctctcctcctcctcctcctcttcctctctggtctcctccctcctccgggctgggttgcaaatggcttcgttccccgagaccgatttccagatctgcttgctgtgcaaggagatgtgcggctcgccggcgccgctctcctccaactcgtccgcgtcgtcgtcctcctcgcagacgtccacgtcgtcggggggcggcggcgggggccctggggcggcggcgcgccgcctacacgtcctgccctgcctgcacgccttctgccgcccctgcctcgaggcgcaccggctgccggcggcgggcggcggcgcggcgggagagccgctcaagctgcgctgccccgtgtgcgaccagaaagtagtgctagccgaggcggcgggtatggacgcgctgccttcgtccgccttcctgcttagcaacctgctcgacgcggtggtggccactgccgacgagccgccgcccaagaacgggcgcgccggcgctccggcgggagcgggcggccacagcaaccaccggcaccacgctcaccacgcgcacccgcgcgcgtccgcctccgcgccgccactcccgcaggcgccgcagccgcccgcgccttcccgctcggcacccggcggccctgccgcttccccgtcggcgctgctgctccgccgtcctcacggctgcagctcgtgcgatgagggcaacgcagcttcttcgcgctgcctcgactgccaggagcacctgtgcgacaactgcgtccgagcgcaccagcgcgtgcgcctcaccaaggaccactacatcgagcgcggcccgccgggtcccggtgccgcagcagcggcgcagcagctcgggctcgggccgccctttcccggcccgcccttctccatcctctcagtgtttcccgagcgcctcggcttctgccagca

SEQ ID NO: 229370 - DNA, 124 bp, Homo sapiens; identical to SEQ ID NO: 198873
  chr3:33137820-33137944
  hyper

SEQ ID NO: 229371 - DNA, 150 bp, Homo sapiens
  chr3:33138858-33139008
  hyper
cagcttgataacgcgcctcggggattggacatgaatcatggtctccctgttccctggctgccttgagagagcagaagagggaaattgttaatcattaaacctaaacgccctagatggaatccgcgtctcatatacgggctctttgaataa

SEQ ID NO: 229372 - DNA, 242 bp, Homo sapiens; identical to SEQ ID NO: 198874
  chr3:33155230-33155472
  hyper

SEQ ID NO: 229373 - DNA, 38 bp, Homo sapiens
  chr3:33260157-33260195
  hyper
gccgcctcccgcacactcaccatccgcccgcaccgaaa

SEQ ID NO: 229374 - DNA, 68 bp, Homo sapiens
  chr3:33260735-33260803
  hyper
gcccctccggcagggccgttagacaacgagtgtctaactctgtcctcggcctctacttttcaactggc

SEQ ID NO: 229375 - DNA, 170 bp, Homo sapiens
  chr3:33318845-33319015
  hyper
ggcaccgcccctgcgggtcacgtgctcgccgaccaccaatggccgcctccgagcccaccttggggacggggcggggcgcctggctggcgtcaccaggacaacgggcgtcgccggcgccgtgtgacttcgggctgtgggctcgctcgcggctcttcggccatggtgagtct

SEQ ID NO: 229376 - DNA, 70 bp, Homo sapiens
  chr3:33759877-33759947
  hyper
gccccctgggaggcgggccgttctttgctagccgctgtcagggcaccctgccctcgccctgtgaaatgtg

SEQ ID NO: 229377 - DNA, 264 bp, Homo sapiens
  chr3:33839852-33840116
  hyper
ccggggggttgttcgagtggaggaatactcttacgtgaaagtgctcagtacaccactgcggcaggaaggaggaagggaagaattccagatggggagaaagtaatattttgcagcacagtacagggtaaactgggtccaggtgggcgtagccgccgcgacaccttcacgtgaccgcggacagcttaaggaccccgcatccagtgcgcctgcgctggagctcccggaagttgccggacccggaacgcaggcggagcgcaagtctgt

SEQ ID NO: 229378 - DNA, 1005 bp, Homo sapiens
  chr3:35680721-35681726
  hyper
ccgcgggcgcccggcgcacccagcaggtgccatcactctggatgggccagttctggatgctcccagtggcgcagaggcggcgacactggcaggcgtccggctgccgccacctcccgggtgtggcgggtctggggcccggggtctccggccagagcagctgtggagccacgtgcaacacgcgcgttgccctcagcccgggcggggaccggacgcatccggagctgcggggaggagccgggcgccgcccccggcggcagtgccagccgcgtgggagggcacggaccggcggaggggcagacgacggaggcggccaagctggaggaacgggaccgagggatcgaccgaggctggctggctaggggtgggactggcagagctacggacaggtgggagcagtcagacagcctgagagagggagaccagaacgcaaagagagcgagagcattaagtaggcagggagaggcacacagaaagatagacagcaacactcgcgtgctccctccctccacacgccctcctcttaccgagcgaagcggccaggggcacagagtgggagaggactgtgggcacagaagaccggaagagggacgctgcattgctggtgggacggagggattcggacggacggacagaccagcgcacagactggcagcctgcgagagtggcagctttgagagcagagcgcagcaaagcgagaatcccgcgccgagctgctagtcggacccacagacggtcggactgacagacgtgcagacggacagaagagcagacaggaggcgggggcgcgttcactcccggcggccagccggccagagaaggcggcggtggcaccttctgagcgcgtccggagcagagaccagcagcagcaggggcagcggggacacaagccgcgaccgagccgccgccgcagccctggctgccacagctgtgtgggatcccagccgacactgcagaaagctccttttactagcagttaaataaatcgaccaaaaacaaaacaaacaa

SEQ ID NO: 229379 - DNA, 785 bp, Homo sapiens
  chr3:36421689-36422474
  hyper
ccccacccagtgccggcgtgcgcccagccttcccccagccctttccagggcgctgccccctgcctgccctcactactccaggcgctggccgcgcagccccgccctggagctgcctccccgcctccttcctcctcctgcgggcgagcagaagcccgctcgcccgctgccgagtggcagtcacgactgtgaggtcgccggcgaggtggccgcgggcgcggcggggcggggcagggcgcactctcctccacgcccgcggaagtgccggggaggtgggcagggcggggagggagagggagcgaggctggaggagggcacgtcggcgcctcggcgaggatgggagtccccaggacccggagctgagcagcctggcgcgcggcgggcagggcgcgcaggacagaagcctcgctgttcctccgggagcccaacaccgttcccgcgcggccacgatgatccctccgagcagcccccgcgaggacggcgtggacgggctgcccaaggaggcggtgggcgccgagcaaccgccctctcctgcatccaccagcagccaggaatccaaggtaccgagcacgcttgcccccaagagaacacaaactcactctcctctcctgtcggtccagctttgtctctcctcctatctagcacgggcgtgggggtctgagacttgctagttagcccagggctgtaggacttgaacgtccggtaggacccgctgctcacgatgctggaccacgtccctgtggacccagccttcccgcccacacattcacacacgcaattcatggtgg

SEQ ID NO: 229380 - DNA, 88 bp, Homo sapiens
  chr3:36805377-36805465
  hyper
aggaagggcccccctgctggcgagggaaataaaatcagctccggagagcgttattcccctagaaagcaggtttcaggtggtgtacacc

SEQ ID NO: 229381 - DNA, 627 bp, Homo sapiens
  chr3:36805525-36806152
  hyper
cacacagtcctccgtacacccacgcggggtctggcactgctgctacatcccgcacggagcggggtccagagttagggcgaatgagtcctcccgcccccgccaaggtggcgcccagaacgggtcggtgccggagcgcacggtactcacccggggcaggccgcgccgggcaggctggggctggccgggccgggggcggcggcggctgcggggctggagtggcggcgggcatggcgcggcggcgggctcggggagagcctggagcagaggtggcagcgcggggacgcggctcgacggtcgagcaggcgcgggaaggcggggcgagacgagcagccacgagcccgcgccgactctccctcttctctccctcccgccgcccgccgcccgcctgccagccccgcgccgcgcagcgcccggcgacagccaccgggaacgtctccgggggcgcgggacttagcaaccgcgcaccagctgcagccgccctctctgcgccggtcccgccatgcgcgccgctcctggccctggaggccgggcggggccgggctttgaacttgctcccacaccccctgcttctccagtgagcgcccaaaggcggtcccgcctctccccggtcagcggagtccagccttt

SEQ ID NO: 229382 - DNA, 56 bp, Homo sapiens
  chr3:36985897-36985953
  hyper
cttgccccgggggcgcgctcgctggtcaggaacctgtcggcagcccccgggaaccc

SEQ ID NO: 229383 - DNA, 560 bp, Homo sapiens
  chr3:36986133-36986693
  hyper
gtgggccccacagggatggccgggcgggcccgttcggccgctacctcagggtcgccagtccccgcgcgcggccgcctcccgccaggaagggtggcgggcccggaaggccagagatgccccagtgcttcccgcgccgctacgcacctagctgcccgcgggtcccacatggctgcggccggagggtccgcaccaggaccgccgccgcctggggaagcgcttccctgtgggcagggcgcggcgggcagtgcggaagcccgaaagctaccggagcccggggcaggggcggcgcgatgcagaggcggcgttcgggggcccccagctgcctgcggctcggctacccagccgcgatcagagggggcgggggacgcaggaaccccggcgtccgggcggtgtgcagccgcagacctattccaagtttccacgtagttgcgagagcccaaaaactgtcacgtgcacgtcgctgctgagtgggaggaggtgtttgtcatcgcgttcaaaaggggcgtttcggtgtctcccgtcatgcaagcaaatggtatggctctcggccgcctttgaat

SEQ ID NO: 229384 - DNA, 232 bp, Homo sapiens
  chr3:37033965-37034197
  hyper
ctcagggcctacaccgcggataaagaccaggaggtagttctcataggccacaaaagcctggtcgtccaaggcaagagaataggctttaaagtccctggctcggttaaaaagctggttgcgtagattcctgtcaatgctcaggatcctctgccttgtgatatctggagataagtcaacgccttgcaggacgcttacatgctcgggcagtacctctctcagcaacacctccatg

SEQ ID NO: 229385 - DNA, 140 bp, Homo sapiens
  chr3:37034617-37034757
  hyper
gagaggaggagcctgagaagcgccaagcacctcctccgctctgcgccagatcacctcagcagaggcacacaagcccggttccggcatctctgctcctattggctggatatttcgtattccccgagctcctaaaaacgaac

SEQ ID NO: 229386 - DNA, 176 bp, Homo sapiens
  chr3:37035237-37035413
  hyper
cccgggcagaggcatgtacagcgcatgcccacaacggcggaggccgccgggttccctgacgtgccagtcaggccttctccttttccgcagaccgtgtgtttctttaccgctctcccccgagaccttttaagggttgtttggagtgtaagtggaggaatatacgtagtgttgtctta

SEQ ID NO: 229387 - DNA, 177 bp, Homo sapiens
  chr3:37284437-37284614
  hyper
cctgtgttctttgcggtgggcccgtcggccctgctgccatcgatagaagcagcactctccccgtctgatttcgcagggccaaagcccaggtgagagtcagggtagtgttcagactagcccacgctccggttctgagccgcgacggcggtctccgcacgcaacgaaatcaggcaggac

SEQ ID NO: 229388 - DNA, 933 bp, Homo sapiens
  chr3:37493091-37494024
  hyper
cggagaccacacttcgggaatcactggtgtacgagaccaagtgactagaatatggaggggtgctctgctcgcttccacgtggctactattgttatgaacaacaacagccggcgtttactgagcactgctcctacagcttatctcacaactgggtgaaggagcagaggatgcgcagggctagaacctggagtctaaactcgtccttcacccgggttgctctggatcttactggttgtgagacagggagggaaagagagacaaaggcagggagacaggcccagcagggccggcagagcctgtagtgacggaggggagcagccttatctccgggaacccgagcgccccgtgcgcggcggggagggggcagttcggggcgccccggcgggtcccaggggctgactcccgcccgggaagtgcgcgcagggctcacggcccgcagggggcgctgccgcgccgtccagccgccgccgcccgggccgcccacctcgcgggcgcgcccctccgcagaccagcgccgcccggcccgggacccgctcgcgcagacttctcgggcggactgaggacgccgccgctcggggccgcccctgtgctcgccttcagcgcccgctcagcccgccgtccgcgccccggtggcgggcccgacgcccgcattccgcccgtgtccaggcgcagagctcccgccccggggagcttcctggccgtcggcgggccccgcggcccgcgcgctcggcgccctgctcgccgggcagaggggaaggcggcggccggctggggatgggcggcccggctgcgccgaggggcgccgggaggctccgcgcgctgctgctggcgctggtggtcgcggggatccccgcgggcgcctacaacctcgacccgcagcgccccgtgcacttccagggccccgctgactcgttcttcggctacgcagttctg

SEQ ID NO: 229389 - DNA, 101 bp, Homo sapiens
  chr3:37494324-37494425
  hyper
ctagagttgtctcctccgccgcccagctagactcggcttcactctctgaatcgaaaagtaacttggctcctctgcctccgggcggccgccgctggcccagc

SEQ ID NO: 229390 - DNA, 898 bp, Homo sapiens
  chr3:37901940-37902838
  hyper
caaggcctgaagtgcgcgcgcaacctagcaggcggaggcaagcagctcttcgcctcaggccgcccactgaaccctgcccaccgacgtcgcgccctgtaggccctcccaggccctcctgattcgtggagagcgcgcgcgagcgctcctgccccacccccgagcccgccctcctgcggcactaccccgcccccccggcttacggggctgcagagtgtggcctgcaagttggaagcgcaggacgcgggcgtccaaaggccccgacgctcccaggctgaggaggcactttgtcgtctctcccacgctctggccgtcgtcctaggcctgacagtggccagctgccttgcacaagcacagtccctgccagacttggtctgccaccagcgccttccgctcttctgccctcgacggactcccccggtccccttgctgcacagcacccgaaaatgcccactgcccaggcccctctcagtcacgacaccctcacgtgcaggaggttggtccttcaggacccgccgcccctcacgcgggctctggggccgaatgctgacgcgagtcccgccagcatccgaacaacctgagcctctggcccggtccgcagactccctctctgcacagatcactcccgatcccgctcactcctgggacccctcaagctggggagcgcagccctgggcctctccgaaccttccccacgctccccggtctccatcacagcagcgccgcgcccgggcccctctgcgggccgtctgggtgtcactaccgctcctgggcagcccccacttctgcacaccgcttccctccgcactcacgtcccaggcccctcggttccctcgcctggacgcccctcgcccagcaccttcccgagacaccctcacagcacctccgccagcacttcccg

SEQ ID NO: 229391 - DNA, 643 bp, Homo sapiens
  chr3:37903409-37904052
  hyper
cgggcctcccgctccgcctccccgtgcgcggctctcccgggcgcggctccggggttcatggtgacgaggcggcggccgctcgagcccagcggcggcggcggcgggagctggggcgcgggcccgggccgcctctcccagagcgcggggccgggcggcgggcgcgcccaggcagcggctgcgagcgcccccccgcgccgcgcccccgcgccccccgcgccgcgcccccgcgcgcttggcttgcggggggccgggcctgcgggcggccgccgcgccgcgcacccatggacggcccggccatcatcacccaggtgaccaaccccaaggaggacgagggccggttgccgggcgcgggcgagaaaggtgaggaggggcgcaggcggccgcgggctgggggcgagcgcacaccccgcgccgctggagttcactgccgggcgccggcatgggcctgggggaggggtgcacagggcccggagggtgcgtgggtgtggggtgcgcccggaggagagcgaggctgccagagtgcgtgtgccgactgagccagtgtgagtgtgcaggggctggcggagagactgggagcgagtgtgtgtgcatctaaccgggaggttgtgagtttgtgtgcgcgcacgcccgcagagaagttgtg

SEQ ID NO: 229392 - DNA, 371 bp, Homo sapiens
  chr3:38035703-38036074
  hyper
cacctccgtcttccccgcaacacatatacacaaacacccggaccctaggtcccccagagcccgaaggccacgcagggggcgtccagcgacctgcactactgggtcgggaagcaggcgggtgcggaagcgcagggcgctgcggaggccttccagcagcgcctacaggacgagctggggggccagaccgtgctgcaccgcgaggcgcagggccacgagtccgactgcttctgcagctacttccgcccgggaatcatgtgagtgcgggggcgaccggggcaggagggagccgtggaggcggtgccttggctggggcagtcttgggatggccatcgtccacatccctgaatggggcaagccgggaggggttgggt

SEQ ID NO: 229393 - DNA, 714 bp, Homo sapiens
  chr3:38070615-38071329
  hyper
aggagaattttggtcgttcttggatgctgtttccttccttcgccgcccctccgtgcgagcgggatcgtggagcccagactttcatgaccaggacaagggggtccgcgaggcggagggaagtctttagacccgtaccgcccgcccacccaccccccgggctagatctcggacaagcctggaaacgcccagggtcgtgcccggcagtcccacccagggagccgcgggctgagattttcccagtccggagaaggggcagagaggcgggcccggggtggtgtggaggcggccgaaggagctgggggctccctgtccagggcccggaacagctttccaggggtccacccctgcagggtctcccgctcgcgcgggccaggcactcaccgtgcagggtcaggaagtcccggcccgagtccatgcccgacgggcggcgcggcgggaggggcaccgcgggactcacttgagtagcgacagcaccggcggcctggggtccgagcggagtgcggtgcagggacctgaatggaccgcggtgggaggaggccgggggtggtcccgggacaccgccccgcccccgctgccctgcgcccccgccccctgagcccgccaaccctcgtctctccccgcccccttctggggacgcgagagggagggcagagctgggggcccggaggactggccaaccctggcccgggccagcgggcgcgccccgaccagaaa

SEQ ID NO: 229394 - DNA, 153 bp, Homo sapiens
  chr3:38178729-38178882
  hyper
acccgcccctccccgccaccgcctaccaagccctctataggagggcccacaggcaccgcccagccgagctttccactcaatgccccgcctaccttggcctaccgcagccaaccagaaggtgtatctttacgaatccccgcccagaaatgcaga

SEQ ID NO: 229395 - DNA, 330 bp, Homo sapiens
  chr3:38179801-38180131
  hyper
cctcagattcctccgtggaagaactgtggctccaccagatcccaaaaagcaaggcccgtttcctacaacccccgaaggagggtcgtcctcactccgccgccaacctactagcaccatcaccagaccctcgagggcggtgccgtggacctctccagatctcaaaaggcagattcctacttcttacgccccccacatcacccgcctcgagacctcaagggtagaggtgggcacccccgcctccgcacttttgctcggggctccagattgtagggcagggcggcgcttctcggaaagcgaaagccggcggggcggggcgggtgccgcaggaga

SEQ ID NO: 229396 - DNA, 45 bp, Homo sapiens
  chr3:38206259-38206304
  hyper
tcagatctaaagctgcgaatggacagaacccgcccagtgcagggt

SEQ ID NO: 229397 - DNA, 200 bp, Homo sapiens
  chr3:38206925-38207125
  hyper
acactggagatggcggccggaggcgggcccgaggtggggcgtgaccagcgcagtgacgtcagcgcgctgcgtgtcggcaggtggaggaagaggggaaagtttggcccgtgcgtggggctggggtggagggcgggacagaggggctgggcccaggcaaagcttctgtcgctgctgctgcggaggccgaggacaggacgtgg

SEQ ID NO: 229398 - DNA, 316 bp, Homo sapiens
  chr3:38496126-38496442
  hyper
ctcagggtcggagttcgggctacgcgggcgcgtggaacccagggaaagagtgaggaaaacctgagcgtggggaaggcggccaagaggggtgggcagatctcattgggggtggcaggattgtaggtgcagcagcagcagcagcatgcggggagggttgcatgtccctcagagtcactaagtgtagcgaagcgaagggggcggcttcacgcagcccaaagtcccctgcatctcttgccaccagtctgcgtcgcgttaccggcccggcgggctgttggtgctggctcccacctgctccctctttccctgccgttggccc

SEQ ID NO: 229399 - DNA, 81 bp, Homo sapiens
  chr3:38496682-38496763
  hyper
cctggaaagcttgtttctcctacggtccaagcaccgatttccctctctcagtggtgccggggtgcgcctaaccccggcggg

SEQ ID NO: 229400 - DNA, 132 bp, Homo sapiens
  chr3:38497123-38497255
  hyper
cgcgcgcgcagcctgagtccggaaaccgaagggcaaagaccagctggcacctgagtaccgtatggaagagggcgttgcagctctcctggagccgcttcttggaggcgaagtggtggtcgtgttggactttct

SEQ ID NO: 229401 - DNA, 156 bp, Homo sapiens
  chr3:38537735-38537891
  hyper
tgtcaccagggggcgtgcgaggccctcagcttggcgggcggtgaggcgtggggtgacggggggatggcgggggccggcatgcgcgcgcatgcgccgtggtaaaaggccggtacctcgggcaagatggctatcaagagtatcgcttcccgcctccgg

SEQ ID NO: 229402 - DNA, 710 bp, Homo sapiens
  chr3:38690811-38691521
  hyper
ggataccctccagccgggcggatctgcgccccttctccccctccggctctctggggcactgatcggggagggagcggctgggcggacccggggcagggaggagcacgcagggactggaggcttcggccctcggggaggaaagttgggcggcggcaggcggagggggctccggccgggccagggctgccgggcgcgggggcactcgctcacctgctggtcccccggccgggccccggggtgggcggctgctgcttggcgcggactcggctcggcgcggggctcggggcactgggcgcaggctcagcggccccgggggagcgatccctgcatcctacgggcgccgccgccgtctcggctccgcggctctgttcgggctcccgggctgggcaggcggcgcgggctcgggctgggggcggggtcgggggcggggtcggggcgggccccgcctgggttcggcctggggcttggggccccgggctggctccgccccagagcgacgcgcccagggctccgcacgtggtgctccgcccgctcggaggggggacacaccagcgcccgccggggcgcacactcccacactgacccgggggctcacagccacagacagccgcacacgcggccgcggacagacagacataggcgggggtacacacacggcgacccggcgacgcttcaccacagatggccacccacgcggacgcggacaggct

SEQ ID NO: 229403 - DNA, 211 bp, Homo sapiens
  chr3:39093354-39093565
  hyper
atcacatggctaccggccacacagcaactaacagcaccgaggaaacacaacagcctgtttaccttcagccccgccactaacccttggccaaagggaaaggggcaggacatcctcccgctctgagccacctccggaagtgacgtcggagtgtcaacatgcaagatggcggcccatcaccggcagaacacagcagggcggaggaaagtgcagg

SEQ ID NO: 229404 - DNA, 251 bp, Homo sapiens
  chr3:39149006-39149257
  hyper
tgctcagcgctgacgcccaggcccatggcagcggctccgctcggcacccaggtccagtcccgctgcgcctacccggaccgacccgacgccagtagcaccgactcgctctctcggcgctcgattcctgcgccttgtgacgtgaggcgttttgttcctcccactccagacactggacgctcctagcaaccggctagcagctcggtttccaaggactgtaacgccttcaaccgcccgccgcgatagagtgccca

SEQ ID NO: 229405 - DNA, 75 bp, Homo sapiens
  chr3:39250104-39250179
  hyper
agaacaaagaccgacgacaactttaggccctcatcagcctgaaggtggcaccagaggagtcgacacagcagactt

SEQ ID NO: 229406 - DNA, 227 bp, Homo sapiens
  chr3:39448005-39448232
  hyper
ccaaagtcacaagcgccccagatccgaccaggatgccgctaccggctacagcccagaggcccgctcctgcggcgcaagcccgccttcctgaagaaaaagcccagtcccggcagcgttcttctccggctccgcccttcttccgctcgactttctttgccattggctgacaacggagtacataaggacgtcatttcctgccgcctgtcttttccgtgctacctgcagag

SEQ ID NO: 229407 - DNA, 1642 bp, Homo sapiens
  chr3:39850394-39852036
  hyper
cgggctcactaacccggcggttccgcagctgtgtttgggagacttgggggcgcattagcctggacagctccctgatcggtaacccctttgatgtgtgttgaatgaatgagcgtcgttagcgtagtagtaaatttatgggagaattaaagcaatccagataggggtcactacggagactttaattacccagggactgtgaagtggggaagagctgtctgtggaggagcgccacaccatgtcttagattcaggcaggccccggattctggtgacccattactctacggtcactgagggtccgggcccccaggactcagaggcaggagacaggaaaagcctgacttagaatcggggaaggacctggagtcgcacatgggggctcccgaaccgcggccccaatactgcactgcgccgcagggaagagccccgggaggggcgcgggtccccgccccgggcgcgcgcagccctgccccgcctcctcccggtgcgccccgcccctcccggcgcgtgccgcccgcgcgcccgaggtgctctggaggaaccggcccggcgggcaccccctgccccggcgcaggcgcgatcgcgggccgcccctcccgccgggcgccctgcacgcgcccccgccccgcctccgcaggctcccccgctccgggcgcctctgattggctctcggccgggccagcaggtgtcggcggtggctgcggccaggctggccctggctgcctgcggcgcgggcgcctccctcgcagccgctgctgccgacgccgctgcgctcccgcctcctgtcggttcccgggttcccgctgcggctgcggttctggcagccgagcccccgcggtgctgcagcccagctttagcgcgcagaccgacccgcgccccttcttcgccgccggcagcctctaatccacgcggcgcgttgcggcaggtgccctgggcgtactgaggcgcggtggcctgagcccggccgccatcgatgaccccggtcgcggacttgcttcaggctggccaccccccgtgagtaccgtccgcctccctcttctcccctctggcagctttgcgccactctcccctcaacgttgccgcaacttcgggggtgggtgtgtgaaggtgtggaggtgtctctcacgctcccccgcaccctgtgcgcgtccggagccaggaaccctaggcgcggccagtcagcctctgcggaggggcgaggggcgcgggtacttgaacttgctcagggatcatcgcggagccagaatcgcctctttctctcgctgctggggtgggagctcgcctctgcgtttccctcgcgttttccgatcccggatggccacgtagtgcttgggctgcggttcaccgcgtacctactgtgctgcgggcgcaccggcgggacgcctcaaaccatccgttaagcgccccgcaagcagcccagcgcgacggacctgactcaaactcttaattctgtaaaacgggggtaatcagggactctctcaaggtcacagctggtgctcagagttagaacacaggtggattgcgtctggccctcgcccgcgggctgcctggggaggggagagctgttggcggggcggtcacttcagcttcatcccgggttcctcctcatactccctttccgccacagccgccagacttgaaga

SEQ ID NO: 229408 - DNA, 116 bp, Homo sapiens; identical to SEQ ID NO: 198892
  chr3:40350787-40350903
  hyper

SEQ ID NO: 229409 - DNA, 34 bp, Homo sapiens
  chr3:40428624-40428658
  hyper
gccgccccgcccccgccccgctatacccggcgcc

SEQ ID NO: 229410 - DNA, 168 bp, Homo sapiens
  chr3:40494719-40494887
  hyper
tgggtgtagcagacggggcgtggctcttcaggtagaggccgaaggggctgagagcggtcccaggcggccatcttgattcctggcatcactctcaacgtgccctccctctccgtgattggacgagcagggcgggccttccggaggcacacagccgaccaaccagagatc

SEQ ID NO: 229411 - DNA, 396 bp, Homo sapiens
  chr3:40498461-40498857
  hyper
agaacgtgaggagcgaacagacctagccatgaataaccaacaaataaaactcgaggaaataaaaaggaactcaaatggcatgcgaccaacggaagacatagcttctgtactcttaaccctaaattactaagcgatgaccctcctgcagctttctaatccaaatcaccaaaaacaatctcgccgcccaactttgccaaaaagcaacttaacgccagccgactccgccatgttttcccagtgagcttgcgagcgcgtgcgtacgcacgcacgcacgcacgcaccaaccaatcggtgctcacgtcggtgactcgttaccgcaggggcggtgcgttcttctacacatgcgcagggttgggcgggtcttcttccttctcgcctaacgccgccaacatggtg

SEQ ID NO: 229412 - DNA, 227 bp, Homo sapiens
  chr3:40547354-40547581
  hyper
taccaggtgtgggcgctgcaggacccctgcctggggccgcccgctcgggcccgtgttgtctcaggcagtagggacactggcgctgacggcgggggtaggaaaccacagagactggcaacttcccaggttcctagagaggaggggcatggaaaacgcacttccggcggagggtctcaagctttccccggtgtcggcggcaggtggaatttccacgctttatctgcgcc

SEQ ID NO: 229413 - DNA, 178 bp, Homo sapiens
  chr3:40566234-40566412
  hyper
ctccagccagaggcgatgccgacggctgccggagaaagccgggcttagagcgccacagttccacgcccgccgccggcctctcagcccagccggtcgccgcaacctcgcctcttccgcagggcggggccagccatgaaaggcggggcgggtctggccacggggcgaccgagatggcggc

SEQ ID NO: 229414 - DNA, 91 bp, Homo sapiens; identical to SEQ ID NO: 198893
  chr3:41240629-41240720
  hyper

SEQ ID NO: 229415 - DNA, 54 bp, Homo sapiens
  chr3:41240948-41241002
  hyper
agcggcttctgcgcgacttataagagctccttgtgcggcgccattttaagcctc

SEQ ID NO: 229416 - DNA, 46 bp, Homo sapiens
  chr3:42003539-42003585
  hyper
acttggctgctcccgcggttgcgcgcatctcggcctctgcctcagg

SEQ ID NO: 229417 - DNA, 161 bp, Homo sapiens; identical to SEQ ID NO: 198894
  chr3:42056668-42056829
  hyper

SEQ ID NO: 229418 - DNA, 502 bp, Homo sapiens
  chr3:42304893-42305395
  hyper
aggcagcattcttacctttccgggcctgctggatgtatcttgccagcagggcgcccaggtgcgctcgggactcgccatccgttctctgcgataccctcagctgcctacggggcgcctcctctgcccgctgcagcccggagcccgcgggatctgcgggaggcaccggctgcgtcagggcgccagccgccagtaccgccatcagcacgcacaggcacacgccgctgttcatggctgtagcgagcaaaggaggagggcgcgttaactgaaaggctgggcaacagagctcctgcggcgggccgggcacccagaagcgggcttaggacaaacacaggtgctccagacccgccaggccgccgcaagcacgagggctcgccaagcgctgaccccagccgagtgccatggcgcgcgcccccgggcgcacctggctggtctttgggaactcctcacccagcgccaaggggcagagaccctgttttctgccgtgttgagcagaaggaatgtt

SEQ ID NO: 229419 - DNA, 854 bp, Homo sapiens
  chr3:42542855-42543709
  hyper
ctccttcaggtagccgcacattctgctcagggctctgggacccgctgccctctccgcctctccactgaactccgcctctccttctgtcacacggctccgccagccactctatcctgccgccgcgaccacatctccagcctcgattgtgcaggctcgagcccgtagaaagagggctagcagccacctgcgcttggtccacaagaagacgcgctcccagggcgcagagctggtgaccccgctccccatgccagggacgaataaacgagaaaaggggctgacccggtgtcacccagcggccgagcagccgccccttggaagctcagcaccaaaggcaggcggccagggtcctggcccctctctggaccccagtatccccagctgtaaaatagggaatgcaggaggaggacgacgtctgtggatcgttttaggtcagctgcggagtcggcctgcgggctgggagcagacctcgctccccacgcgagggcgctggcacttcagcccagcctccctggggaggtgccctggacgagacccgcgagggtgcggacacctcatcctccctggagcaggtctcccgaggcttgaagggccagggcacccaacaggtgctgagcgcgccccaccaggtcacccgggagcagggaacaccaaggaacccagagtcgggcctctttcgagccctcgcttcctctcgcctggcttcttcggcgcgaaggatgaattggggttgttgaaaattgatcaaacaacccgatctctgtcagcgcctggacacttgctgggccccagctcgcagcctgggaagataagtggcacttcctgtctcgtaatcggatttgcgcgcacgaaccctc

SEQ ID NO: 229420 - DNA, 643 bp, Homo sapiens
  chr3:42623201-42623844
  hyper
ccatggtcaaggccgggactgagggccgggtgggccctgggccgcctccacctctgggcccgccctgcgccacaccctaacccgcctgctcttggctaacgggccgcggcacccgcctccgcccgccagccctcacctcgcccggacggcggccttcggaagtcggcgcctgccagctacccgccgcctcctcagcaatcttagccgaccgggagggctcggcccaggtcaccggcagcccaggcgcaggtaggccgtggtgcgcgtgcgcgagtcttgagccaccccacctcccccctaccccgcattcgctgctgctaagcgacacccgcacccaaaccgaccaatcccggcgcgcctccacagcccccgtcccggcgaaggcgcgaacgtagtggttcttaaagggctgcgacccaaacggagagggagtgtgacgggggcgcgcgcctcccaactttcttcccacctcccggctctcaccgcggcggtttgagatccaagcctgtaattctcacgtccggaggtgagaaggagccttcgtgatctaagctcgattcctgccggggtagcaaccggactgacgtctggaggcggggaggctccgcgtgacagagtgataacgcccggggcgtatgttctg

SEQ ID NO: 229421 - DNA, 45 bp, Homo sapiens; identical to SEQ ID NO: 198896
  chr3:42641736-42641781
  hyper

SEQ ID NO: 229422 - DNA, 142 bp, Homo sapiens
  chr3:42642019-42642161
  hyper
agctccccagacacgcccccgtgcgtacgcccccgtgcgtacgcccccgctgccgccaccttcggttgaccacccccatctagactgtactctcgcggtatttgtcccgactctcgcggggtttagcgtggcattgggaggc

SEQ ID NO: 229423 - DNA, 53 bp, Homo sapiens
  chr3:42814258-42814311
  hyper
gggaactgggagatgcggaagtgcacgccgtcgggtcgcatctttcagtgcgg

SEQ ID NO: 229424 - DNA, 105 bp, Homo sapiens
  chr3:42814911-42815016
  hyper
ctggagtatatttttaaaaaagttttgtggaccaaacgttctgcacagagatgcccattccgctctcctgttggggagttaaaaagcgaacgatctcaccatgaa

SEQ ID NO: 229425 - DNA, 33 bp, Homo sapiens; identical to SEQ ID NO: 198898
  chr3:42845262-42845295
  hyper

SEQ ID NO: 229426 - DNA, 302 bp, Homo sapiens
  chr3:42845897-42846199
  hyper
gctcgcagtcccccggcttgtttcgcttacctagagcgagaaaacctctcacaccccaaccggcttccgatccctgcaggcgcacccagtcctcccggcttctccccacccacagccgtcccagccaatcagaggccagcggccgcaaaaggacgcgtgcgtgtgcgcggcgggtggggcagtgcagagcgggtcctggattggctgggccggtgagtgctggcccactaccccggctctagcgtactggcggagacagacgtgagagctcggcgcctggggttcgcgcccgggcacttgag

SEQ ID NO: 229427 - DNA, 104 bp, Homo sapiens; identical to SEQ ID NO: 198900
  chr3:42922532-42922636
  hyper

SEQ ID NO: 229428 - DNA, 579 bp, Homo sapiens
  chr3:42947483-42948062
  hyper
ctgcacccctaccccggtagcggtccctgggatcgtccgtgtctccaggagaaccggaccgctctcccctccctccccgagcgagaaaggaggaccacagagatgcggcgccctccgccgtcctagagcaaccggagcggcccgagccccggcctcccggatgctggggcctggcgggtgtggagcacggggagtcgggcgtggggcgggcagggagtggagtcggggtcttactccggtggctgcagggcgcagggtagccgtgtcaggcctgcccaggtgcagagcgctcttccgcgaccccaacagcctctggtccggtctggcgcgccctcgctttcccagagggcgacctgggctatggcggccgtggcgctggcgagcgggacacgcctcggccttgtcctcgagctgctcccgggacagcccgcgctgccccgggcgcgccgggtgagtgcggggccggagcctggaagcagtcttggccctgccctgggttctaggcccggagacggggtggtgcggcggctgggaaatgggggtacaacccagagtgaggggcctcgagggacaggcagc

SEQ ID NO: 229429 - DNA, 725 bp, Homo sapiens
  chr3:43020689-43021414
  hyper
gaccagaagactgcggctggccgagcccccggcagggcttttattgtgaagggagcttccccctcccgcgctttcaggggaatggggaagctgggccgggacgcgcggcagggactttgcaaactctgcaaaagtcccgagtagaccgcagaggctcgcggccgcgggtaggctccctcagatccccgtagatctcagtagatccggcgtgtattccccacccgcggagtatcccggtgtgcagcgatctcccgagagttggcgcagggccacttggctgcagagaacgtgtgcaccttcagtccgggaaacccgccccagccgagtagccgcgcatcctgggaagcctggcgagccacggcgccgggggcggccaaggggaggcgggatgagtctgcgagccggctgagcgcgccgaggagccggccggggcaccgccggggacatggtaggactcgcgggaaggaacgcgcgagcggagggtggggcgatcaccaggacaggtggctgcagtcaacgcgcagcggcccagggcgcgcgcagcctgcgcggcctcccgaggccggagttgttccccgaaagttgcatggggcggcggcggctttcatttctgcaccagagctgggggcgatcggctttcctgccgctcttagtggggcggaccgtaataagggggcttttattactaatctgcactccttgacctaaccgtaacccactcgcaa

SEQ ID NO: 229430 - DNA, 104 bp, Homo sapiens
  chr3:43147265-43147369
  hyper
ccacttcaagtcccaggcgggtgtcggagtccgctccagccccaagcgcgcgcgcgtcttacctgaagcctggactccgcgggacgaagccacctccgccgacg

SEQ ID NO: 229431 - DNA, 58 bp, Homo sapiens
  chr3:43147669-43147727
  hyper
gccgccaccagcctgcggaatgttgggagtgataatttgcgccgagaggctgagtttt

SEQ ID NO: 229432 - DNA, 37 bp, Homo sapiens
  chr3:43662919-43662956
  hyper
ccgccctgatccccggactgcccgggaagcaagaacc

SEQ ID NO: 229433 - DNA, 359 bp, Homo sapiens; identical to SEQ ID NO: 198904
  chr3:43731959-43732318
  hyper

SEQ ID NO: 229434 - DNA, 480 bp, Homo sapiens
  chr3:43935656-43936136
  hyper
ctcacttcctcgtccggaaattgaagctaataagagcactgacttccctgggcggcggttgaaggctacctgtgtggatctgggcacagcgaagagcggagccttaacagggtgagcacgccggttgcgcgctctccagagcagcccagcatctcccgccagcctcgctgcccgctccgccccggcgcaggggccccaagcccacaggcaacgccagcgcgctcccaaccgctggagacagaaacaatgtgcgcgcgcacacggcccacgtgcacgcgcgcacgcccacgcggcatacaggcgcgcacgtgcacacgcgcgcctgcacagctctgcggctctgctccggccccacaggcccatcttaaagtgtttcgtgctctaacttaccaaacacgtggcagccggcagaacgaaaaggaaaataaatgaactgcgacgaaataaagcaggcctttccgcagtcggccacgtccaaca

SEQ ID NO: 229435 - DNA, 2623 bp, Homo sapiens
  chr3:44038482-44041105
  hyper
acgtgcaagacaaagcatttcaagcaaagatggtccagagttcaaattggaaagcacatctcgaggcgctgaatctgttctcgccgtctgcctcggtctctggggcgtcgcatccaggagaagggttttaactccctgccagatccgctcggaattagctcttctggcggtgcagcaacaagtggccccgccgcctcccttgtgcactcggagggactacatcctcctcctctcccagcccctagtccaaacgggagtaggtaatggcggggaaagggggaggtgacgagagcggggagaaggaagtacatattttttaattgtgaaattgtctgtctgcgtgctgtgctctgggattctcttgtctcaatcaacttcaattttaacgtggccgtaacgttaagattaagacctagaaatgaaaacgtacccacctttcttattacaaaggtcgtttgttgttgttgtttttttaaaacaccaagtaaccccccccccccccccccacggacttatactttgtttatgagatttctccaaccttggtggtttggagaaatgaggtgggggaggggaggaccaagggcagcaagacgtccactacgaaaataagatacttactaatttaatagggccgttcctttttacataagatgctcccccaccccccaccaatttacaataggtaaactttgagcttcctcaaagtttcgctatctagcgtttatgcccgaagctttacgaataaactccctttccaggtaaacctgcccaacccttgtcctatgcccagcgaagcccaggtacgatgggtcaaggacccctggcttccacattgtctgagtcacgttccagttggaaaggccatcttgggcgagggacgtgttgcccgactggtctaaataaggaaagaaagtggagtaccaaagaatcaagggcctctgttcctccccatcccgccaccaccaccaccggtccccgggctctgctgagcgctgcggcggtcttggctgaaaactgcgtccccgcccaaatcgagcgcaaaactcccttggacagaagtttgaaagaatccagtgtagaaacagacttctccgtccaatttggttttaatcagtaatcatataagtatacccacataaccacctaagtggagagcagacgcccagattcacggtccccacgtgttgctggagttggcgcagacgcgtgtgcgggcatagcggcggacgtgacaccgcattttctccgaattcctgccatctagggtggtgccgccccaagagggggccgtggggaggtggggtaataggctgcgcaatccacttgctctgggggagcttagggttcagagcagagcgcaactccggggggctgtcgcacagccccattctcccacaccagaagagcaatgctccttatggatgattaatagccgggcttctcctgaccatgcggcgcgtccctgccggcaccacttagttgttttaatttgacctttattagcaacgtgctcccagaggctgcgagttggattcgcaccacgataacggccctctccccttccacccggccggcttcctgggaaggatcggggactgcagctcccgcgacgcctcctcctcctgcgcagggagcaggcctgagttcctccacgtaatgacctgggagacctcaggcatcccggggcctggtcggagggtcttcgggccctggagctgggcggtgtctgcagtgcaccgccgtgagtttctctcgggtacaatgtgctggtgtgcagagaggaggaaaggaaaaaaaaaaaacccaacaccactcttaagtggcactggcatctatgaagtggcagtggtctacactgagcgtgcccttgcctggaggtgtagggggcggttactgcagccgaggggagggtactgcggccaagggcagggcgagaggacagtcaaggccggctggccgcgtgggagcctttcctctccgggttcagcggccggaatcaccagcactgcggctaaaggggctggtaggctctcctgcaccccgcgtgctcctccgccttctctgtgtcccccggcttttccaggaggaagatggggtgcccatcgcgaatggggcgcgccgggccgcctggccgggcggtcacgtgtcccccctcccccgccactgcggcgggagttccaatcagagcgcgccagggggctcctcccgggcaggaaccacccggctcggcggcggagggtgggccgccgtcacctgaccgcccgcccccgccccccgcgagtaaggggcggtggtagcgtctgctcggttacaaatggcccctcccgcccggctcgcccgctcgctcgggctcggcgcggacccgcctgggcgtgctcctcccgccggctccaggcgtcccaccgccctgcccggcgccagcccgcggtcccagccactcctgagggcgcgccgggcacccagcgcgtaggctcgcccacggaggtcgacacggaagtctggaccgccgaggcgtgtggctcgtctaccggcaggtgagcgtgcaccgcgggcgtgggatgctgtggggacagtgcgggggacgtgtggggtcttcggatgcgaacgcgagtccgtgcga

SEQ ID NO: 229436 - DNA, 830 bp, Homo sapiens
  chr3:44063212-44064042
  hyper
aacatgtaggaaccctttctcgtaatgccacttgcaggttacagctttcaaagcaaagccagactccggccctgcccggggtaggaagtctttgtctgcctgcgcgcccgagcgctcccggcttgggattgatttttggcccccgctgcagcaagttgggggctggtgaggagtgtagcggtgactgggggcggagtgcggactcgcatccgctgtaccaggagcccactgccacctcgggattttttttttaacttggaatttccatatgacaaaaaagaaagaggtttctcctcaatctaacggagccattaacatctattaataacgccgacagggtaagtaacggagccgcgctcctcggggtggtcaccgggctgcgtggtcctcggccggcctcctgcatccgctgcccctgtgcgctccgggccggatgcgcaagggcggcgcggggaccaagcctggctgccggccgcctactcctccccttccctaaggtaaggggtcgttttcacactcaccagagctcctgcgggctgagctcgccccctcccccgacttctttgcggggcattttctcttgctggtgtattacgtgtcatttctcacggggcattgccggccgcttttctgcaactgtcctttcggatttggtgatctggtccggcacagaggctctcctaggaggtggtgcccatgcatattcattctgtgtagtaaccgactggccgtcttgccattgcaggctgatttattgatttatgtaggaagtgtgttttattttagtaattagggaaccctgaattcacgggaaccgtctgcacttcgca

SEQ ID NO: 229437 - DNA, 242 bp, Homo sapiens
  chr3:44481213-44481455
  hyper
actcaaaactggttcggatgttgaaactgatgacactgcagacaccaagaggttatgaaaaagtttactactcacatgaggccttctagggaaagcaaagcgggcacccacgccagtctgttgggcttcagtgaaaggacgaacaagtggctctggtttttgttgtggttatgagagctcagtgcatttgacagtcagggtttgcacagtttgaacttcccctctgacgcaaagaggaagtg

SEQ ID NO: 229438 - DNA, 91 bp, Homo sapiens
  chr3:44518783-44518874
  hyper
ccgtgttatctaattgtctctgataaatacgctttatatgcagaattggatgaaacgagaaagcccggagaaacccgggctccagattctc

SEQ ID NO: 229439 - DNA, 582 bp, Homo sapiens
  chr3:44596541-44597123
  hyper
accccgaccccgcccgcggcaggtggccgggcacagccgagaagtaagccctgccagctctcccgggtgcggggacgcgcgcgcccaccttcgcaaacgagacttccgggatcccggagggggcggaagtcgaggcctctctcgcttccggctcggccattgtttttggtctaacgggcagtagagtgtccggcttcggtgccgagtgccaccgcgagtgggccgagacgcggagggaggcgcggccggagctcgggtcgccgacgctggccaggaccgcgcttcttcccggcggcaggcggcgcggtccccgtgactctcagaagccgcccgatgtagagccgcttctttgtctcatacccctgaccattcgtgcgtggcacggagccgggtatctgcgggtacagcgatgaacagggcagacgtggccaggtgagcggcgctgctgaagcctggtttaacacgaaaggtagatcgctgttttcccagctcttgcagtaggaaactgtatgaactgtcatatttgggtcagacccaggctcagaatcgcaaacgtggagcgtgacttggaaatgcaaaaat

SEQ ID NO: 229440 - DNA, 579 bp, Homo sapiens
  chr3:44626179-44626758
  hyper
ccacccagatgctcggtctctttccgccctaaccaagccccctgcccagcttccaccacttccagggccctcctcacattggctgaagtcgccaagcccttccatccaatgatagggcaaagcccggaagggaggcagggccagagcgtcggccgaccgcgcggggcttctgaggggcggggggactccagcccgcgggcacagagatgtggaaacctcacgaagcctagaagggccggagggacaggctgggagttagctgggagttgctgacgcagttccttctgcgctttgttcaagatgtgggtctggcgctttcggtgaggggtgctctacagtctggcgtggggggtcgggccgggttctgggagcgtgtgggagacgcaagccaggaggccagggctcctctgcggctgcccgctgctgagatgggcgcggcagccaaggggtcgttgtgggcctcccctttctctcgttcagtgctgcccctttgtcttgggtccagtctctgactcctcgtagctgctcgcttggaccaggctggccgtggtgacagcactgtgtcgtccccgctcctag

SEQ ID NO: 229441 - DNA, 565 bp, Homo sapiens
  chr3:44666348-44666913
  hyper
cggtctgaaacagcggccagttcttgttcgatgtaaggaacactagtacccaagggctcaggagttccgcctctcttccccagttctgggaaaagaaacgaaccatagagatgtggcttcctagagatccgggatgaggggcggggtgcaaccggaagtcgcagtattctcggctcggccattattctgtgcctcggctgccggaagggctcgttcctgtgtcatctcctagcggcctggcgccgaggcggcggtacgcaaggctggagccgcagcgggagcccccggtgagcggggtgggctcgggggcgggtgggcgtgcagggaaggcggcccgggacgcgggcctgagcttgctgggactgcacagccctcggtagcctctcccgggccctgacccccggcatggtccgtcgccagcttcgtgttggggttcgacgtcgtggcctcggctgggcaggcagccggcccgagggaagtactgaggacagcagctccgagtctgtgtgtgtttgtggaccggtgctcctgtctaacggactctgctggcgctttgagaagagct

SEQ ID NO: 229442 - DNA, 623 bp, Homo sapiens
  chr3:44690079-44690702
  hyper
aacagcacaatcctcctaagcgcttctgccccatccctggtctggggcgacattggacacccatcgagaggaaagcacctccgaggttcctagagaggccggcttggcgacttggggagccggaagcccatcccgaggcacttcctgtccggtcattgttctcgtgccggtagaagctgaagtaccggtcagccagcctcctgctgcagagccagtgaactcaggtcgggcttctcagctgcgcacagtgagtggggtcggagggggtgggcacgaacgtcgagggagaaaaaggggctctcccaggggccatggccctaggagcggcccctgcgtcctttccccggggacaccagccttgtctgtcggggtgcggggggcagtgagttccccaccgcctcggaatcccggctgctgcccacctggggcctggtccgggagaggatgcacacggaccggccaaggggccagataggtcccagggacagggccgcgaggagcctatacgtggaaagaatggattgccacgtttggaaatagagaaaggacgttgaaagggagcctttgatagagggccctgtgccgtctgggaccggaggtccgtcagaatctgatcagaagtc

SEQ ID NO: 229443 - DNA, 326 bp, Homo sapiens
  chr3:44726883-44727209
  hyper
tgacgagcgactttccccttacatcaagtgcacagtaagcccaagcgccggggccgcggggattcccgccagtcactcccgccactaccgccacccggccccgccgccagcgcagcccgcagccccggcaagcctgcgcccgctcggccccggtctctttcgctcaccagaggctacggggcgcccggccccgcacacccaagaaacactgccaccgcgacgcgcctgcccccaggatcctctcgcgagcttcagtacccaaggaagatgggccgtcccggaagtgcggccggggcgacttgcaggcccctcgccgaccgctctag

SEQ ID NO: 229444 - DNA, 327 bp, Homo sapiens
  chr3:44754085-44754412
  hyper
tcagagaatggatgcgcgagctcgctgctgacgcactaccggccgcgccaccattcttccggtttcagaagttaaggctggtgtcctggccccagtccacctctgggagcgcctgcgccgctccgcggagagtccgtggatctcacagtgagcgagttgggacccagggaggggaaaagagaggaccccggcgagccattgctggggcggcgggctggagggttatctgggaagtcagccccggcctcggtcctctccacgttgctgcctacgcgtgctgcccggacgtagggcactcctagcggctcggcccgcccagcctgcagc

SEQ ID NO: 229445 - DNA, 337 bp, Homo sapiens
  chr3:44770922-44771259
  hyper
cctgtgctggaagacgcacgccaggtggggtcgcaggttgtttctggtgccggcttaaccggcgcagcaccgaaacccgtagctgcgtgcgggaaggaaccaccgagcggaagccgctcccaccttcctagagaggagacggtagtggttattagccgaggcgcggactgctgacgtcacgccggctgggcgcgtccgggacttactcctttccgcagggcagcacccagggacctgagtgttgcaaggtgcgagaggggagcgccgcggggagcgccgcgggaagcgcatggtgagcggtttctgctgtgcccggctgccgcgggtcgattccagc

SEQ ID NO: 229446 - DNA, 188 bp, Homo sapiens
  chr3:45017826-45018014
  hyper
gtagctacagcagcggcgttgggtcggccgccgggttcagcctggccctgcgggtcgcggcctgccctgggtttgccagtgaggaggcagccgagctgcggcgactctccgtttaccttgtgattaaacggttctgctgccggcgtttgcaattcagagctggcaacgtggacgtttttaggactgtt

SEQ ID NO: 229447 - DNA, 832 bp, Homo sapiens
  chr3:45186917-45187749
  hyper
acaggtcactgggacgtgttggtcccttcccccaaccgaaacaactcgaaattcacacatatccccggaacaacagcctcctgccctcaaagtccactgccaaaaagtgcgaggggcgcgggaatgtccagtctctgcggtggcgcagatgcctggcggctttctctgggaccccctaaaagaaatccgggcgctttcatttttgcaccaacgctcttcaactttaggagagggggaatgcagcgtgcggacgggaaaaaggggatctagtgggaaatgcggacgtgaaagcactttttttgcaccttctctctggaccaggcgaggaggtagagggcgagcctggagaggaaagatctcttcccacaccctgcctgggtgctttcaagaatcccggcaaagaccctggggcgcacggcgcgccaccttggacatgtcgcctgggatcggctaccgggagctccttttcccgccttctcggccagcaccgggctcatcctcccggaccgggaggctccccgatcggggacactctcacgtgccgagggcaaggttgactccaggagggcaaggcccacgcgcccgacgcggcgcgcgcaggaaccgaacagtccgggggtcccggagccacccgcgcattttgactacgccgtccccgccctctctccgcaccctccgcaccctccgcaccctgcgtccctcggccgcatctccgccgggcgtccgctggctggctagctcaccactccacgccatccgcctccaaagcccggcactcacctgccccgcgcggcaggcgcgccgcacccagcagcagaacccctagcagtgc

SEQ ID NO: 229448 - DNA, 32 bp, Homo sapiens
  chr3:45635676-45635708
  hyper
gcgcgcgccgatccgccgccgccatcggacaa

SEQ ID NO: 229449 - DNA, 226 bp, Homo sapiens
  chr3:45730475-45730701
  hyper
gcaaaacagacatcgcgagccagccaggagtcgaacctagaatcttctgatccgtagtcagacgcgttatccattgcgccactggccccgacttgctaaagccttctccgtgatagctgatcacccttatacagtttgaacgggcttccgggtaccaacgatccattttgcccttgcgccgcgctcccgctgctctgcctttccccaaaacgcgccccaccaatcc

SEQ ID NO: 229450 - DNA, 72 bp, Homo sapiens
  chr3:45730961-45731033
  hyper
cgacggcggcctacgagcagctgaagctgtgagtcccacgggccagaggcctgaggcgcggcgggcggggcg

SEQ ID NO: 229451 - DNA, 68 bp, Homo sapiens
  chr3:46037443-46037511
  hyper
ccagtccccggaccgactgtcccacccgcgacccatgctggccccaggttaacgcctgcaaccccgga

SEQ ID NO: 229452 - DNA, 87 bp, Homo sapiens
  chr3:46854159-46854246
  hyper
tcctctctctcttcgcagctctccgtggactcagggccctccacctcatcgggagcctcccaggcactcagcgtctcctggcctagg

SEQ ID NO: 229453 - DNA, 500 bp, Homo sapiens
  chr3:46886710-46887210
  hyper
gaggaaatgagtggcgagaggttaagcaatttgccaagatcacacgaggcaggagtaaagcggggcttgaacccagggccctgggcagggctggggtgcgggggctggcagggtatcgacccagggtacacaacacagcagtcaaacagatagacagagttttggatgagccaacggctgagatgggacgagaagccagcgcctcctccctgcgcgtctgtctgcaggccaggggctcacacgggagccggctcctgccccctggcccagggccagccgtcatccccatgaggtcagccacagctggcgatttcggggaaataccagctccttattaaaaacaggcggtggtcaggcccccgctgctttcccagtagaaactggagtgtttgttccaaaaggaacaagagtgggcagggcctggccagggccctgaggcgggaggcttgagctgcagtacctggtcagggtgtcccgggagctgcggggagaggaagtgg

SEQ ID NO: 229454 - DNA, 1439 bp, Homo sapiens
  chr3:46923054-46924493
  hyper
atgggtcgagactcggagacccggacccgaagagacgctgggcagggagggagcgggatgtgtggctgcagacctgggcgggggtcggggctggcctagggccgagaggaacgacaggcctgggatgggactgagggcaggggacgaggcgagggtggggctggacgtgggggagggcggcagcagccaagccgggctcggggctggcagccgagcggcctccccagggaccccgacccggcccgaacgggagcccagtggactgacagcgtcgcggccgggggcgcgcgggggtaccgggcagcctcctcaggggattcgcccatgatgaaagagggctcgcttctcggctcagggtctctattcgccagcgggggccggatgatcaagggaaaaaaaatttaaaagcccgtgctttccagaagagaatgaagcggcggcggcgtcccgggttccctgctcgggtctcgatgttacagctgcccccgccccgtctccccagcactcacatcccgccgccgtaagactccgggcctcggcctctagcgcaatgtcccggggcggggggcggaaggctcctctcggcctctccacactcccgcgtcggcggctgcggagggggtgggggcgggagaggcccgggagggcgcgggggagggaagaggcgcccggccggggagaaggggagcggcagacgccgaggcgagggatgcgcgcggcgggcggtggctccgagcggcggccgggcggggggcgctggaggccaggccggccagcggggggtatcccgagagctccatgaagtccccccggggccgcggacggggcgctggcttggggaggctgtcgggggggccccgacatccatggcaaggcgggggccgcggcggcgcgctcggagtaagtcggggctggggacccgcgccgaggggaagtggccggagtcggggaggagcgactccgggcctggccggagcagccaggctgctctgtctcggtgtcagtcggcggcgcctcctcggaacccgggggagtcgccagccccgcgccgctcggctcggtggcttttttggaaacttgcaaatgttttcgtagagagaaaagggggagggagggagcgagggagtgaccgaaacggagcttggggccgctggaagaactgaggccaaggccgggggagctagagacggactgacagacaggcagaccgacagagcgtcggggccgctgcgcgcccgagccgcacaggcgcaagcggggctctggccaaggatggggaaggggtgcgggaggcggctgccgagggtctgggatctcaggaggccgaacggccgggggctggcggccggaacacctaagggctcagtgtggctgcaaagttgagatcgcaccccctaactgcacgccccgcgcggctcagaacgcgccccctgcccggc

SEQ ID NO: 229455 - DNA, 154 bp, Homo sapiens
  chr3:46924942-46925096
  hyper
gccggggcgtgggcggggcggccagcctgacgcagctctgcaccccctaccaccaccagggccggcggcggcggctgccccgagggacgcggccctaggcggtggcgatggggaccgcccggatcgcacccggcctggcgctcctgctctgctg

SEQ ID NO: 229456 - DNA, 137 bp, Homo sapiens
  chr3:46933850-46933987
  hyper
cacgtccggctcgcgtcccatactgacaggctggacagtctccatgtgagaacgcgcacggacgggcacacacaagtgcacgcgccggccactcgagaatgcgctgccactcgcgcgcgcacgcacagggacgcgca

SEQ ID NO: 229457 - DNA, 237 bp, Homo sapiens
  chr3:47018180-47018417
  hyper
ctcttcctctagccggcccacaccagccgtagttgcctccatcttgcccgcgtacgcccctccttttctcccgtcttgcatcgcgcaggcctaaggagagtggataaatgtctcgcggccaatccaaggacgagaatgagagactgggaggtcctgaaagccaatcaatgcggggttattatgggcgagccctccccgccttgccccgccccgccccgccccgcccttattcttccg

SEQ ID NO: 229458 - DNA, 417 bp, Homo sapiens
  chr3:47020746-47021163
  hyper
aaaagttgcgtttcggtcttcccataaagcgacagagtagcacctggcatttgataagcgctacaaggggtcgtcatggtggtggtggagattattgttgaaggaccctcgccacctccacgcggcccgccgccccttccctgaatggcggcaaatgcagtcaggcgagcagcgtcctgggcggattcagaccctggggaagtctggaattcctcaccccgaccctcgtcccggaggctcaggctggcccttccaatggcactggtggggcagggcagcggggcaccctcccgggccgcccggcccataggcccctcctcctgccaggctctccgccctttacatggtcccaggagaggcggggcggcggtgactgcagcgaagtgcaggaagctgggcggcggccggcagtgagga

SEQ ID NO: 229459 - DNA, 108 bp, Homo sapiens
  chr3:47051019-47051127
  hyper
agggccagcactggcgtctgcggccgcagcagcactttttgcacagtctggggcggggttccccggcttccaagtcgctgtttcgtcaaagcacgagggccgcctgtg

SEQ ID NO: 229460 - DNA, 453 bp, Homo sapiens
  chr3:47205420-47205873
  hyper
cggctggagacggcgacgcgagccccctccccgcagcagggcgacgcgggggaggggaggggaggaggccgcaggtccgaccgcggcggcggcggcggcggcggcggcggcggcaggggcggcccgcgtcgctacctcgctcgtcgctccctccctccctcggacgcccgccagccgctctctccctctcaccctcacaccgggagcgacgcacaccccacccgcccctcagcttcgcaggcccggccccttaaagagacacacacgggccaccgatctgccgccagtcggcgtgccttgcagctgttggcttgaccccaggccgggacgggcagagcggaacactgcccggcgggtccaggccgaccgtgcctgtggctctccggaacaataaacccccggccccagtgatgtgggccagaccggacctggagaggcggcaccgcgacccct

SEQ ID NO: 229461 - DNA, 167 bp, Homo sapiens
  chr3:47323999-47324166
  hyper
gacgctcccgggacgcgactgccgcaaccgaaaccacctgcactccccacgcggggctgcctggctgtgtacatagtcgccatggcaacgggtcgcttccggggattccggaagtgtcggggtggcggaaatgaagtccgaggtcctacgtcgaggatacgggtgag

SEQ ID NO: 229462 - DNA, 79 bp, Homo sapiens; identical to SEQ ID NO: 198922
  chr3:47324508-47324587
  hyper

SEQ ID NO: 229463 - DNA, 95 bp, Homo sapiens
  chr3:47422258-47422353
  hyper
cggggaataagctcgctccgcgcctctcagtttagtggatgaagactactatcccagaagccgtttcgcctcgggctggcgagctcctccccgcc

SEQ ID NO: 229464 - DNA, 170 bp, Homo sapiens
  chr3:47844166-47844336
  hyper
ccgagctggaaaccgttccccgctcagccatgacccgggctgtttattcgcatcaggaggcgcgggtggctcgcagagggcgagaagacccttcccgctttcacactgcaggcagctaagtcgccgagaaaggcagcaacttgacgcccgaccccgccacccaaacccgc

SEQ ID NO: 229465 - DNA, 87 bp, Homo sapiens; identical to SEQ ID NO: 198924
  chr3:48130785-48130872
  hyper

SEQ ID NO: 229466 - DNA, 196 bp, Homo sapiens
  chr3:48282460-48282656
  hyper
cagcattttctctcgccctgcacaagccgcatttcgccccgagaactacgcttcccggcaggctgcgcgccgcgcggtgacgcacttcacccagtcctgcttctttcttctggcgccgccagtggcccgcggtgcgcattctaatccgtttcacacacggtgctgctacctcgtttgcttcgtgcgtgcgtgcgcg

SEQ ID NO: 229467 - DNA, 540 bp, Homo sapiens
  chr3:48342985-48343525
  hyper
ccctggagggtggcgggttttccaggcgcatgcatttgccgcggacgggacgagaggatgaagccgttctgggcgccggaactcgcttgtgggaaccgcccctcggaagccggcctgggcgccctcggaagccggcctgggcgccctcggcgggagggagtgctgggccgggtgctggcgcagcgctacgcagggtggcggaacccagaggaccggacgggctcgttcagggtggcggcccggcgggggcgatgcccgccagcagagacaccgatggaaaccttgcccagttattttctttgcccagggtagttcctggaacatggttgatgcccagtatttgtcaaaagtacgcggagggcaaagaacttaagcgctcgatagcgaaggcacaggcccttcaaagtcttttgagctctgagcgatacattagcatgaaggatcgtagctaatatgggggttgatgaaggaggatccttggctggagcccaggtgtgcatagggcatgaggaaagcaagtcataacggcctttcacgtgt

SEQ ID NO: 229468 - DNA, 218 bp, Homo sapiens
  chr3:48470350-48470568
  hyper
ccaacccccagaccccgaggcgaggaccccatcactggccctgggagggcggggaaggggccggccggtcccccgcggcgacggcgaggagggggcgcggaggagcagctccacctcctcagtctcccaatcgcgttccaggcggagtcgccagagtttcccttcgcgcggagaagtgtggtcccaactctcaaaaccaaagccgcccaccactcacc

SEQ ID NO: 229469 - DNA, 71 bp, Homo sapiens
  chr3:48471202-48471273
  hyper
tgccaggagccgaggcggggggtcgcgctccgcacccgcaggtgctggtggaacagcgtcccggcctcttc

SEQ ID NO: 229470 - DNA, 332 bp, Homo sapiens
  chr3:48481454-48481786
  hyper
cctcctacggttccgattctaccctggcaggacaaccctagctcctcgtacctggcgtggcccgaccaatcgtctgccactcagttgacctctgacctgttagtacccgcccctggagcgccgcatccggtagcgagagttcaacttcctgactaggagccaatcagcggggccgcctcgctgtctacgacagagggtggggcagacgctccgtttccggtggcagggtctggggaagcggcggcaggcgccatgtccggccgcgaaggtaagtgttccggaaccgtgaggactgcggggacggcggggtggggaccgggcggcaggggcag

SEQ ID NO: 229471 - DNA, 213 bp, Homo sapiens
  chr3:48487961-48488174
  hyper
cggcccgcctctccggtaacgggtcgcgccgcactgagtccttgcagcaaacctgccgaatcccgcccgtggacctctaaacaccgggcggggccgggtgtggcggcgcgctcggacgttcgtcattcctccgcgccctccgcctgccagctgattggcccctgggccaggggcggggcactcgcggcggaggcaagcggcggcgcgcggacg

SEQ ID NO: 229472 - DNA, 157 bp, Homo sapiens
  chr3:48541365-48541522
  hyper
gtgctgcccggctcgttggagaggcagcgcggggaagtgtctgcccggtcccagggcaggacgggccgcccccacccccggctcaccacccggaggcggcgttagcagcagcagcaacagcaacggcaacaggatccgcggcgcggggaccggcgca

SEQ ID NO: 229473 - DNA, 312 bp, Homo sapiens
  chr3:48594205-48594517
  hyper
gccatcccggggccgggatgagtcggactgcgccgcttccaacccagcagccgggccacctcgggccacccgaggtcccgccccttgggccccgcccctcctcaagccgcgacagcccatgtctatcttcccgcaggtcccgccccagagtgagtaggctccgccccagctgaaaggggcccggcctccgaccacgcatgcccaactcacctacccgcccgttttggaacaagtgggcccagttcttcaggccaggatcgagaatgcgcatgctcaactccggattgtactggtcccgccccagttcaaggc

SEQ ID NO: 229474 - DNA, 39 bp, Homo sapiens
  chr3:48672961-48673000
  hyper
ttgggccaatcagcgcgctggggcggggcctaagtggcg

SEQ ID NO: 229475 - DNA, 102 bp, Homo sapiens
  chr3:48693398-48693500
  hyper
acggcgggaccgaccggggggacgcgggtgcagcgaggtcaggagaccccgggcggggcgtcaggggaggggcggtgtctcatggggatgccaggacggggc

SEQ ID NO: 229476 - DNA, 626 bp, Homo sapiens
  chr3:48701061-48701687
  hyper
gcatgccttaaccccttgaagggactgacacagaaactcagtcctccccccaccctcggtgcattccagctctccctgcgtaactcctggcacgcgccggtctcgccaggccaatgggtggacctggcgcaacagacgtcacgagaggagcggaggcgaggggtgaacgcggagcactccaatcggtcagtcattgtttctattggcacaatgggaggccccgcccctcacggcggactcatcgcatgggggagggggctccgcgggttgccggctaaccgtgagagagtccgggaggtacactatacggaccggcctccaaaggcggaatcgataacgagctgcagcgccgggtgcagaggacgcgggcatcccgaagcccaggaagaggtcagggccgggaccccagaacgctccacagggtgcggctcccgcgatggggtggatcctggttctaacaggcgaggaactcctggccaaggcctctggcccgccccgaacggtccctatgacatcaccatcaaccaatcagtcggcgcatcctttcgccccttgactgctccgcttccgggaggcggggcttctgcgggttccacctcccgagcgccccttgtggctaccaaggt

SEQ ID NO: 229477 - DNA, 56 bp, Homo sapiens
  chr3:48754857-48754913
  hyper
gccggaggtctgacgggcggttgggtggatagactagctgcgggccgatggacagc

SEQ ID NO: 229478 - DNA, 47 bp, Homo sapiens; identical to SEQ ID NO: 198929
  chr3:48885300-48885347
  hyper

SEQ ID NO: 229479 - DNA, 391 bp, Homo sapiens
  chr3:48955804-48956195
  hyper
cttgcacggtgaccgtaagtcggagaactgcgcggcgaacgaggcctcggcaggggaagcgaaagcctggtgtggttgcggctctggggccaccctgcgaccgcctcggggtgtaggcagaatttcccggcccagctcccctctgaccagatagcggccgagaaacaatggttatctgctccactgacgccaggatgtcttctccgtgcccgatcccggagtacaaacagtgaaatgagaagccggtgagaaacgcgctggttaaaaacatctcgacgggagacgctggtaggcgaatagtggctccagacgcggtcggcgcctgccgtaccctggtcagactctgggtcagagcgctaagtttcaaggaggcggcgctaaacaggccctc

SEQ ID NO: 229480 - DNA, 202 bp, Homo sapiens
  chr3:48956726-48956928
  hyper
cggggaaacgcgccgcctcggggctcaccactcgagtcatctttgggagctctcgcagcgctgcccgcgcggtttaacgcccgcctgtggagggtatccccagctcgcgggctccgcgtccgcgcgaatatcccggagcccgcggcgcccctagggatgtgcggccccggagctgtgccgccgcctcgccagaagctggttg

SEQ ID NO: 229481 - DNA, 497 bp, Homo sapiens
  chr3:49027049-49027546
  hyper
atgccccctctgacggcctatgaaaccttgcacatcaggcagcttcttcctaaggcctgcctgactccggcgagacttcccgggagatccggaccgaccgcggaaccgagctccaagaatgcctgcgaggaggctgtgggtcctaccctatcgccgcttacgcagtcccagcctccgcggcgcccccaaatgccgcactgttgagtcatctcagcgctgcctcctccgcgctgcgctccccacccccgctcctggagcaagaagatgcagacgatacttttcccggaggcaagagggcgtcttcacgcaggcaccgagaagctcccactagtgtatgccttaatggtgccgctcttgtccgcgtctacgcttgggaccttggcttctgacttggagagtgtacagctctgcccgacggcaacccagcttgggaagagaagccccagcgtgggctggggctcaaggcgcaggaaggccgagcccggcgcggacgcagg

SEQ ID NO: 229482 - DNA, 394 bp, Homo sapiens
  chr3:49027803-49028197
  hyper
ggcgacggcgaggacgcaccggtgcgtccgctgtgcaagccccgcggcatctgctcgcgcgcctacttcctggtgctgatggtgttcgtgcacctgtacctgggtaacgtgctggcgctgctgctcttcgtgcactacagcaacggcgacgaaagcagcgatcccgggccccaacaccgtgcccagggccccgggcccgagcccaccttaggtcccctcacccggctggagggcatcaaggtgaggacctccctgccccgccgcgctccaggccctgcacggctgagcccgagaggaccggcgctcagcccgggtccccacgctgcccccggcgctgctctgcgtcggtcccgcgcgctcccactcactcgcctgctgtcgctctccgggccgg

SEQ ID NO: 229483 - DNA, 293 bp, Homo sapiens
  chr3:49044449-49044742
  hyper
ccaccccgccagccgcgatacggcgcagttcctatattcatgttatttattgtgtactgactccatctgccccgtcaaataaaaaaccacaaggttcgagccgccgggcccgacaaactccgggtcggcgaaacagagtccgcgataggtgcagcgggctggcagctgggagcgccccgcaagcgtcacgtgagggggcgaggggcgggatgcccctccgcgggccccgccaatgatgagctggattgcgtgggacgaagggtcgtcattggacaaccgccgcgggcgccctg

SEQ ID NO: 229484 - DNA, 137 bp, Homo sapiens
  chr3:49057921-49058058
  hyper
ctcggctctcccacgtctacacccatcacctccagcctgagggcgcaactgagaggaactgagacccaagcagctcagtaaagtatgtctgggggtcaggggcaccccatctgggccagggcgctgctcaggcagga

SEQ ID NO: 229485 - DNA, 31 bp, Homo sapiens
  chr3:49058561-49058592
  hyper
tccacagagcagccgcgggacccccggaaac

SEQ ID NO: 229486 - DNA, 68 bp, Homo sapiens; identical to SEQ ID NO: 198933
  chr3:49066685-49066753
  hyper

SEQ ID NO: 229487 - DNA, 204 bp, Homo sapiens
  chr3:49066962-49067166
  hyper
gctgaagaaacagcgcatgcgtatagcacatagtggccttgtcactgaggagctgccacttcacgtcccaccccacactccccgcaggacctcggccagttcaattaacaggcaagggtttacttctactgtcccgccgggctcctccccaaaataaagagacgttgttcactaacatgttgaaaagacgtgcttgtcattctt

SEQ ID NO: 229488 - DNA, 286 bp, Homo sapiens
  chr3:49131391-49131677
  hyper
ggccccgccgcaccgccagggaccctggttctgccgtcgtcgctccaagaccgacagggttttctcctcacagctccctgggcgccatcttacattcaaccctcacagccaataggagccgattgctcctctcgcgataatcggggcgtcggatcccgcgagatctgggactgcctaccggccaaaattaaagtgaacgcttcagcaggggaaggtggccgcgcttctggccgctagagcggatagtggatcctagggtatggagcggctcgctccgcccatggac

SEQ ID NO: 229489 - DNA, 274 bp, Homo sapiens
  chr3:49142031-49142305
  hyper
gggcagaggggctcgcacctgagtagcggcctcgcgcagctgcgcgctcagagccgagttcttgagcgtctcgcgggccttctgctcgctcaggccgaggctagtgaagagcgacagggagtctagagccgccattgcagagacaccggaaactaaaagaaacttaggccccagtctgcaggtcggcattcactcgctgaccaatgagagtgaagcctccggggagagccaatggggtccttccttggcgggagggggcggggcgctccaaggt

SEQ ID NO: 229490 - DNA, 38 bp, Homo sapiens
  chr3:49142558-49142596
  hyper
cgagtccctgtcacgcttttgacgccacagctttggag

SEQ ID NO: 229491 - DNA, 188 bp, Homo sapiens; identical to SEQ ID NO: 198934
  chr3:49158289-49158477
  hyper

SEQ ID NO: 229492 - DNA, 187 bp, Homo sapiens; identical to SEQ ID NO: 198935
  chr3:49171171-49171358
  hyper

SEQ ID NO: 229493 - DNA, 243 bp, Homo sapiens
  chr3:49203302-49203545
  hyper
agaggctcctgcccggcctccgacttcccttcacacgtgcccccggggaaggcaggagaagttgacggaagatagggcgtgagagaggcgccacacaggcagaccgggggagggggcagatcggggccctcaggctgggaatgcacgtccttagggcccaagccgtgaggcgggggtcactgaggcagcgaaatgtacagggtgaacggtgctagccctaccgggaccgcacagccccagggt

SEQ ID NO: 229494 - DNA, 310 bp, Homo sapiens
  chr3:49395159-49395469
  hyper
ctcttcgttcttggcgttctcctacaggagagaagggcagctagaacccggggtcaagaggaggagagaaacgttctaaccacaaacaagggagattttctatgagtcaccgggattttgccctccatgcgcaatcccaagggcggagaggaatttcagcagctacgagcaacagaaaggaaacgagagagtagccagactctccgcgcatggagccgacggcacccaccagcacaccgccggcgcccccagccactactgcacgtccgcccccgccccgccccgctccgcccggcgcacctgatgccca

SEQ ID NO: 229495 - DNA, 239 bp, Homo sapiens
  chr3:49395700-49395939
  hyper
gcagcacacatggcgcaattgtccaagaagccagcggagcgccccgaacaagcactgtaaggggaggccagcaggcgcctccttttaactggccggcggcgggtcacgtggcacaggcagttttccgggcctgagggtcccgcctcatccggcccccgccctacccggagggctcggcccctcctcagccaggaaaaggctggagagtgcgcccgagcgggacgcgtgctcctcctaag

SEQ ID NO: 229496 - DNA, 644 bp, Homo sapiens
  chr3:49449335-49449979
  hyper
ctgaagaccagaccgtggactaacgagagaaccgacggaggaccgcgggcggcgggagggtagcgcgagagagcgagggcgggcggcggcgggagggcggggaacgacgtgcgcgcctccgagtgcccagcgggctcgagccggcacaggtcgcggccccgcgcacgcgcgcgcactcacagctcatccactattgctcaggagcccgtccacgccctaaaagcaaaacccttaaccaatcattgcagccgcgtggggcatcacgggaactccggggctataaaagacctggttgctattttgtactcccggagtcactcatcccttaagcaagcagggtggggttaggtgcgcgtgcgcggttttaatactcctccccgaactgccaactcttcacgcacgcgaagtaggccccaccctggctgggtttacgcgtgcgcactaacgggcctggtcccggaagaccacacgcgtgcgtggtggggactacggtgacagtaccccgggtggggcgagggccagtcatggcggagtcctggtctgggcaggccttgcaggctctgccggccacggtgctgggcgcgctgggcagcgagttcttgcgggagtgggaggcgcaggacatgcgcgtgaccctcttcaag

SEQ ID NO: 229497 - DNA, 122 bp, Homo sapiens; identical to SEQ ID NO: 198938
  chr3:49507371-49507493
  hyper

SEQ ID NO: 229498 - DNA, 84 bp, Homo sapiens
  chr3:49577215-49577299
  hyper
agcagctctgggccgaagagggagacagtgtccgcggcctcccaggaggtggcgccagaggattaagtcgccagcggtgggcgg

SEQ ID NO: 229499 - DNA, 408 bp, Homo sapiens
  chr3:49591667-49592075
  hyper
gggctcagcgcgacgtcccagaggccgcttctagtggcaggtgcccctcctcacagggccctcgcagccccgccggcccccgcccggctccttctcagcatgatacaaccgcgtcggccctggacagcgcatgcgcgggcgccggcggctgtttcccagcgaccccgaggctggcgggagcgcgcacaggggaaggggggcgtgtgcagggaagggggcgcgagacgcgcatgcgcagcggcaggcggcggcgcgagccgagctgggagatggcggcggcagcggcggcgccgagagtgtgagcaccgcccgggagccgccggcccgggcgcagcgcgaccccgaccccgcccgcccgcctgcccgccatgggcaacgaggtcagcctggagggcggcgctggcgacg

SEQ ID NO: 229500 - DNA, 149 bp, Homo sapiens; identical to SEQ ID NO: 198939
  chr3:49711249-49711398
  hyper

SEQ ID NO: 229501 - DNA, 242 bp, Homo sapiens
  chr3:49761709-49761951
  hyper
acaaagacagactcgcctccgtttctagcggctttatttttgacatacacgacctcagacacaagcggggcgggcagcgctaggtgtacagaaaggagcgggctcggaccgagcaccccctcccccgcacgcaaggtccaaagcaaacgcaactgcggcgggagccaccggcgcaggcctcgggcggtggagacaggcttagcttccaggaaagagcagcagagagcgattcccagaacgcg

SEQ ID NO: 229502 - DNA, 109 bp, Homo sapiens
  chr3:49841073-49841182
  hyper
gcatccagctggccgtgctgctggaacggcgcgggaggagagagtggaagggggacttctttgggggcggggcatggggcggcaagggactaacgaggtgctggcgctg

SEQ ID NO: 229503 - DNA, 129 bp, Homo sapiens
  chr3:49851238-49851367
  hyper
acagtaggctgcagcgctcagagatagggtctttgtgtaggtggcggtgacagtaggggccagtgccctgctgtagccagtgcaaacaggaaccaaggccaagcgaataagggacgctgctggtcacag

SEQ ID NO: 229504 - DNA, 399 bp, Homo sapiens
  chr3:49893731-49894130
  hyper
caaggccctgaagcggtacccgggcaaacaccgggccccaacactgcagtcactcaccactgcaagtggaaggtgtggccgcagtggatggcggccacgtcgcgggagtgatcgaagaagtcggagcagatagtgcacagagcacggataggcatgatggctggactcaaggggcccaggcagccaaagaaactgctacaggtccggcttcgtagacgcgcccccgcgcctccgcttgcttcaaatttggctccgcagcacgacttcctggagcgggccggaagtgacaacacaaaactttgggcggagcgtgaatacttcgcctggattggacaaattctcggatgggcggaactatgggcggggcttagcggccccgaggccgtagagaatcctggg

SEQ ID NO: 229505 - DNA, 92 bp, Homo sapiens
  chr3:49906717-49906809
  hyper
tggagcttcctcccccaccccgcggcagccccgcccagccccctccgggttgtcgcccataaagaactctccgttgtcatggaaattagtga

SEQ ID NO: 229506 - DNA, 67 bp, Homo sapiens
  chr3:49977376-49977443
  hyper
gggcgggtaagcgcgccttcttattggatggcgatggacagcgtgctcttacgacccaccccagaag

SEQ ID NO: 229507 - DNA, 39 bp, Homo sapiens; identical to SEQ ID NO: 198940
  chr3:50126252-50126291
  hyper

SEQ ID NO: 229508 - DNA, 172 bp, Homo sapiens
  chr3:50192568-50192740
  hyper
cgcaggacctgggtacgccgcgaggaaccgtgcagcccagcgcggccgcccggcccgggtccagcagccaggagagcgcagcgcttcgaagccgagtgcgcgccaccgcccgcgccccgcgctggggaatgcgccctcggcgcgccggccagggggcgcccgcagcccaccc

SEQ ID NO: 229509 - DNA, 48 bp, Homo sapiens
  chr3:50242721-50242769
  hyper
gagcagagcgaaccgcaccggcccgagcggagcgccgcacgttcccaa

SEQ ID NO: 229510 - DNA, 598 bp, Homo sapiens
  chr3:50243056-50243654
  hyper
gtacagcaggaggtcggcggcacccggggctgggaccacaggacgccttgttgggggctcgggcggcacaccacaggcttcctgaggcagggcccatggggcaggctggagagggcccgaggggaggacccaagaggggcctggagcagtccctggagcgctgccccgacgggcgcctgacaggcagagcagcccggctggcacgatgggaatccgggtatatttatctcggctgctccggacaagggcttgagggcagatcgggccgggccgcctgaggggccgcggggtacatgctggtcccagagccggtgccatttgcagaggagccagcgggcacagcgggcgcagggcgcgagtggctccctgacctgaggccggggcgccgtgcgagctcctccccacctggcgctgggtagggtgtaagttagagcccgcgcagcgcacggcggagagaaggaaccaagacttggtttgcaagagcccgcccccgcccggttggccccttcgattggccacagcaaatgcgtgcgtttgtttacacccaggcagggggaggccaggggagggacctgcggggacccgcccttttcccccc

SEQ ID NO: 229511 - DNA, 99 bp, Homo sapiens
  chr3:50374290-50374389
  hyper
caaactgctcggtcggctttagtcatagctggataatgcccggctcaggtctaccacaagccatacagctgctttttccgtgttcaacctgtctgtgac

SEQ ID NO: 229512 - DNA, 426 bp, Homo sapiens
  chr3:50374569-50374995
  hyper
cccctcccgcccgccggcaccccctggctcccacctggtcccggcgcggcctgcgagctagcgaggttcgcgcggtgaagtactgctcgagctccgagtccgagtcctcttggctgcagtagccactgctcgtcgtgctgctccaggtcatttcgaaagaaggcgcctccgcctcgcccatagccgtacccgcccgtcccccagtcctgcgcgtccgtagccgccaaccaccgccccggtcgcgtgcgtgcgtgtacgcgtgtcagtgtgcgcgtgcgcccgggccagagccgcgccgcaaccgttaagactgaaacgtagatcgccgggatctagctcttgtctcattggggcaggaacgccggggcggggacacgcacgcttcgcccccaggaatgacctcatcgctccggagctccactcaca

SEQ ID NO: 229513 - DNA, 271 bp, Homo sapiens
  chr3:50377896-50378167
  hyper
gaccccctctgccgcgacttgacccgcggcgactgcgctgccccttggctgccccttccgctctcgtaggcgcgcggggccactactcacgcgcgcactgcaggcctttgcgcacgacgccccagatgaagtcgccacagaggtcgcaccacgtgtgcgtggcgggccccgcgggctggaagcggtggccacggccagggaccagctgccgtgtggggttgcacgcggtgccccgcgcgatgcgcagcgcgttggcacgctccagccgggt

SEQ ID NO: 229514 - DNA, 618 bp, Homo sapiens
  chr3:50387962-50388580
  hyper
gaacgtccctcttcccgcccagtcccgcgagcccgggtggcacctgataggtgatcttgggtcccagcgtggggtggaactcgctgaagaatatgcattcgatgcggcagccgctgcccatggcaataaccgggcccaggcccgtagctcctcgttcctcgcgcagaggcgtccccacctcctgtgaacacttgtcagagacagcctcgaggcctgtgtcgctggggcacgcaagcttgccaatccctctgcccaatggcgcctgcgcagcgcgactcagaggcgtggctggggcgggggacggctcgtcccaggaagtcctgggtgggtagacgtcgcacccggaagtaaagcggctccgtgacggagcggcggtgcgcgcggcagggcccggagtatcccgctttctttggaggaaaccaccgcatcagatctgcgctgcggcagaggcaggcaagtccctagcgtggaggggcagcatgctggcagcacttggggaggcggtgcgctaagggattcacgctgtaactgggaccgcagcagggaactacaatttccatagtgctccgcgccctcccagctggctctactgccggcgacggcgtggtacacgctggg

SEQ ID NO: 229515 - DNA, 869 bp, Homo sapiens
  chr3:50402181-50403050
  hyper
aggacgcccagcgacggcgggaaggaggccccgcggccacagtctgaggtatcttcctgcggggagagacaaggagctggtcggcctgggcgggcgcaaggccgcgggatttcgggtccaccgccccctctcctcactgtcgcgttgtagtcgaagcagatgtgcgggcctctccggtatcgcggtctctgcactagctcacactgctccgggccgtccgctgggcatgggtggggagtcaaggaggcggacggcggcggcggcacggagggggcgcgcggggcagagggggagcgggcggcggggagggcgggggcaggatacagtgcgtctccttctgcagcagccggccagcctcgcactggctgcacagcggcttctcggccaccacaaagagaagattggtgttggtcagtctctgcgcgtggaacagcctgcgggcagcccggaaaggcggggcgttgagtttgccccgccctgacccacccccatcctgcggccccgcccccggccgctcggaggccccgccccttccatcctcccgagcgtctcgccccgctcacaggttccgcccttggcctctggtcccgccccactgccagcacctggagcagtttccgcagtcgatgatggcgttgtaggaggcgtttaccgagccgaagtagtactgggtctgtttcatgacgcagctgctctcgcgcgtctcggggctcccctcggcctccgcggggtctgcgagggcccagagcgcctcagctccgcccacagaccctggcaaggtctccggcctccctcagtcgtagaccccaccctccccatggagtcgtcttagctcagattggggacccggacttgaggaggcgcctcca

SEQ ID NO: 229516 - DNA, 1175 bp, Homo sapiens
  chr3:50540207-50541382
  hyper
tctggctgtaaagcgccggattcccaccagggagggaacgtggggcagatgcgcggctccaactccgccggacaggggtcgctggccgcccctctcacccaacccgggtttccctctcaccgggtcagcggcaggggaatcagctgacaagctcggaccgcccccccccaactcctcccggggcttgaagatcttgccttgcctcattcgggggatttgggggaagcaggggcaccgcggggaagtttcgcgacgcagccagagcgccgggaccgcggctgccagccttcggggcttggggccgtcgcccccgggcgcagcgggcagccggacccagcgcctctgccctggcgcggagcgcagggaaggagtagcgcggaccgggggcagagcggggcgcaaggctcggccggggtctcgcggccggccgaggccacttacgtgtgctgctgggggaagctgtaggcagaggcgccgggggcggcgagcagcggtagaagcggcagcagcagccacagcgggcgcgggggcccggacgtcgggcgccgggtgccggggccagggtgggggccgcagccgggccaggggcgcgcagtccgcgctgggccgggccgagaggcgccgcaggtccgagccggcaccgccatgtttccattcaagatgcggcgccgcggggagggggggcagtggcggcggcggcggcggcggcggggttgggggggcgcgggcggcgggcggtaactcggcctctcctccgccgccgccttctccgcgaggggcctccggggctgcacgggccgcagcgcctctgcgggctgcgcgctgctatctccctgcagcgctggctccaagcgctctgagcgcccggcccgggacctgcgctcaaatagcagccgccgccaacctgccggcaccgccctcttctctccctccctccctctctcttcccgggctggcccgcccccgcgcgcccccgccgcggccacgcgcccacccgtgcccgcgcgcctctcgtccccgcgcagcccgaatcctgccctactggctcgggcgtcctgcgccccagctgctacccgagcgccccgggtgcgcccccgcccccacacctcagaccctgccgctcctccccaccccacccgcgggaagagtcccgggccccgcggcccaaggcagga

SEQ ID NO: 229517 - DNA, 205 bp, Homo sapiens
  chr3:50604943-50605148
  hyper
gactggcaggaggccggggcggggggaacccccaagcccggcgtctggggctgcgggtccgacccgagatccgccctccctgcaagccccgagccgctggccaggcccgctactgcgcaccagccgcatccgcgagcgctggctctgccggcctgagctagggtgggtagggccgggacccacggcggaggtggggccgggccga

SEQ ID NO: 229518 - DNA, 84 bp, Homo sapiens
  chr3:50605328-50605412
  hyper
ctcaccccgtggcctgcgccgaagttgggcggaggacagtgggtggccaggcccttccgggccagaactcgggacccctgccag

SEQ ID NO: 229519 - DNA, 256 bp, Homo sapiens
  chr3:50606623-50606879
  hyper
cctggttcctaaacgccagctcggagcaatccccttgggctggagccaaatccctgctgtgattttaaggaagaccggcaggtccgggcccccaagggtcaaccccacacacatccccgcactttcctgtatgcaggcctgcgagcgtagagggagtggaattcacagcctccccacccatccgcaggggtctcctgggaggaacccaccagcgataggaacactgaagctgggctacggcgtccgcccgagcctt

SEQ ID NO: 229520 - DNA, 201 bp, Homo sapiens
  chr3:50649440-50649641
  hyper
caggaaaacggggcggggccccgcgagctgaccaatcgcgacgctgaaggtggagccgagcggtcggggagggccaatagcagcgcgtggacccggggctgaagctacccagaggggcaggtcggagagatcagtggggaaagaccgggtcggggaagttaaggaggggcccgggctcagcaacccgcgcccagattgcct

SEQ ID NO: 229521 - DNA, 59 bp, Homo sapiens; identical to SEQ ID NO: 198949
  chr3:50654360-50654419
  hyper

SEQ ID NO: 229522 - DNA, 920 bp, Homo sapiens
  chr3:50712100-50713020
  hyper
gcgagtggggagtccgggtagagggagtcgcccacctgaccggcttcgccccctccggggtttgctgcagctgagggccccggaccagcgattctagaagccggtccggggccgggcagtccaatagcttctcgcggatttccctccgctggcgcgcagcagcggcgcgtggattcgcgcgcgggctcgggacggcgcgagcccgggcagcgcgagcccctgcgcggcagggagtggcgcatgcgcgggcgtcctgcgagcccgctggggcgagccgagccgcggcggcgccgggagccgggcggcggagctgtgaagaagcaagcggcggcacgggagcagcggcgacggacaggtggcgagccttcgcccgcgccgccaggggctgctgggccacccgcggagcctcgcggtccagacgtggcgggggtggcggcggcatcccggacggcctgtgagggatgcgccgcccactgccccgcgccgcctgaccgtccccgcctcgactcgcggtgcgccacagccgggcccgcggccgtccccgccgcgttgtcgcccggtcgccgcgcccgcggggccgcgcccggcacggccatgtggacccccacggaggaggagaaatacggcgtaggtaggtgaggctcaggcctggccgtggcgggggttctgggggacgcgcccagctcccggccccgcctggattcgcatcctcgtgcccccgccactgcccgcaggctgcgcggcctcggcgcggggcgagcgcggggtgggggcaggtgcgggtgcgggtgcgggtgcgggggtgggcgcgggtctctgtgcagagagggcggcagggggcgctggcggtgcggccttggcaggtgcggcccgcgggaggggtgggcaaggcccgggcagttgcccgaggtttctggtgt

SEQ ID NO: 229523 - DNA, 315 bp, Homo sapiens
  chr3:51975954-51976269
  hyper
cctggcaagaccccgcgtattgataggcttccaccgcccgccgggccccgcctcctactgctccattgggtccttctgcaggctctgccacgcccccaggcacccataggatgcacgcttgtagccccgcctcctgaagttcctaggctcccgcaccaggctcgagtaggaagcccgcatctccacggcgcttccggcctgatgctgtggcgcttgcgctctgctgctggcccacttcgaagtcggagcaagagccttctctgtgtttgcgccccttggccgctggggggcgccagagacgcggcgccctttcgc

SEQ ID NO: 229524 - DNA, 164 bp, Homo sapiens
  chr3:51989952-51990116
  hyper
cgccgctctgctgccggcctgcacgctcggggtggccgcacttggcctggcacgctaccgcctcatcgtgcacccgctgcggccaggctcgcggccgccgcctgtgctcgtgctcaccgccgtgtgggccgcggcgggactgctgggcgcgctctccctgctcg

SEQ ID NO: 229525 - DNA, 55 bp, Homo sapiens
  chr3:52001437-52001492
  hyper
cgagtgacatcagctgcgaacaatgaggggtttgacaggcgcggagcccggccgg

SEQ ID NO: 229526 - DNA, 203 bp, Homo sapiens
  chr3:52001981-52002184
  hyper
gcgcgccatcctccgctcgggcttgcgcccaccaagacccgctctcctcggccacccacagctgcatggcccggccctcgtccgcgcaggacaggctggaggaggggcctgagagccgtgtggccctgtgcacccgatcctgtgataaccccaaatctacccccggaattccttttggggatagggtcgcaaggaacgggctc

SEQ ID NO: 229527 - DNA, 115 bp, Homo sapiens
  chr3:52008007-52008122
  hyper
cgggaagcaggcgcgtgctggcggtgacctggggccggaggaggaacgctgggaagaggccgggccccatccagcgggggcggggactgggccgtgctccggggcgccctcttgt

SEQ ID NO: 229528 - DNA, 333 bp, Homo sapiens
  chr3:52009563-52009896
  hyper
tgtctacctgtctgcgtgtgtgcatttctgggggtttgtgtgtgtgtgcgtgtctgctttcctgtgcatgtgcctttcttgtgtgaatgtgtagtcttacggttgtgtgtatgaccgtgcttgagtatttctgaggatcagcctgtggttttcaaagtgtgcatctccatcagtctctctggcttcctgatgcctgactgtgtgcgtgatgtagagggtaccattacaagggattaattgcacacgggccagtgtgtgtgcaaagaggctgcatgtacatgcagggaatagcttgtgcaaaagaaaagcgtgtgggggcaagactcgtatttg

SEQ ID NO: 229529 - DNA, 210 bp, Homo sapiens
  chr3:52017371-52017581
  hyper
cccgaaccagaggcgggcggggacatccgcgccgacgcggccgctggcgccgggacggccctcactgacggtcttcggtctccgccccgacatccggcctcggccacgtggtgggcggaccggggcggtcctgagcctgcgacctcgcaggcgacctcgctggaccctaagtccaggccacagtcagggaagggcgctgagaggcgagcg

SEQ ID NO: 229530 - DNA, 188 bp, Homo sapiens
  chr3:52029759-52029947
  hyper
cagcttttgctcccgacagacacacggtcggtcaccagtcctctccgcagcccgcgccccgccgccacccgtaagtcgcggatggcatcggatgccgcgcggccaacactcaccataagccgcggctcccgaagcgcctagaaccggaagagaaaggggctgcggtgcagcacgggaaatagggtcaa

SEQ ID NO: 229531 - DNA, 103 bp, Homo sapiens; identical to SEQ ID NO: 198951
  chr3:52273293-52273396
  hyper

SEQ ID NO: 229532 - DNA, 131 bp, Homo sapiens; identical to SEQ ID NO: 198952
  chr3:52280023-52280154
  hyper

SEQ ID NO: 229533 - DNA, 139 bp, Homo sapiens
  chr3:52570462-52570601
  hyper
tccagagctgaggcgcctgcgccagctccttcgaggccctgctcggcttcagggagcacgcgcgccctgccgtgctctgattggcggagctgcacgcccccgctgcagtctgattggcggatccgcctcgctttagaag

SEQ ID NO: 229534 - DNA, 321 bp, Homo sapiens
  chr3:52720017-52720338
  hyper
cgtaagtgcgtgacgctcgtcagtggcttcagttcacacgtggcgccagcggaggcaggttgatgtgtttgtgcttccttctacagccaatatgaaaaggcctagtaagtggggtcgggaggcgggcgtggagggacccacgtctggaagttgctgcagccaccacgacgctcttctacggctacggctttgtctctgctggtatgggggtgggagcctacgcgtaggccttggccctatttcctggtagaaccgagagttggaagtccctacggcgatcatgttaaccgcgcgggctcattctgcggaacgaagccgggc

SEQ ID NO: 229535 - DNA, 225 bp, Homo sapiens
  chr3:52739477-52739702
  hyper
gaaagtgatgtgacgctccggggatcccaccaggctcagagatacccctggttagggctccgacaagtcgttcccctcaaaggctcgccgcggccgcccttactgcaggcgatggaggagatgcggatgcagcccgcgccccgacccgccctgccagctcagcgcccgcgccgcaggccccggagcccagcccgttgtctggccgcccgcgttccctgcacgctg

SEQ ID NO: 229536 - DNA, 122 bp, Homo sapiens
  chr3:52740139-52740261
  hyper
ggcttagaaggcccggctactgacgcgcagtgccagaccttacccctcacggtccttaagtctcggtcgccctcgcctcgcagcctgccacccgcgctcagctgcccgcctcctcagccagc

SEQ ID NO: 229537 - DNA, 322 bp, Homo sapiens
  chr3:52804893-52805215
  hyper
gattgctggggcccggcccgcgacgacgccgctgccatagcgatccgggccgggagcagttctgcgcatgctcctgcgtccccaaaggacggccatagagcggacgccacgagcggccagagaggttccgcagccccgggaggacccgccatagagcagaggctccaggaggccagagcgactccgccaggctccgcgcactttctgtgcgtccgttccaccgtccggatccccgccacaacagagtcagggaaagcttcctctttttgtgcacttgtttgtcctaaggccgttacaagtattgttcgttcattctgcaaat

SEQ ID NO: 229538 - DNA, 198 bp, Homo sapiens
  chr3:52931643-52931841
  hyper
gccaaggttggggcgggcctcggccgcggcagctctccccacccgcccccgaggggcggggctccggccgggccacggggcggggtcgcgggtcccgctcccctctccaaccccgccacgcccgcaggtagacaggccaggtgagccggccaccgcagaccggaatgagagcctgggaatcacgagctccaggtccgg

SEQ ID NO: 229539 - DNA, 303 bp, Homo sapiens
  chr3:53164409-53164712
  hyper
tgcccatagcctccgcgccaggctcagacaccaggaaatgccgccgccactccgtttagtcgcgataagatggcgtcacggcgcgcctcgctgtctgattgatggccttgagagaggggggcggggcacgagaagttctggtcctttaagtgggcctgtctcgggccgtctgttatggcgcctggctctttctatttcggtaggttttgcgctgtctgtcgcttgtgcgctgtctgtccctctcttccccgtataaacgaaatagtgtggcgagtactaagagataccgttaaagaatccaaa

SEQ ID NO: 229540 - DNA, 86 bp, Homo sapiens
  chr3:53195914-53196000
  hyper
gtcctcccggagccgcgcccccggcccacgctcgccgccccctgccagtccagccgcctctccgctctaccgcggggcccaggcca

SEQ ID NO: 229541 - DNA, 264 bp, Homo sapiens
  chr3:53289956-53290220
  hyper
atggtgcggcaggcggggaccgggcgcacacgcggacacacagagatagcggctgctcccgcggcgacaggcggctgccgaggccgggcgcggggcgggggcgcgttaagtcgccgggcggggcggggcggggatgggagaggcggggcagggggaggaggcggggctcggatcaccccaggccttcagccccgccccgcctggggccgcctcctgcccgctcccctcccctaggcgctgggccgctgcggactgcgaggttag

SEQ ID NO: 229542 - DNA, 302 bp, Homo sapiens
  chr3:53381571-53381873
  hyper
gtgggggcggagtcgcggacaggaaagtgccatcgaggcaaaattcccccatctgcgtcagtcccctcaacttccgcctctacgcgggcctcgcggcagggcggtacgtcagccattctggtccgccgcgcgcacgctccgggcgccgggttccggcgttgtcagggtccgcggccctacgatgtgggcggtgtccaaggctgcgtagtggagcttgcaggctggagctccggcgcttcctttccctgagctaaaacgactgggtcctgggatctggcctctagctcgcctgccgagctctt

SEQ ID NO: 229543 - DNA, 136 bp, Homo sapiens
  chr3:53528264-53528400
  hyper
cgagctgtcccccagcccagaaatgcgcggggaggagcggttcatccgcaccccagcgccgcgggagacactggcgccgcctgcctcctccgggtcccggggggagagcgcaccgtgcggcgcggagggggttaac

SEQ ID NO: 229544 - DNA, 75 bp, Homo sapiens
  chr3:53528797-53528872
  hyper
gcatggggggagcgccgagcggccccggcggccgggccggcatcaccgcggcgtctctccgctagaggaggggac

SEQ ID NO: 229545 - DNA, 415 bp, Homo sapiens
  chr3:53879618-53880033
  hyper
gtccctgggccacccacccacgaattacgggggcgtgggtggaggctcgttaaatgcagatcccgggcctgacccggacctgccgtctggatctcattttaggcggcgctagagatcccgggccagggaaacttgagaaccgcagctccaaatcgccagtgctgacggcttccgctttgggagccccaggtgttgctgtccgaactcacttggtggaaacagacatttaccagaaagcctggggtcgggcagcgggcactcctaccgctctaaccccgcgtagctgaaagaattcgctccctcaaaggagtcagtgagcttcggcagtctgcgttccacccgtttcgcttcgcgcggcggggcgattgtgtaaagcgggcccgggtctcggcgtccagcccggccccaaacctcc

SEQ ID NO: 229546 - DNA, 273 bp, Homo sapiens; identical to SEQ ID NO: 198958
  chr3:53925898-53926171
  hyper

SEQ ID NO: 229547 - DNA, 92 bp, Homo sapiens
  chr3:54154849-54154941
  hyper
acactgcccgcgggcggggcgcacctggcgctcctggagaggggcctgttccttgcgttgccccccaaggtgggagcgcgacctgccagagc

SEQ ID NO: 229548 - DNA, 2454 bp, Homo sapiens
  chr3:54155219-54157673
  hyper
atgaacccaggtgtctggtgcgccgggagccccggcgacgttaggagcgcactccttgctggggtcaccggagttgcgcttggccgggcaaggatgactcagcctcactccggtcggtctttaccgccagcctgcgcgagggctccacaaagttcccaatcacaccccatacctcgcacgggggagaggggttctgcaagctgggtcccggggtgggggcagcggcgagagaggcggggagaagcctggttcccagaacgcgcaggggcttctccggcttcctttctcctcgcccctgagggcggcgagaaggcgcctcctccggcgctcactgcctcctgcccagtgcggtgggcgccggagtggggagcaggcaatcccccaggctcggagaaatcttttatcccgaaatccagggtgtcccccggtcaggatcgactcggcgccgcgttggcttcctcgctcaaccctgacatcccggtccccaccagtcaccgcagccgggcggactccgaaggcagcggccgctggggagccccggggcctgggtcgggcgcgcagggggccgctgcgctgcggccggatgccgggagccccgcgctggtgcgcccaagccgtggtggcagcaccgccctccgtgctttcccctgtcgggcgccgcggccggaggagcagctgcgggcggtcacgcagcgctgccctagccagagccccgagctcccacccagtcccatccccagcccgatccgccccgcgtgcgatcccgcctgccgccgcgagcctgtgctcctttctgagatttctgcttcttccccagctccctccccgcaggagaatcgcgcggcgggggcggagggcgcgccccctttaggttccgcggcccccgaccccgcccggcccaggggcggagcgggcatgctacgccctctcctagcagccgcccgcaaagtgcggagcgccgcgccctgccctcggcttccctcccgcgcccccaacccccaccctggctagggtcgcccggcccggggccagccccagagtcgcgcccgcggtggcggactgcggagttgtaaagaactcagcggccgcagtagcccgggtggggcagggcgcgctccgccgcggccaaggacactggagtttccgagtccccgcccgcgcggcgcctcctgccccgccgccctcccgccgcggcccgccggactccccggggccgccgaggcggggccgggcggctgctgctgctagaggcgcgtctcgctgcctcctcccccgcccgcctccctccccacctctcctccctccctccccacctctcctccctccctctcctctccgccctccccgccccccccacccgctcctttttctgctccccaagtgagccgggcgcgcgagaggcaggcggggcggcgcggagcggagcaggcagccccgcgcgctcgcccaccgcccgctccgcgcagctccccgcggccgctctcgtcgccgccgcagcgggcgcgtcggagggagcccagcatggccgggccgggctcgccgcgccgcgcgtcccggggggcctcggcgcttctcgctgccgcgcttctctacgccgcgctgggggacgtggtgcgctcggagcagcagataccgctctccgtgtaagtgccggctcctgcgccgcccggggaggggaccttgccgcctgcgacccactgtgcccaagtttgggcgcctgcaggtgcggctgggcaggacccgccgcgggcgtcggcctcgccgctcgcacctgcctttcgggacccgcgtcgggcggcgaggccggggtgggatgctctggcccctgcccgcaggttgccgagtgagatctggagaggctcacctcaagtgacggcaccaactttggagcctggttaccgaatccaacttccatgggccgctgaatttcccccctctttgctctactgccgccccacttctttttttgggggggggatgggtggatttcttctgactgctatttgccaggtgatgcccagtttggggggtcgagtcctcgggcagtggttcgaatgaaactcagtggtctttttagagagcctgggagactttgcgcattcttaactccgcgacccccctcgggccccctcccgcgctgcgctttgcagttttggtgctggcagtttctaccaagccgctttttctatcttttcttcttttaaaacatgttacatcgcactgctccttcagccatagtcccatgtgtgcgtgtgcgtgtgcgtgcgtgttgactgtgacacgggtgttacatatcttcctgtgccccttctccctgtagggtgaagctctgggcctcggcttttggtggggagataaaatccattgctgctaagtactccggttcccagcttctgcaaaaggtaaggtttctgtggtggcaggaagcgatgatttttccggcacagaaaatgg

SEQ ID NO: 229549 - DNA, 609 bp, Homo sapiens
  chr3:55518994-55519603
  hyper
gaggcctcctagggcgacactctccttcccaagcccagaagaagaggtaccaaccctgtgtccagctggccgagtcccatttgctgggctggacccgtggccccttccgtattgcagcggccggcggcgcagcgaaactggtcctctgggggcctccgagggcccctgctgggagagtggggtctggtggtcgggagggatgaagggagcaggggtgggagggagaggggagcagctgcccgcccgcccgccccaaggaaccgaggctcgcaggagtcctacctcaaggcggccaacagggggcagccggcaccgcaccgcggggaagaaaaggccgcggggatggctccgagttctgcgcgcatagtgctaaccccttgagcaccggagcgcacgggggaggggaggagaagacaggggactcttgggccgggcctcctggggagggtcttccgttgagagggtcggggggtggaggagacgaaggctactacgtcctggacccgagaacaactcccctacacacacaaacacacacgcacacacacgcagccaaggatccacacactcggacacacacacatttgtcggcccgcggttcgctgcgca

SEQ ID NO: 229550 - DNA, 2004 bp, Homo sapiens
  chr3:55520345-55522349
  hyper
aataatgctaataacgcgaccccgctccccgcgccggggtgcgcgctggccccccgccaggcactcttaaaggcaaaggggcctgaagcgctcgagttactcggccaaggcaagcctacaatctggcctccgtcggtgcgggggggtgtcggggaaggtgtacgccgctctggagtagttggcccctagttcctctgcgggttctctcaaccaaggagtccctttccccatcccgagccccggccacacaccgtcccggtgcccgcgcagtgggcgcttggtaaatatttgttgaattgaatcattatcctgttactgaaatatacatagtaaattacactcgatgttctcagagcaaaaggaaagtcgtcagtgaaccgcactcagtttgtctactatcgctcttccccactttttctcaaaaatcaaaattgtttgcagaacgggtggtgcgaccagaagtgatctcctgggacactgaggcagtgcgcccggcgtggagggcgaaggggtaggggttcctgccagcgacgctggagttccagcttcttcaggcggttggggaaatggagggataggaagaggcgaagggaactcagttaacttccaacagggggtggggggaagtaaagaaaaaaagtggcagcgcactgaacacctaccttcatggcgagggggagggggcgcggggaggaagtcgccacccgagcgagcgcagccgaggaatccgagcggagcgaccgggttaagcctggggggacggtcaggagcagggctgcggagtcctccggcgcgcgtccggcgggcgcagtgaaccggagctgaagcgggcactggcgcccgggcctggactcccgagttggggcagagctgggatgcgcccaggaatggagggggcgcggacgcgcgcgagccggcagcaagggcagggcctggtcggggcgcaactagggagccgccggtccggcgagggcgcgcaggcaactgttccacggagaggcgctccgtttccaacgtccatcagcgacggcggtaattagggctttccaaccccaaatgtgggcgtgattgtgcaaaagaccttacgacaaataataataaaaagaaattcttcacaagagggtgaaaaaaatgtaccactactcaactgtggcccggggcgggggaaggggggcgatctgtgcgcccaggtgcccccagttcattcacaccacagattctgcaaactcttggcggctcacgcctcctgatctccagctcctcctctctgggtctgtagccgaaacgtctgcttccagacgctgatcctgcagccgcgagttagtgtggacgtctctgtacacacacagacacacaccccaacacacacacccccgctgcagctttggggccacagaacaatcaggcgcgcatggctttttctccgggagatgccgctgaaaacgcacaagtcgccatctgagctgcaagagtcagccccaaattgtgtcctttcattttagggttcggcaaaaacggggagcaaaataggtgaaagtcgccccggaacttattgctgtgcggtgagctggaggggtgcgactaacccaggggagacgcgggctccccccccccaccacgtatcccgttctttctctcttcgggttgatctctcttttccccgtttttccagggcgaagggcgaagagcagcgagtgcaccgcgggcgcgaggctggggaagggcgagagctcggagctccgcggcggcgactcagctccggcggtccatggccggcgaagctgcccacctcctcgtttggcgcccgggtccgaggggcgggagagcgggccggcgggaggcgggcggtcccgggcacaacggcggcggcggaagggctcgctgggcagctgccgcacggaccccggctctgggcggcggaggcggctccgtggagctcgcagcagatttccacgcgatcctgtgccccgcaaacagactgaccgaccgcggggacgcgtcccc

SEQ ID NO: 229551 - DNA, 759 bp, Homo sapiens
  chr3:55522552-55523311
  hyper
ttgctatgcgcatgcgtggtgaggccggcctatgacaaactctgcaggattttaaagccgtactacgggctggggtgccgggaggcggggtacactctccttgtctccccttctctaagttccccatcccccgcggcatctgctgaaagagagaggtccactccgcagccgctgcctgcctgccgcctggttgtctgcgctccttccagagccaccgaccggcgggaggctgaaccccaacttccccgcctggaccccttggctcgcccgcgtatcccagaccgctcccactggggctccacggagactgctgccttgacatggaacctcatgggggacctcctcattcttacctctgggggaggatacttaagcactggggctgatggatagggttaggcgctcacctcctgcaaagtccccagagtagtagggacttgggtagtgggatgcatgattgctcatctggctccggcccagagcatgaggcgcgatgcgtggtcctgccacggagatcttggcgggtgccctcaggtgaggagattgcgaagtttggcaaaaccgggttccgggcaccggaatttctagacgcttccagatgcccgtggttttggggactccggaggggcagggttggtggatttgtgtccgctacctccagcacgccgagggccccaccccacaaacagtgcctcacactggagcgtaatagttattttccgccgtctgcattctccagctgtcaaaggtgaagacaca

SEQ ID NO: 229552 - DNA, 39 bp, Homo sapiens
  chr3:55523371-55523410
  hyper
attggcatgcacttgaccttaaggcgaaaaatccgtggc

SEQ ID NO: 229553 - DNA, 1455 bp, Homo sapiens
  chr3:56501326-56502781
  hyper
atcacagagggaaccgacaattcaccgctcggggagtaaattgcctttcatacagcaaaggcaggtagccgcctaaaatcgatccactcctaaaagagcggaccctccctctctggcaaggagaacagagacccttaagtacaaaataaataaggcagggccgaacggagagtttacgagcgctattttattaccccgaaccaaagcagctcttaatcttcactgtcctaagacgatctttcaaaggctcgtacggtattttttttaattaggtacaccttcgtaagtatccctttttttgtataattaggagatggggaggaggagagaagggatgccgttcagttcaatttcacatcgtattccttttcatacaccatcccctagccctccccgataaatcggcttcattttccctgacacgggttttttaaaaaaaaatatgctcccctctgaacccacccaggcggccagccaccccacccccgggcgggggctccacctttctccactttgttctgcttaggattgctcaagacccccgaccccgcgaacaccccacccctcgaggcaagaggggacgccaggcagaagagggggatctgagagaagaaaggcgatggcagtgagggtggctgccggagagggactgcgggaggtggcccgggcagccggggctagcgagcggcgcccgcgcgctggaggaaaccgtgcacttgttccaatccgggggtttatacatcagggcaaagcctcccttaggccgccccatccctccccccgcccaagaaagccccgtaggaggcggatggttcacccttaggctccccacgataacgcattgcagctccccacgagcgagggggacccggcacgaggaatgcccgggcacgggcgccccgagggagccgggcaccaggcggccccggccccggcgtcggcgtctcacctttccgatgctcgccccggggccgtcccacatggatttttacaacctctcgtcgccttggccccgggcggccaggaggagcaggagccggcgccggagccggagaccgagcgagcaggagcgggaggcggaggaagaggaggagaagcggggcggggaacagggagggaggaaagaagggaaggaggaggacactgctcggagggccagggccaggcgcggggccgggcggggccggcggccgagggggcggcacccgccgcagtcccgagacgcgcgctcgcgcggcgctgccaggcgctgcgctcggcggggcccccacccggccggccggcacgctcgcccgctcgcagaggccctgactcacattcccagcattcccgaggagccgctaggggggacggggctggggcccgggcgcctccgctgggggcagcagaaagcgcccggcatgggcgggggtcttcgcagcgcctcctcccggcaggccgcggcgcgaagcacct

SEQ ID NO: 229554 - DNA, 259 bp, Homo sapiens
  chr3:56590946-56591205
  hyper
tggaaggctacaattgcgagaagcgcaggtctccgccaccgaagctttagactcataagccgggtcaggccaaattccgctgtgcgtaggggaacaaacggcacaaacggggcacaaaaggggaacaaacggcatacgcaaccgtccccgcgggagccccggcccagctcagcgcacccgccagcatgccccaccctgattggtccacttgctcagctcgccggcacccctatatccaattggcgtagcgcttgctgag

SEQ ID NO: 229555 - DNA, 701 bp, Homo sapiens
  chr3:57112574-57113275
  hyper
ccgtctctggctgcgaggcacccacgctgaccttaaccccttggcgtcctccaccctggtgtcctatctcgggattttctggctgctcggtttacaagatgcagccgccgggacaagggcctcaggcaggctgggacggcgcccgccgcccggagcgccctgagcccggctcccccgccgcgaagtgacccgcggccctgtgagccgccaccagcagcgcccgacgcgacgctgacctgcgggtgccccgcggggctggagaagaaagttgagcgaaaggggcgcgtcccaggacaggtggcacctccctccccggaagtggctccgggaattttcgctcaaggggctacccggggaacagagtcagggtccccagcaggagcgacggctagtcgaggctggcggtggcactgcccacctgcgctgcgcccagtgcgcccccgtgcgctgggcataccccagaccagggagcgctcagggcccgccggggacgccgagacctagcagggtaactcggaggtgggagtgggggtccagctcggggaccagggcaaaggagggactagaccggaagacggtctcactccgggagacctagcgggggtgtcccgccaaaggggtgtctagccggggagggtctagcgcgggagcgggtttcccgactgcttcccgcactcacctcgacccccgcgctggttcgg

SEQ ID NO: 229556 - DNA, 778 bp, Homo sapiens
  chr3:57198370-57199148
  hyper
gaatggcaatcacccgcgcccatcgcccagacagtgtcaaaggagcgctcggttccacgaagacggctcaatgcacacggcgaaagtctgggcacctctccagtctcgtctcaggcacctcacccagatgacacccacgcggccctttggcggaaaaatatccgcaactcgaagcagggaaggaggatatcagccgcgagaccttcacaagacgaagggctgaaccgggaggcgaagtttctcaggaggtcccggagtcagaggaggggtaggagtggggtgacggccccaggcgaggaggaacaaagctactagaagagcggggcgcatccctccccggtgctccaagtcccctctccggccgcccgggccttagcagggttgtggactgaaagtccgggagaatacccccttccctctccaaagcgcaacccggtccgggtggctcgggggatcccagcccgggacacgcagccctgggacgaaggaggtcccgggccaagaacaaagggtggggcgcccggcccagccccgccgcccctcacgcccgccctctgaatgggaccccggccggcggccgcacctcattagcaacacaaagccggggtcgggcagccgctttcatctcggccagggccggaggacacgcgtccggggagggaaaccaggaggatgcgcgggaggagtgagacccaggccggccgcggaccccgcgaagagcagacaggttggcgcgggctcgcctccccgcgagcacctgtgcgcgctgcgtcccccg

SEQ ID NO: 229557 - DNA, 516 bp, Homo sapiens
  chr3:57204028-57204544
  hyper
gcctggcctgggaccgccttgcctgggacgaaaggccccagactcagctgattcctccagactcttcctgtctaggacgccaaaaacatggccttcctaaacccagccttggcgcctcctgcacagcccagagacccagggcggcggacaacagaaaacctggggcggcggacccaaccctgcgcccagaaatcccaggacgcccaccccatagttctggagcggtgcgtaccttggccactacacggaattcaccggcccacggccacttcccgtttcttttcccggaggaaaagaagagcggatgtctagtctccaaggtaaccgcgagggggcgcgcgcagtccaggtcggagaccgccgccccagactaccctgcactgcgaccgcacaacaagtctttctagatcaaagccgccagggcaggtgggagtactctgctgttattcagagctggtgctaagctttaggggaagtagagtccagggggtcgtaagaaaacggatcaaatgggtc

SEQ ID NO: 229558 - DNA, 113 bp, Homo sapiens
  chr3:57261453-57261566
  hyper
tgcgggaaaagtcaacccgccccaaattcccccgtgtggccctaactcgaggctctggctcctcgcgccggcaagctgaggaagagacggtcccctgcgatttagatacaaac

SEQ ID NO: 229559 - DNA, 174 bp, Homo sapiens
  chr3:57261815-57261989
  hyper
ggagagggcgggccggggtcagctgcggcgggcgggccggcgcggggagctgtgggcggcagctgcgtctcctgccaccgccctccctccgccacgatgccggggatcgacaagctgcccatcgaggagacgctggaggacagcccgcaggtgaggcgcgggagctggtgggcg

SEQ ID NO: 229560 - DNA, 139 bp, Homo sapiens
  chr3:57262340-57262479
  hyper
gggagagaaaccccgatagtcttatttaatgatttccgaggctcagcaagctaaggaaggaaatggatcgtttttctttgggagaggctgtaaggttgtgtgtggagccctaatggcaaagcccgtgacgggtcccgga

SEQ ID NO: 229561 - DNA, 196 bp, Homo sapiens
  chr3:57541812-57542008
  hyper
ctttcgacaaaaccgtggaatctagtattttcctctgacacctttatattttcttcacttccctataattctgacctatcgtgtaggtaaaaattaatcttcagagtattacagacatgcgtgcccacgcgctaggcgaaagtgcgagtcggaagcacttcattccctctcttcgctagccggaagtcgcgagatc

SEQ ID NO: 229562 - DNA, 305 bp, Homo sapiens
  chr3:57583320-57583625
  hyper
gctgaggcacatgcgtactgggagacggacaaagtcccacaatacctcgcttcgtcactgccaaatcagactcagggtgagacgcttccgcccggatgaaggtattgtcggggtgatagtccttgcttccggaaaggcgagctgagcattatgggttaggtgaggaacctcgccctcttctattacggtacgcgcgatgggtattccctgatgccatgaacttacacgtttcacacacgggaccagacgcttgctttagttgacgcatgaagaccggtccggtcttttgcggagaaaagtggtta

SEQ ID NO: 229563 - DNA, 99 bp, Homo sapiens
  chr3:57678589-57678688
  hyper
caggccccggccacggccatcgtcctcttcatcgtcctctggcgcgcctcccgccgccacaagggccggcgcctcgcggccctcggcccctgccaccgc

SEQ ID NO: 229564 - DNA, 41 bp, Homo sapiens
  chr3:57741912-57741953
  hyper
ccctctaccaacacggcttccgtggcgtcgttcacgtgaca

SEQ ID NO: 229565 - DNA, 62 bp, Homo sapiens
  chr3:57742969-57743031
  hyper
caagggggaaaagcggccgcgatctcaaaccaaacacaagaattggcgtgtgactcatctgc

SEQ ID NO: 229566 - DNA, 622 bp, Homo sapiens; identical to SEQ ID NO: 198968
  chr3:57994558-57995180
  hyper

SEQ ID NO: 229567 - DNA, 166 bp, Homo sapiens
  chr3:58203325-58203491
  hyper
accacccatgccaacgcgccaggacttgtcaccacgtgggtggcagatctgaagcagcctgtaactatcaagttggcctttccaggctgaccacaagggtgcatggtgaggacacaggaccgagaggcaaagggcttctcacagcgcctgacgtgggaaccagcag

SEQ ID NO: 229568 - DNA, 48 bp, Homo sapiens; identical to SEQ ID NO: 198969
  chr3:58223132-58223180
  hyper

SEQ ID NO: 229569 - DNA, 179 bp, Homo sapiens; identical to SEQ ID NO: 198970
  chr3:58224037-58224216
  hyper

SEQ ID NO: 229570 - DNA, 144 bp, Homo sapiens
  chr3:58292072-58292216
  hyper
ccccaagccttggcgggtccttgcggcgaataggagtctggtcaggcgtcaggctagtccgacgaagagtgggtaggtggaagccttccaaagagcggcggttgtctgggagccgtctcagttggccgcgacccgggcgcatgc

SEQ ID NO: 229571 - DNA, 64 bp, Homo sapiens
  chr3:58318385-58318449
  hyper
gtgttccctggtccgaagcccggagctaagggcaccgggtctgcggtgcggctgcgaggagcag

SEQ ID NO: 229572 - DNA, 484 bp, Homo sapiens
  chr3:58419468-58419952
  hyper
aatacaggccgcgcgctgctgcctacctcccgaaggggtctccgcaccaagccagacaccgccgccatcttggtcgtgtcctctatccgctgccaaacgacaacagaggggccggcagacgtgagcaggccccgcctccaccggcgcgggccaatggcaaggcgcgccggctgcgtgacccgcccacccgcccaccgggtgaggggccgcggggccgggctgaggtggcgtgtgggtggccgtgcccctctgcctggagccgcctcaaatcaactttattgacagtaggcggtgaccgacaggcggggtgcacgctgggcacacgtgcctggtcggtgttacttgaagcgtggggactagaagtcagaccctgaggagcatgatctctggaagctggagagaccttaagagttaggccaacctgttgtgggtgctggaatcctttgggcaccaagaagtgcttgcacacgctctactgatgggg

SEQ ID NO: 229573 - DNA, 203 bp, Homo sapiens
  chr3:58571201-58571404
  hyper
gatctcccccaggcggggcttaagcgggaagggcgagcagttccagagcgggccgcgcggggcgcggggacaggcaccgccgctgcagacgcggcagctggtttgcctcgcgcttttggctccagcggtcggcaggcaggcctacgggtggggcgagctccttgcccaaggcagagggtagctggcccgtgagcccaagtccc

SEQ ID NO: 229574 - DNA, 173 bp, Homo sapiens
  chr3:58572571-58572744
  hyper
tgctcccacttacccgaccggagcagcacagcccggtagagcccggtggcatcggagggcccccgggcccactcgcccagcctctgcgccatgcccccgcgcctcctactgcagagccagcactgctggccccgcgagcgcacagcaggagcgtagtccggagccgaagcgcc

SEQ ID NO: 229575 - DNA, 494 bp, Homo sapiens
  chr3:59035464-59035958
  hyper
gtgggaaagggcttcgtgcttggcccagacttgggcaggctcttctcagcccctccggcccctggtcagctccatctcccgccctccatcagcaccattgcggctccagcctccgcggtgcccgggtctggggagggcgcagctgcctggacggactccgggccgtccctggggagtgattgtgtgtgtaacctacgtgacggggcgcccagtcgcggagccacagacaaccgcccgctggcctaggaaaagcgggcgcgctcccgctgccgccccaccccagaatcaaaccgcgaaagagcagcgccgagcgccacccgcgttccggccgcgcccattggttcccactgggcgcctgcgcgttgcgctctctaggcttctcgccgacgggcacgggaggatacgcggtgacgtagcgttgcccaggcaaccgcgggactcctggagaaatggtgggcggtccaaacggtgagcagcacgctccttacttaggt

SEQ ID NO: 229576 - DNA, 578 bp, Homo sapiens
  chr3:61237049-61237627
  hyper
cccactgggtggccgcctgagggacccgggaacagagggcaaaaagtcctgtgaccggacagagcagagcggggactgcaattcccagaagaccccacggtaggggcgggacccaagatggccgcttgtctggggacaggagcggaggccaatacgcgcagagcatgcgcctacgccgggccaattgaaagccatagtgacagtaaccctgattcaggggcgggaaacactgaccacagaagacaagttgaggtgagaatccccttacaagggggtttggggcataaatcgcacaatctttggctttttctaactagaaaaagaaacatgattcttttcacgtgtaacgaaaggctgtaccgcacttttgcttttttctttcctcccaaaacgcgtttaactatcccttcacgacttcccactggctggatttcttttcgtttcatttccccactctggatctttctggattccttaagccttcttttctttatgtgtctctcagaaacacagacttgcagtccctggcttgatccatcaaataatgtggtcatttacgactacgctcagccctccct

SEQ ID NO: 229577 - DNA, 320 bp, Homo sapiens
  chr3:61546308-61546628
  hyper
cctagtcctcccatttcccccggacgcctctccccgattgctaaagaagcagccgctccccgggtagctgccaggaaatcagtccggccccgcggcgctgctttcaccctgcagggtgtaagaggcgcacttcctgcgccctccccgcggccaaaccggggtgcgggaaccttctccagagaagctgcgagttggggaaactccgccaccgatccatcgtggcgccgggaaaggggatgcggggctcggaagggctagatttcgcaatcctgggatcgacattcctcccctcccccactttccccagccttggactgggc

SEQ ID NO: 229578 - DNA, 42 bp, Homo sapiens
  chr3:61546988-61547030
  hyper
gcctccctcctctctccgcgcacgggctacaatcgcccccag

SEQ ID NO: 229579 - DNA, 1429 bp, Homo sapiens
  chr3:61547630-61549059
  hyper
ctgcctgccccaggcccggggcatcgccgccggccgccgactccgcgccctgcccgatcggctctctcctttttaaacggaaagcagcctttctccgccgagaggatcgtccccagcgtggctctgcgttcccggtcactttttgagattttccggggggcgctcggcggcttcccggattccaaggggactcgggccgccgagcgcggggggcccgtggagcgggcgagccggggaagcgccccggcttagcggaggctcgcacggaggcaagaacttattcaacaagtttacctccctgctttcctcttttcgatgtgcgttttcggacatgcggaggttactggaaccgtgttggtggattttgttcctgaaaatcaccagttccgtgctccattatgtcgtgtgcttccccggtgagtgccggccgccgaggggatgcggccccggccggcgcgcgttggggatgcggagttgtcgcctgggcgcggagctccggcgcccgtccgggagaccctggagagggtggagggtggcccggcgcccggataggagaaaaggattgctccgctggcttggatgatgtttagggaggcaggctagtggtcgaggaaggtggaggcaggggctggccggggagggggctgggggacgcgggggtctgctcccgctcccttttgggggtcctggggagctggaatcgggagaaagggggacttgctttgctgactcgtcgccgatcgggagaactcgagttgtggggcggttggggagactgaggccatggaaaggatgcttctgtgggtttggggggcccgggatgagccccctcgctctggcgggtattgaaggaactcagaaggtgggggtttgctttgctgttctccatccctttgggagggctaggtttcggggaatggaagtcggaggctggctgcggaggactgaggatgtgtggggagcagcctgcgttctgggtcgggggcgtcctccctctctctgggggctggggcgcgggcagcacttcggtgccggcgtgaggcagcctccttgggcgcagtgagacggcagggcgcaggcggtttcggagagatccgtgtctcccctagccccggcccgtggccctttccctccgctgctctgctcgattggattgcctgggtctggacgcggggagggggcgggggcggtttcggcggccggggcggtttcggcggccgggttgctgttcgcgccggggctgatttttttcctgtctcgcgcgccctgcctaccttcatctttgcccttttgcaggctgttcgcggctggcagacccagtctcgctcctttctggccaggttaagacaggaacaatactggccgttgataagaataaatcaccgcacgtaacggtgtgcggctcggcgaccctccacttccagctctc

SEQ ID NO: 229580 - DNA, 44 bp, Homo sapiens; identical to SEQ ID NO: 198974
  chr3:62254650-62254694
  hyper

SEQ ID NO: 229581 - DNA, 31 bp, Homo sapiens; identical to SEQ ID NO: 198975
  chr3:62254724-62254755
  hyper

SEQ ID NO: 229582 - DNA, 669 bp, Homo sapiens
  chr3:62304494-62305163
  hyper
accctttcaagccaccctcccgcgcgccgcgttaccacacgcccacctcctggttgccgcgactacacctcacgaacttttcgcgccccaaggcggccctttataaagatgcggtgacgtcaccgcgcgccgcgcgtgcgcaaatatggtaacgtgaccacgccctggcctgcgctaaggccccggcgtcggcgcagtagctggtgccttcccggaagggctcagaggcgggctcggtgagtggagtcggacagtgggtgggtgccctgactgcctgacggccgcgcagggccttgcaggaccgctggggaggatgttgttaacgtaaagagccaggctgatgaggaaggttcatgagtcctttgggtataagcgggagttggggcggccggagggcagatgactctgagaaggtgcggatcttcgattctaaggggagaatgtgatttggttttgtctaaagtgctgatagtgggcctcacagaaaagttaccatgaaccgactttccgggattcccttggcgctgcattaattggcctcgttgcaaaaggaaaccgagaggaaggcggcaagacttggcctgcgggtgatgttagcggaaaatatctgtaatttagaccccggagggcgggcctgtgagcgattgctgtccgcggtgctgaaggaaa

SEQ ID NO: 229583 - DNA, 620 bp, Homo sapiens
  chr3:62353298-62353918
  hyper
aagatctcccagacgtaatggggggagagcgctaataagacactattgtactatatgaggacaaggaaagggagctgactccttaaaccggcctgcagtctccctggggatagatgtctgggaaaagcaaggcgatattttcatatccttagccgccaagtcctcctcgcccatcctggggtttcctggggtttgtggcatccaccgagatttcggagttaaatctgcatattcctctgggtcccaatctcccctaagcgaactgcagccagaacgagctaacatttaaattccccctcgcttcctcttcccccctcccctggctgcgtcttcctagacttgaggggaggaggggaggaatacaaaaaaacgaggacgctctcctttcaggaaatggaattctaatgtacgcgttcctatttctgaatcggaggtactaaaaatacccccgcgacagcctgaggaagctgtcgccgtcctctgtgcaaacaaaatcgacaattctccttccccgcgcaatgggtctgcgaattgggcggcgggcggggacagaaccgttggctgaccaggacacaacctccatcctgccccagagcgtctttctccgagccccaaccccg

SEQ ID NO: 229584 - DNA, 264 bp, Homo sapiens
  chr3:62354297-62354561
  hyper
ccgccgtggaaatacgcgtggggtcagctcccagccacactcgccccctcaatggggaggttgcgtggaagcgcactcccgggccccgcgccgcacttcctcctggcgctggggaacattgttccaagagacgtgggctgaatcgccgcgcggatattaaaagtgtgtgtggggggaggcccggagcgacgcgccagtaatccgagctcttgattatccagattcggatcaaacggggcggcggcggccggccccctcctggga

SEQ ID NO: 229585 - DNA, 85 bp, Homo sapiens
  chr3:62355813-62355898
  hyper
tgtcgtggagtttgcgcacatgtttctttaagtcaaagtttctgcaaaaccctttgccgcaagtggcgcacgtgaaaggcttctt

SEQ ID NO: 229586 - DNA, 286 bp, Homo sapiens
  chr3:62356105-62356391
  hyper
ctgctcaaaaaaggcgacgcttggctaggcgggcgcgacctcttcgagtgaagaagttgtcaaacttcgtaagcgtcaagccgggtgctctcccgacaagaccgagactgagtcccgcggagccgctctgcgctcctgctctgcccgccacagaggctggtgcagcttccctcccgccgcgctccgcgggccgggaaacttttgcgtagcccagagacgcaccgagtccttctcctggctgatgcctcgctagaagaaattcgcacgaacccgggcttcatccttt

SEQ ID NO: 229587 - DNA, 697 bp, Homo sapiens
  chr3:62356631-62357328
  hyper
tttccttctgtccccgtgcttccttcgacctctcgaattcggagtctctcagtgcacccagcctgcatacagcgtggtctactaaccccgctaggagagcttccccctacaccaggcacaacccgattctaaagaaatgctgcgcccgcgcctgcagatttcgccttctctctccagatccctctttgccttcctgccagccagccgcgacccgagtcctgaggtgaggtgagaagagaaggcctcgcctggcacgttacctttttggtgaaagcctttgccgcaaaattcgcagacgaagggcttgtagcccgcgtggatgcggatatgcgtgttgagcgtggagctgcggttgaacgctttgccgcactggttgcatttatgtggcttttcctgaggaaaggggcgagtgcacagtaaggagaggccacctcgggaacacctggaagggacatcccccccacccccactcaaccctagagggtaagggataatctttggccatcgtatccccggtgttatcactaagattctgggggttgcgcgcgggctaggcccgacccgggggccacgtacctgggtgtggataattttgtgcctgcagagcgtgctggcctggcgaaagcctttgccgcagactttgcacacgaacggtctggctccggtgtggaccggcatgtggcgggtgagattatag

SEQ ID NO: 229588 - DNA, 1049 bp, Homo sapiens
  chr3:62357619-62358668
  hyper
ccaggctgccccaaggaagccgccgccgccgatcgcccctcccggcccccctcgccgaaccctgggcctcaccttgccgcacacctcgcaggtgaagtttttgggcttgccatctgcggagcctcctggcagcttgctgtggcccttgacgcctccgcgctcggcagtcagggccgagttttccttcagtacctgctccagcggcgccggcaagcgctccttatggggatagggagccgggtgggggaacttgtccgcagccaggccggccagcttggcgttctccagcagaaagagcttggggtgagcagccagggcggcgggggcctgcgcattgaggaggccagacgggaagaggtggccgctgaggagctcagacggcgggtacgcggtcgagtccaggtagttgaagtagtagagcgagccgctggccggcagccccacagcctggttgatgacctgcggcttgatgaccctgcccgcgggcagcgcggacggcgccaggcccagctcggccttgcagcacacgccacagttggttttgcacaagccgctggcgccgcacactggggcccccccgccgccgccgccgccaccgccgccgccgcctccgccgccgcccgcccggaggctgcttttccagagctccgagtaactgagcagtgtctttgacggcacctcgtagcctaggggctggagggggatcatacagggcagcggcgagcagaggttgagcagtttcttgccctggctgccgtccgcctctagcgctccaggccggggctcaaagggcgcacggggctccgacgtcttggccatgatgcgctcgatggaaaaggccagtgtcttggaagtggccggcgacgctccggcgcgcgggcaggccgggggcaccatggtctccagggaagccgagcttgccatggcgcgcggagctgagccgagccaggctgggccagggcgcagcctctctcctctaagtctgcattccggaaaaggcaggggggaaaactgcaatttaataagcacctagtcgggcccgggtcacc

SEQ ID NO: 229589 - DNA, 1745 bp, Homo sapiens
  chr3:62358930-62360675
  hyper
ccggagagccacctcgcatttacctctttcccccaccaccaaggagatgcgttccgagccatgcagcgtgtctcttctgtcacattttgatggcaaacatcttcccctccgcgtgagatcactgtcttttacattcagctgacatcacatgaagtcacttgaagtggaatgacatgggcggcggcgcggctcccgtagcggcccctgtgttcccccgcgcctgccggccgccgccaccaccgcccctcaaactttaaaaggaggcaactggcgcccgcgctcctctcgggaaagtgcgagcggtttgcgaatagggaaagagggaagagacgggagggggagggggaggaatcgtgatggttttgccggtggaaggaaagggggggggggacccaaacccaaacctaggcagagttccgtgcgtgattcacaactttggaggcctgcaggtttgggggacgcggggagggcggagggtcccggacgcggcgcccccaaagggcccctgggtatcagtctagtagccgaagtatcccttagccctccgcagccgagctgggcatcgtgctaataaactgccatttacccacggaaccggcgccagccccgaacacgcgcaaatgataattacctcattaggatgtggcgcatggacgcgggcgccgcgtttggaggggggaacttgttaatggggaaatattaatttatgcaaaagcaatgagctcgccttggctggcgtcggaggtcgggagaaagctcccactgactaaggacgaccccgaagcgtcacggagagcaaggccgctcgccggcatctcgggggcctcggcgccgcgcaggtgcgcctccagctttatggccagctctgggtctgaggctgggggagactaaaccgagagctggaagactttcggagatcctaatagatcagaattgttgatttatgatcgggtttctgaggcaaagccgagttctgcttctggtttagggctgcgtgcggggaggattcggagggcagctctcccagctgatgggtacttactgtttgtataattgagaaggtcccatctccacctgtttaaggagcagattgaaacagcagaacctccccctggatcctattaaaacgtttttcctcctaaggccattcagtcgaaccaattttccgaagtgattcatagagctgaattctgccaaggcagctctttcacttttagccactaaagcaccgcgtggaaccgggttttgtgtttttctaaaataaagagaaggattatcagagaggagagggagggggcctgaagggggacgggcagagacttagtgtggccagaggtacaagcagagggaagaaaagacccttttctagacaggccccaagtaagttcggaggaattcagcgttttgtgcctggcgcacaaaagcagcgcgctccgcgcttggtttggaggggctgaattcatctgtttgcagaccattccacctgcgtatcacaacaaactgctcaaagacgctccagcactttcaacaggccgggtgctcttggcgacaacaaaagtggtcgaggctgagggttcttacggaggggggtggtggtggctagcaagagagcgagcgagagaattaggtttaggaaagggggaggactgggtgcaagggttttttgaaaagttttggctggttttgttcgcgggacaattatatcttgctagccagcttttgcaagaccacgagctttgtagccg

SEQ ID NO: 229590 - DNA, 405 bp, Homo sapiens
  chr3:62362688-62363093
  hyper
gtcctaggttgccctgtgtaatccccgggcgcccaggcccgtggccttccgattcgctccatggcgtgggttgcagcccgtcacgcacggccgccgggcccgaatccaccttggcgccttccctagcccgaggcctcagccccaggcctatttcacttggagcgcctcagcctagagccggacgctttggcttcttcgccatctggccctaggttgggcctcaaactcccggcggcggtagggaaacagacgatcacagttaggcctgaggcccctcggcggcctgtgtccttcccacgccgaagaacaaggcgccaaggccgggcgcgtccgctgctctgcggggcctgaccggggcggcgacctctgggatccgcggcggtgcgacgccgcgccctggccaag

SEQ ID NO: 229591 - DNA, 65 bp, Homo sapiens
  chr3:62363628-62363693
  hyper
ctccccagggagccgagcagcttgggaggagaaggcttgcttgcggctcccgagtttggggaaac

SEQ ID NO: 229592 - DNA, 173 bp, Homo sapiens
  chr3:62364157-62364330
  hyper
tcgggtaccctcccggagcacgcaagcacagtcccaggcctttagggacagatgggccagagccgtctgcatctgcccgcatcctttgggaggctgcgatgatcgcagccagggtggccgagcgcccggcccactgcacccggcggctgttttgcagcgcccctggcattcag

SEQ ID NO: 229593 - DNA, 675 bp, Homo sapiens
  chr3:62364748-62365423
  hyper
taggaatctgatccaatacccgcgtgcagcaatttgccagcagacgtgtcattttgtaaggcgcagtgagggaaggaagtcgtctcgcctacctgggttttccacttgctacgcgattttggtgtgcaacccaaaggaaataatcgtttatagagaacgatgatgatgtatttttatatatgatataacacacacatccgtgtatgcatatttgaaattaaaaggcgttttggtgactgactggccctgcgtagttgagagatgtcggtttccgactccctgggaagacggcttaggatcctccgcgttatttaacttggcagctggttaaactccgcggtggagcctgcccaaaggtattagcgttaagtgctgagagcaggagttaagccggcagggaaaagggaccggaaggggtacaggggtgagggaaaccgatttcagacttcccccaacttctgtaagtttgccaggcaatgtaggtctgagttagatggtgcattgaataagaacctgaagcgttgtgatcgctttgcaagcgaatctctcagctctgttttgtttgtttgttttgtttggctttgataagaacttctcgtgtgtaccggcaaacggaaaagttctctcttgcccgcatctctggagctctcagtcgaatcccatcttttctttacc

SEQ ID NO: 229594 - DNA, 2111 bp, Homo sapiens
  chr3:62859447-62861558
  hyper
agccagaaggtggcggcgaagtcaccttgggaagaggagaatagggtcaaagacaggacggcggaggggctgacccggacggaaggaccagagggcgtgcccctgctctggggtcagtgaggaagggtcagggggactggtgagaactccagccataaggaagcagtgcccgaggacactttggcgacgctagtcggtgatcagctgacccgggcagggagaggagggtgcccttcgcagagtcacgggaagcttcgccttctgggcttgctttctcccgcctgcccctgcggttgctctctgccccagcgagcggagcgctgctccaagacgctcttctccctccacctcggcgcccccacctgccgttgcccccgcccgccgaacgcacgcccaggagggcgggcccggagttgagcgcagccgcccgccgctggagagcgctgggagccctgcaagcgagcaaggcctctctgggcgccgcgggcagcaaatcactccccgagcctctcggtccacaaagcgggacctgcctgcctcgctcaccaacgctcccgggctgggggggctcgagcaagcggcgctgcgctccgcggccctcgccggtcccagtcagctccaggagcgctccaggctgggttgggctgggcctgggcgagcccggccgctgggagggggcctcgtagccctttccccagggcgcggtctccacctctcctgctcctcctcgccagctgcgccgccagctcccattgttcaccccgcccgcctggcgacgtccgggtgctgctccctgggcctcccaggcgcacctaccttctgctgccggcgagccatgtcggtgggctgcttggcattaaaggggtaggcgatgcagcgcatcacgaacacatacagctgcagcctcttcttcctctcctcctcctctttctgcagccgctccaactcttccttctccttctcgctcaccaccgacgggctggggctggagggccggccgccgccagcgcggctgctgggttgcagccccccggccccgccgccgctgctcgcgccgctgcccccgccgccgcctgcacccaccccggctccggcgccggcgccgccgccccccagcccggcgctgccggccgagccctcgctggtacggctgggagacaggcgcgcgccggacggggccgagccgagcacctccttgccgctctcctcctccacgatctcatccgattcttcttcgctggacgaagggtccagcatagtggcgcctggggagcggggtctctggagcccccggcttggagtgcaaaaggtggggggcgctggaggcagccggggatcagctctcccgggtgggcgcttctccccaggtcagggagcgagagcgctgctgctcagcctcggccgccgcgactgatcctctgcccggcggtcgcgagctgggctcagacccagaagcgcgaagggaggaggggaagggagaggtgcgtccgtggactcgaggtgggcaagggggagaatcaattgcgagccccgagcccgcagccggatgccatctgcggctgctgaaggaggcgcctccagaaaagatgccgagtgttgcaagctgtcgatgcagccaagagccgaagaggcatcttgccgattggggagggagcggcgcttacgtgtttattggcttaactctcccgtgtccgcggcgtaaagggctgctgcagagggctggaggggggagagcgcggagcgtcctcagagcctcagtacttctgaccccaataccttgccaccctcctcccctgccggcttcgtggataatttttttgttgatatctggctctcattgcctcaaccccttttcccctcccgcggacaaaaagttcttgggggagggagaaatccagaaaccagccgagcgggctgtttggagacgctaaatcgagaggtcttacttaggaggaggaagtccgtgagatcttatacgggaaagaaagggtccatctcctttccccaggcttctttacacctggggcgtggggggcgtgggggctgggcagcgtgtttgtcccacctgtgtaaactctgattccagcaacttattccgcatgcgcccagtc

SEQ ID NO: 229595 - DNA, 178 bp, Homo sapiens
  chr3:62861813-62861991
  hyper
ccctaagaactcagcggcgtcaacatctaatgcgtcgactgtcgcactctgttcacccctgcctctcgggtaaactattaatacaaagcagcagatggtgcctgccttccccgtgctcctttcacttaggccagtaaacctggtaaacgagggagctggccaacgtgctgaatgtaac

SEQ ID NO: 229596 - DNA, 1139 bp, Homo sapiens
  chr3:63263853-63264992
  hyper
tgtgggccctgcctcgcccacctcctcgccctcccctctggagcgcggctggccaatgacagccttcccctggctccatgggtttccccctcccctgttgtatctaccctgccccagctcttccctgcccacccctcgctgactcgcttcgcttccccgacgcgctgggttcccggagcgcagagcccagcgttagcgggtgggctccccgaggccccctgccctcgccgggctgctccagggtgtcgctcctctggctgctcccgaaggggcttctggccctgaggacggtggtgccaagcgaacttcatttttaaaaagaactggtggatgagaagagcgagcgagggcgagctatggaccctgtgagtcaggtgagacagaactgggcagggcggctggctgggagcagggggcgggggatgccgcggcttgggagaggcgcccccagccccttcctcacgctttgctttctctctctcgcctcattcccccaaagctggcctctgcgggcaccttccgggtgctgaaggagccccttgccttcctgcgagccctggaattggtgagtagcagtgtgtgtgcagggaggggcgccaggcagccagctatcaggtgaggagaggtcggatggggtgctccctgctcagttctgctccaagccggagattcaaccctcaagccggggatttcaatcctgccccctcctaagatgccgttccaaggtggtgaggacaaaatcgaggcaccctgcttggaggcgggagtgtggacgcatttttgcaggggcttagacaagtgtcgtctcacctcaccgcttgcagacgcgcaggggctgtggaaagaaacctcccccttgggagataggggaggggggcgcatggaagggctgccgctgggttctggcccctcacctggaccttcgtggggatgaggggatgggtggagggacccatagttgagcggaggagccgggaagacttggccaagctcagaaagttggtcagaactgagacagctcctctgcgggactgggatgctggaagcgcgtgttcaactgctccgcgggagcttcagggagggaaagatgctgcgaagctattacagactgttataaacggcggcgggtagagagcaga

SEQ ID NO: 229597 - DNA, 40 bp, Homo sapiens
  chr3:63850067-63850107
  hyper
cgctgggggtccccgcgaagttggcgcccacgcgcgctgg

SEQ ID NO: 229598 - DNA, 695 bp, Homo sapiens
  chr3:64430605-64431300
  hyper
cgcccgccctagaccgggctggtgctcccggaaagggggcagcagaggacaccccaaaagacggccctaaagtccccgctagagctccaagtggctggacgctggagctttggtgctgggattccgatttgcccggagggagggggctttccagggatcccccagactgtgaccctgagggccacggttcgggtctcactgtcgcccagccggggggtcggaacttaacccctcccgcgccttggagcgctctctcgcgccctggacgcgccccgcccgcggggccggcttacctggggccacaggtgcgcagccgcggggcgcagtggggctgcgcgcgggcgctcgcggccggctggaggtgcccggcgatcggccccgctcgagcgggggacactcaccgagcggctggagagtcttttccgggagctccggctgaacatggccggacgcctcctgctcgcagcgccgtccgtcggtccgtccgcgccgcggccgggagggcgggtagcctgggcgggcaccctcggcggccgctggcctggctgtctccgccttgcagtccccggctcgctccggagcgcacgcctacccctcctcccttccctctgcctctccctccacgcccgcaggtccctccctctctcccggcatccccccgccctcccgggttcgccccgcggtccaccggctct

SEQ ID NO: 229599 - DNA, 1323 bp, Homo sapiens
  chr3:64671301-64672624
  hyper
cacatgcgggggtcgacagagagtcggggaaccaacgtggattccctgctaaatgctatttggcagcgcaagaaggcggcctccccgccctgcctcagtccctagggaaacgtgcgccgcaggctccctctctccactccctggaacccgtgagtagtagaaaccccagaggaaccgaaatcacgtccggacagcctctccaggctgtctcccactatcccgtttctcccggccaccccgccagtagggtgcagagttggactgcgctgcacccccactctcggttccaccccaattcaaagcgtccggggtaggctccgccttctcccccgcccccagagccctcggcccacccttccgttcctgggacgggacctgctccctgtcaatccagttcagcctcagggttcctggcgcgtgaataaaggccctgagagaaagcggggactctagattacgcaccgccctccacaacacacactgaaggaactcccagtgccttgggcaggggatcctcagccccacatccccgatgcaaggcgcaccaataaggagtctggtccgccctgcgctcagcggctccgctcccgggtggccaagtttgctgcagggaaccgcaactccagtaactttctccgagtttggaaactgacttccaggccgcctcgcagcgttgggcaacgcgccgctgaaccgagtccaaactccagaaagctctgaaacatccagaagcccctgggggcgggtgtgtgcgctccacgccagtgtactcgcacgcacagagctagctacccaaaccatacgagtttctagctgatatttaacgccggagaggagcggagcctcgccacagtgagggtctctaggcttagaggacaattaagtcttctagaagcgggcgaggaggcggaaggggagaggaggtggcgcgcgcccacttaccattcctgagcagaggctgatgacggccgtgtgctcggagttggtattgacatagcctttgtagaaacagtgcttgagttccgcttcctcttcggaataaaacttggtctgattcaccccgggcgtcccgaggagggtgacagtgaacagtggagcgataaatccggcattggcggtgagattaaatagaaactgctggccgaaggcagagaggcggtaatgcgcctgggaggaggtagaggaggaagaggaggaggcgaaggcaggccaggggtcagtggcagagttaatgctccgtcgcgttcttttgaagtggacgttcgtgggaaagggttctccgagagcgttcactcggatgggagacacgatttcgtattcgct

SEQ ID NO: 229600 - DNA, 187 bp, Homo sapiens; identical to SEQ ID NO: 198989
  chr3:66023466-66023653
  hyper

SEQ ID NO: 229601 - DNA, 361 bp, Homo sapiens
  chr3:66024122-66024483
  hyper
cgctcccctgcacacgctcgcgcactcaagccatcataaaacaaactttctgggcttccccgcgagccccgcacaggcgcccgcgagctttgtttgcattccggtgcctctgggtccacgttccggcgcccgcccgtgctctcccggaccagagtccactctgcgccgctcgggttatttttttttccttccttcctttctctcttgccttttacaaatgcggtgcctcctctttgcctcccgcccggctcgcctctcctcgctggcaggctgttactgagggtgagggaagcccttccagccagttgccgggagccctgaagacgcggtggcggggcggcggggagcagggcgggaggta

SEQ ID NO: 229602 - DNA, 183 bp, Homo sapiens
  chr3:66024663-66024846
  hyper
tcccgatgggtcctaaaaccgacctgccgggagaaggcaactcccccccaacccttcctgaacccctatcctctctccttttctttcagtgccctggactccgcggattcctttggggctggagggccgcacacgtgttttactccaactgtttgcaacttttgaaacccgggcaatctggct

SEQ ID NO: 229603 - DNA, 160 bp, Homo sapiens
  chr3:66025206-66025366
  hyper
tcttacacacacccgcatccttaaactttgggaccaactttttaggacacgggaaactacaggcaagagagagaagccatggtgctagtgtgggttcaggtattcaaccaaaaaagagatccctctagcttttcaactgccctgccagcagagactgctg

SEQ ID NO: 229604 - DNA, 68 bp, Homo sapiens
  chr3:66551834-66551902
  hyper
atacgccctctgcgtcaagaaggggagagaaagttaagagggtaaaacgcccccgttttggggctgtc

SEQ ID NO: 229605 - DNA, 99 bp, Homo sapiens
  chr3:67048277-67048376
  hyper
gcttgatttcataccggaagctagtcactggcaggaagtttacggaagaagaaaaaggtaaaaaaatgtgccgggggccaggagagaggcctaaaatgg

SEQ ID NO: 229606 - DNA, 582 bp, Homo sapiens
  chr3:68056798-68057380
  hyper
ggggaccagttgcgcgcccaagtttctgatgctcagttctgaagtgctcccagccctccacccgcctctccaaatcccatcaatggcctcctccccccatccgtcgagcttcctcctgctgcgtagtccagcgtctacgccctcgcctttccctggctcctcagtcggcctggacaccgatactaggctcttctgtacagccctccagcaataccttccggggccccgcttgctgcctcctggggctcagcttccctgctgggggcaggcatgtcagagcgcggatgcagcccagggtcctcccgcgcgcctgcaccaggctgcagcgagcgcgcaagcctgctgggtgctggagctcgggccgccccgggagaaggggtggggctggcttgtgctaggggctgaggctgggggctgtttctgggccctgccaccctgtttcccccagccctggtctgacagggaaggcgagggggcgctggtgcccctgcaggtgggcagggaaaccgccctcttcaggacgcgcttgtatttctgcatcctgtgtcctgagcctggcgcgggaaccgccactcaaaccct

SEQ ID NO: 229607 - DNA, 1040 bp, Homo sapiens
  chr3:68980932-68981972
  hyper
ggggggacgctgaccggctcccacctgcttgctcctagaaagatcctagctcagattaaagggatgaagcgctaaggtcgacttgtccagaaaagagctcacggtgagttcaccaccccctataccaattcatcgagtggcctcctccgcatcagcagagcacccccggggattctgtcagacatgaaccccgaaactggaagcggccgctgcctctctccagccacacatccttacttcggagtgccccttccaacttcgggttgcacgccgacctcagcacaggcactctccccggcgccccagagagccgggatgaggggagctgcaccgagctgagttaactcggtaccagccgagaggcagcggctgcccacgagacagcacctaaatacagggtccaaatccacccccaccccatcctctcgcccctccttatcccttccaacccttcttactcgactagagccggcatccaagtcggaccggcgcgtccggaactaggtactgatcgccgcaccggagcccgaggacgctcaccgtgccgcctccccgcgggagccccgggagcggcccatcacctctgcagcctcgccaggagaagaaaagttcccacgtctctaccaggagaagcccgaagctcctgcgggagaagcctgaagctgctgctggagaagcggcagctgaggcaggactcccgatgtttgcccgcagccgcgcgcgcagtcggtgcgccccgtccagggcggcgcgcagctagcagtgcggagccgagcccagctagcgcgctgaccaggaggggccgggcccgccgcggaacgcgctgattggccgggccgcccggctgctcctgtccctgcctggccccgcggtccacgtgggccggccttctccccgccccgcacccctgctcaggcggcgcgcccccactgccggcctccaggcgcctctcccgagcgcctcgctgtggccaccactccgcaggtgctgagcaaaaggtattcttcctgaatacctgagagtcgcgttgagctccacat

SEQ ID NO: 229608 - DNA, 111 bp, Homo sapiens
  chr3:69434906-69435017
  hyper
caggtggagcctgcttcccacgagtgcccggcatcctgctggggccctcgggtgccgcgcgctccagctcacctggtacacgtcctgcagcccgcaccacgtccgcagcac

SEQ ID NO: 229609 - DNA, 276 bp, Homo sapiens
  chr3:69591882-69592158
  hyper
agggaggaagggagggggcgccctcggcccccgccgcacggggctgcgggctgggctagccttccccggcagagaaagggcgccggtgccaggaggcgcggagcggtgcctgccaggaggaggggaaagagggggtcaccagcccgcgcctctccatcgctccctccgactcctccaagctctgggcggaacttgattctgcctcaccggcttcaggcatcccaggacctgagtgctgttagaataaagggtatgaggcaccggtggcagagggag

SEQ ID NO: 229610 - DNA, 630 bp, Homo sapiens
  chr3:71113096-71113726
  hyper
ggggtaaaaagtcccgtttccactgaccgtccttcatgcagttctgacagttgagttagctacattcagagccggttcagctgggagtaccccgtggcaattcctcagtctgctgcacgtccaaacccaaaccccgctcactacttaattaaccagccaagtaatgcaacagaggcttagaatccccaacctgccagagtgttccattcgctcgctcgcctgctccggtgtggggctctgtgcctctccctccccctttactgtgtgtgaactcgtcgaatttgaacagctaagctgaaaatagcctagacagatatagaaacaaactatcagaagcaaagaaacatccacatgggttacactgagatggaaggctccttgtatatttcacacgctctgaaagtgacagaaatcacaccccagatacgtcccccgaacggagtgatggcgagggcttcaccaaagtggctgcgtgaaggccagaccggcagaaaatgaatcgcaaacgaaaaagagagagagagaaacacacaagcaggacttcctccaactctcaactacaccccacccatgaacatttaaaaaaagagagcgagagtgtgagccaaagagcaaggggggtgggggggt

SEQ ID NO: 229611 - DNA, 88 bp, Homo sapiens
  chr3:71114746-71114834
  hyper
gggtggaaataaataacaaccaaacgtgcctcgtcgctgaaccaggcgacttcccctctagaacgacagctgccgaagaaagcatctg

SEQ ID NO: 229612 - DNA, 608 bp, Homo sapiens
  chr3:71630565-71631173
  hyper
acattcctcgctcccggtgccttatcgctaggctcgcgccaccccggctggctctttggggacggagaacccctagtgccgcctggggctctccggtgtccctggaccccgcgcccgcggccgcctcgacttacccgcggagtccggggagggagtaggagcgccgccttcacgcccgcggaggaggcgccggcagcaccatggtccccggcgccgctgccgctgcccccggcccgctcgctcgctcgccgcgcgctctcttcctcttacaaactttcgggttctgcagtcgacaagaaaccggggcgaccctcagcaagtcttccccgtgcaggctggggggaactgaaggggacgggacgggtgagtaggccgaggggccaggacagagagggcagcgggctccgaggacccgcgagtgcgcgtggagggaagagaggatgcggctcagggaatccctgcaaggatccagagaccgggaaatcggcccgagccaaagtctcagcaccttccccaggatctcacaaagttgcaacaacaaaaaggaggggggaggaatagggagaagggggtgggatggggatacgatcacgggcgcaaggtttgga

SEQ ID NO: 229613 - DNA, 122 bp, Homo sapiens
  chr3:71631593-71631715
  hyper
tctcggcgggacaggaatagagcgcagggagctcgggaggaaggctgcgcgcaagcgagggacggagagccatcggccgccaggacagggccggagggacgaggcgacacgcgcgcgacgca

SEQ ID NO: 229614 - DNA, 62 bp, Homo sapiens
  chr3:71633202-71633264
  hyper
ggccaacacgtcgcggagggagatgttgttattttttgctgttgtgcgtccctgacgtcaca

SEQ ID NO: 229615 - DNA, 1409 bp, Homo sapiens
  chr3:71802518-71803927
  hyper
cctctgaggcctcccgaccctgccagcccaggcaacctcccccgcgcacggccaccgtgaccccagcgcgggcgccgccgccggacccccgttacctggggccaaacgcgacttgtcgccaccttgcgtcctgggccctgcctccctcccggccgcctcccgaccccgcggctgctgcggaggcgcccccagcccagccgggcccaggcggtgcgggatgcctcggcggggctggcggcggcggccgcgctgcgcgctccggcggaggggagggggctccgcggcggcggcggcggcggcggcagcggcggcagcggcggcggcgggcccggcggggggcagagccaagaggcgcggcggcagcagcggaggagtaggaggagacggaggaggatgcggggggctgcggacggtggcgaggccctgtccgcagtgaagcccgcggcgcctagggcgcagggagtggccgcctcctcctgcgcgcaccattcctgagatggcggcggcggcacagcggcggctcggggagcccaggaggggccggccgggagcgggctgagccccgcaggacggggagctcgcccagggccggcggagcggcggagctcgggccgggcggcctgcgggagcggcgaggcaggggacggccccggggcggagcgcacggcctggtgaggccgcgatggcgaacgcgagcgagccgggtggcagcggcggcggcgaggcggccgccctgggcctcaagctggccacgctcagcctgctgctgtgcgtgagcctagcgggcaacgtgctgttcgcgctgctgatcgtgcgggagcgcagcctgcaccgcgccccgtactacctgctgctcgacctgtgcctggccgacgggctgcgcgcgctcgcctgcctcccggccgtcatgctggcggcgcggcgtgcggcggccgcggcgggggcgccgccgggcgcgctgggctgcaagctgctcgccttcctggccgcgctcttctgcttccacgccgccttcctgctgctgggcgtgggcgtcacccgctacctggccatcgcgcaccaccgcttctatgcagagcgcctggccggctggccgtgcgccgccatgctggtgtgcgccgcctgggcgctggcgctggccgcggccttcccgccagtgctggacggcggtggcgacgacgaggacgcgccgtgcgccctggagcagcggcccgacggcgcccccggcgcgctgggcttcctgctgctgctggccgtggtggtgggcgccacgcacctcgtctacctccgcctgctcttcttcatccacgaccgccgcaagatgcggcccgcgcgcctggtgcccgccgtcagccacgactggaccttccacggcccgggcgccaccggccaggcggccgccaactgga

SEQ ID NO: 229616 - DNA, 72 bp, Homo sapiens
  chr3:71833747-71833819
  hyper
agcctccaaaagtacttgagaagactcagagagaaacttctttcagcctaacagaagaaaaatgcgaggagt

SEQ ID NO: 229617 - DNA, 34 bp, Homo sapiens
  chr3:71833999-71834033
  hyper
gcgaccctccctttgcctctagcctgcccttcag

SEQ ID NO: 229618 - DNA, 193 bp, Homo sapiens
  chr3:71834933-71835126
  hyper
caatcccacatcacccgcgacgtgaaaggatttgtccttccagctgcgggactcctatttgtttatttcaagtcagaggccttccctttatgcccacatctgttcccgaccctctcctctgattttcctcacatgtatttcctcccctcttcagccccgcgccagctccaggcacagccgttcagggtgatgc

SEQ ID NO: 229619 - DNA, 402 bp, Homo sapiens
  chr3:72149792-72150194
  hyper
agctctgctcagcacgggtaagagaataataaatcggtcacttcactatccaattagcagctgttgctccccgctggaggaagaaaacaaacaggaagaccctgccctgttttgtttaggatcaaactcgcctctgtaccacctaccggagggactctggggtttgagttctggggacaagcgcgtgcccctgcctccgaatgagctccttttacgtgtgagtcctgggcacaaaaccacagccaccacaagccgcggatgcttccccagcgggccccgcgaagggaaactccgtgcaggggcaaagctgagttttgcaaccagtgagcgggagcccggggggcgtggccaggctgaggggatgcgttgtcctggtaacccgtaacttccagaaccatccat

SEQ ID NO: 229620 - DNA, 558 bp, Homo sapiens
  chr3:72787765-72788323
  hyper
cccaggaaatcctgcgggtgccttcccccaacgaaagccactgatgtcgcccctctcctcccagcagcttccagaccgcgaccttctgtagctctgctcagaacttcacctggaacagcttcttacaattcttaaacagcccctcagtcgactgtgattaagcatacactccagcctcagcaagcttggcgtctgcccctgccgctgggagaccctcctccaggcacctgccctgggccccgccccgcccggtccgcgcgcacgcgcagtggccccaccccgccccgccccgcgacgcccgaggacccgacggagctacacccgctagttcagccaggaggccctgcgcggctccggggagagctgggtggttatgccacctcattagacacattggtggacgatgccgcggattagcgggttggctctcagggcggggcgcaggctttctcactgatccgggagcgtgggagcaggggcaacgcggggccatccgggagctgcccgcctgcttcgcagttggctttccgggccctcgagcaacgtctgactttgccc

SEQ ID NO: 229621 - DNA, 254 bp, Homo sapiens
  chr3:72897526-72897780
  hyper
ctcactgccgccgcgttcccgccacgcaaactctccaactccccacgcgcaggaactctcggtgtgagggacggagcttccggctcgaggcggaagtgctcgcgcgtaaggcaggaagtctctccccacgccaatctccatggagacgggacgccgttcgagaagaggcggaactttcaaaacccccgggcggagaaagggcgtggcgagtggtgcctgggagccggcgttgaaccggcgggatgactagcaac

SEQ ID NO: 229622 - DNA, 633 bp, Homo sapiens
  chr3:73673899-73674532
  hyper
tccaggaccttgtggcacagcgcgcacttcaggtccgggtccacgtcgccgtcgaagcggtccagctcgaagcccatggtggcggccaggccccggggtcgccgccgggcggccgggcgccccctccctccccacgaggcggcccagacaggccggctacgccgcccgcgcgctcgctggctctccccggactgagcctaattgatccagacttcctcggaaaatgcccgaggaacaggactcctccggccgtatttgcgcgagcgcgagcgcacatacatcgtgccttggatgcctcccgccagccccccgaaaaagggaggaggctggaaggcagaagcgcgtgggaggacactgaggctcgccagaagggacgggccagcccaggacgccagcctgaatcttctcgggaaactcctttctgttctcttacagtctacgctataggagacaaaacgccagccgagaaaagctcgctgagtttggagctgaggctactgctttctcccaagggttctcttcgagccccttcccgaacggatcaaaacttttttactcccttctccctcccccttcctctagtggctgattgcagaggactaaaaatatcttggggcccgctatctcagcact

SEQ ID NO: 229623 - DNA, 72 bp, Homo sapiens; identical to SEQ ID NO: 199008
  chr3:75471467-75471539
  hyper

SEQ ID NO: 229624 - DNA, 544 bp, Homo sapiens
  chr3:75955829-75956373
  hyper
gcacgggcagctcgcgcgctggaggagggaggcggaaggacagcgctgcgccaccacccggaggagggagcgcggtagctgcaggcaggggagggagaggaaagaaaaggaaggacggctcccagacagagagtgggagaaaccggggagcagcgggagcagcaggtccggggggagctgttccgctgcgctgccctcgttattcacacggacgctgcggagcttcccagggctgcttccctgtccccctgggtggaggctgccgtctaaacctgactccaggtgagttcggcaaagaggtgaaccgaggggtctcgaaccagagacgtggcattggcgaggctgctcagctcccccaagcgctgctgcctttatatttcccaaattcacggaaggtcttggcggtggctgcacaggctgggagggggcggagggtcggtgggtggttgcgatcctcacggccagcgtgggggcattcggatggaattagcttaagtgaatggggttttaggaaatgtccccaaaggcacgcgttatatatgtg

SEQ ID NO: 229625 - DNA, 339 bp, Homo sapiens
  chr3:77087670-77088009
  hyper
gctcttcctcagacggccccttctggagagaacctttcctaatattttccagtagggggaactaaagactcaccatccagcatttagctcggctcggggacctgcgtgagttcctataagccgccttctcatcatctgaacaagcatcaaacggctaccagcgagcctgtgatcacacgtgggcccggccgcaccggggcaccgccgacaccggcacccctttgatctaacgtgaccttccttcatcatccccggtcctgaatggcatcctttggtagtcttggtcttaattttcagagttttgtcgtctttgggctgaaattcggcttctttttgagc

SEQ ID NO: 229626 - DNA, 360 bp, Homo sapiens
  chr3:79067251-79067611
  hyper
ccctagtgcttagacgtgcgtttgcccagagtaatctgggcgtgccctgaacttggcaaaaggccgagatctgcaaagagtcttgaggaggttcaggggtggaggggaggttttggggagtggggaaaaagagacaaccccaaatgcgaactaggaacattttcgcctaaaagtctagcaggaatcgagcccctccggccttaggagggaggggtaaccaaaatacacttctgggtttgatcgtgcaaagtggagagggggcgaacagggaggatcaagggtgaagaaagaagacgcggggttacctgaacagagacatattaatccaaacaggtaaaagtgagcgggctccgcaatcat

SEQ ID NO: 229627 - DNA, 729 bp, Homo sapiens
  chr3:79067817-79068546
  hyper
aggtttgtcttctccggccccaggatttccgaggaggctcagacactttcaagaaccatccaaagcgaacaacaaagagccgaggcagaagcgcagtagtgccgtttcctgcctccacggtcttgcggagcctcccggcgtgcgcccccacaatgtgcggccgagcgccgctgcgagggcaggcgcggcggcggcggcaaagttggggtgtgagagctgctgagggagggccaaaaagtgcttctccgtctcccggcgagcccagtcagcagcgggccacccgcggcggcggcgatagcagccaaagtagaagcagcagctccggaggaagggctcggggtgccgggagtgtgactgggtgactccgcgcgcagagagcgagcgagggggcggtgcggcgacagcggctgcctgggcgggcccttgttcccatcacttgggggatgcggagggtactggagacagcagcaggaccgcggacactcgcacgtcttctgggcgcccccagccccgcgcggcgcccaacatcgccctcggcccctcgccctctggggcgctcgcaggcacccctaaactacgcagaagcccaaacttcctgggggcagctgcctgcacccctggctcgtggaagctgtaaagaggcagctcccggctctccccggggtggcagagaagggcagagaggatgctgctgcgggtgggagagacggccgccgcggctcaccccag

SEQ ID NO: 229628 - DNA, 73 bp, Homo sapiens
  chr3:79068799-79068872
  hyper
gaatccaattgctcggaatcggaaatccaggcgaatgagaaactgtcttgtttctctcgccacccctagctcc

SEQ ID NO: 229629 - DNA, 513 bp, Homo sapiens
  chr3:79815581-79816094
  hyper
accccacccatctgcgtgggacacagtgactcctagaagggtatcccaggattttagcggccaggtgtgagcgccctccacgcggtcctccgagacctcagggcgcgtggcaactgggcagaagccgtctctgcagcgccgctgccccgggtggagcggcagcccaggctgcagcagtggggttgccacgccgagttttccgcatcggccgcccgcagggctcgcctgcttctccccattgtgttctcagagctgtgggacccagccgcgcgcgcagccgcacccgcgccaacgctggaaccgaaggctcatggaagcggggctggcaagatggggcagggagaaggagcaagaaggggccccagaagggcacggcgtttcatcaataatgcagaggctcctggacctccctgcaatacgttttccagctaaacgccaccaactggagcgcttcctggttcgtcccactcgtgtggtttttgtgtgtgaaagatgggacgcacctttttcatt

SEQ ID NO: 229630 - DNA, 1054 bp, Homo sapiens
  chr3:79816294-79817348
  hyper
tttcaaagcccccacgcgcatccattcctggagaatgctttcaaagtttggaagctccctgcagcctgcccgtgtctatgcctcagtcagctcacatcacgaacaacggtgcggtcagcggcactgagattaggctgcaaagttgcccggccccagcccactacaccgctgatgctcgccgcatccctagagcaaattccgctgtgtgcccccaagaagccaaaagcggcacgaaacctactccaacaagggttagcccagccacacacacaacaaacaaattccaaaacttctttgttaagcagccgcagcctacctggaacggacactctgcacaactggcaaggaagaaacaaacatcgcatccctgcaggaaaacttgttgaatccctcccgatcgcaaggctgcaatttccgatttagcctgaaggtttttgattctaccccaaaacaccctggcgcatcagccacaatttctggataaactgcagagtcctctcggcaaccattctgcactccaacaaccactagtgtaaaacccagcgtgtccccttttacaaatcaaaagccagctgtcacttcccttgcaaccatttccgagacttacccttccataagactgttttcagcaatctagaggctccgtagtgcagacgcagccctgcaactttgctgtgcactgagacctttccgagtttaaaccaagcgaaaggtgacagacttttaaacctaagagtggggaaatagggagagagtgaagtcgggtttcttctctgtatcagcaccctggaaaaattcaatccttcttcagtagagaattctttcaaacccgttatctgtattactattaatgcgcagagcagaaggcattgcatacaaataggtccaagtgtgcgcttctattggtggctgcggaggcccctgggtcctactgctccggtctaaactacacagcaacactaggcacgcagctttggagacgccgaggggaaaatggatttaattgattcgttacctctggtattgtaatgcctgctgcgatgtttaaccgagg

SEQ ID NO: 229631 - DNA, 125 bp, Homo sapiens
  chr3:81810245-81810370
  hyper
acgtaccctatggcgcaagaccgctgattagaacagaggggaaaggggatgaggaaagaagtttcttcagcgcccgctccgggcaccagcgctgtcaaacctgccactacggaagccacagaacc

SEQ ID NO: 229632 - DNA, 83 bp, Homo sapiens
  chr3:81810985-81811068
  hyper
ttcctccccttaacggttttttcctgctggcggaggtcattctaggaggtgggtcccaagctgacctcgctcagccttggcct

SEQ ID NO: 229633 - DNA, 91 bp, Homo sapiens
  chr3:84597195-84597286
  hyper
agatgtaatccagtagatggcgcttaaaattaacggtctgtaggctgttactcggccgtgcagctctttcgtatttctctgcattcccagg

SEQ ID NO: 229634 - DNA, 1585 bp, Homo sapiens
  chr3:85007718-85009303
  hyper
aggagtccaaatgcgcagaagaacctcgcacccaggacctggcccaggcaccacgaattccagaacatgctggggacacggctaaccccgccccctcgcggtggcgattggctgaacccttcctgagtgcaaagcgctgattaatgaaggcagttgtctcgcctgcaagttcgggcgagacatctctaaagaggtaagatccgccaggggtgctgaatgggggcttcagttcttcctgcccgaagggtccttgagaagcctgtttgtttttcccggcgcttgtctccacccatccccttctctcattggccagacctggtgggcgggggagtttccattggccggggggcggtgtctgtccctggccggggtgggggcggggcctccgccgctctgagcttgcccttgtgtctggtgcttcgtagagctgccgccgtcgccgctgccgctgccgccacagccgccgctgcagccggagcatccgggagccgccactgccgccgccgctgccgctgctaccgccactagcgctgcttccactgcttctacctcccctcccaggaccccgagacaccccgggcgcgagcggcagtgctgcttgcttgctcctcctctcccccagcccttcccctccgtgacctacccactccttgcagccctcgcccgcaccttctccaacaccccggcatccctgcaccacctgctcgggcagccccggcgggctctgggacttgctgtgcgcgccgagaggaaggcaagctccaaacccctgcctggaagacgggctgtcgcggctgcaccaccagcaggaggaggaggagaagaaactatttcgcgataccccattctgcgggtgctttgccgctgccgcttctgctgccgccgatccgagtccgcgggttcgaacaccgcagcggtggggacggtgggtccggcgggcgccgggaggaggacaccagcggagccctgcactctcgtgccccgctcaccagcatctacttgccccctcgttccttccccagccctttagagaagggaccatgatttggaaacgcagcgccgttctccgcttctacagtgtctgcgggctcctgctacaaggtaatccccgccccggcgcagggaacatcaacttctcgcccattccccatcttccccattccaccccatatttccactctcccctcccagtctccctgtccccagcgatttccaccccctccccctactctctggtgcggcagggggcagtggcagtttgcaccagcccctcgaatttctaacactggctcagccctgccttcccagcagtcagccccttacgcggcaccttttgccttctcattcacctgagcttccttcatctcactccattcccgccagcatccccctcccacgccttttggctggcaacttgtgcctctctgaacattccaccctcccgacaacccccaccagccacctcccacatcacgctcttgagcgaccctctccatctcttgtcatctctttaacctcccccttttcaggtcgccttttcttttccccctcttcccaccatcatcatatccgtgtgtctttaaaa

SEQ ID NO: 229635 - DNA, 116 bp, Homo sapiens
  chr3:85009749-85009865
  hyper
atattatcctttcacgtgaaatgtaagaacctctgcgaccgcagcagtggagggaaaccgcacaaaacgctgttattatgcaaatcactgggtttggatgccggatggctaaggaa

SEQ ID NO: 229636 - DNA, 146 bp, Homo sapiens
  chr3:85010662-85010808
  hyper
ccgggtgtctgacacgttacttaggtttttaatccgcgctgagacaatctcacagagaccctacttcacctctcagtaacttgcatttctcagctctgctgtgtgtgtgtgtatgtgtgtgtgtgtgcgcgcgcgcgcgccggcgt

SEQ ID NO: 229637 - DNA, 1158 bp, Homo sapiens
  chr3:87039596-87040754
  hyper
ctgctctcccttcccggctctctcgggatggctttctgctcaaggacgctcccgcagatcccagagcatcctctgcgccacgcgtgccggcgggacgtcgccgagccccagaccgatactctcgatgcccttcgcccccgcccccagcaggctgcccgtccggtgactcacctgctggccaggttggggcgccggctgatagtaggctgtggggcaggttgtcgctgccatggggttgggcagatactgggacgctccataaggctgggggtgatacatcacctccgcacaactcatggcagccggggcagtggcggcccccgagctgccgccgccgctctacgcgctggcgcgaggggcgcgggcgccgccgccgccgcagctgccgcctctgtcgctgctccagctgctactgcggcgaaggcgggtcctcggcggcctcgggctccgcgcggggcgcggggtcgggagggactggcaatcagcgggggcccatgcgcgggcaccttcatcttcagcccctccggatgttccctgccgcgcttatatagcggctcagggacgcagccgcccgctgcgccgctggggcattaccgcgtccggctcccgcgagggctgcggcgcccacggcagcgccagtcacagccacagcccaggcccgggtcgggcagccgtggggagcccagctccggtttgcatatacacaatgcacgcccggggctcgtcctatcacgggtgctcccggctgtgcgaggacagggaggcgggggcagagggagggggaacgccggggagaagggggagcactttgcctccccaggctctgacgcggaactttgcaaagtttctccaactcgctttgcagcgggcgggtcaccctgcagggggaccccggggaaggctggctgcggattggagcgaagtttgcagccctctccgcctcccagcatgggatggtggtgggaggggaatggtatgcagaggctccgcgccctcaaggctcggcaggttcccaccctgtctctgtcacctggccgccagggcgagggcttccctactccaaggagattttacagggaacaccaactcagaggctgggaccaaacaaaagccgagtgtacaaaggggtaaaacagagcaggcgcagaatacacgggg

SEQ ID NO: 229638 - DNA, 65 bp, Homo sapiens; identical to SEQ ID NO: 199014
  chr3:87276369-87276434
  hyper

SEQ ID NO: 229639 - DNA, 1099 bp, Homo sapiens
  chr3:87841626-87842725
  hyper
cccgcccttctccacgcatcagtgaaagaggagggaggagacggaggagagaagaggcagggaggcgaaaaagtgacagaagcaagagagaaagggagagaggggtgttgaaggaaggaagggaggaaggcaagaggagagggctgctaggcgtgctggagagcctggggcgtccgcccacccgcaggcgccccggacccgcaagggcggcgcaagacttccccagcgcgcagtcagcgtcgcggccccgaaagctggcgacaggcgctgctgtcttcccgccccgtggggtcgcccctgccctcccgcgccccggggctgggggcgccaccttgccagctccgactgctgcagggagcgccaggggtgagtgtgcggatcagcgctgagcccgggagtgcgggtcacgcccgcagctggcgcgcaggtggggaaggggtgtggggacgtggggagtgggaggctggacagcgcttgctctcggcggaaacgctgggaagccggcgccaagtcctttcccacactactttgatctaacagcgcaggaattcaagaattgccctttcccttttctgcccacaacctctgctccctgggggcgaagttctgtggtgctaggcggagatagtggtcaaggctgggaggaagggaggggtctgacccgggcccaagggcgaggggtggcggtccaagccggcgagaccccacttagggcgcaggctcctggcgctcctacctcgggaagccgctggggtggagagagacggggcacgggccagaatccagcagcggaaggaggggagagtcttcgaatccatctctcggtgggatcttgagaggattcgcgggggggacggtaagataaatctgaggagctggaagaagccgtagatcggaaatcgcttgcagttttccaactttatttcccgcgggtacgaaccattaaggtaaaagggtcagagagagcttctacctcgcggctgcagcttgcctagttgccgcaggtctgactcaaggtagggttgttggcgccttcctgtttggaggggcaatcaagcaaaagagaaagggggatccgagagaccggcggaatgagggt

SEQ ID NO: 229640 - DNA, 179 bp, Homo sapiens
  chr3:88198587-88198766
  hyper
tgagaggaaagtccgctggaaggcggccaggcacagtggattatctatttttaacttttcatactataatgttaaacaaaactaaattattttaatttacttaatttaaggaaccaaactaccggctcacccaactcagaagtggccgcagaagacattcaagcgctcccgggggcccg

SEQ ID NO: 229641 - DNA, 147 bp, Homo sapiens
  chr3:88199142-88199289
  hyper
gggcccagtgggccgtaggggcgacattgttgccgttgtctttcccccccagtcccggggatggagatgtcgggactcagcttttcagagatggagggctgccgtaacctacttggcctactggacaacgacgagatcatggcccta

SEQ ID NO: 229642 - DNA, 532 bp, Homo sapiens
  chr3:89156553-89157085
  hyper
ttttctcagcaccgcggcctcatcacatcttctgtgtttcctgtcccatgggcgacgcccccactcccacccggtctccttcccgagcagctctgggctgcagagccagctgcgtgccatcccgctctgcttcagcgcacgctgaagacggcactaggacccagggaagtccccgagcggggttcgcggaaaggcagccagactcctccttatctccagtgtcaaacttgacatcagcctgcgagcggagcatggtaacttctccagcaatcagagcgctccccctcacatcagtggcatgcttcatggagatatgctcctctcactgccctctgcaccagcaacatggattgtcagctctccatcctcctccttctcagctgctctgttctcgacagcttcggggaactgattccgcagccttccaatgaaggtaagccaggtaccgcgacgcacggagctctgccccgcggggctcacgctcttcaaagcacgttctcaccgaagccttgcacgtcgggaaggtgcctcc

SEQ ID NO: 229643 - DNA, 380 bp, Homo sapiens
  chr3:89163679-89164059
  hyper
tctttgtgcacaagtctctccgcgcctggctgcccaagtcagttcccggagcgcgaccagggtgccacggcctccgtcccgaggtagggtgggtgggcgagcgcagcctgatgctcttttgctccgggtttctgcccccgggcggacggtgtagactctgtagcgagcggagagcgaaggtgcaaagttaagcgaacacgagcgccaggaggagactggagcgcgcgagaggcaaacgtgcgccctctgcctgctgccgcggatctgctggcactgggagagcacggcgtactccttgccacctggaccctccttacctgggcgtcagtaagacgccagagagtccatgcgccttggacgggcctggcaggtcctgacct

SEQ ID NO: 229644 - DNA, 38 bp, Homo sapiens; identical to SEQ ID NO: 199017
  chr3:93692750-93692788
  hyper

SEQ ID NO: 229645 - DNA, 125 bp, Homo sapiens
  chr3:93698754-93698879
  hyper
gcttatctccggacgctccggttgcctagttacgagaacgagctacctcgagctccgcctccttcttatagagtactcccctttctcttttcctagtctcgcgcaggggcgggtagccaggactc

SEQ ID NO: 229646 - DNA, 374 bp, Homo sapiens
  chr3:93781639-93782013
  hyper
tctaaggtccggccgcccaaagctacgccgaccaatccaagtagcgaaagtcgctttggccctggcccgttacctccgcgtcctgggaagtatcagcctttaccagctaccggaagtaactgcgcacgaaatctcccgcgggagctaagcctcttcgacaagaattctatagcgcgagcaaatcagtatctcgcgagaaattgaagaggaaacgtgagaatgaaagtggatgcccgcgaatcccggaagtcagactgtttttttcagttccctggaggctttttgatactgattcgcgtacacctgttgtttgaaagctctcagcgggacaatgctgacccaggtgagacctggggcccggctgggtacctcta

SEQ ID NO: 229647 - DNA, 2325 bp, Homo sapiens
  chr3:96531740-96534065
  hyper
ttggctccatctcccgctcccctgacctcttgtcactgtgccatttccctcctgtgctttctgcccacttggaaaatatcgtatatcctttacaagaccgctactttctctcctctgttcacatttctccattaccatccacattttctcaaaacattccgacgggttttgaagtggggttttcaacctccctcgactgtgatagccgaagtcccttcaagaaagaaaaatgatgttggaaatactagtaacaaataaagtatcacggaaatccccacccaagcgatacggtttccttgacgcgcccttaaccaaggcgttaagtttagcctgacagcatccctccctcctttcggttcctggcctgatgagccgcctccacctgcgagcggtgcaggcatttttgttgtcgactaaccccctctagcgccgaactggcggcatccgagccgcggctgccaggccgggagaaggctgggcttggccgggctctgcagcgctccgggctccgtccctgccctgggcgcccgcctccgccgcggggcgaggtggtggagaccgcggacgccgagggtcctcccagtcagcacgccgcgttgccccggccctggggcgggggccgcggagtcccaccaagtggcccgcgcctcggcttccgggagacccgagcgcggggagggagtgggtgccgcgagggggcggctcgcgcggggagagccgtcagcccacggcgcccctgcgctgctgtggatgtggccacgcgccactcggcccttggactgctaggagagcgcggcccgacgccaccacgccgtggacgctcggggacccctgaatcccagcgtcaaggctgcgacgatgctcgtgacctccaccgcgaagtcacctccgcaaggcgacgcaaggacctcggcgatcccgggcgccgtacacccgccactttccagcctcatgtaaccccccctctgctgcttcctcccggcgctttgcttttctacaactggaagccgcgaaggcggctactgcgctgagccgctcgctctgctggtcaagtttgggcgacccgcgcggaggagggtcgggctgactgccgccgctgagctgtccccggacgggagcgcctgtccacggcactcaccccctccagcggtggaaatgtggagaagtaagtgggaggcggtgtcgggaactgactcctcttaaaacggtcggcgccgctgctctgaaatgggcggctaagtgcttgtgggactaagggcggcctcagagatgcccggaaaatcgctgccacggccagagtgcggcgcagacgcggcagagttggaggtgtccgcggtgcaggctgctgcccacgccgctcaggccaggtgctgagggctcagcccgcgcctcggccgaaccactctcagccccgttgagccacctcgtccgcccggctttcatcgcaccggccagaggaaagttcccgcggcccccacgcctcttcacagctgcagcgcctcccctgcttttggctccgcaagtgcccacttgagtcgggagaggtcctcgggccgccccaactgcccgccccacctggcagtccgtccccgcccccgtcctcgcggtgaggcgctccccgccccctcgctcccctcccccaaaccacagcccgagctcgctcttgcgcgcgcgcgctctctccggcccaagtgaatagtcctcgcgcaagcgggacactgtggtggatgcaattcccctcgcctccagccgcgaggagctccccggcgccgcaggcagcgtcctcctccgaagcagctgcacctgcaactgggcagcctggaccctcgtgccctgttcccgggacctcgcgcagggggcgccccgggacaccccctgcgggccgggtggaggaggaagaggaggaggaggaagaagacgtggacaaggacccccatcctacccagaacacctgcctgcgctgccgccacttctctttaagggagaggaaaagagagcctaggagaaccatggggggctgcgaagtccgggaatttcttttgcaatttggtttcttcttgcctctgctgacagcgtggccaggcgactgcagtcacgtctccaacaaccaaggtaagggacggggcggaggagcgggagtgggtgggaggaggagggtgcttggagaaccagggtactggttgcctcctgcaggtaactttgtacaggggtcagagtctcctggctcgccacacgaggggatcgaggatgtccccttaccctagcgccctgtttacaccgcccgggacggtgactccacaggctaggatccgttgtgtttctaaa

SEQ ID NO: 229648 - DNA, 51 bp, Homo sapiens
  chr3:97483452-97483503
  hyper
atgtatagttcctcggcgcgcctctgaccttttcccggagctcttcaatcc

SEQ ID NO: 229649 - DNA, 197 bp, Homo sapiens
  chr3:97483737-97483934
  hyper
cagatttccatcccggagaccgatacgagtgcgtccattcctgttgccagctcctgcgccctccggactaacctcaaaaaccaggtatctcctcaacgccggtttttaaagccagcgccaccctctgtccccgtcagttttagaattcctctttggtctttcccatgtttttcactccacgcgtgtagttgttgcta

SEQ ID NO: 229650 - DNA, 37 bp, Homo sapiens
  chr3:97691378-97691415
  hyper
cccggcggtgttccgcgttcacgcccgggcgtttctt

SEQ ID NO: 229651 - DNA, 32 bp, Homo sapiens
  chr3:98241908-98241940
  hyper
taggcattcctggcgccgcgcgcggcgcattg

SEQ ID NO: 229652 - DNA, 92 bp, Homo sapiens; identical to SEQ ID NO: 199021
  chr3:98311894-98311986
  hyper

SEQ ID NO: 229653 - DNA, 209 bp, Homo sapiens
  chr3:98312340-98312549
  hyper
aaggccatgttcccgcactatcacctggagcagtgcctgcgtcccagagccctgcgtttgagccccccacccagacccccggagtattgagccggcgagctgcacaggcggaaagaacctttcgagaagagccgctgcagcgtcgggctccggaggcgggggcgggaactggggcgcgctgggagctgtagtccggatcctatcgccgc

SEQ ID NO: 229654 - DNA, 1544 bp, Homo sapiens
  chr3:98450987-98452531
  hyper
aaagataaaaagtacgaacacatttgcccttgaagggcagagccccggaattcaggagctctctgaacactcctccccttctgatagggaccaaaccttctgctgagccttgtgtcacagtcagtccgcggcgccacaagcctcagtgtttacttctgccgcctgccagccgggcggggaaggggagtacccggccacccctcactttagctcctgcagctttccaaacaaaccagggcgggatgggagtgtcttcttggctgtggaaatcgatcctcctaccttgtcctgaagccacccgccgcctttcctcgtccctcccttcgcggtgattttccggtcccggcgcccggcgagggcgcgcggctggtgtccgccccgcccgaaaggtaggggttcggctgtgctcccgcctggtccccaacgcctcaccctccgggagacccgcagcctcccaccactttgcaccttcctcctcgaatttgggggcggccaccgtgcaactggcgccagccgcggagcaggaggagcttcccgcgactccggaggcgctcggcgcagtcgcccgggattggggctggcgggagcctgagactccgggcagggctgctccctcctctgctcccccgccagatccgcggggaaggaatcgtgcccgcgccgcccctggcccgcgccaccttcctttggtttctgccggcctcgggcttctgcggcccgatgtggcaggcgccgcgagagaggcagcagccggctggagcagcggcccctcaggtctcggagcccggtgcgcctctgcggtcgtcgctcctgggcctcggcgggtcactcttgccggccggcttcgctgcgggtttgcactgcccgggtgagggaaattgggggtgcgggaagaccggtctgggccggggtccgggcggcctggggtctgtgctgccccgaccctccggctttgcagcctctgaggctcagggttgggggtggggacacggagcgctgtttgcccctccacatatcctgccagcaccaaggaggtggcgtgcggaggcgtaaagggaccatgggcgctgggacccgcgagccagccggcgtgcgccgcagccaccgccgagagggcacccggggatcctggagccccagtgaagggcgggagggacgcgcagcctcgcgggtaagcccaggagccgtgggggccgagagaatctgctctgggaccctcttttgtcgaatcgccggcgaggttgtgcaattgggaagccaagaggagtgtccagctcctcgttcactattgttttcttgtaaaagggtctgtacgcgaggagggttgaggggtctggaaggttctggtctcttaccgtataaagtttttcgagaaaccctttttccctccacaatggaactagacctaacaaaacaagctccgaggcagtttaggagaaaggaggacggtgagtaaattgcagtgtttgggctgctgttaattttcaagataagggagaagcaacttgtcattttgaggccgccggctccggagatcccggcaa

SEQ ID NO: 229655 - DNA, 41 bp, Homo sapiens
  chr3:98452765-98452806
  hyper
atcagaaatcacaccgagtctaaagtcgtaagtcccatttg

SEQ ID NO: 229656 - DNA, 117 bp, Homo sapiens
  chr3:99536600-99536717
  hyper
tgcttctgcctgtcggcgcctgtgtggaaactgcgacgagtctgggagcggctgccggagaggcggggcagaggtgtgacgtcatcgccgcggggcggaggcgacagtgtctagcgg

SEQ ID NO: 229657 - DNA, 56 bp, Homo sapiens
  chr3:99787818-99787874
  hyper
gtgcagggagctgccgttctgctccacaaacccagatagaacgttagcaagtaccc

SEQ ID NO: 229658 - DNA, 131 bp, Homo sapiens
  chr3:100053358-100053489
  hyper
cagcacaccacctcgacttaggccgttcccttttgccctttgcctttcgaggcatgctttttccggactgtgttgcaattaaccatttctcgttggtccgtcctggtgttacaggcgcactggaatgaacg

SEQ ID NO: 229659 - DNA, 448 bp, Homo sapiens; identical to SEQ ID NO: 199026
  chr3:100120034-100120482
  hyper

SEQ ID NO: 229660 - DNA, 527 bp, Homo sapiens
  chr3:101231399-101231926
  hyper
cctgttcagcagaacgagacccggagaggcattgtatcaaagaaaaggagtctccggtcgcaagccccacctttcctccccagcagcagctacctgctgagggaaagaggagggagaggggaagggacgcaaagtcgagaatcaaaggaagagaggaaagtggggtcaggcgctgagaagccgaaatgaaattggaacattggtggaattacgaggaaggcgtggcagagagtgacaagccaaccgggaagatccatgggccgatgagacgcaaggagggtgttcgcgggaggagggaaaaaataaaaggggttttgaggtgaagagcgcccgaggcttcgatgacagctcggaccgggtcttcgactccaggggcgggggcgacccgggagccttccattgtgcgcgccccttcctctccccgcccccgccctcgcccccgcggcttcgggccgcaaccccagctgccgcctgcgcctcccgtttcccccgggtaggagacaatatgttcagcccttctctgaccc

SEQ ID NO: 229661 - DNA, 495 bp, Homo sapiens
  chr3:101280471-101280966
  hyper
aagccaactggcccggcccagaagaagtttttaggatatatggaggaaaacacaacacaacacagctacaactccgtgacaactgagagcgtagtcttcgagtacccagttgcctactgacagccgtctcctctaaggcgcttcttttagccaagaaagcgttctttgcgtgctgtgacgtaaaaagcagcgccggaagggagagggcggaacttccggctgagccccagcgaccgctctggtcggctgtgtagactgttgggtaggctgcgtgctagcttcggcgcggatccctgggcgtccgtacgtcggagtccttcgtcctccagggtccctgttctttgcgccagcgggaaccactatctctgcactcctggtaagcgagtttcttctttcgcctaatgtgtgtgttgggggtgggaggacgccggagacgttccaagatgcacttagtggagcatgtgcgttcggaaggcccacgggtaagaggaagcc

SEQ ID NO: 229662 - DNA, 189 bp, Homo sapiens; identical to SEQ ID NO: 199028
  chr3:101292846-101293035
  hyper

SEQ ID NO: 229663 - DNA, 99 bp, Homo sapiens
  chr3:101395081-101395180
  hyper
gcctccactgccgcgagccacacgccacctccagagggccggggcctacagcctcaaggggccgcccaaggaggcggacctggcgcagcccaggcgtcc

SEQ ID NO: 229664 - DNA, 69 bp, Homo sapiens
  chr3:101396030-101396099
  hyper
gccctgattggagcgcactctcgttttctggcttgatggagccgatccagtgacgtcaggaatgcgggt

SEQ ID NO: 229665 - DNA, 184 bp, Homo sapiens
  chr3:101405383-101405567
  hyper
aaactgcacagctcgaccctgcaacaaaaagtgaaagtccatcagggagggtgtctacagccatgccagggacgacagagaggagttctgcccgaggatgtaagcggattgggaaccacgggtcgtgcttacttcatggcgacagctccacggaaagacaaaagatggcgaaaagaaagagaga

SEQ ID NO: 229666 - DNA, 472 bp, Homo sapiens; identical to SEQ ID NO: 199029
  chr3:101443394-101443866
  hyper

SEQ ID NO: 229667 - DNA, 204 bp, Homo sapiens
  chr3:101546676-101546880
  hyper
ctggccctcctcagtgcccacgcaacccggttcgaaagagaggatgaccgtattctgcattttagaaaacaggctcttagcttcccccgcccccgtcctcactagagtggagaactgaaagcgaacgctataaagggcgccagtgagaggggctggcctcctcttgccacgaggtcagacggcgagttcttagagaaaaaggct

SEQ ID NO: 229668 - DNA, 713 bp, Homo sapiens
  chr3:105087451-105088164
  hyper
atcccttcagctgtcggcaagctcaggtcacagaagaggtttgaaagcctctgaatctctcccaggaactggcggggagaggggtttgggggccagagcctgaggaagagattacaagtgtttgcgagctgctgctgctgctgccgttgctgtgtgtgtgggcgggaggagtgccctctccagatctctttattaaagttacatttctgggtgaggtaatgagctcacctgatgtttctgaggctgagggaaaaaaaaggcgtctgcgttctctgacaaatctcgggctctggggcggggactgtgaaaccatagttcaaccggatttaaagcaggtgtcctagtgtaacaacgctggggaggtaggtggaaaggcgagacccccttgggcctggcacagtgtggatttcactttttcgagattccactgtccgatggaggaaaggacactttggagccagggaatgagccaagaagggaggacaagggtgatgtcggtttgtaacatgcaaacgtccacacgcccacagttggttttccgattaaccccctcgagacttggagaatgtaatctcaccctcgtccacacccctgacacaggcacataaccagtttccttttcggtgccgtcacaggcgggccacgtcgcaggataggtttttctacacatttaactgctaaaagggggaaagttccgctttcagacctccttc

SEQ ID NO: 229669 - DNA, 40 bp, Homo sapiens; identical to SEQ ID NO: 199032
  chr3:105587995-105588035
  hyper

SEQ ID NO: 229670 - DNA, 236 bp, Homo sapiens
  chr3:106959643-106959879
  hyper
gttggcttctccacgagtgacaaccatgttttcccagatagaagaccggagccctgctcctttgcgatccgccgagggctgcagagagcatcctcatccatttgggcacccctgcccaggaagagcccggccatccctttccggactggatccttaagaggtgaattttcttccgtggattccgatttgctccgtctgaccagcctaggcaatccagcatcgcgtggtaccagtgc

SEQ ID NO: 229671 - DNA, 347 bp, Homo sapiens
  chr3:107148755-107149102
  hyper
aagccccccccaggcgcccaggctgggaggcccaagtcccggcagctgctgcggtggacttagaggcagcagctcctgcttctgccccaaacgttcagtgtagtcggattcccggggacagcagggcagtctgcgcgcacatccccggggcatcgcaggacacctgctgccccctatcggtggtgagaacaataacccgaacccggttggaatcaactggaagaggccttttgaaaaaaagaatattccaggactacgcagtagccagacgactctctaagaacatgggtttccgcagtcagctccgactgcctcgttttaatgcagtttttcgccattgtaggaga

SEQ ID NO: 229672 - DNA, 253 bp, Homo sapiens
  chr3:107149810-107150063
  hyper
aatagatagacgaacgaaggtgcgtgcaagaaaggagggaggggaggaggtacggtcggcttgcacaccagactgtgcttgtttgagcaggaatagtggcggggtgtcttcgagaggataacggaaatgccccaccacacgcccacagcgcaagtgccggcgtccccaatcggccagtggcagcagcagaaccggggtccacttggcacctcaggggctctcgcccgtccgctctgggcgtcgggctgtccag

SEQ ID NO: 229673 - DNA, 208 bp, Homo sapiens
  chr3:107243052-107243260
  hyper
ctttgcctggtcgcgatgacagaaaacttgcagatcctttatccggggatggggtcgatgcctctagaaagagctccctagccctcttaagccacactcgtgttacactgttatttgctgcgatccgggtcgctagtaaattacagaaatcagactcgaggtttcttttcctcctccacctcgtctcgctcactcaccctctgaaatt

SEQ ID NO: 229674 - DNA, 61 bp, Homo sapiens
  chr3:107244979-107245040
  hyper
aatacggggagcttctttgccttctgttcccacagttctccagtgtcggggggtggtagag

SEQ ID NO: 229675 - DNA, 393 bp, Homo sapiens
  chr3:107646510-107646903
  hyper
gaggaccagtggcccgccctctggcggccgcgagagacagcgtgccccgcgctccaccaagccgcgacagggaggcggggagggtgcgtgcgaacatgtaagttaaaattagatcaatagtcagcttagcggcctcaatcaatgcttcgcagggagagcatgcaaccatctatttataagctaacaccggcattatcttcctcttttaggacgcagagatccattactgcgcgcggcggggaagaggacgccgccgggagctggtgcgtgacacactgcagcctcgcgggctgcccgggacttcatcaagcccgggtcggctcggggcgggcaggggtaggatccataccgccgaactgcggccccgctgctcgcagccgctcttccgggagc

SEQ ID NO: 229676 - DNA, 708 bp, Homo sapiens
  chr3:107940770-107941478
  hyper
caagtcagggctgcgtgagctccacggacctcccgggagtttggggtgaagtgcccttccctggctaggaagacggaggcaaggaattgctaacccgctctcacgaaactggttcccagcaggaccaaggagggcatctccctgggggctagcaggcacccgggcgctcggggacgccggcacccacctggacggggccttcaggttgctcttccggaggaactcctcctcgtagcggagcagcttcagcttctccaccaagtcctccatcaccacgaacatgtggtaggccgcgccgggcccccgctccaagaccacttccccggtcccttcgccacgggacctaggcaccccatcttccaaacccgacgtcgtgacgacggccagagcagcagtcatcgcagaacggacagagtccagcgtgggctcaggcccacagacctctgcggcctaagccgccagccctgccgccgccagtacagccacgaccggttaccaggcgaccaccggacaatccgtcaccagggaaactagactccgcctccttccctccaatcagggcggctttcctgaatgacgtcacctgtggccctcttcttgccctgcctctgtggaaatggtggtcgggaagcagccccgcccctcatggaggcgtggcgttcgcgccccactgccggctgcgtcttctccctcgctgaaagtctgaag

SEQ ID NO: 229677 - DNA, 34 bp, Homo sapiens
  chr3:108307932-108307966
  hyper
cgctcttgcctctcgctgcggccagcggaacccc

SEQ ID NO: 229678 - DNA, 99 bp, Homo sapiens
  chr3:108308519-108308618
  hyper
tctcgcgatttctcgggagaggaatcggttaggagaagggggattcctcactcagctgtgcgctctgatttcgtgcgcttcctcgtccttcatgttgga

SEQ ID NO: 229679 - DNA, 1975 bp, Homo sapiens
  chr3:110789509-110791484
  hyper
ggtactgtgcgaggcgggaggatggagagggcagggcggagagccacctgggatgagcgagggtcatggtggaccacagacgctcttcttatacgggcaaatgtttaatacttcccgaggtcgcctctctgccatcaaacgaaaacaggcaagaaaataaaactacacatacgaacatgcaaaggaaacaaaaccaaagaaaaacaccaacgcactcgttgggggaaatccatggcctcctgttgccagtcgcccggcgcggaaagtggacagcccagcggccagtgagaagcaagagcaagaaagcaaaccttctgaagacccctctcctcgcccagctccgccgaccattctaccaagctgccctcccagaaaaaagagcaggaaaaatgcctgtgcaaacgtgccttggcgagcggggaataagtgggctgggaagaagggaaggattcggagagcacagctgtcccggggaacaggaaggaggagaaagtctctccctcccttcagtgccccgcgccccagcgaggaggaagattactagtccagcaggctgcgtccagcttcctacacaggaacctttagcatgggcaacggaagggcagccccctcctgccttcccctccccaccccaccccctcgtcccaggtccccgccacagggagagcgccgcccgggagaggagaaggccgagcgtgattgtcccgcagccctcgcctcagtcggcgccggggcccccgtggacccgcgaggggtggagtgggcgagaccattggaaaggcagggaaggggggaaaccaggcaggaacgaggggcggggccgactaacctattccagattttcctgtcccttttaaatctctgctgtgggagaaaccccgttatcaaagtggatgaaaagaatatttttttttgaaaggggaggagcatgtgtaggagggcggggtgggaggagacagggcttgcgcccggggatcagacgggaggtggagttgcgcggggagggcgggcgagtcgggcgcccgctctgagagtcggtttcttttccccctcttgcgtggggcggggtggtgcgttccgagttcccaggagttcgacgcgggcgggtgccgaggggaggggagtggcggcggcggcgggcggctcccgcttcagcctcggcagtggcgtcggcgacggcggtgtcgaggcagccgccagcgttcggccaagtgtcagccggcagcgacggcgctagagctgggagctggggacgcgcgcgccggaccttccacagcctccgcccagagcctgaggcgccggggccgggggagccggggggcgggcgggcgagcgggccggggggagggtgggggatggcgcggaccctgcggccgtccccgctgtgtcctggaggcggcaaagcacaactttcctccgcttctctcctcggagccgggctcctgctgcagcccccgacgccacctccgctgctgctgctgctcttcccgctgctgctcttctccaggctctgtggtaggtgaacctcggcggccggcgtgggctgagggagccgccactgagggtgcgggcgccgcggccggctctgccagccgttctctggagcagcgaggcggttggttgtgcgagcgagtgccgaggactttggctggaaacttttcgccgcgcccggggcgaggccctggaagggccaggccagcgaatgctgagccggcggcccgctgccctcccccgcggccgcgcgggtcgccgtgcggatggccgagggttggcgatggtgcttcgtgcgccgaactccgggtttgctccggggaccgttacttcctcgctcattctctgggaaccctcgtaggttaaggtgccgggatgcacgtttgccgctttttttcccggtgaaacttgagctgtgagcccagaaaccctagggaccggagcccgatggaatgaagcctccgggtccacttctcatggcctt

SEQ ID NO: 229680 - DNA, 1554 bp, Homo sapiens
  chr3:111578040-111579594
  hyper
tcatcaccctaggacgtaaaccctcccgcccttctttcagctcttaaaaaaagcctgccacgaaagtccctactgcgttgctgcgaacgtagctttgagaagctggcgcccagtgatggggcaaacagccatgcccttccagcagccgtgaaagccccaacagcaaactgcctgggagcggggcaggtcaccaacttcgttgctcgaactccctgggtgcccgccgcggtggttacaaagggggtcaagagtgccggacccagccgcgcggagcccaccattgcggcccgagggggacccgacgggggcccgacggtgtggcgtggcgcaaggagcgcgcctgccttctctcgccgccgggaacgggctgcaccaatggccaggtgaggaggcggcggtggtcgcccgggaggagggggtggtgccgactccgtgtgccaggagtgcgtcccggggacgctgcctcccccgcggccgagttggttgccgccggttgcgctgcggagggttgggggcggagaggaggcagtggctgcccgggccgaggaggggcgcgctgactgctcaccgcgagtcaggaggggccggcgggctcacggagggagacagggtgggcgggggcaaaggctaggcgctagggcggcggcgccagcgtagagcggcggtttggaggaaagatgagacggtgagtgggctccggggacacagagtttctttgcttctttacaggctgtagggacaaaagcccgggctggggtcggcagtgcccaggctgcgcagctgggtgggtgggggtggcgaaccccgttgtgcatgactctcggggggctgggtagatctccggttgaggggatcccggggagggagtgtctggtagggaagatgcttccagagtgattgtagaaaacaggcagaatgtgggggaactgggggcaactttttccagcaactctggaatgcacatggagagagggatggggatccttgggatagctccctgagaaagagaaggtccgctgctggatggtgtagggcgcgggattcagagaagactccctccccgcaaatatttggctagctgcgcttctagttccactttctttcaagagtgaacctacgagctttaaccgccaaaagcggctgatttcgatttggcctttgaccccccactgaaagtttacagtgtggccgtctcggcacccctagagatagcagctggaaggcttggggagtattttaaccctctgtttctccagctccctgcgcggcggaggcgcagctgaatcgtttgctggttcgcttaataacttagccctagcagtcatcacttattaaagcgccgaggacctggctaactcccgccaccaccaggaaattaaaaggctgacaggctgtccctcccagggttggggtttcctgtttgaaagagcttgagaagtcaaactgcttcgcggttcctcacttacctttcttatgtaaaagagggagcgacgcccgcagctttttctctcggtaaactacccgtggctggaaatcctccgggcgcctggccct

SEQ ID NO: 229681 - DNA, 249 bp, Homo sapiens
  chr3:111697740-111697989
  hyper
gaaagagccacgacgctctgcgcatgtgcgctcttcgcaagctgaaaatcttgcggggagctctttagcaagttccgccttccagcctgaagcgcatgcgcagcctcggttccgttgcgtagcgtgtccctcagtgggacactgcagggtgcggggacaactacgaagatggcggttgcgcgcttggcagctgtggcggcctgggtaccttgtcggagctggggctgggcagccgtccccttcggtccc

SEQ ID NO: 229682 - DNA, 432 bp, Homo sapiens
  chr3:111804991-111805423
  hyper
gcatagcaggcagcgccctgaacaaatcagaaaaacagccttcggctctggagcccactccggcacggcctcaggtgctctaccccgcgggatccagggagtggccgccactcacagttgcccctcctgtccgctccggtccgctcccgccgcccgaggtccgcgacgccccgcccagtgggtggagtgtgaggcggggaggtcgctcgactcgccggcgctgtggcctcccgcggagccgctcagactttccctgccggcacatggacctggcccaaccctcacagccagtagacgagctggagctctcggtgctcgagcggcagccagaagagaacacgcctctcaatggtgccgacaaggtcttcccttctttggacgaggaggtccccccggccgaggtaaggtccccttggcgctggccctaacttg

SEQ ID NO: 229683 - DNA, 759 bp, Homo sapiens
  chr3:112051794-112052553
  hyper
tcagtttccccagcggtcacctttgaaaagggaaaaatgtctgaaaatagacaaagctgaatataaacatcatttaattccccccacacagacagcctccgctcctgtgagggcgtggggaaaacggagtgggagaagggggctagcgaggaggaagaggcgggaggtgcggcaggggcacaggtgacgctcctcccgcctgcctagcagagctccaggcgcacatccgcagtcagccacctcgcgcgcgcctccaggagcaaggatggagaggctggtgagcggggccggggcttgggaaggagggcgcagggcaggcgatgttgagccggtggccctggggcgggcggcgagtggaaggcgcggagcttcggctcttgccacaatctggtccggggactagatcagcggtgttgatggcagcgcttttctctaagcgctttctcttgctgagaaacggattttgccttccaaagggtggtttacaggcagctgctggcgtccagattctccattccaattgcctgaaaaaaagatgcaccaggccggggctccgggggctcttgatccgcgctgacgaagctggcgcatcctccgggcaggctcggctcggctcactggctccagctcccaaaactggggaggcacagcctattttaaactgcccccaaaagggaaagagaaatgctgtattggttccatattggcaccaaaagctgcggcggagatacagatttccaggctcgctttctccgggag

SEQ ID NO: 229684 - DNA, 35 bp, Homo sapiens
  chr3:112709773-112709808
  hyper
cagcgggaagtcacgcacgcgcaacccaggccaca

SEQ ID NO: 229685 - DNA, 306 bp, Homo sapiens
  chr3:112930382-112930688
  hyper
gaaggaattgtttgcgagttcagtcatccaaaaagcttcttccatatggagggaccgggtgcgctgggcgcggcgtcccctgcgttgtcctcctgctgccgcccccgcggccgccgctttctgccgcggggaccctgagccccggcccgccggtgtcagccgccgcgcgcgcgcacagacacacacacagagacacacaaacacacacagaaaagacacacacgcgcacacacggcgcgcacaccctcacgcccgccacagccacaacacgcccgcacgcgccctccctctccggcccgcaacttc

SEQ ID NO: 229686 - DNA, 93 bp, Homo sapiens
  chr3:113233979-113234072
  hyper
gaaccgcggagcgcgccacaggttaacccagccagcggcttccgggctgttgcctgggttaccagagctccgccccacgcccttgcgtatatc

SEQ ID NO: 229687 - DNA, 391 bp, Homo sapiens
  chr3:113251174-113251565
  hyper
agagaacgtgatgacgtgagactctccatggagagtaggaggtaataaagaaataaaacaggtgtctgaggagaggttctattagagaggggagaatagagagtaattatcgttcagacaggcaagagttctctgcaggtagcagcctgggaaagcgaactcgcgcaccctcttgggggacgggctcttttgctttctatttcttctcctgcagccagggtgcacacgtatttgaaacagaccgaatttcctcctcgatgtggcgtcaggttgacttttcgagactagcgggtatttctttttaatgactccaatgcctttttattattgctgttattgaggttgagggagaagagatcggtctaaattctggctgggtaagtggggggat

SEQ ID NO: 229688 - DNA, 42 bp, Homo sapiens
  chr3:113251745-113251787
  hyper
aggcatcacccgctcggctctgaagcggacgcctggccctgc

SEQ ID NO: 229689 - DNA, 217 bp, Homo sapiens
  chr3:113415721-113415938
  hyper
gagggccggggggcggaggtgtgcaagttgggttgaagaaacaggaaatattcttaaaggtagagtgacggacaggaaggaaagccagtaggtgaatgggaaagaggtgggcctggttccttaaaggggacgccttgagaacctagaaaagaaggtgttttaagaaacttctttgtatcttcttctgtggtctcttttcttcgtctttcggtaggag

SEQ ID NO: 229690 - DNA, 229 bp, Homo sapiens
  chr3:113557578-113557807
  hyper
catcgtcaggaatccttcacggccgccagagggcgcaaggagctgcggctggaagtactcggagggccggcggaggaggcgcgcggagcctgtaactcgcagcgcgcgctggaggtgggcgcggggcggtgcggtgcggtgcgcgcggggcggtgccgcggcggcggagggagccgcgatggagggcgctccgactgtccgtcaggtaagccgcgggcctcgctggggc

SEQ ID NO: 229691 - DNA, 84 bp, Homo sapiens
  chr3:113666356-113666440
  hyper
caccgcctgttgccggagtctgaatgaaggctggcggctccacggtctcacgtagttcggaaatcctccgggttcccgggtttc

SEQ ID NO: 229692 - DNA, 377 bp, Homo sapiens
  chr3:113775219-113775596
  hyper
tcaccttgggactcggcttccttgtgaaccgtttccagcgattcagccccatccttttctttgagaaggaccttccctgaggcgccaggagcattttccaagttcgagcccgaacctcggccaaagctgcagcaaccgcccttctgcccgggctgcctccgggtcacgctgggaattgtagttcctccgcccgcaaggaaagcaggcataggacaccgtcgaaccaccactcccacgaggctctgcgcaggccgctcgcgttggctcagttaccatagcaacggcagaggtccctcgctcttgccgtcatcaaggctcgcttgaatgtcggctttgctttttttctggcgcccagtgatgacgcagtactccctgat

SEQ ID NO: 229693 - DNA, 241 bp, Homo sapiens
  chr3:114866221-114866462
  hyper
aatgagaatgggacgcccctcgtgaggttgccgcccataaacaaaatgcactcttccttctcccctccgcccccccgtccccgcccctttcttcctcttccctcatctctgtcaccttcgattgggctaaaagaggcccaatccgctatctcaaacatccattgggacgcggaaacttcgctcagagaagtattaacaggcgattggtggacaatccttccacttcgcccacccccacaac

SEQ ID NO: 229694 - DNA, 399 bp, Homo sapiens
  chr3:115231423-115231822
  hyper
ggagaaggtctccccgcagctcctctggaccgagccacacctctgcctgggaatcctgggctggggctgcagaagcccgctgcgcgcctcctggtttctatggagaccctgcttgatgtcaatggcggctccggagcgcagggaaacctaagcgtttgtatttaaatgagggaaagtgggggaaggggaagtaaaagaggaagggaacagaagagaggatggtagaggtgagcgggcgggtgttgaactctggggactagaaaaatccagctgcgttactcagtcatctcatgctcgcggagaaatcagaggaagcagcagcgggcagaggggtgtttatttcttgcgtgagaaatatccgacttctttctgacatccgggagtaagggacaggcaact

SEQ ID NO: 229695 - DNA, 615 bp, Homo sapiens
  chr3:116163677-116164292
  hyper
cacacgtgtagacgcgcgcagcagaaaagttgcccgaaagccctacctgaggatggctgtgtccccctgcctcacggtgatgttgtccgtgcctcggttaaaatccacgctgcgaacaggcagtcctgtgggaagaaggcagagcaatctcagtaggaccagtggcaactgtttccgatccggctgaactctcctgaccatggtggccacgccgaggtgcgggtccgcggggtgctctggaggggtgcgcgctgctcgcgaggagaggcttcaccaacacggggctttcatccacagcgagcgcagagcgggctttgccagtttatggtcctttccactttgcctctctctttccctcgctcagtctcttttccctctaagacttaacaaagccctcataaaacccaagcagaagggtgaaaagtaaaagcaacacaatttcaaaagagagagtgcaaatagcaagccctctggaagagctgaagaggaagccaaaggaaagggttcttgtttggtctctctgtgactggatgctcctctgccagtgtctgagctgagctccttcgctctgtaacccactttcccaggctggcgggcgggcgggcgagggagccg

SEQ ID NO: 229696 - DNA, 222 bp, Homo sapiens
  chr3:117715481-117715703
  hyper
accaggtgccaagcggatacctagcctcctaaacttaatgccaattccctcctgaaagaggaggaatgcagtgatatcagcaccggggacacggggatagcgaacaccaccgcggctcttggagtttacagaggagcaaccccagctccgtcgccaccacctcgcgcaaaagcccccaccccaccaagacacacacacacacacacacacacacacacacac

SEQ ID NO: 229697 - DNA, 821 bp, Homo sapiens
  chr3:117715763-117716584
  hyper
cacacacacacacacacacacacacacacacaagccctggcttctttccccatcaacaccgatgttgcagcaagtctgtccgcacaatcccgcacgcctcaggacccagcctgggcgcagagctggcagggcagggagcgcaccgcaggacttgtaaataaaccctgttccatccagaaccggagcgcttcttactccaccgaccaccccggagcccggcggcagggaggagggggcgcaaggggtcagggaatcctccccctaccttgcaatgagaagagggacaggaaaaagcccagcacccagacgctgtgcagccagtaggtcctcatgtctccgctgcgctcgatgctccctcgcgcgctcctgctctcgcctcttccgctcgcgctctctctagtaaaacgcgccgctcctttccctcggtttccctctgggttctcctggttccggcaacccggacagacaagcctcttgccgcacgacggccggatcccagaacagccttgctctcctcttcgggagcgcaagccaggggccgggatggacgctcgtagcccgtgcctggtgtaaacacaccgagcccccttgtccctcgagctctcccgctttcctgcttcctatcctcctctccctcactcccctgcagcttcaactaaatgcgatgtacttaaacaagcagcgccttataggaccgcgaaccgagccgaaagggccccgctactgccatctagtgctcacagaacggcatcgccgcggctcttcttcgctgtgtgtctgtgccaagtctatccaacgccgccaaagtcccctctgctctc

SEQ ID NO: 229698 - DNA, 174 bp, Homo sapiens
  chr3:118959826-118960000
  hyper
aggctggtccgcccggctctgcacgcgcctggcgctccacccccgccaaatcgaccacaccgggcgctggaaggagcaccgggagggaaacggagggttgacgcctcggcctctgggtggctttaaaaccctgtgccaatagtagactgggtgctgagcgcttcccaaattcca

SEQ ID NO: 229699 - DNA, 33 bp, Homo sapiens; identical to SEQ ID NO: 199054
  chr3:119041464-119041497
  hyper

SEQ ID NO: 229700 - DNA, 282 bp, Homo sapiens
  chr3:119182268-119182550
  hyper
cccagcgttggaacgctgcaaaccagctgcttggacgcaggcagcccccgcctagagaatcaagaaaaggtgtccaggcttcgggctgccagactcagacccagactccgacgcagttccagtgccagagctaaagctagagccagagcctgatacttcagcacccatccctagcctccattaccgcggagctgagcagacgtggcagcgcacggcgatgacgtcagctacgcgaccgcggtctgccccagccgcgagtgcgtccccggaatcagccggcac

SEQ ID NO: 229701 - DNA, 253 bp, Homo sapiens
  chr3:119187877-119188130
  hyper
tgggctagctcgccgcttcggctctggctgctgttgttcctcctgccctcagcgcagggccgccagaaggagtcaggtgggctccgggcagtgccgagcctgccccttgggctcggggtctggccggagtcccgaggcgctcccccgcgcggccggctcccgggaagatgccgtggccgctgtagctcggagctgggcagaaggcaccggggcgccttgcggcggagagtgaggtgccggggtctctgctcct

SEQ ID NO: 229702 - DNA, 119 bp, Homo sapiens
  chr3:119298797-119298916
  hyper
ggagcgtgtcaaccgccccgtttctttccaaagccgggcatggcccggaagcagctgatcagatcttagttctgaatgtatagttcgggtacgagaatgtgacccgtgaaagttcagag

SEQ ID NO: 229703 - DNA, 284 bp, Homo sapiens
  chr3:119421925-119422209
  hyper
gggaggaaagaggcggcaccatgagccacgcagtaaccatcgaggagccccaggcccagccgcaggtgtctcaaactcggtaccgggagaggtcgcgggctgggagccacatctcctccaatcgagcgtatgattttctgtacggtaaggaccgccgcagaccttcctccgcgtccgtcgcctcctaggccaggtgggctcccagatggtgggacctggccaggggcatggcgaacgaaacacgaccctctggactgacctcttgcccacggttgtccttggtc

SEQ ID NO: 229704 - DNA, 224 bp, Homo sapiens
  chr3:119813913-119814137
  hyper
ggcgtctataaagcgctgtctcattggcctgaagcttaggcgctggagttggggcaaaagggagagggagggagcccgaaactcgcggcggcggccaatcggctctcactgccgtccaatcgcaagacctagctgcagtgtgattggccttcggccccggtcccaggagcggggagatgcctgactcgggtcgtggctgacgacccgacggttcgcctgcggcc

SEQ ID NO: 229705 - DNA, 465 bp, Homo sapiens
  chr3:120003913-120004378
  hyper
tgctatgtgcaggacgcccacggtcccccggcgtctcgcgcgttcgcggggctggaaggggcgggaaggggcgggccggggcagagacaggggcccgcgcccatcgccgcgccgggagcctggcgtggaggcggcgggacggcggcgcaggcctctgaggtgtgcgcggggcgccgggcgcctctggccggggcactggctgagccacgcctgcccgcccctccctggcgccgcccgcgtggcgcgcctcgaccctgctctcccgcgagggccgggagggctccgggaccttgcagactccacgcgcctcacggctcctccagctcctcggatctttctccttgcgtcgccgccgagtcccctggggcggccccgcctccggccgtctcctcagagaccttccctggggggcgccttcccctcagcgccccttcccgggcctcgagccagcggctgccgcaggag

SEQ ID NO: 229706 - DNA, 1242 bp, Homo sapiens
  chr3:120168944-120170186
  hyper
ttctcttacacttgcgcaacgttacagggaacacttgggaaaaggccgttacattgcccagatgataacacaaaacccgaggacacttcacaaagaagaaaatacatttcagagaatcatgatctcactttaaaagagagaaaggaaaattaattttgccccaaaagaagaatcccgattcctctgcccccgcccccaggagacagacttgggagggaaaagtccccaactactctcagtctcctctgaagtgaaggacggaactgaggcgcctttttgaactcgctgctgctccagtcgccgcctcgtccccgtcggcccagcccgtcccctctcctcctccccgctctccctccatgttagccgcggcggggctcccgcttacggcccgaactacttttcctgctttaaagatttaagtttcgtaagcagcattactgccccagctccaccccagcacaccccaaggaccgaaactcccagcgccaccccgggagagcatccccaggacgcgcgcccacccgcccagcgcgcagacccaagaggccccggggaccgagttcggactcctcggcccctcgcctacctcggcgcggacccaggcgaccgccaccagcgcgagcgcgagcgcgagccagcgtttccacatctgcggaagagagaagagagcgagtctgaaggcgccgggccccgcgctgacctgggaaacttgctcgggtcccgcaggctcgctccggccgcccaagcacccccggccgcccgaagagtccggcctccgcgccgtgcgccctgcgctcaccgtggtctggtccaggtctcctgggggcgcggggcaggacggcggcagcgagctgtaagcggaggtgggagctccgccgatcgccagcctcggaggaaatgcgacctcccctcgccgccccttaagacctctccttccccgcctgcctgcccccccagctcctccccattctcctcccccttctgctgcagcggcccccgcggctcccgctccccctccttccgacccctgctccggggagcccgcgggagtcctggcgccgccgaacccctctctccgcacggtccctcgtccggcgccccttcggccccctggacgtggagcggaggcagagggggtgtcccgtgggtccctgccacaaaggggtagggggaagggaaaccccaccccgggaggggctgctggctggcggcggcccgggcgggctgcggcggtggccaggt

SEQ ID NO: 229707 - DNA, 295 bp, Homo sapiens
  chr3:120626723-120627018
  hyper
catcccccagagcacgacccccagcatactggccaataccgctgtcaatcaaatacctcacctacttctctaaattcccccctcccactgtcattggctttaccttcggcctatccacagatttcttctgccctggagaccacagaacttaccctatcgaatctaggattggcgccgaagctactcccgccctttgacgtccccgggcaccccgcccccttcacctcccagctttgccggggaagaagcagggcggggcaagctaggggccggcccgggggcggggcctgcctcc

SEQ ID NO: 229708 - DNA, 60 bp, Homo sapiens
  chr3:120627258-120627318
  hyper
cacctgtgtgtgtctgtgtgagtgtgtgtgtgtgtttgagagagagagagacagagagag

SEQ ID NO: 229709 - DNA, 355 bp, Homo sapiens
  chr3:120627678-120628033
  hyper
gggggaaagaggacgcggggagggagatgagggggaggtgagggggaggcggagggacaagtggaaacagacggtgtcgccgttctcctcctccccccctccccggcagctgttgctgtgggtcactcgcagatgttttggggtccgggctgctgggggatggggactagaaaaagtacccccctccccgcctttcatagtgacaaaaaaggaagcgttgaagctgatgggggaagagcccggaaggtggtggcagagtaaataccggctcccccaacgtcgtttttctgaaaataaaatactctgagccgaacgtttcgaagaaggaaagtccgcccttaagagagagacagag

SEQ ID NO: 229710 - DNA, 32 bp, Homo sapiens
  chr3:120628277-120628309
  hyper
ctttttttccagtcggtcgtaaccaatgctca

SEQ ID NO: 229711 - DNA, 33 bp, Homo sapiens
  chr3:120628526-120628559
  hyper
tggttccgtacatccggcggggactgcaggggt

SEQ ID NO: 229712 - DNA, 259 bp, Homo sapiens
  chr3:121264679-121264938
  hyper
tgattctgaacgccgccgtttcccactccgacgcagaagattcatggcaaactcttctcggccgatcagggcaagccacagtcccagcgtcctccctctcgggagaaccctggcctggcaacagctgcggacatcttcccgccagtcttcaaactcaaacctcccggcccgccccggaaccatagagttctccgtggcttaagtaacccgaaagccatagactcgtggggaaggagcggctctcgctggcgtctaagac

SEQ ID NO: 229713 - DNA, 197 bp, Homo sapiens
  chr3:121468538-121468735
  hyper
cgggaagcccgtacgcgacaccttccaccgccgcgccccgccagggactcagccactagcagttgggacggaagatgggattaagacaccgaccaatcaggactatcggcaggacgttaccagggagaccaggcacaccttgtttgttaccaacctatcaacaatgacggaaaccaatcaacgacagaagatgctcc

SEQ ID NO: 229714 - DNA, 101 bp, Homo sapiens
  chr3:121553926-121554027
  hyper
ggactaggagcctcggagtcaaggggcggagcgccctttgctaataagccaatcagaacgtgagacgctccggtggggcggtgcgcgtcgagcgcggggtg

SEQ ID NO: 229715 - DNA, 270 bp, Homo sapiens; identical to SEQ ID NO: 199060
  chr3:121741107-121741377
  hyper

SEQ ID NO: 229716 - DNA, 872 bp, Homo sapiens
  chr3:121902662-121903534
  hyper
agagtttgggcacgcgatttgtatttattttactgtgaatctctggccttatatcagaaaaaaaaaaattgtgccaccctcggcacagagaacgttggtggcgtcgtaagcgccctaagcttctttccatcgccaaggagtaggggtcagggaagaggacagcgggaacaggatttgagagccgggaacccctggctcggcacgggagagggcaggagaggacctaagcgcggggctcgccgtctgctggggacccgagccggcctgtggccctcggggaaccgaagacgcgccctcagcgaccctgaagagtcagctaagctctctgcgggctaaggagacggtgaaggaaccgggactaactggggtaggggttagaaggcagcccgcgagtgggctacgaggggagctgggctcggcagttggggaccccgagggggcaagcgggcggggagcaggagaggggcggagctccggggccggggccggggccgcagcggccgcccagagggtctgcgggggctgctgtggccggacccgaaggcgggcgccgggagcgcagcgagccagacgcgcctctccaagaccgtgaccttggcatagggagcggggctgcgcgcagtcctgagatcagaccagagctcatcctcgtggagacccacggccgaggggccggagctgcctctgtgcgagggagccctggccgcggcgcaggtaggaccggggaacccaaggagggcgggaggaaagcgcccctggtgggggaggggccgtggcggggtctgggggccaagggctccgggccgaacgaggggcacacgccggagcagctccagcctgggagcattgggcgtgaacgtgggggaaagtag

SEQ ID NO: 229717 - DNA, 285 bp, Homo sapiens
  chr3:122101937-122102222
  hyper
gttcatactccctcgcaaagcagggaatagggtctggggacaaaaggaggcacatgcctgccacatgaggaaaaccccatcacctggaactcggcgaactcctcacagttcacaccgccactgggcgccgccatattggacaaacacgaggaccccgctgcaggccaatcaccgcggagcaaaggtgaccgcggagtcgcctgacaaaaaatatagtacgaggggaatccttaggaaagctgagtgcaaggcttgagttcaacgtggtccgcatccacctcggaa

SEQ ID NO: 229718 - DNA, 273 bp, Homo sapiens
  chr3:122134806-122135079
  hyper
ccgccgcttttagcggatttcagaagctaaaagcctacgaagccaccgaaactggaaactctggcctgtcggctacttttgctcgtaccagcaggtgtgcactgccgcgtcaatctccaacaaagccggaaaagcagcctggcgcatgtgcaaaggaagtccctcctaccactaccgagccgagatgaccaatgggagacggccatctgcgcctgcgcaaaaaagtcgccaatgttcatttccggtctttttcgccccgcccttcaaatgcga

SEQ ID NO: 229719 - DNA, 353 bp, Homo sapiens
  chr3:122282989-122283342
  hyper
tggccctgggacccgggtccgcgcccgtcccccttctccccgcccacctcgagcctgcaggagaggggaccccgagggcccagaggcaccggacctactcacccggcaggccgctctcctcggtgcagacagcacagggaggagggggaagcggctctgccgggaacagggagggacctccagggaagcgaaactgaaactttgcgcccagtccgcagggcgggccgcgcctttaccgcccagctgcctcccggagcccccgcgccctcccgacgcgcagagccatggcctcccacctgcgcccgccgtccccgctcctcgtgcgggtgtacaagtccggcccccgagtacga

SEQ ID NO: 229720 - DNA, 96 bp, Homo sapiens
  chr3:122399330-122399426
  hyper
aagggtcggcttgcggcaaaaattaaatgatctttgcgtttgggcaaggtctggtgccccaaagctgccgacttgatctgcggttggggcgagcgg

SEQ ID NO: 229721 - DNA, 254 bp, Homo sapiens
  chr3:122399767-122400021
  hyper
gctcctggggccccgaccccccgaagaacttgaacaccaagttgcagatgtacttccagagcccgaagaggtcgggaggcggcgagtgtgaggtccgccaggatcccaggagcccatcccgcttcctggtgttcttctacccggaggacggtgaggggcgcgaggggtggggtgaggagggggcacctctgccctccctccagggaaatggcggcagggcacgcacgggagggtgacccgcccgacttcggcgg

SEQ ID NO: 229722 - DNA, 250 bp, Homo sapiens
  chr3:122513919-122514169
  hyper
cggaggccgagggcgaccacagcagcctccgcctcctgctgctcaggactattctgcgctgggctagtcggcggtgacccggactgcgcccggcagtggcttcgcgggcgacgcgtcgccatgggctctcgctggagcagcgaagaggagaggcagccgctgctggggcccgggctcgggcctgggctgggggcctcctggagaagccgggaggcggcggcggcggcgctgcccgcggcggtcccgggtc

SEQ ID NO: 229723 - DNA, 540 bp, Homo sapiens
  chr3:122746001-122746541
  hyper
cgggtccccatcgccgctgcagcccagatgcgccgaccacagccctggcagggcccagtgcaacccggacccaagctggctggcggcgggaacgcagcagcgatgagggctctcaagccgaggtggcagcgggaggcgcggaagccaggggaccccctgtcctcccgcccgcagcctcacctacctggcttcaacttgccagagcccggacccctacctctctaccccgatacccacccgagttgctgaagtttgcaagttgcagccccaacccgcgcaggggaagcgcccggggctcccgggactcacctcccagaggcgggtgcaggtgcccggttccccgcggctcccgactcccgggcggcgcggagcggcgggagctaaccagatgggctggcggccggtctgggaatggggcggccgcgcaggaacggcctccagctctcagcgctccggtgcagtccccacccgggcccgcgcccgctgcgctcgggctcccagcagccgctggatgcgctgccgacccgcccggctcggcgg

SEQ ID NO: 229724 - DNA, 725 bp, Homo sapiens
  chr3:122746829-122747554
  hyper
tgtggtgaccagcccggtgggccgaagccccttccccggccggcattccggcggcaagacctaggactccgagcacttgccgccgtttgccacatcccgccttgccgttctcggtcaccccatctcgaatgtgacatccccgagggccatcggcgcggcctgcccaccccaacactcagggcctgaggaagctcccccaaaccccactccggactcccacattccccagccccgtcagttcggaacgatcttcctgcctgtggatttgaaggggaagggacctcgtgtaaaacgggggagagccgttataacctgcagcggcagagagggaggctaggctgctgggctgggctggaaagccagaactggccggattagggttaaccttgcaaactgtacgataccgagcgaacctctccaagcctcagtttcctcagctgtaaactggggttagtaatacgcaccctacagaattgtgaagaacgagtaggggatacggggagtaaaataacatcaggaacagtgggagggcagccaagagatgagcgatccggggaggtggtggagcgttctcagctgaggacggaaggtttagcgcaatcacaaggagcgaggccgaattgtttacaagtttaagtgatctagtgtttctgatggctagaaggcgggagagaaagattcaaggggcaagcttcaaatcctagctgcccgggctgcaagaggga

SEQ ID NO: 229725 - DNA, 186 bp, Homo sapiens
  chr3:122920576-122920762
  hyper
tctggcgcaggtgcgagagaagctgccaatctctcctggagcgggtgggactaaggagggccccgggagctggggggttgttgtgtccttcctgcagaacccgattggcctgggtgagctgagggaacgggggcgtggtttgattccgcgggcgcgagccacgttggacgcgccgcagcgtcgccg

SEQ ID NO: 229726 - DNA, 262 bp, Homo sapiens
  chr3:123167262-123167524
  hyper
gggggtagccattcgcgcgggaatcggcctcgccccacgcagagcggtgttcggggcctccccggggcgccggcgccgcagtcttctgcgccgcgtagcccggggggctcacgcttttggagccggacatccccccctcggcctcgtcgtctccttcctcctcccccggaagccgggccgggggtctccaaggggagggcggacggccgagcagggggaccaggctagggtcacacgtcgggggcggcccggggccctgcgc

SEQ ID NO: 229727 - DNA, 147 bp, Homo sapiens
  chr3:123168004-123168151
  hyper
aggacgggggagggggcgacgggcggagcaacagctccggagccccgggggggagggtcctggagcccgggggggccgttgcccgcatcccccacctctcgcggcgagagtggatgcgtggccccggcgaaagccgagccgagcctt

SEQ ID NO: 229728 - DNA, 641 bp, Homo sapiens
  chr3:123168451-123169092
  hyper
ctcagaagcagccggcccagaggggcccgcctgagagccgcggcgcccgagaggcgctccgggggggcccgcgggagcccggctcagggcgcgccatgcacgcttcgggccctgcgccgctccggccgctcgcgccgctcctcccttctcgcccgctcgccgccgccggagagccctccgcatcccctcctcccgctgcctccccgccccccgcgccgcccgggcctcggctcacagccgcgcgaggccgcctccgcccccggcctggccatggccccagcctcggcgccccgcgggcatcctcaggcctggccgcgggcaccccagttccccttcctcacctaaaattctcgctgcgcccctccctccctgggactaggagccgcatccagcctgcggtcccgtcaccagacctgggtggagcgcggtcttcccccgcccccggccagggctccagcgcccccagtcctagctcccctcttttgtatccccctttaatccccctccccccatttaacccaacttcagccccggcgctgcgccccccttccctggcccggctcgattggccgcttccggagctgtcagactacagtccggcgctcttattgggcgattctctggcccggcggctgtgccaa

SEQ ID NO: 229729 - DNA, 798 bp, Homo sapiens
  chr3:123602702-123603500
  hyper
ccagaggccgtcaccgagtcctctagcgagggtctgggagctgggagaagggtccgcttctcctccgcccctcaaatcaaaggcacccccttcggatgattcctagaaaggcaatcgcatcagtgtccccaagcacttcatctccccaaaagaaaactcgtgcagcctggcgtcactggggtcgtctccttacgcccctgactcctcgccgcaccccggggcccctctccattaggggagtcgggaggcacagacggtgggggtcccagcccccacccagaactcccaccctcggagccttgacttccagggcccgcgcctggacaaaagcatggggcgggctcactcacccgcgcggcgaaggcggcccgggagccggggcaccggcgctcggcggggcgccccggccgcaggcgcacagcgcgggctccgagctcgctcagcgccctgctgccgaccgggcggcgcggggagcccgcgaggcgcgtccgggactgggcagggcggggcggggcggggcggggcgggggtgagcgaaccggcgagagagagagcaagtgggagagcggagagcggacgcgcgctgaggagagcgagtgagagcgcggcgctacggggtcaggactcaaaccacccgctccagcccccatgcactgatttgcatgacatttgcatagcgctcggggagtggacctgctgcccttcccgccacgcccacccgccttctgcctcggagtccggagcggagaatccgcagccaaacctagcgccagacccgggcccccctcgcacttatcc

SEQ ID NO: 229730 - DNA, 120 bp, Homo sapiens
  chr3:123680449-123680569
  hyper
gaaggaattgagcgcgactttttgggttttcgctctttatttttagtttggcatcgtgtgccttttggaagattttgttcttgatattctataaaaataagacctcggggttgttacctt

SEQ ID NO: 229731 - DNA, 298 bp, Homo sapiens
  chr3:123751655-123751953
  hyper
ggaggaggtggccgcggggccgggaggagcaccggcggcgcgagcggagaagctgagcgcgcagcgcccgggccgcagagccccctggacaagcctggcgtgtgccctgcagccccgggctcgcccggcggccccgccccctccctggcccgggcttttcctgcggagctcaggaagccggcctagcacagcctcgaacaatagctcgggactcgggctccgctccccgggaggccggcgcggggccgctgggactgggggcgtaggcgccgccgggggcccgcagcgagccctcggc

SEQ ID NO: 229732 - DNA, 1131 bp, Homo sapiens
  chr3:123752133-123753264
  hyper
cgagggagggaggaggtagggagacagggagggtgggagggaggaggaaaaataaagaggagagagcggagcagggctgaacaatagagacaggcagacgggcgagcaggagagccagctgccgctgctgggggacagcgggcgcccaggcagcccgcaccccggccccgggccccggccccagccagacagcaggcggccagcgccctggggaaggggtaccatgggggagctggcggcaggcacccccagcccgccgcgcgcctccgcctgagggaggctcagcgtcctctgccccagccccgccgcccaacgcccgccctcgaagctccgcggccgccagctctgcggccgcagcagctgcgccccgcgccctccgcccaccgggcgccgagcagccctcggccccaggcttcttcggctcccggctgcccgcggacgccctcccacagtcatgaacccccctgagggagcagcggaggaaggaggagcagcagactcggacgtggacgcctttttccggacaggtaagccgggcagggcgcggggggccagggctgaaggctactgcctcggacgcggcgtctcggacaagtttggggaaggagggctgttgctgccgcgtgcgtgttggggggcagtgccccctcggcgtcggggctggagttgccgagattctggttgttatggcagtgctggctgcgtctggggagggcgtgggggctgggaactccgcgcccctccgccttcaccccagttgcgggagtctgtgttggggaggtgggaggcggtcccctcggaccgccttctcccagagcgcggggatgggcggtgttggctcactttgcagcgcgccgctccggctaccggcgtcccggcccctcccttggctccccctcccctgtgcctgtcagcggggctcccggcggccgccctgggtcggcacccctcctcgccgtcgggggcccggggccctgatgtgcacagaggggcggcggggacccggagccgcgccggctgcagactgacaggagtggggcggaagacatcggtctcgcctggtgcgtgtggggagctggtccctctgacttgagaggcagacccagctgggagggcggtgggcgcctcgga

SEQ ID NO: 229733 - DNA, 262 bp, Homo sapiens
  chr3:124605380-124605642
  hyper
atccccccagcagcccgcccgctcccggccggccacaaggaccgctttgtgcccgccaacggagagcccgggccccaaggcagggctggcggcggtcctccccgtgccctgggcgcgggccctggcgggctaggtcagcaggccggccagcctgtttacacaggaagggaagctcctcctcagcccgggagggaacaggagactcacgacagcccggcggggctgcgcgcggggagcgccccgcggggctgtcccccagcga

SEQ ID NO: 229734 - DNA, 111 bp, Homo sapiens
  chr3:124606487-124606598
  hyper
cccgttgcttagccgcccgtcgccacgggaaaggggcggggcacgctgtattaggcgagccgagattacttgggccaaaggcggttgctagactgcgagagggagagcagg

SEQ ID NO: 229735 - DNA, 40 bp, Homo sapiens
  chr3:124774345-124774385
  hyper
gggatgcagcccggggcgcgcccacgcccccagcacagac

SEQ ID NO: 229736 - DNA, 37 bp, Homo sapiens
  chr3:124860593-124860630
  hyper
ccacccctggaccagcgaccgacgaccagccagacag

SEQ ID NO: 229737 - DNA, 457 bp, Homo sapiens
  chr3:125094169-125094626
  hyper
gccgcagctagagcgccgccgcggtcgccgccactgccggcccggtgcattgtgggaagccccgcacacgggaagcgctccgcggcgcccgccctcgtctggcgcagagacctggctggaaagacacagcgtggcttcgattccggcgcctgcgtgtcaccagcccagggtggccgtggaagctggacccgagccgcaggccccccaggctgggcctgggaggaaagcggtttgaaaaagatcggaactgaggaactctcttagagcgggggactccctgctcctacagccttaaccaatgcccagcgcttggaaagtggaggactcggggattcgggagcgtttcaggcctggggaaatggaagggtcggggacctaggtgaaaggttatttgccagaaatgtcttggctttttcatttattctgtcttacctagcccttcgccgccacctccagt

SEQ ID NO: 229738 - DNA, 33 bp, Homo sapiens
  chr3:125239049-125239082
  hyper
tgcgccgccgccgcgcccgcggccaaccagtct

SEQ ID NO: 229739 - DNA, 71 bp, Homo sapiens
  chr3:125314510-125314581
  hyper
tccctgaaggaggcggaggctctgggagctggtagctgggcgactggctgatgggcgagggagggcgaggg

SEQ ID NO: 229740 - DNA, 290 bp, Homo sapiens
  chr3:125690917-125691207
  hyper
aacatgcatcccgccggagctgccgaaaatgctgaaggagtttgccaaagccgccattcgggcgcagccgcaggacctcatccagtggggggccgagtacgtgctcctttctcgccttcatctcttggaggacgggcggggagagagggtcctgtaaaaccgcggaggttgtcatggctgcagccagggggtcgggactaactggcatcgtctttgttttagctcttgcattgctttgatgctttaaaatccacacataaatactacatctagccgggcaaggatgggat

SEQ ID NO: 229741 - DNA, 1304 bp, Homo sapiens
  chr3:125898665-125899969
  hyper
ggggcctgagctctcgatagcggggccccaggagccacgttgtggggtctgctatccggcctccctctgcacgcgcgaccgtccacttgagcgcagtggctggagctgggactccagcgcagcccctgagcgctcacgtcgacccctccaatcacaagaggccctcgtgccaggcccccagatttggccaatcagggaagacctttccctgtcacagaatggggtcgaggggcccaggaaacaggtagtccccagtcacaaatcatcgcgtcgccttcgctggtccctttctcttatcgagcctcagttttctcttccataagccgggccagcagtgcccaccccacaggttggcgccagctccgtaagggccctaccaccgcggccggccagatcctcggcgggccagtcctggcgctgcggtcatttagcctgatgacccctggccaggttcagcctcaattgctccaaagaactccggacccgtaccccgagcccggcgtcccagcggcgaagttgatgggccccgcaggagcccttgcggtgagaaccgagtcctggagcccctggagcccccggagcccccggagctgcagccggggcagcctcctttccgccgggagtccagcgctctcgagagcccagaaactcaccgcgcgcaggagttggtgcgggcgtcccgggcaggttagacttctgtgagccgcagccccgaaactgaggttggtgcagacccgtcctgggagccaggaggtgggacctgtccccgccagtccgcgagctctggttaaggccagagcccgtgaggggaggggcgcggggcgggcggagagtcagccgagtgggggcggcgctcaccggtggtgggactatggcgggagcgcagcgcaccctctccgggcgggtctataaatgccatgtaaaagccaaccccgcaggggcctgcgctctttcccgcttaggtcaagaagacttactgtggacccttggagaattcccagggctttgaaaagtcccaagcacccagcagggctggcagttctgagcgctggcaaggctaagtgggtcagaggagaccctcgccaagccggtgactcactcactcgctcaccctctctcactcttgatgggccaagtacctgccatgtgctacggacacagcagagcgaaaggagacgctgccctccgggaatttgcagccgcttgcagaggcggccccttagcagctgcgcatccgggtggatagcggcgcttctgcccgcccagtgcctacccgcctctccgagagaaaaacagcccctggt

SEQ ID NO: 229742 - DNA, 744 bp, Homo sapiens
  chr3:125931775-125932519
  hyper
gaagcagcgaaccccgctgtgacggcttcaggccccggcctgtggagggtgggggagtcgcccttgggaggggctgggccccaccgccggctctgcttctcacggcaggggcgcccccaggaagggacaggacagggagctttgtcccgcagcgaacgggaacgcggaggcccggcctctcgcctccccaccctccccaccctccccgcgccttctcgggcctccgcgtccgccctgcgccctcggaaggcgccgcccggcggccgcggcccttcgccgcagccagagtgctttgtccgagctcaaaaaagccgtctccatggaagcggcccttccgctcggagcccggcggcctggagggagacccggcggggatgcgaggattccgccccagccccagaggacgcggcggagagcctggaggaggcgctttgagagtcgaggtctcccgcccgcgcgcctccctggcgcagacctcttttaactttttggcgtggagtgcgcgtcctgacgtgccccctgagctacagcttactgagctttactggcttcgccggacagccgtccccaggtggagagacagcgcgtcgcgcgctgcccgggccccgcagggcctggcgcctggggcccttgcgccgctttggggcgaggggatcacaccgcgggctcccggagcttagcgtcttccacgcggcgctgtgtgtcatccacgcagtgtgctctcgctgccgtgttcaggtcact

SEQ ID NO: 229743 - DNA, 434 bp, Homo sapiens
  chr3:125986252-125986686
  hyper
tcccaggctgtggcgctggggcggtgcgctggccgtgggtcgagaggtcgctgcgccctgcattcctggccgcgcgcgcacaggctggaatccgtacattccattcataacattcccgcaagcgaggggaggagacgcaaagccggggagtgagtgattaaagaaaagaaagaagggcttcttgcagctccgggctgtgttttttcctgcgcgccctggcgcagtccccggctcggaaaggcaggagcacgtgagcggtttgcagagcagcccggcccagccgcgcgcccgtggccggaggctccatttaccctccgcggagggcgctgtgcggcggcacttaagcggcagcttcctctctcccaggcggcctttgtggctgtggccgggacagggaaaagctgcccaggccaagagggcgggggcgtcagggg

SEQ ID NO: 229744 - DNA, 628 bp, Homo sapiens
  chr3:126075614-126076242
  hyper
gctgggcaccatgccctcgtcccacgccccccccttgcccccgacactgctgcggtgaccgacagtaacccctccgtctccagcccctccgccccccaaccccgggctggccagcgcgtccgctctccccctcctctcaccaggccgcgccggtgcccaccatatgggagggccggcccgcaaggcgcgccacggaatcgcccggccaggcaccgaggcggcggcgcgggcctcagcaaagtgctggtgggcgaccggggcggggggggtcacctcccccgggccagtccgacccctgcccacctccgcgggggcccatcccgctcctccgacattcctccagcactcgcgcggtgcctccgagagctgcgcgggagcacggccacgcgccccgaggccggccagccctctgatcacccggggccgcgtccacgcggccggccggccccgccgcgcctctcccacctgaacttggcgcacgccggaccggcggccaggccccggcggtcctgcggccgggcgggctgggctgggggcggcggctagactctcggtccggcggcggccgggggccgagccgcgggtcctgcgctggctcgatcgcccgccggcccgcgggtcgctgcgg

SEQ ID NO: 229745 - DNA, 438 bp, Homo sapiens
  chr3:126113494-126113932
  hyper
ggatgaaaggagccaacccaagtgcggagtgttgaacctcagaggaagaaacccgcgttcaccaggcccaggcctgggccaggcgctgtcctggcggcgtcagggaggacatcgtgcccagagctcggacccagcagcccggccccgcgccctccctgtcccgcggcccgcaggcccagccctcaagcgcccagcctccgcggcctttgtggcgtcacagccagcctgaagaatggttgccttggagacgtaaacccaagagccctgctcctggagctgagaactgcagcgcggaggcttcggagcgagccggggcagtcggggtcggtgggtgcgctcgcggtccggggagagggggcgcgcggggtccgtgagggcgcgtgggggcggcggcaggggtgcgaaaccagggcccgaggggcgcgcgtggccgggagc

SEQ ID NO: 229746 - DNA, 178 bp, Homo sapiens
  chr3:126195223-126195401
  hyper
ttaacaggcaacctctcgtaggcattgactgcgtcccaggggctgtacctgtccgagctgattaagcgtgcgcggtcacccaggggtgaggaaacagggacggcgagctcgagtcactcggcagccggcagatccaggattcgaacctgtccaacaggccggacgcctacccccagct

SEQ ID NO: 229747 - DNA, 846 bp, Homo sapiens
  chr3:126242791-126243637
  hyper
gtggggcacgccaccgcgacaatgcctcttggccttgggtggataatggcacccctgggcaaaccctaggggcggggcccagaggcgaggggcttccccaatcagtctccgccctagcgccctggacttcggccccattccattgggtgagggtgggggcacgaaaagaggagcgggcttgcggccccaccgtgtcccgcctcctcagtccccagcgactcgcaggggctggtggggctggggtccagctgccgtgctcccctgccctgcgccgcgccgcgcgtcttggtaggcgctgcgctgccggggccgggtcctgggccagtgcaactccgcccccagccgtatccagcggactgtcctccgccgcgcgcccggcacagcatggggaggcgctgctgccggcggcgcgtgctggcggccgcctgtctgggcgccgcgctcctgctcctatgcgccgcgccccgctccctgcgcccgggtgagtgcccgccggccgagccgcgcacccccaaccaaacctggctcctcgcgctttccaccgcggcctgacccctcgacagcgcgggggacacctgttgtctccttcctggctggggctaggggtggcgggcaggggcgctggtgaggcacagaaaggctctagacgcccccgcgagcaaaggctcttgctcctcctccggagttacctccccactcccagagcggtgactgttttgagtcccacagccggtgcctggagaccggggtcagttgtggggggtagaggacaattggccaatccgggaaggccatctcccttaccttcacccccttcccctgcgcaccccacggcccctggacatg

SEQ ID NO: 229748 - DNA, 682 bp, Homo sapiens
  chr3:126373468-126374150
  hyper
gctgacctcaccgccgcagcccgggacccgcgggcgccccggcccggacccgccctgccccgggtggcgtccgcgtggcgggcccggtcgcgcgcggtggaaccggcgagggccgcgcctacccgagtactatggggacagtagctcttgctgaagatcaccacccggctgcgctcgatgaggcccacgaggtggcggcgcagctcctcgcgggcctcggacgagcggctgggcccgggggacgacaggcgggcacggcgccccggcggcgacaacacgcgcgcccctcggacatggcccgagcggcggttgggggcatcgcccgcctttcccggcccgggcgactgcggcggcgaccgctccagagtctcgctctcgctcctggcccggccgggcctgctcacaaaccgaaacgcaggcggctgcggcgccgggacggggcctgaggggcggcgaacgctgccctcgctggccactctcaccacccgcgcgaatccgcgaggcagccgctcgccccgccccccaacaccgccccgcgcatgcgaaattgggtcccccgcccgcccgcagcctaggtgtcacctgcccttcgcaaaggggcgggtaccaagcgcgagcctctttatctccaggttgtgcctgcgtccggagaccacccaatcttggcgatggcgctctgaga

SEQ ID NO: 229749 - DNA, 202 bp, Homo sapiens
  chr3:126422878-126423080
  hyper
ccagggcctccgccggtacacatcttcggcctcagcctaacgcactctagcaggcacagaccgccacgcccccacccctccagacggaaggactgcaatccccacaaggcaccgcgactcagcgccacccgattggtgaagcctctggcgtcggccaataggacgtggctttgttggcgtgtgccgcggccgcgcgagtcct

SEQ ID NO: 229750 - DNA, 358 bp, Homo sapiens; identical to SEQ ID NO: 199078
  chr3:126701039-126701397
  hyper

SEQ ID NO: 229751 - DNA, 455 bp, Homo sapiens
  chr3:126854312-126854767
  hyper
ggggcccttgagcccgagccctccccgcccgcgctgtcaccagggccacggggctcgggttaactgatcgcagggaaaaacccattaagcgcctgcctctcccagtcatccgttatcgcgcggacggtcgctcttcttcacgtaattggagaaacttttcccattacccgctgtctctgcgaggcggctctcccgcccccgcaccctccccgcggcccctctgccgtcacgcgggttcttttcctcctccttaagaggctgacctaatttccactctttgtcattttctcccgaccaaactcggagtcggctttctccaggagctgctaggagcctgggctcccactgagcaatccagagcagcgtctccatttcctgggctctccaggccatcgcagcccccggccctgccacgcaccggcgcagcccctgcactcgggcggccctgcctcggc

SEQ ID NO: 229752 - DNA, 140 bp, Homo sapiens
  chr3:127174691-127174831
  hyper
ggcgccagcgccacggcccaaaccccagcctctacaggtgctcactgcgcgactgcctgtcccaggcgctcgggctgggcgccctctctagggcctgggagcagcgtgagtcccgggggcggcccggcatgggcctccca

SEQ ID NO: 229753 - DNA, 204 bp, Homo sapiens
  chr3:127176067-127176271
  hyper
cccgccagccctgccggccgctgccctggagaaggagctgcagatggatccccagtgagtaggaggcagccgtgtgagtcaggcagcggagggaacgggctgcatcgcggagaggaggtgcgaagcagcgcgccgtttccgggctctggaagccgagctgccgaggcgtaagctgggaggtggacatgacgggggagtggggaa

SEQ ID NO: 229754 - DNA, 55 bp, Homo sapiens
  chr3:127177695-127177750
  hyper
ctctttcaggaccacggagagctccttggctgccagccaccgctagagcaggggt

SEQ ID NO: 229755 - DNA, 340 bp, Homo sapiens
  chr3:127309528-127309868
  hyper
agaccgtctttttcgtccagcccaaattgcgaaaacggccacagtcccacaagtcccagagtcccagagtccctgttatcactcaggcccgccctctaacctccagcagcctataggaataagtcatcactgggggaaaaaaaaaaaaaagtgggagagaccaatcaaattcccaagaggcggagcagcccgctgacctcttaaagagacagcacagaggaggtgcagagacaagacgctgcttcacggaagagagaggcctgcgtttctcactcggaaagcgggcggaatcgaagactggaaagctgaggacgcgccacctctcgccctacgcgccttc

SEQ ID NO: 229756 - DNA, 39 bp, Homo sapiens
  chr3:127316969-127317008
  hyper
tggccctggtgtgaccgaggtcacgcagccagcaagtgt

SEQ ID NO: 229757 - DNA, 45 bp, Homo sapiens; identical to SEQ ID NO: 199080
  chr3:127451716-127451761
  hyper

SEQ ID NO: 229758 - DNA, 260 bp, Homo sapiens
  chr3:127634153-127634413
  hyper
ataggtgcgcaggcgcacagtggctggagggcagcggcggcgtggtctcgggccacttccaagcagagggcagcacctgtcccctcggaggcgctgccagcgccctccctcctcctccgcagggcgcgggacctctatttatatcgcccagccagcacaggcccatattgggcagtggcctcagtcaggcccgctggccgccctgccacacggtagcgtccaagccaggtcgtggcccagcgagtggggacgcgccccga

SEQ ID NO: 229759 - DNA, 733 bp, Homo sapiens
  chr3:127794545-127795278
  hyper
gggcggagcctgggcccgaaacgccacgggcgcgactctgtgcgcgtccgcccacacgggggcgctgtgtcctcgcaagctcccgcggggtgcctcgcggccctggaacgctgtggttttcgaggggaaaagtgagagtggctggtcctgcctccgctgccgcttggccctgagatccccactgcccacgggataggccccagtccacccagccggggccccccccttcccctcgtctcgctctccttggcagttcggacttcgggtcagtcccacactcgcgcccggctgtccctgctgcgctcctgtcactggcattgggaagccctccggccccctctctgcacacctggcacacggctcctccctggcggcatgtgggtatttgggttgggcgagcctctccctcccgattcccgagttccgagtgggtcccggcggaccagcgctattctggaggggcagtgcctcagaggcaggtcgcttcgagtggggatttgtgcgctctggcgcggaggaggggggtgggaagccggctcttgccctcctcacccggtggggagcgagcagggccaacggtgcgctgagagcgctcagggcgtccccaacagcatgacccgacccagggacgaagctctgggggacgggaccacttgcgatgacagctaaaggagcacaggggggcggccggcatggagaggcggggccggcattcctgcgggcctgccgggag

SEQ ID NO: 229760 - DNA, 313 bp, Homo sapiens
  chr3:127842608-127842921
  hyper
agctaggacagtgcgcccggcgcctgagttaccatgcggccgttactagggcaatttgcaaaggcccgcctagaccggctttccattggtggaagcgggaacacctccgctctccataggctcacggctgcgcccatcgcggctgctgctagagctccggtcacccacttccgtctgtgtctccgggttggcttcccccgtagccggcgcttcctgccgaggctggggtcgggagcacagtgggaccacgccccggatttgatctagggctggggcgttgcacgaggcagtggcccccgggtaccactcctaa

SEQ ID NO: 229761 - DNA, 84 bp, Homo sapiens
  chr3:127872078-127872162
  hyper
gatccctccatctcgggctcctagaggcttcaggcaggaggagccacgtgagagagaaaccctgcctacggtgacctccagttc

SEQ ID NO: 229762 - DNA, 1101 bp, Homo sapiens
  chr3:128201959-128203060
  hyper
cccaaagcagggaacgatttaagcctcataaatcacttcgccctgaaaaaatatatttattattcttagcattttacgcattatttgcagagtggagggtattagaaatttcaaaacagcccagcgagaggcaggactgagctgaggagactctaaaaactcgcagagtccggaaacagatacacgaagtttccttatcttcaggctgcagatgtccggataggaaactccggcaggagatccgaaagggcatttttttaaaatcactcaaatgaaaatacacagtataggtgactccatggaaaaataataaagggcaggtttttttagtggccggtgtgagtttgtgttttatttaaataagcacgaggagcttgtgagcggggctgtcggggagggctgagccacaaggaaaagtacttcatggccctatttttaaaaaagagctaagcagaggccagaggacaggagtccggcccgtggacactcaacttcggggatcccggagcagagtggggtggcgcaagggtgcccggtgggctccctatacccgaggaggaaatctggcccgaaagaatctggccagaaagagagacgaccccaactgacatcccagtgcttttcatgataaaagaggatttcaagcggcaaagcgtctgcatttgaaggagtttttttcccctgtaattaaccgccagctcctgcccagcagccccctcccagccacctgtgcccgctcctaccagtcttcgcttgggcttgatgagtggtcggttctgcccattcatcttgtggtagaggccacaggcattgcacaggtagtggccggtgccgtcccgccgccagagaggggtggctgtggccccacagttgacacactcccggccttctgcaggggaacagggagagacacgggggcctgcttaaccggcaagttctcgggagggagtccagggcaggaaagcagccagccgagcagtgccggtgcctctcaggcacacggttggcctgggcctggctgcaacagcctgggcaggaagagggacgagagggtctcccacatgggagggggcacaggtccagagtcgtttaaagccaaat

SEQ ID NO: 229763 - DNA, 3995 bp, Homo sapiens
  chr3:128205404-128209399
  hyper
gaaggaaccccaccggacagaccctacagggaaccctcacaggccagctggaagtgggcagaaaccctgtgggtcccagaccctccccaatcggccgctgctcccacctctcccgccccaatttttcagcagctcgattcctgcggatcctacatccgggaagcaagcagacgggccctcctcccctccctcgcctggcgcgcggcgcctgggttctcatcaccacgggcccagtgctcaccgtgcgcggggctgtaggagacgcgcgcccgcgcgtgagcggggttggcatagtaggggttgccctgcgagtcgaggtgattgaagaagacgtccacctcgtctggaggcagcagctgcgcgggttccatgtagttgtgcgccaggcccgggtggtgtgagtcggggtgctgcgcattcagcacggccgggtgcgccatccagcgcggctgctcgggcgccacctccatggccggcggcggcggctcagggtctgggtgcagacggcaacggccctgcgcgaggaagggggagtgaggcgtgccgccagcgcctgacaccccccaaagtcccaccacgaggtgtcccgcacgccacggagccccagcccagatccggcgagaaagagcaccagtcccgggtgggaggaaagcccaaggctcaaaacgaaaggaaggcgggggagggggttcagccacgcacactcacgtggtgacccgcggctccagaatcacacacccgtgcacatggggtcacgcccggggacgggtcccgacaccagtgaccccaacaaacgcacagagcagcacttcagtcagacactcacactgagcccccccgcccggtagacaaacacatgaacacagactcaaaagttggagacaggcgcccgggcacccagtgtggcacttgatcccagcgacacgcacacacccacacttggcgccagatacacatactgatctcaaccccgaaaacatgcacacgcagccccctgagcgcagtactaagcggcacaatcaggacctctcaacaaagcacaccaaagcagtcgcccgcagcctggccccccgccctaagtccccccagagtcccctcaaagctaggagcgccccaggcccccagccggctctcaaaccccaaacttacacacgcagccgtggggaggggagggactcggcctctgagagtgaaggagttccggcgggagccccgagggcgacgggcccagggacagcacgtccggaggctggcggggcttacagggtaggagctgggggtagagtgcgcctcggcctcgggccctcccggctccggcccctcggcatcctccggccgccctggcgccagctgccgactcctgcacagacatgaagcgggggccgcgcacgcctaagaagcccaagccagccaatcaacgccgcgcgcctcccagcctccgcctcccattggctgcgtccgcaattcccgaaccgctggactccgggactgacccgcgggccggcccccctcagccggcgggccccctccctgcgcgctcctggcggcccctgctgccaacgcgccccaccactaagggaccctcaccccaaggcccgacccctgcagcccctcttgcgaacactccgggatccctcgatgctctgggcctccctagcagtaactaaccaccaactgccccctccccaggagcccgggccgcacaccctctggatggcctctccccgagaccctaaccccgccacgctccttcaccgctgaacgtggtcagtccgagcgcagttacctacccagaccgttccctcccctagctcgggcgctgtctgggtggactgggggttgggatggttcggacgacagcggcggaacagcaggagccgagaggggcagagaggggcaggaactacagggctctagagggcacctgggcctcggacacgcggccgctcagggctgtgcttgacccagtggaggtggcccggccggtggctccagaaagggggagggggcacccctccccgggcgtggccttcgcaggccaacgggcccaattgcctggggcgaggccgtggagacccggactggcgccggcgccagctggagggagacgcccccgggcaagaggtggcattttttttcctccggggggggtccccgaggtggcctctggtgagggggaggcggtggtctgaggtctccgtcttctaagtcacctggaagtgctccccactcacttctagcccggagatcggctctatggttcgtgtgggccgggcgcacaagtcttcctccctcccattgtacagactggggagacggaggctcgaagggagccccgggccgaggagggaggtccaggacaaaggcattttgggggacctagacaggtgccgagtactggggggactcaacagcgtcctccagccctcttccctgttgggcccgaggctcccggggtagatgtccagagggcccccaggtgggtcgggggcaggaggagggctggggtcccggccacccccgggagagtgggggaggggcggcgggattgacagtcggtaattgggtaactggaggcggcttctccggccgggcggccccgccaccgcgacgccgagcccctgacgtcacccgattcgccaggaaatgaactttttaataatccgaggagggaggaaagccctcggtcccctcggctccgggggcgcccggctgggcccagctccgcgggcgcgcccccgtcaccccctcccaggccagttcagggcagcgccaaggggccgcgggctcaggctgaggcctcctcctgcctaggcgtctggcgtccgtttgtctgtccgaggcctcagcgcaggtaaagcgcggggctggggggcgcagagctccattgggctgggaaccagcgcgtctcgtgcccttgggggacccgcctgcccgagccgcctgctaagcctcccgctcccctccacgctggagcgcgcggagcccggtctgctcggaactccactctgcgggagcggaggccggcgccagcccgggaagccgcgcagggggcgggaggccgagcgcgaggcccttggcgccgggcctccgcggccaggccgggcaggtgagcagtctccgtgcctcccggttggcgttcccctcaacgcgtgcggtcccgccggggcccactgtctctccgtccgtctgtctctcaacttttcccatcctttagcttacgattcttcatcaactcgtaaaatgagatcgccgcggagctcgagcctatttggcgtctccggagactagcaagaccctctgaaagacaccgcgtccccagggataatcccccgtgtccggcaaagctgccccgctcgagcgcgaaccctgggacccagcgcgggaggcagaccagcagctggccgctgggctgtgaacgccaggaccgagcggaagcttcccgcccggccgcgatcggtgccgcggctctcagggaagtggctacgcgcgtccctcgggaaagcaggtaattcgcctttttctcccaccggcgcggtaaaaattaccctccccctccccgttccgtgtgtattcccagtttcagcgcagcgagctcggcgtctaacccctccgcggcagggtcccggccactgcggtagtggaggtggccagcctggctgagtcccctgcccaaacgtcagccctgtgctgccgcctgcctgacgcagagcggagcgagggaggggatttaattaccccgctcggcagctcagaaaatcgccgcacagaggggcttagcaggacggttaaggagtgcttgagcaggggcctcgggagacccgaaccagcctccttgcccgcaatccggtgtagaggaaaaaaaggaaacaggagttctgccaggtcctttcaggccttggggttgccttcctcgacaacgcaggcaggagccggcttgaccgaagcctccacctcggttgcaggtcctgcgtaggatgcgggactgctgcatt

SEQ ID NO: 229764 - DNA, 796 bp, Homo sapiens
  chr3:128216309-128217105
  hyper
tgtccgtgtgccagcgtgggtggactccgggctggggaagcgacagggaatggtgtgtgccggtgtgacagacgccagagcggcggggtggaacgtgctgtgtcacgggagactttcttgaccaaaacggaatgtgcgagtgtggaaggaagaggggccgtccgcggagtttggggacacccgggcgtccgagccccagagcctctgcagctgggacaaggaagcccgagcccgccgcctgaggtccccgcgccgttagtgacacgcgccgccgacaaaggctgtatttttccaggctcgcgccccgcccgcgcgcgcgcgatggtccccatggcgacgcagatagcgccgcagccattttccctatctccccagagtctattatacggcgggattagctcatctccaggcaggtcaaacccaaagtcacacaacctgcgacgcgggccccgcccccactccccggccgcccctcccctgccccggccccggccccggccccagcccggcgacccccggctgctgcccaagcgcaggcgcagagcgccacctggcggcggcggggtctcgggtggggtccgcggagccggtgcccgtgcagaagaggtggggtgagggtctctacctccagaaggcgggctctctgggagcaggggctttgctttgtcactgctgttccccagggccagactaacacacagtaggtgctccataagtgtttcttgaaaggatgtttggagggatggatggatggatggatggatgggcaggaaattatagacgggggcaaactgcc

SEQ ID NO: 229765 - DNA, 107 bp, Homo sapiens
  chr3:128274455-128274562
  hyper
cggggacgggccgaggactgggtttcttgccatcctcagcgctgggggtgactccaagcccccgggtgggggtggggagtggccgggcatggcgcccggctccacaa

SEQ ID NO: 229766 - DNA, 627 bp, Homo sapiens
  chr3:128336499-128337126
  hyper
ttctgttggagccgcgccgcctttaaattagccccacgcatgcgcgacttttctagcccgagcccgccgtctgcgcctgcgatttcgcccatactccccggtgcccgcctcgtgacgtgccgcagtgttacgaagggacaccagggcgcaggcgcagctcgctcctcaggcctgcgagaggcccgccggcccagcagagggcgcccaccaatctgcacgcgggcccagcgagttatcttgatttcggccaagctttctgactgctccaaaaaacgaagaaaaagattcagggagagtaagaggatgaagagagctggtgaagcagctgaccaaatggcccgaggtggtatgcagccgcggtaaagcagggcccctccgtgaggcacagccgcccgggggttccctaggggaagcaggggctgcggcagacgcctctcgggcaggtcagggtatgcaccctcccgcaggggctcccaaggccgggcgtgcgtgaggccaggtccacgggcacaccactgtgaacactgattaaacgtggcctccacggcttccaacccccaggacaggaccaaccctctgcccccggctcaggccagagctcggcgagaccgtcgctgtttaacaagc

SEQ ID NO: 229767 - DNA, 136 bp, Homo sapiens
  chr3:128369739-128369875
  hyper
cacaagatggcggcgccgaacaaggaaggaccctgtctccggggcaaccgggaagccgacccggcgcctgattgctaaagccctctcagagctgctcgggatatccttctgttcgtagtgcgagtgtacttacttt

SEQ ID NO: 229768 - DNA, 62 bp, Homo sapiens
  chr3:128564768-128564830
  hyper
gggcggggccaggcggcaggggcggggtgcccaacagccaactgcccgccctcaaccgccaa

SEQ ID NO: 229769 - DNA, 120 bp, Homo sapiens
  chr3:128598081-128598201
  hyper
gaggcagctgagccggcctttaggtttctgtacacagggagatttcccatggctggcatttatggaaacaaccgctggtatgtgaaaaacaggtccgtcaccgccgtcacgacggccaga

SEQ ID NO: 229770 - DNA, 70 bp, Homo sapiens
  chr3:128713002-128713072
  hyper
tgcggcctgggggcggggctccgcggggcggggctttccccctcagccactgcgcgcagtttgtcaaatg

SEQ ID NO: 229771 - DNA, 199 bp, Homo sapiens
  chr3:128720064-128720263
  hyper
gagcgaactctccgcgccaggcgggcggggcggagggaggagggagttgagagtggacggccgggagtgggaggaaaagcgcagacgccaggaacgccccgtgagtgaggagaggagagcgtgggagtcacgcggagaagccagacccagacgccgaccgggcactggtggcgctgccggggtcccgggggttcctgga

SEQ ID NO: 229772 - DNA, 231 bp, Homo sapiens
  chr3:128764559-128764790
  hyper
ggtccccgcggtcccggtcccccgcccgggacatctgatggaccgagccgcgcccccgcggagcaccacttcggaggcctgagagcggcgaccgggcagggcgtggcctacatcccggagcctcgcgccttctcctgcgccgacttctgcagggcctccggctgctcgagccgccctgcgctgctcccgcgcctgcacccgaggctggggcagcggcggcgctgggtgacg

SEQ ID NO: 229773 - DNA, 86 bp, Homo sapiens
  chr3:128839594-128839680
  hyper
ggcgtggccaggccggaaattctgacaaaaagttttggccctctggtcctaaaagcaactacttcctgatcgctcctagtcctggg

SEQ ID NO: 229774 - DNA, 188 bp, Homo sapiens; identical to SEQ ID NO: 199087
  chr3:128840084-128840272
  hyper

SEQ ID NO: 229775 - DNA, 120 bp, Homo sapiens
  chr3:128968529-128968649
  hyper
cattgcgccccaccgactccactatgttgaagaaattcgacaagaaggatgaggagtcaggtgagggggccaggcctgggtctgagggaggccggacccccacccgccgagctttccttc

SEQ ID NO: 229776 - DNA, 152 bp, Homo sapiens
  chr3:129118190-129118342
  hyper
ctgtctcaaaaacaaacaaacaaacaaactcaccgagcaggaaaaagaagcaccaaggaagagagaagggatgagagagcgccggggctgatgggaggtaacctctgggtcctgacagggaaaaggcaagcacttccggctccgggtcctta

SEQ ID NO: 229777 - DNA, 159 bp, Homo sapiens
  chr3:129158870-129159029
  hyper
tcaaatccattctcgaggaagacgcaccgcccccacacgccccgaccaatcgctcgcgctctggttgcgctggcgccttaggggctccagtgccaccattgcttttgctgcttttctggctttccctttcggacatgcgcgctcggagcaaggcgccct

SEQ ID NO: 229778 - DNA, 301 bp, Homo sapiens
  chr3:129325032-129325333
  hyper
cagctggcagaagccctggtagatggacccgcacacgactaccaggccctggccggggtccagctgcaggatcttgttgtagttgtccgtgaggcgccgcgggtgctcgcacgaggcctgcggcagctgcggagcgtgacacagcgggctgtcgggcaccgggcccacggccgcctcggcctccaggctcaggttggcgcccgacagctgatagaggcggttgacggccgccaggtacacggtccccgccgcgccgtccagggcgaagttgttggtgggcgtgggcgaggggaaccgacgc

SEQ ID NO: 229779 - DNA, 892 bp, Homo sapiens
  chr3:129345779-129346671
  hyper
cctcgtcctcccgcggccagaggtgcgacctctgagcccctggccagctcccagccggcctaggggggcgggggcacggggcggaggtcccgcagcccgtgctcgtcccgcctcgcttggagggagcaagggctccgagccctgggcccaggtcctgtgcctccgcttccccggctgcgggtacacccccagcttcccgagccccccgggccctcgctgctccacccagaagttgcggtgactgcggccccagcaccccgttccctggccgggcatcacttgcgcagcatgctgcccccagaggacagggctacagttagtcgcccacacctcattcacccccttgggcccttgagcgtcttagaagccgcagatgccaaggaggggacgctgcctcgcggatggtcacttgggagcaaagctggggactaaaggaaccagggacagagattcctgctctcgccaaattggccgctctgggccaggcactgaggacacaccgcgaagccggatagccaggtcctgtcctcagggccctgtccggaagaggactgggcagcctcgagtccgcggcaatgaatgaatgttcaattgcacagatggggaggcgaaggagggagggagggagggagggcagtcgcttgggcggtcattggaggctctgggaggctatgcgccggcaagaagcagcggggtggaggcagccctgcgggagtcggcgagggccgcgtggatgtgctcggtggttttgaggccagtggctggaggggcgtgagagtgggagaccagacttgaggggagtggctggagttgagactcaaatccaagaaggaaacggtggggcttggaccacttgcctactgagaaaaatggaagtcgggaaggctttaga

SEQ ID NO: 229780 - DNA, 76 bp, Homo sapiens
  chr3:129611907-129611983
  hyper
ctaacttctgggacgccatggcgatcgagggctcctaaaaccccagattccgacgggaaccggctcctaaacagtc

SEQ ID NO: 229781 - DNA, 736 bp, Homo sapiens
  chr3:129693934-129694670
  hyper
ccccctgcctgggtgccgccggacagagctgggtattcagggcgtcggcctgagaacctgggagttcgaatcccaatctcaacgctagaaatagaattttagcgttgaagttaggattttagcgttagaatcagattcctggcttagtcatgaaagcttagcattagaaatagaatcttagctttgcaaatagactttgagctttagaacctgaatcttagcgatagaaatgggatcttcgcgttggaatgaggacgtcggccacggagcttggagttagaacgtggcgatggggacctttgggggagtcttggcggggacgcaaccgttagcgtcgcggctgtgcctggcgctgcaatctcaatggttgcactcccggcgaggcagtcccagcgttggcttccccagttccgcgtcacattgaagggtggcggtggcgctggcgatggggttcctacggcctcctgccttgcgcaagcagaactgggcgcaggcactacaggcacccgtgggggcgaggacgcctagaggtgacaggtgtggacgcagagccggggcgaacccgccgctgctcccgcccctgcacgaggggcagtggtcctgcttctgggagggcggttgaactgtgcgtggtttgtttctggcgggcgtcgggggagatggagcgggatgtgctgtgattcggtgcgctcaggctccctctgtcccctaacccagacgccgcgatgcccggccc

SEQ ID NO: 229782 - DNA, 69 bp, Homo sapiens
  chr3:130064446-130064515
  hyper
ccctaagttcatttggcagccggcggcttctctgaaacaaagccagcaaacagctggagcgtctctgga

SEQ ID NO: 229783 - DNA, 219 bp, Homo sapiens
  chr3:130465368-130465587
  hyper
ctgggaaagctctcggggtctcagcagagagaagaagccacgctaaagagtctccacaagtaccccgggatttgacccctccagccccctaacctgccctgggggacatgcgttcccgggcctcgtcttcctctagcgcggatcgctacacccgtccgagccctcctcgagggcctcaccaccgggcggggggagatggaacccgggagagaagtgcag

SEQ ID NO: 229784 - DNA, 182 bp, Homo sapiens
  chr3:130613296-130613478
  hyper
cgtgagctggggacgttgcgggcacacgacggggcgggtgcgggatcttggggaggggggctcccgagatagtggctgggcggggaactccttcctcagcctctcgtcagcgccgcttctcctggtttctcttgcagatgctgctgctaggggtggtgggagcagccgtgggacgcgtggcc

SEQ ID NO: 229785 - DNA, 60 bp, Homo sapiens
  chr3:130745640-130745700
  hyper
ctacttgggtcggcgaacacttccgccttggtgccgcctcgccccgacttcccagtatgc

SEQ ID NO: 229786 - DNA, 501 bp, Homo sapiens
  chr3:131080676-131081177
  hyper
gtgccttgcggcaccgcccacgctcggattggtccgaggtgagattcgcccttgtgccctcgtaggccttcggaacagcggaagagcagtgtcgggccatggccagggcccgcaggctggagctggccgaggccctggcgctggggccaggctagaggcatgcctgctatgcgctcctgcacgcgccggaccctggaattctctctggccgcctccctctgcgctacgccatactggtgaggagggcgcgcgcccggccactctccgctctggccttgcaccttccttgcggcgctactctcgggtgtccctgccaatcccagcttcctcctctctcagatgcagatgcgctttgatgggcgcctgggcttccctggcggattcgtggactcgcaagacagcagcctggaggacgggctgaaccgtggtctgctggaactgctgggcgaggcggcggccgccttccgcgtggagcgccctgactaccgcagctctcacgcc

SEQ ID NO: 229787 - DNA, 428 bp, Homo sapiens
  chr3:131221628-131222056
  hyper
gggcgccgacctgcgtcagcagcctccaacccggcatggattagcccgggaagactcgactcacgacttccgggcgccctgccgctctgctttcagggagtccccacgccaccgccacgtggacgcagtagccgtggggaagttttcgcaatggccgccggaacggtcgccggccgatgctctctgcgacggaaagaaagccgccggacccacttccggtgcgttttacaatgaactccgggcactcgagtcgctccccggaaactatagttctgcttccaccgttgtcctactttggatgtgagttggagtaggtaggggtgggaagggactgactcgcctctccaggggtaaaataaaagggatgttcagagtttaaactttagaagaataaggacagacttcctgaggacgctaaggaaaatgaa

SEQ ID NO: 229788 - DNA, 367 bp, Homo sapiens
  chr3:131245722-131246089
  hyper
ggaccccgccctgccgcagcaagcggatcagcctggcctccggctttttcgcccgcctggtggagctgttctgtagccgggaggacagctctcgcccaagccgagcatgccccgggcccccgcctccttcccaggagcccctggccctggccatggagctgagccggcgcgtggccgagctgggggacacccgggccggactcagcgtagagcacgcgcacagcctcacgccctggatccaggcccacgggggccgggtgagccgctgaagcctctctctcccggcctcactttacccgactgccatgtgatagaggaggggcgggaactgcttaggttcctctcagacctccggtattctcccagc

SEQ ID NO: 229789 - DNA, 142 bp, Homo sapiens
  chr3:131752688-131752830
  hyper
tctgtgataccacgcggggtcgtgatctccttactcagctgtggcttggtttcagtggtccctccagtcccgtcccctgtccccgtccccctttccttctggctactttattccatagaggaagaagcgctgaaggactacg

SEQ ID NO: 229790 - DNA, 1180 bp, Homo sapiens
  chr3:131753056-131754236
  hyper
ccgattttgaaaaccgtaccccttcttccgccttcgggacttccctgacctatccctcacccgtgccatgctgtcccctcccctccgcggtctttctccccaactccattcgccccaccccacctgggcgagttgggtggatgtcagaaggcgagaggtaggggatggaagtcccttcagattaaagacgttgcttgctgctgctttttaaaacaacaacagcaatgacaaacgtgcaaaggtgagcgagaaccagtgcatctcaaaagttggtcttgctacgcagcagctccaacagactttgcaatcacagcgccccaggaacacaggaatgaagagttggcatttacttacctgggtgtgccaatctcgaagagtggagagagaattcagcccgggacgaggtctgtcccgcccccaggatgcaaaatccggctttgaagtggaggtggttggtgtggtagttttgtactgatgtaaggggcgtcgcacctccttcccctctcgtcctccgaggtcagtttagcaacagcggctgggaaaggtgctgagagcagagttcggtctctccggaaaccctgactccattctcggtgatgggggtgggggaagagggtgaaaatgttggagatgtcaggtcggctctcagttaactcggagagtaaagaggagggtactgagaaaagagggagggagtggagtggagcgagggaggaaggaaaggagggtggcagaaagagaaggggacgagcgggtggcggggagatggcagcttctcacagagagatttccaccttctgacgaatcccatgcacccagcaacccggcaagagactggttccgaaacctccgcgcgagcgccccctgggggttgctgacggagacgagcattgccccgggaacccgagctcaggccccgcccaggccttggcggcggcgctctccgtggtcctgccgcgcccgcagtctgggctttctgctcagctttgtcgctcaactgagctcctggggacacttgatttagatctccaagtgcttggtctccatctccactctagggtggagcggtcgtatcgcggcgcgggtgtggggggaatgggagttacactttttggcactcaccaaagaaaacttcttagatgggtgcttaactgtcaccaaaaatggtaaaggtgttgct

SEQ ID NO: 229791 - DNA, 42 bp, Homo sapiens
  chr3:132440491-132440533
  hyper
aagcggggaccaggcgcggtggctcactcctgtaatcccaga

SEQ ID NO: 229792 - DNA, 281 bp, Homo sapiens
  chr3:132440593-132440874
  hyper
gcgatcgtgccaccgcagcgagaccctgtctccaaaaaaagagacagaaaaaggggagggttaaggaatcatttcagactcgaagagaatatggcctctcaaattaaaatgggcagtttccgccgaactttcaaagccgcttggtttggagagggagcaggacggccgtgcttcccaagggtctcccggcgtcgcggcccagcccggcgttacctgcagttcggcccgcagccgcttgttctccgtgtccagcttggcctcgcggcggcccatggacaaca

SEQ ID NO: 229793 - DNA, 57 bp, Homo sapiens
  chr3:132756942-132756999
  hyper
actgagtgccacttagcccccgaaaacagagaccctttgtgcccgcctcgcacccgc

SEQ ID NO: 229794 - DNA, 230 bp, Homo sapiens
  chr3:132757419-132757649
  hyper
gttgccttggtttcccttttcctatcctctcaggcaccttcccatcctccccactgcgtgacgggtctgcccgaggggagttgcccacctggcagccctgcctccgcctttgtttcccgcctggagggttgctggcatgaaccccctccccaggtggagggtgcgggtgatggggcgcgggcgtcaggagcgctggacctgggctggggccgaggaggaggtggctttaa

SEQ ID NO: 229795 - DNA, 159 bp, Homo sapiens
  chr3:132757829-132757988
  hyper
cccgggaggttgctctgccggctggacctggcggttttcaccccagagttgcagcgaaattgaacgctttgagcctgctggaggaatccagagattggttcaggggctatttttttttttaagcagttgggcaccggtggagccggtctaaatgaaagt

SEQ ID NO: 229796 - DNA, 140 bp, Homo sapiens
  chr3:133292198-133292338
  hyper
accctcggccaatcgggaaaccggagtcgcccggcacgtcacttattttgcatatgccctcctctccccgcccccatgcttggactccgccccgtctgggtcagggattgtcacctaagagcttcgtcctggcacctgat

SEQ ID NO: 229797 - DNA, 314 bp, Homo sapiens
  chr3:133465042-133465356
  hyper
tgtgctggactccttccactcgcgggtcgtctccagagctcagaaaatgaggtgatcagtgggacgagtaaggaaggggggttgggagaggggcgattgggcaacccggctgcacaaacacgggaggtcaaagattgcgcccagcccgcccaggccgggaatggaataaagggacgcggggcgccggaggctgcacagaagcgagtccgactgtgctcgctgctcagcgccgcacccggaagatgaggctcgccgtgggagccctgctggtctgcgccgtcctgggtgagtgcgggcacggggtagcaccgcag

SEQ ID NO: 229798 - DNA, 385 bp, Homo sapiens
  chr3:133524471-133524856
  hyper
tgtgtgtgtccctcgacaaataacctgtctgcccctatcgttctgtaggaggacggagtcccagagaactacaactcccatcaagcacttgggggatcgccgcggctgagggagagactatggcttaggaaccaccattcgcgtgaggctctgctccccgcgcctgcgcagagtgcagggccacgtcgcttttgctgtaccggggaccacgcgtctcatccatggcttccgcggactcgcgccgggtggcagatggcggcggtgccgggggcaccttccagccctacctagacaccttgcggcaggagctgcagcagacggacccaacgctgttgtcagtagtggtggcggttcttgcggtgctgctgacgctaggtaaaaggcg

SEQ ID NO: 229799 - DNA, 116 bp, Homo sapiens
  chr3:133748101-133748217
  hyper
ctgtcccccaaagcgcggggggtccccctggcacctccaagcccatcccattgacgaagtaaccgcccgctggaggccgaaaaagcgttcctcgagatgatctttttcaatcatcg

SEQ ID NO: 229800 - DNA, 314 bp, Homo sapiens
  chr3:133748637-133748951
  hyper
gagccccatggctgcgggcggctggccgggcgcggagtggcgcggggtcggggcgcctcgggctggagcggccgggcgggtgagaggcgaccgcggcggcagtggccggaggagattcgcggagcggagactgagccagcgagtgcgcgcctagaagtttttataagtggccgccgccgatgatgaaacgcgctctccctcctccctcttttcctcgggtgtcaaaggcgctacgagcccccgccccgccgccgccgccgccgccgccccctcagacaggtgtgacgccgcagcgacccgcgaggcttgactgc

SEQ ID NO: 229801 - DNA, 271 bp, Homo sapiens
  chr3:134032172-134032443
  hyper
aggcgggctgggagcggagtggggcagccgccggggggcgcccgcaagggctagggctcggggccgggtttgggggcgggtaggggcgggcaggggcggggcaggagccggggctgcgagctggccgcggcgcaaggaatgcggcctttggctggtcccgggccggcattccggccggcgcaggaatgtgagcagggtgttcactgcgcgctctgagcgcacaagtttgttctcctctccttggagaacgccggcccgctctgtgccaccc

SEQ ID NO: 229802 - DNA, 414 bp, Homo sapiens
  chr3:134092503-134092917
  hyper
gccccaccacgagcccgggcggacctggagcaccggtggccgctggtacgcctggggcgagccggtgagggtagcccgaggcccggagaggtctttaagcatcgcgggtccgcctccctccctctcgagccctctttgttttccaaatactctaacgctgacgtcaccgggctggacagcaggctgcattctttctaagtgagggccaattcgtggctccagagaggattttccaaggaagacaaagaggaattcttggactagttgggggcaaaggcacctgtaacccccacctaaccaaatcagcccgcaggaccctgcaacttgagctccaagcggcgcctccatccctgtcccccgccacccccacccccgccgacctgcaacccgaaacactgtggctgttgtctccgg

SEQ ID NO: 229803 - DNA, 108 bp, Homo sapiens
  chr3:134093757-134093865
  hyper
tgtgtgtgtgtgcgtgtgtgtgtaccgggggaggtgggaaagggaggagggactgcaaagacatccatatcctctgggctgggacagtgccccgggctaagtgaatgc

SEQ ID NO: 229804 - DNA, 598 bp, Homo sapiens
  chr3:134125148-134125746
  hyper
acccagcatcccaagaggcccggacaatgggtataaattcggaggatcagacgtgcaggcagacaaaaccaacatctgcatttgaaacgggctcccggggctcttcaaggaggcgagcggccgctgcagggctcctctaggccagattacatcccagaacgcccaggcaggacgctccggctcagattgtgaaccctgggactctgcgtccaggaggggcccctaaaccctgcgctaaaagccagaggtccggggagcaggcggatgccctcagacttggctattttgcttaaggtcacctccaaacgggactggaataaaccctccttgtttgcctctcgccaggcctaagccccgggtccccttgggtgtcgtccaggacgccaggcgcggctgcttacaatggctctcagacgacagatggcgggcaggaagggagggggcgccgggcaggtgcgcgggggagacgcgccgcggcagcgccggacgccaggctgcagggtgaatagatttgcagcccgccggctgcaggcggcggccgccgagccctgcaaacaataagtgaattctccgaagcgactgaaaccccccgggctgg

SEQ ID NO: 229805 - DNA, 366 bp, Homo sapiens
  chr3:134204740-134205106
  hyper
gaacgcattcccgcgcctccaaaacctaggccgggggcgctggaaacccttaccggcacccggccaccgcggcagacgcttgctcctgccacgccccccccccctcccccgcatcacgtgtctgcactcgctttcctcggattcccggatgtgggtgagttcatttgctcgcgtgcaggggaagtctggagaaggcattgtttcaattattaaaagtgtgggggcagtgggcggaacaaacgcgccgactacagaggctggacgtaagcttagcggtggcgcgcgtgcgcagcgccggcccgaggtaacggcgggaaggctcaggggcgtgcttgcggcaaccctgtaaccgccggtgcgcaagtt

SEQ ID NO: 229806 - DNA, 150 bp, Homo sapiens
  chr3:134370106-134370256
  hyper
ccctccctgcgcccctgcctcccgcccggtgcacttgaagcgctggtcctgggctccagggcttctctggctgagcgctgcctcatccccacggtctccggagggttctcgagagggctggagccgacctcccacgagaagcccctggca

SEQ ID NO: 229807 - DNA, 1155 bp, Homo sapiens
  chr3:134515161-134516316
  hyper
aggtttccagggtcagtcggggagaggtggaaacccttttcgcctcttgagccttggaacaggagtgggctggggtgagtggtcggtcctacctaaagtctcccagcctctccaccaccccggagaggatactcggcggccgggagtcgtcgggcagcgtcactctctgccagctcagacttggcggtgcctccggcttggtggctgggaaagcgcgctccaaagacaccgtgcccggcgcagcggggagcctgggcgctcggtagcgctcgcgaatccctgtgggaaatcccggcccagctccccgcctcccgccccttcccccgcctctgttcttcgcagcctagcagcggccgcggcagcctcctgggaacacagctccgcgggagagcggagttggagttgtcgggagaaaaccaactctaggggtgatgcgctgccgcagtccggctagcagccccactttccggtgtcctgctccggatggaactcctctgggggactccaagccggggaggagcagctcttggcgaccgcgcagcgttcccatctgggagctcgctccgcttgttactcgttcctcgcgaaactgtgaccggttgcccagtggaaactcccccaaacacgatggtttggtgccccccgccattccggaaagctctgcccttctggaagtgaagctggaggggcattccgggccctgaggcgcggctaagattcccttcccttttggcgaagaccaccgcatcccacgtttgttctggtggcggcgtgggggtgcggcgattaatgcctagaaagctctcgcttgcttttccgaaggtggctttttgtctgccctcagtctcctgcttccctcagggactgctgggctttgtagggaggggagcaaggaggggtttgctttttggaacgtgcaggagaagactggagccgtgtggagtgccgtcaacaccctggcgcagggatgcctgggtttgacttattgagagacacgtgtgggagcagttgaaattggaaattcaaggggatatatacccccaaaccgggcaggaaagccagggtgagcgcatttgcaagggcaattccagactggacttgcagcattggggtggcgtcatgcaggtccgaggctcggtccggcccgcggctctt

SEQ ID NO: 229808 - DNA, 37 bp, Homo sapiens
  chr3:135684610-135684647
  hyper
gagagtccgcgccgcggggaggcttggaggcaagcgc

SEQ ID NO: 229809 - DNA, 101 bp, Homo sapiens
  chr3:135685067-135685168
  hyper
aggaaagcctggcagagaaacaaatgccagcgttttggaagaactgagagtcacgtcgttaggcgctgaggctttcttttccttccccgccccctgcccaa

SEQ ID NO: 229810 - DNA, 278 bp, Homo sapiens
  chr3:135914741-135915019
  hyper
cggcggcgcccctcgcgcctcagtcgcacactccggggtcaccagactcaagcgccgccccctcactgcccggccattttttcggcgccacacacacagacgactcctccgccgagcacgacggccgccgccgccctcagcactccccggccgcggaaggcaagcgctcacaccgccaggccccgccgccgcccagcgcacacagcaaggccccgccgcaggcccctcccccgtgcctcgccgccctcaccccgactccacgcgccactccagctcgg

SEQ ID NO: 229811 - DNA, 64 bp, Homo sapiens; identical to SEQ ID NO: 199106
  chr3:136471113-136471177
  hyper

SEQ ID NO: 229812 - DNA, 1326 bp, Homo sapiens
  chr3:136537643-136538969
  hyper
ttgcgacttttaagcgcaaacaatgggtggaaatggacagaaactgcctccgtgcccacttgcagcggactacgtagccctggcagacaggcaattgcttcaaacaagcgccctccaagggcgtaagctagaggggcccgggcgggcgctttcccgtggaccctcccacctcgcgggtagaggaagtccttcagttcaggcacaaccctgagcgtcccccgcagtctccaactccggcgccagtcaggttgtggggtgggggcggcggagggcggagagcgcaggcgcagagtccgcgcggcggcgcccctctccctccgcagtactccgggcagcgcccgcctcgattttcccaggcgagggcacgcccgcgtcagtcgcctccggggcaccttcctcgccacgacacgcaggtaaccgggccccgggagccggtcggcggcggcggactgggaccttgatcctgcctgcccggccgcccgacaagggaatgagagcggaccccgaactccacacacccgcgtttagccgccacacctaaggggcacaacagtctttttgggtaagggccgggctgggggcgacgcgccccgcccgctttgcagacttcggggtgctctgcacgacgcctgaaaggccgcggggcccgcatttctctgtgctgccctcctggagaaccgggacacggggacgggagggccagcatcggctacggcccggtttcccgtttctttccgctgtcgcgtgtctgggccctcctgcagcgtccatgatgaaggccaggggctgttgctttcctctcgcccagtagccaacccaagcaaggggtgagtcactgtggcgtcatatgggatcaatttcaaatacaagttttaaaaaaggctggatgattttagaaatatggccaagaatttgtattttccattactctcttgtctcatgtccatgactcttgaacgccagtctgtgggcgctgagattttcgtggtacatcgacggtttgtagacatcttttcccaagggaagacgagggcaagggttagtggaggaagggcctcgtcacggccgagagtggcggagaaggctcagggcaagtccgcacagcctccagcagccacggggaggaaaaggcgaatctttcctcacagtgctctgggcgctgtagaatttctacgccacgtgcacccatttggcctcatttgagaggaggagagggaagaagggtcgcgcgggccggcaggaaagagactcgtgttgcggcggatgaaggctcagcgcggacctgcatctcgggccaggttttctttcacccggctccgcgaggag

SEQ ID NO: 229813 - DNA, 478 bp, Homo sapiens
  chr3:136751321-136751799
  hyper
caaaaatttgtttcccactccgtcctcttcccggatacttggagacagcagcgtcagtggcattgtttggcgtctctgaacgcggctttggcagagccctccggagccagctgtagttcccggagacgccactaggtgacaatgtaggtcttggttggtcaactgcaggctacggttgatttggttgggtcccagcggagccttagcgtcctctccggcaaaataacaaatgtccgtcgtgcagggcactttcttcgggaaggactcctgggagctcaggagtttgcatacgaagccgagggagcgaggggcttctgataatgatattcagcgtcgaacagagtcgctcatatgcagagccggagtctctcccagctttgatatatgagattattatggagagtaatgcaggccgagtgatgcttgctcggcaggctgtggatgtggattcctatgtggattgcgaggccgggcgcaa

SEQ ID NO: 229814 - DNA, 667 bp, Homo sapiens
  chr3:137479125-137479792
  hyper
ggacacttgggggggtgggccggattaactgtcttgtctctaaacacctgggtgcgctggcgctcactctcagctgcgagctgaagcccacgctgctctcaggcttcccgcaacaggcacctgcgacttcgctcaccaaaatcttccagtggccacagtgagcgggcaggactggtgccagcaagccccaagcatcccaggccctctggacgcaggtgactcttctggcctctttggaaagccattggagctcgagaggcatagccagctgcctcctttccgtccatccccaaccgcgttctctaagccacgttctgtgcgccttactcccagcactcagccattccccagccccagaggccttggagtagtgacctctgcccaccagagaggagggggccggagggtggggcggagccttgtggcaaggcaggtgggtgcaggcctctggggccccagactgccgcgtctggctctaccaggctgtgtctcgggccccgtgcctgcagctgcaaggcggggaaagacctatcgggaagatccacctcggcctgggcagaaggaaactttactgagagtcttctctgagtttggaattatgcggaaattgaacccaagatgaataacacgcagccacagccccagagaagctcgaagtctagtgggc

SEQ ID NO: 229815 - DNA, 1316 bp, Homo sapiens
  chr3:137479992-137481308
  hyper
aggcgcatcctggacgctctgcgccctggagggagacgaaaggcccggagagaagcagattaggtcggtgcccttagaggcctcttccttcacttccgggaaacagcggcggttccctgacaaaatccctgttgctcgggggttcggacgccttgctaaggctggcacgcagcggaccttgagtagctgcgctgtgtactgaacgtgtgcacagcttctccaggcaaatgtgcaagcggaaagacctcatccaagcgttatctccagccctggaggagaatgaactggtagcctggggccaaacttcaggccgtggacaaagcaggaggagtatttaggcaacctctgtcctaatgcttgttctggttgtgaccgaagttgctgactctcctcaggggtcacgtctccaggacgtgctacccggtggtttagacccgtcagggaggcacagcgtgaagggacagcgcagcgcagtagaggcacctgctggagacagcaccaggccagaccccaggatcacgggaactcctgctcccgccacagctctaaagagtgttgaataaaccggtggtcaccggtactgcgtaaggggtgtgcgtggctttgcagttcgcctaggagacaagctgatgcacggcctggaaggtgcagccctcatccctgcgttccctccccgcgcggagttcctgtctcaaggccaagacgcgcagcgctgatgctggccccttcctaggtcagtgcagctggaccaggcaatcggggtctccgaaacgtcggggggtcagctggcgccctgcccaccatcgaacgcccttcgtatcactccgctcctcattgcgaattggactgcgcattggctgcgacccaaggctgaacacaagaagcttggagaggagctcgggcgtttgaggagaaggaaatatgaggaattgcaggaaggcgctcgcctgcccgaactgcctccgggcaactggaaaggattgtcctggaaactgagaggagagaaaggacgtaggaccttgtgccagatccccttgctgagtaatttccaagagcttggtttgcattaacccagaactttgggtgtgcgtttggtgtcccctggggggttctagagtgagagattggcgggtcccctccgaacgctggatctcgctgcagatatcagtatttctctcattccttcccaaagccgtcgggatcgcccagtagaattagaattgggtgattcctgaatctcctatccctggctggctctgaatatagcgcaccgctggtcagacctgagtaggggttgccagcgacgctcggaaacc

SEQ ID NO: 229816 - DNA, 342 bp, Homo sapiens
  chr3:137481911-137482253
  hyper
cccctcggagccaacggagccttgcgcgtttctggccggtcctcccaagagagaatggtgcaaaagccaataagcctggaacacacgcaggtcccgccgggcctgggacaatggtttccatttaataaatatttcccccaagggcatttcacatcgggcaggcaattattcaaaggaaacaggcgcgcaggttggctctgcgggttatttcgtcctctttacccgaagaatgctcatttgacgcaagaaacgagtctcgcagcctccctgggtgggaagaggcgcccagggacaaaccgaccctggttgcgatacaccgtgagactccgctgtagggccgct

SEQ ID NO: 229817 - DNA, 2165 bp, Homo sapiens
  chr3:137482464-137484629
  hyper
ctgcattgcctgacgcgaggccttccaggagcaggtcagacaacattgctcagccacccagggtcccagcgctacgcccgggcgccgcatcctggggcaggggtggatgcctagttgcaggggcttcccgggagaacactgccaaagcaccgccgagggtggggcgcgaaaagtttatttcgcttttaccctgagcctgctatatgttatttttctcttccaaggatatttgacaagagggcaaagtgctgtccttgcatttcgcggcaaagctgtcctatttatcaacacaagctctcgcctcgctccctttgctgtcccttccccggcctttgtatttcaagccctaattctctttcacaaccgggaaaggaaacaggagacgcggaagagttttatttgttgacagtgcccgagacaatgtggaaccgaagtccccagtctagagctagcctctctgctctagccctctctctgcctctgtccctcacacctctccccgcccccaccagtcgcgctctctgtttcttgcaccggcgtgttggcaggtgcgccccctcggcttctctgctgctgattggcgcccaggttggggagtcgccgccccgcgcttatgtcagagtgcgtgcagtcccggcccacctcgcctttgaacttcgccgcttttggctctcgttcaccagcctccccgcattctcagccaggtgcagcgctaggcgcggcagctccgggaaagccacgggaagggggagccacgactggaaacgcaagaggagagaagggaactagagaaggcaaaggtggagagggggagaaggaggagcttcttgccctggctaaaaaattacctggccacttaatcccggagactccgatacttgggtcccagcccctggtgcctgaagccccccggccgatcgccctctcctcccccgccctttctgcccccactcgctcccccggggctgcctgggcgctgggactggcatgatcagctgaactttgtggggtcagcgcttctctctggcttcccctcagcggcgccaaggcgaggggagcgcagaaccccggctcaggacggacagacagacggccagccgcgcccaggctcgtctgcagaacccttgcactccctacccccacccacctagccgccgggaccatgtccaaaccttcagaccacatcaagcggcccatgaacgccttcatggtatggtcccggggccagcggcgcaagatggcccaggaaaaccccaagatgcacaactcggagatcagcaaacgcctaggtgccgaatggaagcttctgtccgaggcagagaagcggccatacatcgatgaagccaagcggctacgcgcccagcacatgaaggagcaccctgactacaagtaccgacctcggcgcaagcccaagaacctgctcaagaaggacaggtatgtcttccccttgccctacctgggcgacacggacccgctcaaggcggctggcctgcccgtgggggcctccgacggcctcctgagcgcgcccgagaaagcccgggccttcttgccgccggcctcggcgccctactccctgctggaccccgcgcagtttagctcgagcgccatccagaagatgggcgaagtgccccacaccttggctaccggcgctctgccctacgcgtccaccctgggctaccagaacggcgccttcggcagcctcagctgccccagccagcacacgcacacgcacccgtcccccaccaaccctggctacgtggtgccctgtaactgtaccgcctggtctgcctccaccctgcagccccccgtcgcctacatcctcttcccaggcatgaccaagactggcatagacccttattcgtcagcccacgctacggccatgtaacccccagcccggcccggacctgaggcgtggtctgaaagccgggtctgcaccctgtcctctgagcctagccccggcctgcagacgcctccggggtcagccctgccgctgtcccttacaccacccagacttttcctctctcttccagggggaagggtggggcgtcctcccggacccaaggcgcagacaggtaccggaaacttgcaaacgttatgtcagctacacagctgcccctatcccgactctcccaaaacaaatctccgactgtaccccctttggacaa

SEQ ID NO: 229818 - DNA, 277 bp, Homo sapiens
  chr3:137485308-137485585
  hyper
agcttggtggtctgcgggttgggtgtagaagggcctagagcttcggatccgtccggaatgcgccctggagattgctttttgcctttagaggctagacaaaggtatcgttccctgggacttcactctctcctcccattcttcccaaaagggtcaggccacttcaaggaatgaatgaactaagtcaaaggccgacccagaccgctgagatctgggtgagtttactttttaaaaaaccaaacgctgaaggagcagggagaagcaccgagtctcctgggaa

SEQ ID NO: 229819 - DNA, 469 bp, Homo sapiens
  chr3:137485832-137486301
  hyper
agggaaaaggaaggcgacattgtcatggctcaggcaaggagtttttaaaaatcgtaaaaaatcaaataaaagcacagcccatgacgttaaacaaggaaaagagtccttttctttcccctccgggtgaatgttttcttgaagattattgtctttcctgagaaaggaccctccgatgttatccagcaaaactctttggaatttgttctcaaaatcgaagggtgctttccacccttggtcttggagtctcaccccaaaagccgcgctcacgcgtggttttccttaatttgcgtgcttttcccactggctttgatatgctgtggggtgggaggtggggcagcctagaggtttgtgggctttctgctgctgttgagagatttgtacgcttgcctccgctgtttccaaaggagtcggtggctcgaagtgcacgggaaacgttgtcaacagacaccaaagccgaaacccgcggatt

SEQ ID NO: 229820 - DNA, 249 bp, Homo sapiens
  chr3:137486571-137486820
  hyper
gataaataaatgagcgatcaggcgaaggtaaacaaaggcgggctgagggaggtgtagggggagtccgggctggctgcgccacgcttacttagcattacaaaacccttttacaaatcgagacaattaggaagtgacttgcctctggtggccgtccggtctgggggcctgggcgcttagggaaggcccctcctcccgccccctaggaagcccaggaggcctgggacggagacgccacggttttcctgtctg

SEQ ID NO: 229821 - DNA, 1551 bp, Homo sapiens
  chr3:137487031-137488582
  hyper
aaaggggcacgtggcgagtgcgagggcaaagtgcgaggggcaaaggcctcggacggtggctgaagctggaaaaccgaaaccagggttccgggttgcgcttggtcttaggctcagatggggaattaggaaactagggtgcgctgtagaagagaggcgctcagggggctgcggcctcactcagaggtggctgagacctctttccagcctgcaaagagccgggggcccagttcgggtcctgagacctaaagtcaaagacttggctcgggcggtttttggccatcacacttcgtttccttccttctcagactggccttccccagccatctgccctccttagacctggtcccaacctctgcccccacccccatccccgcaagagcctgcctcagctttgcctccgtcgccccgagggctgcggagcgtccgccgaggtgcgcggccgcgactcgccctaacaaacagccaaaatcctgctcgtcacgccgctgacaggggccgattactgactttgaagtcaggcgcagacaaaaagaaatcccctggggggtgtgggggggcagcagtccctgtcaaacctgtttgctcacaactgtctctttctttcaagaaaatcattaaagcaaacctgtagggagaggagcgccccgcccgcccggagtggagaagagccgcttctcccgagcgcgcgtcgcgcagcaaagagcagccaagagttgccctggacagactcctggcatccggagaacctgaactccggcgctgcaaggggcgcccgtggccctgcaggaggaggttctgcagatccctctgcgttaggcacgcgtccggtagccagggagccccagacttctctcgcttagcaacctgggcctccttcgagcggggttggcagggagggcccggacctctcgcctgaggctcccattgcttccccgggacccttctccccgccaaaagtgacccaaatacatgccgcgttcagcgccgtcgctcctctgctgggtgttccctaggacagcagagacctgaacagcatgctgctggggtggcagccatctgcgccggcgcggcaggagcagagttgtttgggttttacctaggtttgctttcttaaaccttggctgccatctggctcaggggtacactggctacatcttcagagagatgtggaattcttgacccctttccgcctctggcctccctcattccgagaactccgtcagcctttcatgcacttctcggttttggatctgactccaaaaatctttgattcccttccagtttccgagtttttctatttaaatattaatttccttaggcccgatgactttaaagacggaaaagaccagctactttgagtaaattacgctgaggtgtgagtgactgacatctgagaccccctgaacgtttgcattttggaactggagcgagctaacctgtaggaatctccggtgaaccaaagcgggatgatgtttccgtctgagtagggccaaggtactttcaatacagctcaccatttagggaagtgtgtcccgccggtcagcttctctt

SEQ ID NO: 229822 - DNA, 369 bp, Homo sapiens
  chr3:137488986-137489355
  hyper
cctggaaccagaagcgcaggagctgggccacggcagagtaattaagaaaataatgaaattgatggcggatgggggcgctagaaatcctggggcgtctacttaaaaccagagattcgcggtcggccccacggaatcccggctctgtgtgcgcccaggttccggggcttgggcgttgccggttctcacactaggaaggagcctgaagtcagaaaagatggggcctcgttactcactttctagcccagcccctggccctgggtcccgcagagccgtcatcgcaggctcctgcccagcctctggggtcgggtgagcaaggtgttctcttcggaagcgggaagggctgcgggtcggggacgtcccttggctgcc

SEQ ID NO: 229823 - DNA, 1489 bp, Homo sapiens
  chr3:137489558-137491047
  hyper
tttccacttaggtccgtaagaaaagcaattcatacacgatcagcgctttcggtgcgaggatggaaagaaacttcagaaaaactctcgccagacaacccggcagcacttggccccggaacagagaggagagaaagacctgaccgccgcactcagggccacccgccgcactaagtttgagggttccctctgcctccaggcctctgtcgcccgagctcaggctctcctaggtgcttcagggccgggctgcactcgagccccgaggaggccctgctagcgctagcgcggcggtgataaccgagggaggtgggtgagaggtgcggctgtcgaggcaaacgcagagcacccgcccagtcctccaagggccgagagccgggagtcccgaacgccgcttaagcagctccttgcttcccgcagcccgtccacatccctgcgggatttctggacgccccgcccggggacctagggaggagggagagaggagggagggagtgggcagcctgggcgcacgccaccggtccccgtacgcccggcaccccccgtggcgcggcgagtcaatgggatttgcacactcgaggtgtaacagcattactgcattaattaccatttccatttcacgtccagattgtttacttatctgcgggaaacatatgtcgggagaagttcacattccggattctgctccgctgcccaaggtgcaattccggggaggcggcgaggggggaggggagggcttcagattttttattacaccctctagccttatctgccgctgtaaattatgaggatcctccattgagcggcatatggagattatatacttttttgaatatcgtttcccaaagcctgcagattttcactttgaaatgaaacaatcctccgctggttcccccggggacaggcgtctcctgcgttcccccgcgcggcctgggggacccttctcgcagagcaggcgcgcaccccaatgccgtggccggcgcccagtggagacttctttcacagggtctagaataatcttccgcggaacacccatccatatgcagtgtttgagaactaaggcagctcccttgctctgttttcctgcgcctagcccccggacttttgtgccgtttgcagctctttttcatttcgaatacccgcatagacgcgagcccacttctgccctcttcctacgctgggcggctccaaacccgccgcgagggctgaggtgttcacacctgcccacggcagcctgcctcgccctcaagcgcctcaaagcttcctaagcgcttacattggtcttgggacagccgactttggcttctttgtttgtttgagggaccgcggaagtggcggggaatgtgcccccgcttgagaccgcttattgtgagccctcaacggaaatcctgcacggaaggcaaccgcctccccgctcgcggtaagcaggatccacccgagtagcggggaccgaatcccatctttcttatctctcgaagactcctttcaggctgag

SEQ ID NO: 229824 - DNA, 802 bp, Homo sapiens
  chr3:137833868-137834670
  hyper
gtcttggggcatcccgtcattcgtcccccgcgcacgggtccttccctccctgggcgccgcagttcggagcaggccgagggggccgggctgcagggccgcgccgggccagaagggcgcgccctgggcagcgcggacgcacgcagccggctcctcccgcgccccgctgcaccccggcagggagttcgcccccgctaatgtttaacctcccgaatcgctgatccctcggactgcagccaagctacccacccgccccgctcccgggacgaattcctggcatagttttcccgcgcggcccgctcaccgtggggtctcctggagccggggacggcgggaagacgtctcgaggtggcggctcccatactcgccccacgtcccgcctccagacttgctccaccgccccagacagcccagagatggttcccggaatgctcaccgcccgccgttcccgggatgcttccccagccccacgcagtccgggcgctctctgcggcggaggcagagcctgcccggcccactccagtgccgccaacctgcgggaccgcggacagagagctcctcggtgcgtcggtcagctcgtggcttggggtctctggtgcctccagctcctactacagccgccccgccccacctcaagaagaggtggagcctctcccggcccctctcggacgagctatttttaggtctgtaacggatgggggaaggcgggaatgccacgtttaatccgttagtaaaatccaggatccaagtgaatggcttcctggccttgctgagaggctggacttgccccggtttccccacaccc

SEQ ID NO: 229825 - DNA, 260 bp, Homo sapiens
  chr3:137893550-137893810
  hyper
ccccgggccgcgccgctctgccagcgccagcgtctcatagatcttatccagctcgccgtggcagcagccagccacagccacccgcattctgccggcctgaggaggtgagcgctgcctgcaacgccctacaccacagccagcccaggaccgactgatcgctcagctcccgccaactttaataagtatagccaccgcctgggtgtagactcctgcaaaataattcacttccggtttccagatctcgcgagagagggaccggg

SEQ ID NO: 229826 - DNA, 158 bp, Homo sapiens
  chr3:137906199-137906357
  hyper
ggacagcccctgacgccattcccttttgcccttctttctgcgggcctttccggtacttgagcggtgtccagagcgtggccagttctcgtctatctggctgcctttagggagcggtgcctagcgttggccaatagttggctgtcgaaagtgccggcccc

SEQ ID NO: 229827 - DNA, 130 bp, Homo sapiens
  chr3:138048356-138048486
  hyper
aaagtgaacaccccgcgaggaagcggagcctgcagtccacgggctcgtggctcgccgggcggttttctggggatctgcgaagccccctccccaccccggagccggccagggggcgcgcgcagaggccgga

SEQ ID NO: 229828 - DNA, 121 bp, Homo sapiens
  chr3:138048732-138048853
  hyper
gacacgtaagccacgcccactctgggcccaacgcagtctctccgcggaggctctgaacccagccagggagaggcaggagggagtcccgccccttgccctccatatcggaccataggaaccc

SEQ ID NO: 229829 - DNA, 199 bp, Homo sapiens
  chr3:138066747-138066946
  hyper
tcaaaaggtggaattttatggtgttgaattatatctttatttttttaacggggggaaaatgacgccgctggagaggagttagcggaactgaaacaatgaaatggtgcgcgagtgtcgcctgtccccgtcgcatccatcccaacgaagtttgggccctggaacggtgcacccagaaggcctgcggggagagacgctgggg

SEQ ID NO: 229830 - DNA, 693 bp, Homo sapiens
  chr3:138153256-138153949
  hyper
cacttggtccacccggactggcgagtgcacacctccggctgacgcctgcgccacgtgctggggtcggaggccgagctcaccggctggttgctctttagagcgggcaggagccaggcgggcggcccgcccctctagggcggagacttccggagctgcggactcactggagccgagaactggggcggcgcggcgcggcgcggtgcatttccaggcgctgctctccgtcgcagagaaccctgagctcggcgcgccgagagtcccagcagggcaagggggcgcggcgtcctggtcctcgagcttgggagacagatgcgcatgggcgtgggggcatgcggacctaagctcgggtgaagctctcgggaagggcaagactgcggcgacgagatgcgagcagaggagccctgcgcccccggggcccccagcgccctgggagcccagcgcacgccgggccccgagctgcgcctgtccagccagctgctgcccgagctctgtaccttcgtggtgcgcgtgctgttctacctggggcctgtctacctagctggctacctggggctcagcataacctggttgctgctcggcgccctgctgtggatgtggtggcgcaggaaccgccgcgggaagcttgggcgcctggccgccgccttcgaattccttgacaatgaacgcgagttcatcagccgcgagctgcggggc

SEQ ID NO: 229831 - DNA, 572 bp, Homo sapiens
  chr3:138312854-138313426
  hyper
ggaggcagttttgtccgatccccaaacccttacgcagggatttttaattggcgcgaccctgtcccagatggctcctccccgacaagggtcagtctgaccacttttaggcccaggtgaggtcaagtccggggtactccgggaaggggctcacgccgacgcctctgagagccccgagagccactcaccttactcagtcgccggcctcccaccagcagccagccgggccaggttaggctgggatcagctacgtcaggccccgcctccgcgaccgttaccaccgccgggggagggcggccaatcgagcccgagcgcgtcgagggccagcccctctttggcctgcgaatgcccccaaacgattctctccagcctctccgggaagctgggtccgccccgctccctccggttggctcactacggggggcggggcttaccgcaaacgaaggcgtcggtgcgatgtgctggtctcgggcacgctggcgcttccaacgcactccttgggtgccctgtcacttacatggaggcttatttgcccggaagacgtcagaaatacttgtggccgtgggtgaaagtga

SEQ ID NO: 229832 - DNA, 43 bp, Homo sapiens
  chr3:138553746-138553789
  hyper
gccgccgaacccgcgcccgtgtgcgcgcgcgccagcctctcag

SEQ ID NO: 229833 - DNA, 156 bp, Homo sapiens
  chr3:138634847-138635003
  hyper
tggagcttcttcacggtctgtgaacactacgcgcaagccctcgggcgcggtatgggcgagtgccctgccctggcgggggtcccagggatccgcagggaggggaaggcctccgaacagaagtcagggcgccacctggcggccgcagcccacagccca

SEQ ID NO: 229834 - DNA, 2499 bp, Homo sapiens
  chr3:138656628-138659127
  hyper
gtgcacagtacacacgcgagcacgactgtctgtgcctggagacaccgtatggcaccggaggagctgctcagccgtcggtgccacctgggaagtagggtttcgggtgctgctctggagcgcgggaaagtccggatccgggtctgctggtcagcgcttcggcgccgccgggctcctttatctctcatccgccggccggtgagcggctccagtttcaagacccccgatcctgccggtgaggggagggagcgagaaggagtgcgctccgggcccaagaggctgcagggccccactccccaggtctgtcgtccttcctttatctcctcaggtcacacccccacttaaaataaagaagggtgcctgactcattcaggtcagggaagtcggcccccgggagcctcctgccctcacaagccatggtgaagggaggcgaagccagggtttgccacggcctgggagaaaatgcggctgcagggtctctttgggctgcagcgctggcccggggccccaagactgttaaggtgtgtgtgggaggcgcgcagtgtggctaccgaagagccctccatcaccgcaccggcaggccgccgggctcgtcctcctctcatgcttccaagggttctgagctgcgcagcactcgcatcacccagaagtgtctgtggagaaaacgacctcaggtgtaagcccaaggctgctgcctgcaaaggcaatgccgtggagactgggttccacagcgacctgggtttttaagtcaccgaaagctacagggcagggtcacaaacactctcccgccttctctgcagaaccgtgcggctgacaggagagcgttgcgcagaaaattcgaggccgggcgctggaggagtctccgcggcccggagaaggcacagaggcgcccctgagaggcgcagctggaacaggcgatgcacgggttcggatctggccggccaaccgagcccagcggtcgcgaaaaccagagtcgccacagaggttgagcacgattccatttctggggatcgggtccggtggggagccactgtccctaacgcctccagagactttaagtaggacaatataatgctggtaggagcaaggtgcaaggaatttagcggcagaagcctttcgggggggtggggaaaggcagatccgtgcctcgtctgagcctgggggtggggacagcccctggccttgtagcccctgttccggggatcagctgggcccacctaacccccctacatggggttgaaaggggccaatgggacggccccgccgcccctccctcgggattccacagggccctgacccggcctttatctctgcacggtcagcagtcgcgggggcttcaggaaggaggacaaaggcccggtgtcaccgcgggcgggggctcggtttcctggctctctgctcacactcacagcctttagcggttgttgggggaagatttttaaaaatatgtgtcgaatttcctttttttctcttctagaaacaaacaaacaaaaaaggcaaaaggcgaattccccttcactcctcgtccatagagattaaagtttcctgggatcctgccctttttttttctttgactgcctagaaatacttgttctcccttgtacatagaggaaaatgcggggaaaggttttttaaaactcggtttcatactattattattactaaggacaaccgggcaggctgaggtcccaacgtggatgatccgagttggcctcgcgccggggctctgcagccactgccctgtgcgctcagcacctctgggggcgatcagggcccctgcgcttccgcccgccgcccggcagtcgagagcaccctgtgcccagactggccgactcattctcccccgaattttgtttagagctggcaagggggacttagctcgcgccccaagacctgggcttgcagcgccgccaacaggcccggggacacgaggcgctccaggccggggtcttcccggctgctggcccctctcgctccccacccgctggcggcgcctcggtcgcccgcaattgacccaacccgcttcctgcgtttgcccctcaggtttcccgtttctccacaaaggcctaggggagcctcgcccacaggctgaccctgcaacctctggcccggtggctaccttctgcttttctgaaaaagaaaaggaaaaaaaaaaaaaaaaagaaaaaatcaaccagtcgagggaggcgcgtgaggactggaggcgccagccggacagcctatgagtaggtccctgggtcggtgccgcttcgcgggtcagcacggcctttctcagagaaaacctcctaaacgtgtgaagaccgctttgggggaagcgagagggaggttggaggagccccgggcggggtctcagcgcccaccagctgtgccttcagggcttgggtgttcgctgcaacggcaaccgcgtgagcctcactcccacggccaaggggctagggcagggtggatgcaatcgcgtgcgcctggccccggaaggtgctcgcagggggtgcctgtggccag

SEQ ID NO: 229835 - DNA, 224 bp, Homo sapiens
  chr3:138662202-138662426
  hyper
tgctggccaggccccgagatagacggggggggggcagtgagggctgggtgcggggtctagtctcagctgagcagcagcccgcaagaaccggcggatctatcctatcagaagtcggaagtcatctatcccatcagaagagtgaaagccgaccaccccctaatccgcctgggagaaccagactgcaaccaggtcaaacgcctgtgtgcctgcgcggaagcatggat

SEQ ID NO: 229836 - DNA, 179 bp, Homo sapiens
  chr3:138662794-138662973
  hyper
aaccaagtcctacctacagtcgcgccttgtgaacgaaccacggcagaaaaagtctttctgctgacgttaaacagccgcaacgggccagtgatgacacagaaaacaaacaatcccaggaaaacaaagcagcagcgacagccacaaacgcctgccaccccggttgctctcaatctttgttt

SEQ ID NO: 229837 - DNA, 2907 bp, Homo sapiens
  chr3:138663608-138666515
  hyper
ccaaggccacaatacttccccggttgcccggtgaattttttttcctttttttttttttaaatactctcttaaaaagttccaccgatctttcaaacaaaacattagccagccgccggggcccggaggtgcccgaagcgacgggactgatagcggaggaaacgcagcctccctccgcgcccgcccgcggtgtaaaccgagtacaggccgtggagccaggctgccccggctcccgctgggtcccaacccccgccccgcctagtgggccccgcggcaagcggcttctgaacagcttcaagagggttcgcggagcaaacacacgtattggtccgtccctttctcgggcagcgcggtcccgccatcagtcctgtccggcgcgtctagccatggactgcacggcagtcgggcggggaacgcggagagcgagcgcaccgacctgtgagagaaggccaagaggtctgcgctgccgacgcccggtcgcacctccgccccgggccctttccgcggtgaatttgggcaggagacgctggggctccggaaagagacgagcccagtagaaagcgcgcagagaggcagcttcaggccaggggagtgcaaggtcacagaggtcagggaggtgagcacaggaggacataaactgaggggacaaagaggagcgacaggagcttaggaaagcgaaaaagcacagagggaccctgggcgctggctccagaggcgggcccagagggtgtgaggtcaggctggcggcggcgtcgtcggctgcgaccggggccggcgtcgcgcgtccctgcatcctcgcatccgtctgcaccggcatgcggtgggctctcagagatcgaggcgcgaatgcagcgcgccggtcttgctgtcgtggtcccagtaagagcaatgcatcatggcgagctcgggctgccgggcacaagcgaactgcaggcccggcgcactggtgggcgcgggcgccgggggcgcggcggtggctgggctggcagggctgagctggcccggcggcggcgcggcggccccgtggtgcggtggggcaggcggcggtgcggcggccgcgtgcagatggtgtgcgtgcggatgcgggtgggggtgcggcggaggcgggggtgcggccggcgggcctcccaggccattgtacgagttcactacgccggggggcagcgccatgctctgcacgcgtgtgtacggcccgtacgaggcggccgggcccgccagccccttgaccacagcggccgcgccagggctaccggggcccgcggctgcagccgcagctgctgcagccgctgcggctgccgccatctggcaggaggcatagggcatgggtgagggaggctgcggtagcggccacgagttgttgaggaagccagactgcaggtacttggggggcgccaggtagccgtagccgtcggccccggcgcccgccacgccgcacccgcctgcggcgcctccggccccgaagagccccttgccgggctggaagtgcgcgggcggcggccggaagggcctcttcatgcggcggcggcgccggtagttgcccttctcgaacatgtcttcgcaggccgggtccagcgtccagtagttgcccttgcgctcgccgccgccctcgcgcggcaccttgatgaagcactcgttgaggctgaggttgtggcggatgctattttgccagcccttcttattcttctcgtagaacgggaacttcgcgatgatgtactggtagatgccggacagcgtgagcctcttctccgcgctctcgcggatcgccatggcgatgagcgccacgtacgagtacgggggcttctgcgccgggtccggcttctccggggctgtcccgccgccacccccaccgcccttgcctgggctcggcggcggcccttctggctccttgactgtgcgaccggtctctggggccagcagggcccccgccgcgtcctcgggctcggggtagctggccatcatgacaaagccggcgcgccgcggccgggccgcctctgctctccgctccaggcgctggcgcggcaaagagttggggcgcacgagtccgcttacggccaagtctcaaacttctggagactgcggatgccgcccgcgcttgcttgctggaggcctgtcgctgctctcccctctccttccccttcccctagggagcggccggcgggagtggagctcagcctctggccatggggagtccgcccaacagagaggggctccggcctcgccgcccctccccgctcaggccagtccccgccttggtgggttttcttttctgcgctcttcccctccccccgccccccggtttcccgaagcacgacccgcgtctctggcggagctgcctcctggagtccctagtgcgccaggagcctcgctctgttctgattcgtatgggctccaccgagttccgcttgcgtcaggcgccttcgcccctatagcggggcggccagccgcgcacgggcgagttcatctccaagtcactttttgtaaacgccccgcacagcctggaccggcctgcccccgcccagcgagcctcaggggcccagccgacagccaggctcacgcgcccttgaaatctgccggtactcgctctgcgggctgggctgggagatgacgaggaccccggtggggtctgcccgcacccggccaaagcccaggaagctcgggccccagcgaggaaaggcgctccaagcctcctcgcggctttcaggtgaaagaaaacgactcctttgctctgccgtttgctgccgtcttgaggctgaacttctagctcggggctggggaggggcgagacggcgagggggctggacggggtagggtggggagagctgctctgaggctttgggaaagtcagcccagaaacgggtgtgactgtacgaagaagcctcggcctggcctgtccctcgcgctctcagagtg

SEQ ID NO: 229838 - DNA, 1066 bp, Homo sapiens
  chr3:138668328-138669394
  hyper
atactgatttctgactgtcccgtagaggaacagaatccccagccctggtgaagaagaggatgcctgatgcgtgcaccctgggaagggctggaatcggtctccccaagatgtgccttcacatggctgtccggcattcgaaggctcagaaaacaggcaagaaaatgcgggcgggaaagctggcagaatgattactttcaggtcccctccaggcttctgcggaaaagccaggggcttcgggctggagatagaggaatctagggagagaacagaatcctctccttgccggcccagccagaggtgggtgaaccgggcgctccaggaaacggtgcggggcgccctgatttacttctcaaccttcggaggtaggctggttgctggcgaggtcgggatcctctctgaacagggcatactgtgcctaggttttgtggacgccagggccggttccttttctccccgcggcattggggcgacgcagggcccccggcttagtgaccttggggcggcgctcacctccaaaggccagggtggtgggctgggcagaactcactgcctctttgccccagttttccagggtcccgcagctgcaattcagcagccaccggcgcctcctgaccgtggtcccaccgtagcgccgcctgcggatacggttccagtgaaccgccgattgagcgcagtctcagctcccgcgcctcctcgcagcctggccccgcgcctcggaggtcccgacagccggcgcgagcaatctacacggctctgatacagacgcttttctccccagggccgggaatcctgcaacagcggcagaagccgcccgcgcctcgggcttccggcggcccagctctactagggaagcgtcgcggctgctctgaggcaggcagcgcttcgctagaaccactcagctcgtcccgcgccgccgccggctgcctgaaccaggttccgctgtcccctttcctagcgggaccccgaaacacccggcggcttcccgctcctgagcgggagagaatagagcttgctgcaaccctctgcttggagggatggcctctgcggtgcttggctagcaaaggga

SEQ ID NO: 229839 - DNA, 68 bp, Homo sapiens
  chr3:138679271-138679339
  hyper
gaggaaggaaggcacgtttcccggtgttgttccaggcctgacgggtgttcagggtgtaggactcaggg

SEQ ID NO: 229840 - DNA, 254 bp, Homo sapiens
  chr3:139062831-139063085
  hyper
tcccaaccacttccggcgcaagtggcttctgataatcatggcgcccctcggaacaactgtattgctgtggagcctcttgaggagttctccgggcgtggaacgggtctgtttccgggctcgaatccagccctggcacggtggcctgctccaaccgctaccttgctctttcgagatggggctgccacgccgccggttcagctccgaggccggtaagtgaccttccggactttcgctggggcgttcttctgggagac

SEQ ID NO: 229841 - DNA, 32 bp, Homo sapiens
  chr3:139258515-139258547
  hyper
gacagctggattcccagcgcgcacaaagcctg

SEQ ID NO: 229842 - DNA, 446 bp, Homo sapiens
  chr3:139396510-139396956
  hyper
cctagtgggctgacgaggggcccacgctgcgcttacctgctatttgcagggctcagcaacggcgctcggcgagtctcgggggactgcgggggactaggggacctgctgggcctagcaggggctgtcggtcagcgcgcggcccggcgcccgaggtccgagagggaaacgacgtttggtctcgggactcaaggctgcctccggcccgggcagcctcaggtctagatcccctagtacctgagctggaggcggggccaaggcgaacttgaccttgcgctcccttagcggccccgggcagatggagtctgagggaaacagatctgcgccccgccccttcgctggggcgggccctaaggagacccggccctggccccgcccagggtcctaagccccgccctctcccctgcccccgcccccgcccgctggctcccaaccgccaaggctctttt

SEQ ID NO: 229843 - DNA, 100 bp, Homo sapiens
  chr3:139653418-139653518
  hyper
gcctctaagagccgcggctgcccctgcttctcggagatgacgcggagccctgccattgccatccaggtccaaggctatctactctgcccgacaaccccta

SEQ ID NO: 229844 - DNA, 543 bp, Homo sapiens
  chr3:139654658-139655201
  hyper
gcgctggcgcgccgtggggacaagcaggtgtctgctcctgcctgggggaaggatcagcggcggtgctttcaaggagggagccgagctgtgacttgtctcccagctcggggatggagtggaaacttgtaggctccagggaaggccccgctgacactcctcaagctcccccagggcgtctctgactccccggggaacgtgtaccctccgggtaggcggcggggtccggaagaagcgcgggatgtgaggctccccgctgcctttcctactccgctctgactaccgaggaccgaggagcctaacctggcaccactcccctgcccaccctgttcctttgaagagcttgacctccccgcgcctcccgcccggaaggaagctagatccaagcgaacgcctggctctgtcaggcgagcctggaagccggcgaaccccggactttgacagctgcctgggagcgtcgggagctctggggtggggggccgggtctgaaacaggaggtcacgtgcttgcagggggtggggaggcgagggaagagcagagctggtg

SEQ ID NO: 229845 - DNA, 187 bp, Homo sapiens
  chr3:140661561-140661748
  hyper
gctttgcaaggtgggtggtaagggggctacgggatcgagcggggaaggctttggtattctcccgtggttgctgtagggtgtttctagcccttggaaaatttcttgcccgaggttttccaggtggtgaatggggtgcaaagctttccagtacctttggggtcagattcctttcgagaaaaccacccct

SEQ ID NO: 229846 - DNA, 236 bp, Homo sapiens
  chr3:140769466-140769702
  hyper
gtcaattctgggagcacagacgagggccaccaaaccaagaactttcaatttccccaaggaagcgcagataccagaagcaccctcgaggcttctgttttggccacgccctttaccccatcgctcagttcaggctcccaatgaggcggcccaccatcagcgctggtagagcaaagagaccgacttcctgcgcctcgggtgggcggggaacgctccttgagcaggtgcggtatgaaatt

SEQ ID NO: 229847 - DNA, 56 bp, Homo sapiens
  chr3:140770242-140770298
  hyper
gcggcggcggaggagggggaggcggcggcggctgcagcatccagagctggccgtgg

SEQ ID NO: 229848 - DNA, 654 bp, Homo sapiens
  chr3:140771198-140771852
  hyper
ataattgtgcacattttataggggtattggaaagatctatgggatggtgttcgtaggtagacatgtgctgggcacacaggaaacactcaatcatatgttagctagtattattattagctttgcgagcccaagcttgttatccaactttccgaagctgcagcagttccgtcgtccgtgtaatggggacaataattcctgggggtctgttcgtccggggtattcggagaggtggaagtaaagcacgggtcacgcaataggcaccggtggctgttgttaccgtttattcctgactctggggcagtgaggctggtcgcctggcccgagagcgactcagggaccagtcctggccttgcttgaatacaaacttgtctatgctcgggaagggagggggttgggagctcaggaaaccctaggcgcagggctctgggaaggagggagggggtcagagacttgagcgcggcaaatgtgtccgccctggtcgctctgtacgcgccaggggctccaagccagaaggggacgccgagcccccgacctctgactggcgggagaaccgggggagtggctgctcccgccggcccatggccaagcgcagacggctgccggcaggaaggagaggagggcacttttctgtaccgctgtcgcgagaaggtggag

SEQ ID NO: 229849 - DNA, 237 bp, Homo sapiens
  chr3:140950012-140950249
  hyper
gggaagggcgactgcgcggggccacgacctccccgggtctctgcagaccgttggagacggagcagcagcgaggactagagcaacacaaggccggatgtgttctgagccggaagaggagtgtgggataggccgaaaggggtggggggtggggggtgacagtttgggtctacgtggcagcaggcgcaccccagacgcgcgcgcccacccggcgatagcatcagcggcgccagggcaggc

SEQ ID NO: 229850 - DNA, 175 bp, Homo sapiens
  chr3:140951287-140951462
  hyper
ggccgcaacttcgcggcctttcccggagacggggctggctcctcttggcagccacctgcagcctgacgcctccgggagtcccgggcctggccacggggccgcccgagcgcaggttaacattcctggatgcgcaggttaggaccgtgtggtgtagacccacgacgttgcttttgct

SEQ ID NO: 229851 - DNA, 263 bp, Homo sapiens
  chr3:141030361-141030624
  hyper
ggcgctgcccctgcgtccccatcatggaaactaccacctgctgcctaactgccagacgcaaaagtgcccaagcctgtctctcacgttccaccccataaaccttccccacccgaccagaagccagagagaccacaggtcgaagcaggaccacgcaaggacgcgcacgcctctttcccacgccgcagagcgatagaacccgcaacaggaaaacggaaaggccgtgcgccggaagaacaggtagggactacgactcccagaagcct

SEQ ID NO: 229852 - DNA, 511 bp, Homo sapiens
  chr3:141378762-141379273
  hyper
gggtgatgcggggacgcggctccctgggaaatcgtgttagcggctccagggctggtccacggcggccttgggagcggcggcaacaggctggagcgtccacgcttcggaggcctctgtctccccaagattccccactgatgaacagggacgccggtccgccttcctcaacttcccctgttccctgccaggcagcgtccctcgcagcgacgttggctgcgacaagtttgacctgcagcgaggacaccaggatttctcagtttctccaaatccaagcccgagcccgagcccgagttccgaccagtcctgacactgcttcccgccgccacctgcctcctcctccagctcccgctgtctccccggcgccggcgccctgggtggccacagtccctccagcctccgcccctcgccgcagtctccagggcgccggacgccacgcgggcagccggcccgggacgcagggagagtgagagcgagtgagtgcgggcgcccggcggggcgggcaggggccgga

SEQ ID NO: 229853 - DNA, 78 bp, Homo sapiens; identical to SEQ ID NO: 199121
  chr3:141457301-141457379
  hyper

SEQ ID NO: 229854 - DNA, 567 bp, Homo sapiens
  chr3:141516153-141516720
  hyper
cgctcctgattctgcggcctggggccgagcatgcggggcgggcggagcctcgagctaagtcccctggggtcccagggccgcattcctccgaggtctgcaaaggccactgcttaaaggcgcagaggagcagctgggaacgagaacaaagcggccaggcccccctcggaggaaggaaggagagagccccaggaaacagctgatagcgctaagctcagcttgtttttttcctctgctcaacagttctcctgccacggcaaacaaaacatgtacattctgattccctcttctgtttggattgtgctgtcgactggatctggtttgtgatgagctgggggaagaggcatccgcgggcgatttctggctcggcgtgccagtgtgcttttgctgggccgcgccgggatcgcggagcttcctctccggctcctttctccccgtctgcgtcgctaatccagcctggcccggccaccccaagggaagacacggccgtttcttttgatagtggaattggaggttgccaagttttcagatttaatgggaggtggagggttgctcgtgtccttgaccttg

SEQ ID NO: 229855 - DNA, 230 bp, Homo sapiens
  chr3:141944304-141944534
  hyper
ccgcacgcctctccgctacagccgcctacccagagggcgcgctacaaatcccaatgctccagagtccccgggcggcccaacccgggccccaacccggctcagccggagagcctagagaggcctggcccctgccgccggctccaccccgacgccgtgacgccacgggcgcgcgccggcggccgcgcgggaggggtggaggtgagcgggtttgcgccgtgatctgcagcccc

SEQ ID NO: 229856 - DNA, 33 bp, Homo sapiens
  chr3:142166775-142166808
  hyper
gggactcccatttcgatcgtcaacactaatccc

SEQ ID NO: 229857 - DNA, 836 bp, Homo sapiens
  chr3:142443118-142443954
  hyper
ggacgggcgcggaccggctcggccggggcgccggcggctggggaggggtcgctggccccggggccgcgcatgcgccgccaccaacttggggctgtcagtggagggcgagtgctggttctcaggggaggcgacgcccttcggggccaacgggcctcgagccgaggcagcagtgggaacgactcatcctttttccagccctggggcgtggctggggtcggggtcggggtcggggccggtgggggccccgcccccgtctcctggcctgcccccttcatgggccgcgatgatggcggccctgtacccgagcacggacctctcgggcgcctcctcctcctccctgccttcctctccatcctcttcctcgccgaacgaggtgatggcgctgaaggatgtgcgggaggtgaaggaggagaatacgctgaatgagaagcttttcttgctggcgtgcgacaagggtgagagttaggcccctttctcctctggacgcccctgtcctccagacctttagtcctctcccccgcctcaacttatatcggggcattccctctgtctcaggcgccgagtgtcttcccgcctcgcctgctgcctcaggcggtcttctcctcaccgcctctgccctgtgagtgtggagctggcgggagagtggagctggggctgcgccctcggagcgctgcaccgtcgggggtggctctggccttggggtccggggtttaggtagcgccttgggagccccgaccccagcgttttagcgccgcccttgctactgaccgcatgaatgacctggtcttctctctggctcgcagttcattccttccgggagtcgagaggctagtttc

SEQ ID NO: 229858 - DNA, 1029 bp, Homo sapiens
  chr3:142607214-142608243
  hyper
agcggctccctaggcgccgcgccgctagggttgttccctagtttacgtctctgggcaaagcctctcggggaaggaaaaaaaacagcggtaaaccaaaatccacatatttgggccccagtgcttccctctggccccatagacacgaggagaggggagacacaagtcagattaagccccgccacgtggtggccaagccagctgcagggccatccggcaggccgggctggggacccaggagggagccccgcgagcaaggatgggtcccgaagtcccgggcttagcctacccgagggtggcggacgcctgcaccgcgcgggagcgcagggtcgagcgctgggtcacccaggcgcgccgaagcgggttgagtaaagcagcaggcgaggctgcaggggtggaggaagggaaaggagagaaagggagcccgggcaggggtcgcgttacctctctggggactgctgccgcgagagctgggtggcggcagccagcagcaggcagagtggcgcccaggcgttcgcgcccctcatggcagcgtagacgctcggggtttgcaccccacggcgcgcgcgccggcacacacgcccctccgcacccaccgcgctcacaccgccgctcacactggcagcagcgctggctcacaccggcgctcggctgcccgcgcgctccctctcacgcgcgcaccgccgcggggcggcccaggtagccgggggatacgcggccggcagggcggaggcacttttaaaggcgattatggtgccgtctgactcgacgcttagtttcccctgaggagctgctctggcagccacaggccactgctgaatatcccgtttgttctccggcggcaggaggggcggctccgaggccagagccgccccctctcgtggggcgggcgaacgtctcctcccggcaccccgggaccgacgggtcctctctcgtccagccctcagggaccccggggagaagaggaaccccttgcggagtggcaccccagcggcccgggccccgacgcccagagacgattctcagggaggg

SEQ ID NO: 229859 - DNA, 283 bp, Homo sapiens
  chr3:142681817-142682100
  hyper
gtagcagccacgggtggtggaagggcacgtcgccgccgctcaggaagaacagacggcagaacttgctcaggaacagcagcagcgggatgaagtgcgtccagaagttgagcgtctcgttggtaggcttcagcaccgaggctaggcactcctgggccgtgcacggcagacgccggtagcccgacaggatgaagcactccacgaagtcgtcgggcacctcgtcccagcgcagcagcggcttggcagacgctggggggtcccgggaggcggcagagtgggagttccg

SEQ ID NO: 229860 - DNA, 278 bp, Homo sapiens
  chr3:143566686-143566964
  hyper
cattacaaaaacaaacagctcgccctcgactccccacatgacaatggacccgcatctgtcaacagacttgcattatgtgccgtgtgagaacatgactgtgacatttgctctcgtgacatggcaaatttcggcggcttgtctgtaaagagattagcattcgttacgctgcagcacctttcatcaaactaatgacatttcaatcagcacattttctccagtttcggtactttgctatctgagcacaagtctctaattacgctcaagcaacaagtttcaca

SEQ ID NO: 229861 - DNA, 170 bp, Homo sapiens
  chr3:145878029-145878199
  hyper
acgagagacagcaccgggctcaagaaaagggtaggtaaggggagcagctgtgtgtccacagcttccccttcagatcccaaaggaagaaagctgccgcctggaggtactgggtagccaggcagccttactgaaaacaactaaggttttcgagcgagcgttgtttttggcaa

SEQ ID NO: 229862 - DNA, 352 bp, Homo sapiens
  chr3:145878417-145878769
  hyper
ctgcagggaaattcgggcacgctgagttcaccgagaactccaaggagtcaacgagggcgggtgcccctacacttccccagggaccagcgccgcccgaccgcaattctggggaagaccccggcggtcctggagaggagggacaggcccccactactcacctggccagccccgcggaagggctggtggatgaatgaactgcccccccgccggccgagcctcgcgggacagcggcggaccgcggggtgctcacctgtggggatgctcgagggcttctccgagtccgcacccagacagggattccaggggtggaggacgagcgccaggagcagcagctgaggcttcaccgtgcatc

SEQ ID NO: 229863 - DNA, 111 bp, Homo sapiens
  chr3:145879189-145879300
  hyper
ttctggctggaacggggaagcctgcacttagctttgggagtgggtttgggagagggaggaggagccgccgggagtctggcgggagggcggtgttcccgtctgggttcctct

SEQ ID NO: 229864 - DNA, 673 bp, Homo sapiens
  chr3:145968332-145969005
  hyper
agcgtttttacctgcgagtggcctggcctgagtccgtgagagccgcgccgtagaaacgccagagacccatgagaaacccaatcaagcgagacctgtcacgcagagcgaaacgaaagggccgcccccgtgaagtgcagccaggacccccatccctgggcaggaaactgctcgctcccaaaccctctgcgtctgcagtgcagacgcgcgcccgacaccacggaacttctgcaaccacctgaggatgcgacgcgagcgcagtgtccgggaactgctagcgcaggacgccgcgcaacctccgcgcctgcccgcaggcaccgcggcctcgggcctcccctgacgacgccctcggccccgcagcccgggcgcccgcgccaccctgtcctgctctgcgcccgcctgtccagccccactcaccgcctgccccgcagaatgctgggcaccggggacgccagacgccgggtctagttgtactggcagaggaaagggaaaggaaaggaggcagggaagggagacggagaggatttttcaagttataaacaaagtaagcgcgcggaagggagggctaggcgcgggttctgggggcgggtccggcacgcctggaccctccttccccgcgcgcggcttccccgtctcggaccccgccccgcgctgggagagccgccagcccggggga

SEQ ID NO: 229865 - DNA, 660 bp, Homo sapiens
  chr3:147073958-147074618
  hyper
ttggaggaagactgcgacagcttaggccaccggaaaatgacccagaagttcaacttctgcgctctccggggaggctgggtcagagctccagctcaaaaatgtcttaaatccgttcgggaagatcatctcgcactgaggccatttgacctggtgataccaggttgttagtaacgcttgatgtttggggagttcggcatatttgactctccctgcggctcctcctcctagcccacccccagcccccagatctgggccccttggaaacactctggcctccgcagaaaattttgaagaaaatgcaaagggagaactaatattgttttcctattattcgatttgcgttctctgggttcttaattccagcctttcctaggtgctattctgcgccaagaagagttaggttttgccaagcactcccacatccaggattcttgaccacacagagggatttagaaaacagaaaactcgttaattttgagcgattttttggaaaaaaagttgggtgggaaggggacgggtgctgcactaggaagaatcaagaatggaccggccttgccccgatgcaatcggcttcctaggatgggatggggggtaggggattgcatttctttaacccagatccacgtgcctccccacctgccccggcgctgggcggttaat

SEQ ID NO: 229866 - DNA, 260 bp, Homo sapiens
  chr3:147074975-147075235
  hyper
attgggctgtctggcgcggcttccaattccagtcttttccgccaggcgcggctccagtttagaccgcggcggtggtctaaattcttcgcctaaggaaccaccgcctaaggaacgatttgccatcggatttgtcctcggcaaatgtctcaccaagctgtagatggatgaatggatagatacatgataggtagatcgatcgatagatagttagagaggtagacagacggatagatccccgaagcttgcggataaatgttctg

SEQ ID NO: 229867 - DNA, 625 bp, Homo sapiens
  chr3:147077095-147077720
  hyper
gacagaaagagaaggtctggcggcctgggggcggccatgcgtgtagccctccccggtatgtttttgtgcacagagttggcgccagggcagcgccccagaccccagtcctggctggacaataaatgaccggacagctgcggccgctacaaaggagcccctcgaccgcgtcgctgtttacttagtgtcgggtctgaccccagggctgcttgcggccagtacagatgctgattccaccctgggaacaggctttctgtcctccgttcgccgcgctagccagcacgtgtttgcaaacaacttaactgacttctcgaatattcatctgctgacgctggctttagggaaatttgaggggagactcgctgggcaaagacccgaggcctctggaggtttggctccccacacgcaggtcccgtccgcctcgctgattatcttttcttctttccagaggaagcggataggcttcagctttagaaaatttattgttttaatttgccagccgtaagtacggtcagaaagaagccggacaacaggcccacaagccgccccgcagacgcgcacgggaacaaacacgaacacgttgtgagccaggccagagaattatctttgtgcacgtggagaagacctt

SEQ ID NO: 229868 - DNA, 181 bp, Homo sapiens
  chr3:147079014-147079195
  hyper
gtctctacaagcctttcaagcgccttcaactttggcggcggcagcagcaggttgcgttgccatggatactgtactgtatggctgtggcggcggccacggcggccgcagctcgaatcccctaaacaatgccgagccaagtgcaggtttctcgcccttttccgtgcacttttctcttctaatg

SEQ ID NO: 229869 - DNA, 41 bp, Homo sapiens
  chr3:147079786-147079827
  hyper
actgccaaaccctccgctagggggcgcgagaggaggtttac

SEQ ID NO: 229870 - DNA, 1076 bp, Homo sapiens
  chr3:147086645-147087721
  hyper
ggtgaataggcagtgtcacacggtagcatgctctcttgtcaagaccgattgtgttttaggcaaacatttgcgcaaacataaaggcaaaggtcaaggactgttcagtcccagtatgtgctaattcacctagcgaaccaatggggcaaaagttgcattttatatgctcgcccccgccagacccaaagcaggagtcgctcctgctaatgaacaaaatcgcctctgatcagctcccttgtcaatttctcttcggctctctgatccatttctctgggcttcctcagaaatacaactggtaaagacgtgtttgccaacatctggatcagctccgcccaatttctggggcagcacatgtttattccacgtttctggtagcagaaagctaataataataaataaaatctagcttgctgcagacgcttgcaggtactcaaatgaaggattgctcattgctggcgtctgaatatccatgccatgcagaaaaacaatattatttaaacctcagaatcgaatctcaaagctgcaggttagtggcaggaaagtgcatttgtaacacacgtttgtggaaatgtggtatgcgcgcgcactgggagccgcgtttctttgggacacttccctacgttcagcgaatacagggcatcactttccagtgaaatatgcctcccccaccaatatatctacaccgtctcccacagataatgccagttatttttccagcccctaaaaaaaaatacaaatgatttcaagtggatgtcaacttgagcaactcggaagtggaatatttttagggttaaacaaacgtgcgcacgcaccaaccggtagggtttactctgcatcaatagtcatttggcaagaaccaatggctgagtttttgcaaatcgtccatttaaaggaatagtttttttcccttgataaaccccagagtcgcagctgtgcgcatccacaggcaagtagtttacacgtgcaaaattcattcctgagtcaggcgagccacaggctcagctgcggcgcggtgcggcgcttgcctggggctagagagtccacgacttgttgcctctgcgacccgaaagcggctctcc

SEQ ID NO: 229871 - DNA, 515 bp, Homo sapiens
  chr3:147088252-147088767
  hyper
tgtgcgcgcgcgcgcgtgtgcggatgtgggcagttagttgcttttaaaaagacatcgttgtccttcagagtaataaaagtgtagcccccatctttgggtgtggggattttacatgcacttctcatttcagttaacttttttcgagctgagaaaagctgctagcttactttcgggagactttgctcgttattcatctgtttagtcgcctcagaggcacaaaagcggatctgcggcgttatgaaaaatggcctgggcgcggagaatgtcacagtggtcggcgtattattttagcccttcttaaaaaaaaaaaaaaaaaaaaaaaaaaaaaaaaaaaaaaactcagggaaagtttgcttttgatgaattcaataaaagcaaagctgcaacggaagagattttcagctaaaattatacagcatggggcagagtttaaaacagccagatggccaaaggtagagggaccctctcggtttcaaaccccagatatagaattccaccggcgagcctcttagttt

SEQ ID NO: 229872 - DNA, 324 bp, Homo sapiens
  chr3:147088981-147089305
  hyper
cctgaggcggtaggcgggttcattgcaggccaccattcggttccaggttcaaatcccgcagcctttgacctctcaggccacctgtggcttttgaatataaggacgaatatattcattccaacccctcccattccgtaccacaactggggaaaactagaagagcctggtcactctcaaccttgccccctcatggatccttccctctcctgtaatcgcaactgcagagccttgttattcccggtaaattcatcagcacttctccccataattttcttaggaatgaggaacacacaaactgaggtgatcaccgtggcttcccagact

SEQ ID NO: 229873 - DNA, 431 bp, Homo sapiens
  chr3:147095403-147095834
  hyper
gaaaggtgggccatcgctaaagttggaccatcgctatgttcaggtagccaactctttctttgaaagagtgggcagatgagtcccagatctactgaaccggactcctgaagtccttaccatagaatcttgctctaacttgcctctttctgctgggtgttttgcgacccagctggccacgctgctcacgctcctatcaccctcaggcaaagctagcgcccctctcccgtcaaggatcaggcaagtcggtattgctggcggacagacaggcagcttgaagggcttgagctccaagatgcgatcactgaccccctttcttgcctttcattggcgtgagtcatccttctattttgcattagaacctattctcacattaccaccaggaattgccccaccacctatccctagcccaggagaggcgggggcctaagtaa

SEQ ID NO: 229874 - DNA, 539 bp, Homo sapiens
  chr3:147098148-147098687
  hyper
gtgaaacgctgaagcgtgatagcgccagttggccaggacgcgccccttttgttttcgggggacgatttatgtcctttataaaaatgtggtttggaaaaatagaaagggccttgaaaacgttgttacaatgaaaaagggacaaattagaagacattttccgtgatcaaaggagagcgggagagagcgcatgggcattcacaaagcttgacttattcacttccctcctttgcaagccagggcaacaagcgtgtcccccattgacaaggagccctattcagactgcaggtgcgaagtgggccggcgcgcccgaccacattatgtcaaggttgttggagattagtgttcagccctaataactaaagcgcttgatttacattggaaaaaagccccctcagccgtgaaaacaaaatctttgaacgcgtgatcattgcgagggcggctgatatcctaatacgtgcattgttctcggcctggcccaggcgcgccccggcctccttaggaagggcaaggcctgggctgctggccgtggaccaggtccc

SEQ ID NO: 229875 - DNA, 202 bp, Homo sapiens
  chr3:147102663-147102865
  hyper
tttctcaaagaggccgggtcgaggagaggcccctctaacctgtccgcgagacggaggaagggggccctttcgcgaaatgaacgggagggggcgctaactccagtgttaatgcccagggacctcctttctcagggacatgtcttggtttcccctcatggcctcctttatcacacctgcgcgtctctcgcgcgccgggatcctt

SEQ ID NO: 229876 - DNA, 96 bp, Homo sapiens
  chr3:147105108-147105204
  hyper
cggtttgaaactaacggggcagagggagtttgacagagaggagaacaaatcgctgacaaagaaccttttacgtttcatcagcgttgttaggacgac

SEQ ID NO: 229877 - DNA, 744 bp, Homo sapiens
  chr3:147105885-147106629
  hyper
aacgtgggcaagtcgggttctagaaaggaagtatatactggagagcgcagtgacagtattaaatggcgtgaaagcaaaggtcagcgcaaatgtatcttaatagagtgtctgtagtgaagtgtgccgcctttgaagcggccgctccccgcgcgtatttccatggcgagcctaacgcggcatgctgatgcaccgtcaaactcacactttcaaccccaaaacccgactctttgaacaacccgagcttgattagacctttctccttttctttcccctcttacaaaccatttcctcgcctttagaaactcgccatcaaacccaaacgcgccctctgatcaccgcagaaagcagaaacaaagggggctgagcggcgattcaagcggctcttttcttccttcacattattatccatttttattatgatcgggtacaagtgcccattcgcgtgggttttgtttaccggaaattaaatgaaaatgatttagtccgcgtcaaacaaaaatatatacttgtatacacaagaaaaaaggtctgttagacgtaaatattatgtccttaatgaaaagcctggacgggctccaggcttggcctttcaggatttcagtgcgacttgcacattgccatagaaatcctaacttaccatgaagatgcaccgtggcgaagaaacactgctttgtgcgcgggccctttgatgtagcaggcgcgagatgcggggcgctcagctgcgcggagcgagattaccttgcg

SEQ ID NO: 229878 - DNA, 129 bp, Homo sapiens
  chr3:147107635-147107764
  hyper
cacccagacacggccgcctaggtcaggtctctccactttagaggcttcgactcagtgacgtcatcagctcgctctacacccggagcccaagcacctacaagactacacaggcaacgcctctacaggggt

SEQ ID NO: 229879 - DNA, 960 bp, Homo sapiens
  chr3:147108611-147109571
  hyper
cctaataccggaggcggcggcggcagcagcagggccaggtggtagctcggggctgaggatcgcggcgggggcagccgctatggggcccaagccctgacacacgtaccattcgctcaagtcggcggtacgcgccgccaccgccgccgaggaggccacctgggacttgtggccgcagtccgacgagggcgacacgagggcagacggtgtagccgaatcgtagccagagctgggcggcggcgagcgcccgtgcaccttcatgtgcttacgcagcgagctggggtgcgtgtagcacttgtcgcagccccgcaccttgcacgtgtatggcttgtcgctagtgtgcacgtgcgaatgcttcttacggtcgctgctgttggcgaagcgccgctcgcagccctcgaactcgcatctgaagggcttctcgcctggcggaggcaacgcagagacattagtgcttgtgggtcgtgttcccgtcaggtgcttgccaccctcccccattcgtctctcattttctggaaaagaactacaaaatattttcagaaatccctttccacggcgcctcaggtcgagcacccctttccctcgtgcagagagcgcccccggtgccctctcttgaacgcctccatccctcccgccttcctcctctgggctcatggggagggtatggaggaggagcgacagtgactccatcttagtcgagtttccatcctcgaaaatcctgatccactcgggttgtttcctccaaattttctccacttggaaccagaagcacctctgctcggaaatacattaacggaggagctcacaatatagttaacggggaagctcacatctgctcgatttaaagttgctgtttcagactaacttctctgccgctaccccgcccagccgttcatcccccccacccacccccatcctggcccaaattgtttcctaaagtaggttttgcgcaaacgccaaagc

SEQ ID NO: 229880 - DNA, 887 bp, Homo sapiens
  chr3:147109795-147110682
  hyper
ataatatttcattacgctgctccagaggcttcctggagaccgtgctgtgggcagctggccctcccagtccgcactgacttgcgatgtcgaccggtctgcccagaccacccccacctggctgtcgggcctctcggtcctaagacgaggggttggcgcggtagggtccgcacaggccaaatgggatccgaggtgtctaccgcaaccacgcccttgagcgctgcggcttcgggaagaaaacagctgctgctgtcaggccaggcctggctccgcagcccggagggccaccaggcggctggcataggccggggaggggctgggatcggtggctgcgatgccctgtagagccgagggaaggcgcgagtgcacgttagagtgacaatattggccggaccgagccccaatcggggagctcacggccagctgaattcgctgacgtgtaggagaggaaaggaccccgagaacccggaagcctagattcctgccggagctgcaagtgctgcggaaatgggggaagaaggtttctgggcgctttaaacaaatggctgcctcccagcgctctgagttaagggaccggctacctagcgtctagctgaggaggaagacgcgcagctggagaactgttgcctttgtagttgcttctcccgccgcatccaggaaaaacaggcgctttggggctggttagaacaaacaaagccccaattcccgagccctgttgaggctcggacagagaggtttgcgcacaacctgcgcttctgcgcaatcagcggctcctgagcccgggtctccggcaccacctggtcgctggattcccaccctacaggagcacagctagtacactgaacagtctggaaggtgttggcacctgccatttcgcgggacactggcac

SEQ ID NO: 229881 - DNA, 805 bp, Homo sapiens
  chr3:147110995-147111800
  hyper
aaaaacaattatttcgctccagacgaggagcagaggagaaaacagcagtgcactgagtgataccggcagccgggaagttcgcaggcccctaggaggccaggtgaggccgcgccccagcttgctccggagctgcaggaggcgccctggtctctgcgcttgacatcacccccgccccccgccaacacccggcctccagtccttccccctccctccagctccctgcactgcgccctgggtgggtgggtgaatgtgaagaggcggcgttgggctaggcccctgcagcccgctcggagcgtcctaggcccggggctgcgctgtgaaagacccagattctcatcccagaggcccagcagtcctgaaaggcctcctctccgaccctgagccgggtccgccgaacaaagttcggaagctcgggctagctgggccagcgccattttctcgcacttgtggctggatctggttgtcccggcgactgcgccccggcgcggtctcttttcctctacctcggatccccagcactgactcgccctcagacgccggggaaggtgtggtgagctcccggccccggccgaggggtccctggagaggagctgggtggcggtggccaggccgagcgcggttgctggcccgcgcctccctccccgaggcaccattgttccgggatcgctgtgaccgccacaaagtgaatcctttcggtgcggacagtcgccttcaaagccaggccccggattcaggtcagggagaatctcagctcctgagaaatttgctcctgtttgccgcttctgctactcgaggaaatgaaacg

SEQ ID NO: 229882 - DNA, 656 bp, Homo sapiens
  chr3:147112049-147112705
  hyper
cccccaccccccaccgctaatgaatcaggaccgcgaaccgaaagaacgcacaaaattctgtcctgaaaacacgaaaacctgagccagccgtggcgcactgaacttgcttctctgctgtaggtcgactgtgctaagaatttaaccattttctgcttcacagaattcaaacagtgggccggcaaagagctgtaaaagtttgtttgtttaaaaaaaaaaaaaaaaaaaccctgtcattaaagatgagttccttctccagctcaggactgcgagtctaccttccgggtgtccgccgccagctcccggagtagcaggcctggggccaggattccagtgtgacctaccgccccttcccgaagctaaaacctctggtgagggggtgagatccatgcgacattgtgggaaaccctgaaaagaactcagggaaaccgtacacttccagacaagctttagaaataaagtgccaggctccaagtggactttggtctggtctccgcatgtgccagtgtccgggccatggaccttccccgggaagggagagtttggggagaagataggcgttagaacaactagccttaggaagttctttgactccaacaattgtcgatgttccagcaagaataggggcgagtaaggcaaggcaccgggcagtaggagaa

SEQ ID NO: 229883 - DNA, 479 bp, Homo sapiens
  chr3:147136959-147137438
  hyper
ggcgctttccaaatcgtcgcggcaggctctggccgggcagggcgagatgtgcgcatgcgcggcctgtggcccgaggttccacgtgctgatgaatatgcatgagactcccccgccctcgcgggctagagagagaaccaagcagaggctccggcctgtgaaagtcgctggctaggctcccaaaatagtgcggcggggtagctgcacgtgtttgttttcaaaccgcgctggtttaagtgagttcacactgcggagccgacagcagagggtagagcaacctggggctgctgccattggaacggcgagttgagcgggcctgtcagggcctctccgccgagggccgggggctgcatggtgctcgagccccagccggccacaccccagtgcatcgggtggctgggcttccagtttacaccgggcctaccagggaggccttcttctcttatcctttcccaagcccgagctgccgccccggctgttct

SEQ ID NO: 229884 - DNA, 1041 bp, Homo sapiens
  chr3:147138408-147139449
  hyper
cctacccaaactcccgagtctccgagctcaataacgcaaggatggctgaagagcgtctgctccatgtctctttgccggactcaacgaccctcacccactgccaccgagtgctaggcccacagaggcctggcagaagccactcacccctcactactcatgactaggaagaaagtggccggggcatgagggttcgagttctgtcctaggtcccggaagccagggctcccagcgtctagtcaggggcgcagaaaccctcgttcctccaaacccccgccacagggaccactccagaagaaacccattcgtgatttgggtccctttgtgtttgagtattgtggggagtgggctatctagactctaaggactccaagctaacgatgacctgtgtgggccttgctctgaacagaaaactcaaactcagcgtgggttcccgcgtcttccccaaaaggccaaggcccaaagaacccttttcatttggcgaggggcttgaggaagggaggggctggggcgggagagggtcggggtctgcaagccagcggcccggcgcagcggacttgtccggctgctcagcttggcagctagcgtccgtgccggcaacgctgttaccctctcctgggctggagagtggggacatcccttccccgcccctaggcgtccctggggtcggcgccagagcccgggagcgccggaggctctggctggatggcggcgaggagggctctgagtcctctcccggccaggccgagcttagtatgtggaggcggcggcgggagtgcgggcatggaccaagggaagggggacacccaaaccgcattggtgccttcctttccctccactcgcgccgtagacctccccaaattgcccgtctccggtatgactgaatctgtctgctggcctctcagctaccaactctgcccgaaatctagatcccagacctggtaagtcgcgttcctcccctaccccgccccgccaccttactagcggactctgcccgcgacagcgtgcgcgcgcgtggcctgaggcgcgcgctgagaagttggg

SEQ ID NO: 229885 - DNA, 403 bp, Homo sapiens
  chr3:147140899-147141302
  hyper
ggccacttgcttggcgggtgaggcggctcacgcggtatttattgactggctcgggaaacgtgttcttttacttacttgtcattaaagttctaagttttaaaagcgcattcccagaaaatgcttttattctctttcccccagtaacagagcccgctaactgctttcaactggagaaggggagaaattcactcctgcacgagttcccagctactctctggtgaaagcgggagggcgaagcgaaattgtgttctagctctgagctccgcagccctccaatggctgacttccttcagctgctgtcctggggtgccgatcgctgcggcagacgcaattttccgcacctgcgtgttgttttttgccgccgggttttggcggagccatgcaggcgcggttcctgggaccc

SEQ ID NO: 229886 - DNA, 208 bp, Homo sapiens
  chr3:147142189-147142397
  hyper
ctttcgagcgagtgcgaggaaagcccctttcgacagttctgaggttttatccgaccctgcccgggactccctccctgcatgcccccggagctccagtccgggccacccgggggctgctggggacctgacgcaggcagctccgccactgacgtcaggggctgctggcggctggaacccgagtccaggccacaggcgcccggcgtgggca

SEQ ID NO: 229887 - DNA, 498 bp, Homo sapiens
  chr3:148415428-148415926
  hyper
ctgtacccccagctcgctctccctcacgacccctcgctaggcggggttcgggaccaggtgaacgctgatctgatagttgacacgggacgactgtggcatcatccttgctgccgtcaatatcccgagagggaggaggttgggccgggagggtctcccggggcggggcggaggaggagggaatgcaaaacagagcctcgtccccggaacccaagaagcagcaacgcccctcactataaattcggagctgcctcctcgccaatgattccagcgcctgacagccaggaccccaggcagcagcgagtgacaggacgtctggaccggcgcgccgctagcagctctgccgggccgcggcggtgatcgatggggagcggctggagcggacccagcgagtgagggcgcacagccgggacgccgaggcggcgggcgggagacccgcaccagcgcagccggccctcggcgggacgtgacgcagcgcccggggcgcgggtgagtccgcgc

SEQ ID NO: 229888 - DNA, 162 bp, Homo sapiens
  chr3:148803822-148803984
  hyper
ttgttaaataaagcactggccgagatgctttaagccccaggccccccacagtcggtgacagagatttcccaagtccctaacacgggactcgccctaggagcccctactcgccagcgaagacaatgcatttatttctccggcggccacatatgcgaccaacag

SEQ ID NO: 229889 - DNA, 1291 bp, Homo sapiens
  chr3:149375046-149376337
  hyper
tgctgcccaggcggcgggagcggagggggcgccgaggccggattcatcttctgcaaaaagaaggtcagatcagccttttatttaaagtcggaggaagtgggtaagagggttacagggtgagagggcgagatggtgggagaaagaatagagggaaaaggaaacgaggagacagataattgcccgcctggagatcccagacactcagcggtaagaccagcaggatgggggaggggtccctcctggcctcgagaattatgcaactttcttgaagcaaagaagttgcctggaggaggagaagatagggcgaggggtggagggaataactgcactcggggcttgctgaaccgcaggatggcaaaggaaaggtcgcacgattccaggacaggcagccccccgaaagaagttcagcccgagccaactccaccacgtctcgactccggaagcccgaggagcctggagccctggagtggtgccggatgagcgcgcgagctccagcgggcactacctgggcgggcagcgaagctgagcctgagcgcgcggcggccgccgtcccgcccgaacttgccgtcgggcctgggtcgctcgggtgagtcccgagattgcggagctggagccgaggcttggctgacaaatcccgacccgactctgtgcctggcagtctaagggcttcggctctcacatcccccgagctggcctaaggcgctagtgctgggcgaaaaggaggcgcaggagaagcagacagcgcggccgcagcagctcccggactgtcccataaacaaagtttggagcaaactcccacccccaggaaagaggcgggcccgaaagttgagctgttgaattatgtatgacctcctagtccctagccggccagcccccgctcgcccctcctcttcctcctcctcctcctcccacctcggctccagaaaaccctgggcgtgatgggtactttactgggtaagaggagacgggtgccccccacccactcctcccggccgcgcggacctctcccgctcagacctgcatctgcattcctttgagtttaccacggacttggggcgggatcaaagggaaagtggcctgagcctgtttcatcaaggggttgtggaccgaaaccaaggccgggggtggcggagggcacgcggatgaggggctcaggcctaggaagggccggtcctggacaccgcgccctcccctgcagccaggcgccgaggcctgcagcacccggagcgccgcactgacccgcgattctgcccgaaggccggcccgggtgcgccccggcgcggggagacac

SEQ ID NO: 229890 - DNA, 161 bp, Homo sapiens
  chr3:149687759-149687920
  hyper
aactggggataaccgtatatcgatgaatctccatatgagaagagaaatcaatggcagttcgccatcttggagaatttaaaaaaaaaaaaaaaacaacctatagagctagagctgaagtcgagattcacgaatccacctacgcggtcggcgtacatctctcg

SEQ ID NO: 229891 - DNA, 372 bp, Homo sapiens; identical to SEQ ID NO: 199135
  chr3:149689311-149689683
  hyper

SEQ ID NO: 229892 - DNA, 54 bp, Homo sapiens; identical to SEQ ID NO: 199136
  chr3:150126521-150126575
  hyper

SEQ ID NO: 229893 - DNA, 357 bp, Homo sapiens
  chr3:150264352-150264709
  hyper
tggagaaggagggcgaaagcaggcgcaccctcccaagctctgtcaagcgtcgccctagatttgcgcgtgcgcgtttgggcgccttttccgcgtcactccgtaaccggaagtgaattggccccgaggctgatggctccggaaacaccaattcgctgtctccacgcatgaggagacgtgtaggggccgggttcggccctggtgaactctcacccgagcggtttctctttccgggacaacatggcgccgtccacgccgctcttgacaggtgagttctgaagaagcgagggactctctttcttcagactagtttcttatttttgtctttgcctttgagaactacccgaggagccggggagt

SEQ ID NO: 229894 - DNA, 348 bp, Homo sapiens
  chr3:150421685-150422033
  hyper
ggctggcgggaggcgggattacagccagctctttggccgcggccccggtcggctctcgcgagcgcgagcctctgttgtgcgttggtctccccgggcaactgcttgccctgcgccaccgagcctcccggatttaaagcggcaggagctggttagccggatagaatgtgggtgccgagggccggtgggggccaccgcagacttctttctgtccctgctcttcagcgtctctgaaacccctggcagcctgcggagaaacgatcttttcttcgtctctcagcttatttggggcctttttttttttttttaacttgggtggaggaagtggcttctagcgacggacacacacgg

SEQ ID NO: 229895 - DNA, 286 bp, Homo sapiens
  chr3:150481642-150481928
  hyper
gctcgtatagcaggccgaggagggagctcatgggcagcgttggctaagagttcgagatcatctagaaatgtcagaaacgtaggttgggtcgtgaggtctctgaagacagtgggtgaaactccagtgtaaggcgctgcgtccgcttggtagagagccggccgaagtccgagtctttgttgcgaggcgtagggccaccctgcgcgcccagcagaagcgctagagggcacggttgcccggggtgaaccgcatgtccaaatgtaactgtgtgctccgagttaaaattgtt

SEQ ID NO: 229896 - DNA, 1829 bp, Homo sapiens
  chr3:150802908-150804737
  hyper
aggttgtaaggaccagagattctgactatcaagatcctggcacgtagcgaaggctccataaatggcagccatcattcttggccaagtgcgggcgcattctcccgggcacgcctcccgcggggtccctcaggacaggccgagcccgcctccgcggctccggtctcgcagagctcgcgccaggtggcccagcatcttggtgcccgcgccccgaagcgaggagcgagggcgggttggatgaccaaggtctgccctggaggatcaccccccccgccccttccacgctcccggcgcaggtgaggttttcggcccaggccacggggaccgcgacctctggggaggtcgaggcggagggtgcagcggggggcttggagcagggctccagagggcgctccctccctcgcccaggttcaccccagggccagcctcggcgccggggcccgcgggctgcgcgctctgcggctgcgaaaacccggagaggcggattggagcgcgctcaccgcgctctcagccaactcctccgcggtccggccgccgagctgggcatgctcagtgcggacgccgcgccgccgtccgccaactcggaagctcgcgctcccgggccgtgggggcgagaacgccggcggcgagccggcgtcgctcgccgcccccagacagtggcaaacttcgcggcgttcccggagctcgtccgggcgaggcagataccgcacaaataaaatcaaatccaagtcccccatcccaacccgaatgatggaggctgcggcggccggagtgaccccgccgccgccagccccagcccgctagccgcggaccaacaggtaaagtgttgggggttgggggcggaagggaagaggagctggggccgtggggaggcggcgggctggaggagcccgagacgcctgcgggctggctgcccccgtcggcgctcacagccatcgctcctcacccccttccccagcccctggagggactgtaaagggttaagtcggccccacgccaccgtgagcacggccccctccagccgccgcgaccgccagcagcgcgcctcggcgcctgcccggagccgccgaggggaccgtagctgcggatgcgccactggaacctggcgggcgtctaggaggcaccggccgcttcccaccggccgcatccctgcgtctcgcgccccctccagacctgcctctgcctgcactggcccggtccgtgtccaggtggcggggtctgcggggcgcgtggcggcgggggaagggtccctgccggggaagagaggcgggggcggtccgctccacagcttcttcccgggaggggagggccaccctcgccttgggcgagcacttcagccaccagcctaggcgccaagaaaagtttttttttttttttttccagtgccccacccccacccccatcctgcgcccagctggggtgggtttgggtccattggtgaaaaaagtcacacgttcccatcagctgctcctccccctggagacaaggtaggggggagcagaggaggcaggcgccgcggaggaccctggccgacctctagtccctccgccgccgccaccggagcggtgcgtcccggggctcgagcgcagccgagtacccgccgaaggctgtccccatcagtgcgtgtctgctgccgggcagcggcagcatccaacctgctttattcctcctgcctgcagcgccacagcgagcgagcgagcgaggagggggagagagggagtctgtctgcaaagtgctgctccctggtgctcagaggcggctgctccagctccaactctcattcatttcgccggttaacatgagagatcatggccgccttcgggcttctcagc

SEQ ID NO: 229897 - DNA, 37 bp, Homo sapiens
  chr3:151556892-151556929
  hyper
gcattcagttggaacggaactccgccagttagtgact

SEQ ID NO: 229898 - DNA, 108 bp, Homo sapiens
  chr3:151986596-151986704
  hyper
attaggagctcgacgagtccgccctgggcttcctggtggggctgggcgggcgggggaggggccgcgcagcagcagcggaagccagacctcggcgataagaggctgcac

SEQ ID NO: 229899 - DNA, 174 bp, Homo sapiens
  chr3:152016858-152017032
  hyper
gcatagtaatgaacgtctgacaggcgcgacctttcataagacaacccacactattggctttctgcccagaatattgctgcaacactatctgtgattggttatctctctatcatgcattgcttcacaaggggaaacggcccctttttttaataaatctacgatggctggctgcaa

SEQ ID NO: 229900 - DNA, 1425 bp, Homo sapiens
  chr3:152552395-152553820
  hyper
cagaaatccggtcccggcaaagctagacgctctgcaatgacaggcgttcccagctagggactcctggctgcttggagcttgaaaacacctggcgtggttctcgagggccctagaggctcctgctacggactggtcggctctggggttgtaggcagaaggctctaagcggtcggaagggtttcctgtgtgtcagcaacttcactttgccgagatagctggcggaagagggaaggagcgctcgcgggccaatcgcctgccagcagccaccttggagcgcacccctctccctcgccgccgactccggtagcagcgtgccggcagaggctgaacacactcggcctcggcggagacctgctccccagaagacgcctcctgcttcccactgcgccctggaggacgcgggctggctgctgggcgagctcggcggaggcacgcccctcgcctccccgcggagtgcggactcgccccggtgcccaaactccgcccaccctctagggagctccgctctcccgcctaaccccggcactccggacagagctgggcctggggaaggggttcctgaactacgcggacgccgaacgggacgcgctgcagaagcgcacgagtctgcggccacgcgcgctccgatggctgccaggagctgagctcagggtgggcggaggaagcggttagacgccccgaaactgagctgcacgtttctaaggtagggaggaggaagatgcccccaattaagttgatctttgagccaaggaggctggggagcagcctccccaagctagagccctgcagagcgagtttcccttgacctcgctgcgcctctggcgcgctctgcagcgcggacccgcggcccctcgggaaagcgcagtcggaaagttatccgcggcggttccctgcgcgccctgttgtgtaagctcggcgttgccagcggacggagaagttgctggcttgcccgatagcccagttcggtggcggcccggggcggatttcatggcccgcggcgaacgcggggccagagctggcgtgggcgagcccctgcgcgccccctcccgcggggatccagttcgcctgctcccttccgctcgctggcttttccgatgcttgctgcgcccctggccgccgctgccctctcgccgcctcctacccctcggagccgccgcctaagtcgaggaggagagaatgaccgaggtgctgtggccggctgtccccaacgggacggacgctgccttcctggccggtccgggttcgtcctgggggaacagcacggtcgcctccactgccgccgtctcctcgtcgttcaaatgcgccttgaccaagacgggcttccagttttactacctgccggctgtctacatcttggtattcatcatcggcttcctgggcaacagcgtggccatctggatgttcgtcttccacatgaagccctgg

SEQ ID NO: 229901 - DNA, 241 bp, Homo sapiens
  chr3:152879615-152879856
  hyper
gctgagtgaatggcgtccttgggcctttgataacgggagttggcaagaccacagcctactccatccctgaggcggcccgccgcgcccacgtgcttctcgcagagccgccgcccttgtccaccactcccacagctgtaaaataaagcggcctgcatgcttcctacagcgctttcctcgctcccatatacgcacacacaccccatcttccagccagttcctaactcgcgccactccccaaatc

SEQ ID NO: 229902 - DNA, 32 bp, Homo sapiens
  chr3:152880084-152880116
  hyper
gcgcgtcccggcccgacgcgcaattagcagcc

SEQ ID NO: 229903 - DNA, 1717 bp, Homo sapiens
  chr3:153838774-153840491
  hyper
gggcatgactctgcgttagaactctgcgctactgcccacgcatctcacaaagtctactacgccgcgcgttctcggtttcaacgcacctccaggattcagggcttcctaagctgcaattcagcagggctcccttgcttgttctcactctgtgcccccggcaacgaccccgcgcgcctacactcccgtgccgcctcagctactagtccgcaacttctagccccaaaacgctggagctcagaacccagctcaggtgcgctcgtcggtttcccagggagactggggctgattgtaggcacgcgggggcgggaagacagcttcttgcttctggctgcgatggaggcggatctgggcggggccgaaacgggggcggggccaagtgtgggggcgtagtcaggcgtgggggcgggccggcgccggcgccgcggtcggcggcagcgctctcctaagctctcgcggctgcgcttcggtcccggacccgggccacccacggggtagtgggtgctcctcggccccggacattgcaagccccagaaggtaaatttgcgtgggagccgcgcacctggagcgcgagggtacccatgatgagggcgggaggctggatggcgacagaagggagcgtcccgcggcgagtttcccaagaaagctgaactcgtcccaagtttcttgtgcctcggcttgcactcagtgaatgggtggcgggctcatttgctgcgggtggtcttttggcgcgggagggacgcggaggtgattggattaatccgcctgggcggcagcccagatttctgccgggaaccgcgcaccgcagtggtgcagtttttgcccgagaaagggcgggtaagtgcggtgcagtcgtgtcctgcgcagcagcagggggaccgccggtctgggagcacgcgagtcggccaggcgtccccggttgtccagaggcacagtttcctaacttctttcctctttaggcaagactaactcggtgttgctcctcccggcgctgacttcgaggcccggctatggacggcgagagcgaggtggatttttctagcaacagcataacccctttgtggcggaggcggtcgattcctcagccccaccaggttctgggccggagcaagccgaggccccagtcctaccagagccccaacgggttactaattacggatttcccggtggaggacggagggacgctcctcgcagcgcagattcccgcccaggtgcccaccgcctcggacagcaggacggtacataggagccccctgcttctgggcgcccagcggagagcggtggccaatggtgggacggcatccccggagtacagggctgcctctcctcgacttcgacggcccaagtcacccaagctccccaaagcggtgcctggcggctccccgaaatccccagcaaatggcgcggtgaccttgcctgcgccgccgccgccgccggttctgcgccccccgcggactcctaacgcgcccgccccctgcacccccgaggaggaccttactgggttgactgccagcccggtgccttcgcccactgcaaatggccttgccgctaataacgactctcctgggtcaggttcgcagtccggccggaaggcaaaggaccccgaacgggggctctttcctgggccccagaaaagttcttcggaacaaaaactccccctccaaaggctgccctcccaggagaacgagctcctcgagaatccttccgtggttttgagtac

SEQ ID NO: 229904 - DNA, 325 bp, Homo sapiens
  chr3:154042065-154042390
  hyper
cgaccaccccctccgccgccgccgcctcctccggagcctcggttacctccatgaccccctgctggcccccctccatagcccccaccggagctgcggggacccccatcacggccccagttctgatggtagtcataactcattgtcctggcagactacaacccgtcagaaccagcaaccgctggaaatggcgtccgggcccggaagccactgtgcgcccacttccgttttgcttccgtagcaccgcacaagagggcgggccatttagcgtcacaagcagtggtttctggtgacgtcacgggaggacgaccccggtggtctggagggt

SEQ ID NO: 229905 - DNA, 1276 bp, Homo sapiens
  chr3:154145709-154146985
  hyper
gagtgccggatctgcgcccgctgcctattcaagactccaccagaaaggcacagtctacaacgtgggggacgctagctaggaaacaggcgtccgtgaaacccgcatctgattctccgaatggcctttgtcgcctccctggaccctcacctccgcccatgcgcgctcgtcacagtggggcgccactctgccacctcttaatcggcttcctcctggaaggaggaacaaaagcctgttttgttccctgtcttctccctccacaactgatctctcctcccctctatcccgccctgctggagatgggcgtcgtcctctctaggcgggaatggaacggcgagaaagggatgacagaaggttgtggggaaaaaaccttttaattccctctttccttttctgaatactctctgattttgctgtgtgagacaatatccttggccaccaccgatatggaaaactaagtcgctcgcgacggaaagcgatccccatgcccctgacttttgaaaggagaagcatttagtagtaaaggtttcgcagccaactagccctgtcccgaactgccttcttctaagtgcatgtctaaaacccagcgagatacacttggaagcggacttcactgtgtgtctcttggtgactccccaaaccggcgacgccggtcccaacactcatttacactgtctggcacacacactcgcgctttgtgagcaactgcacttttaccatcatgggcagccaaaggacgacttttgtaagcgctaggatcaaagcgaagcgcttctgcgctacgctcacggtgaagctcctggtgccatagagagtcccccggttctcacgcctgcaggcttcagccccagcggcagcgggcgcacccggtccgaacacggtgtcggagctcggagagcatcccccagagcgccgcagactcgggcctggagcatcctctggggacagggaaaccactctccccgcagtaggaggggtcccaggaattgaagctccacgggaaatttcctggtagttggagtggagtctcggcggctcctccgaacacagcaatcggtgagtgagtgggactgagaggcccacgaggagtccgaaggccaaagcgtacacgatagagaggaatagtacgtaggagctggagcagtccaccaggcagccccagggcgtgcgcacgaaggcgccccagccgcacagcgggagcgccgagagcagcagactggctgcccacacggtcagcaccacgccgagcacctggcccgatcttctggaggctgtctgg

SEQ ID NO: 229906 - DNA, 1091 bp, Homo sapiens
  chr3:154797107-154798198
  hyper
agcattatagtctccggtccacaggggagagatggagccccctcaggactagagaatcccgaagagcccgtgtattgttttcttgaaagccccgaagctaagcaattctaaaaatgtttagcaaagcccttttgggaatggtgagatggggggtggggaggatgggacattttcattgccaccgcccgccccccgtctccccggccccctcacatgaagtgactggatttgggagacctagcggaaaccttcaggtcacccagggaactgctcctctctctggtcctgcagcggcgaggcggggtagggggtggggggggtgggccgtgagagcgccgagacgcgcggggcgcggagatgtgcaagtggcgaagcttgaccgagagcaggctggagcagccgcccaactcctggcgcgggatctgctgaggggtcacggtgagtctctgtgggtgcgggtcggagggatgcccaggtgcctcgtcgccccacggcccgggcggaggcgggtccggaacctcccccaagtccggcctcagcctggagcccgcgcgccttgggcggatgcacggactgagaggcgcttggctgggctctcagcccgccactgccacccggccccgtgcgctcattggtcgggatgtgtcggctcagcagcctccaacttctcccgaatcccactggtgagtcccaggagagcgagctgagggagaaaggtccaaagggcgcgagcgcccagggcgctgggagcccgtgggacgggcacggggagggcagagccagccgaggggagcggctgccgggaggtgcgctgagcagggtccgcagctaaggtccagcgcgatccgagcgcccaggaccctgcggccgtggaggaggcgtgccctgggaaggagccgctactgggacctgaagagtgaggggagggagaggggcccagagggtgacctggaggagggctctggaagtcacgtcaggttggctcttcaggttcatttccatagttccctgcggcctctgccttggggagttatgttttgttaccgagatccgcgctaccagattgcaccggggctgatttgggggctggg

SEQ ID NO: 229907 - DNA, 1286 bp, Homo sapiens
  chr3:155461744-155463030
  hyper
cattttcttctgtccgtgatcaaaacggtaacaagggaagggaaaagttgggtttttttttttaatttagttggttattgctttaatgctgaactctcaacgtcaaaatgtgatcacaaattgattcgcagaaggaaacaaatagaaaaagcctcgggaaggaggggagagggcgtcgcagacgctcaacagggaactgggtttaggggctcgcggggtggcgtctcggacccgcagctcagtcgccaaggaaacgccgcgcaggcgcagagcgtgccgccgcggggccggggtttgcctccaccaccccgcgccgctcgggcgctcttggttcttcccaggaaagggcaatggagtatatcctcctcgcgctgagcacacctagtctctaagaggtcctgagcagggtcaccgggcgcaggaaaagctgtgagactccccaagtgtaacggacgctgcactccccttgctgggaaacgcggacctgctctcctggcggcgtctggcggtcagagagagggtcccgggaccccgcgtgagggtgaagcatcctgcagcgaggctggaccttccaccgggcgaaacgccacccaccaccaccgcaagggacccgagagttacattatttcgcggacacacacacccaccctcatccttctgaattatgggaccctgaagagcggccgtggccagttccccgcacggggccttaggggatccccacgcacagcactcacagtcctaaacaggcgtgtgccggctgtggctgccgagaaaggaacttgggccacctgctcactcgctcatcggactggcgtaccagttctctttttcctgcacacccccttctctcctgggccccttcttcccccgaaagcactgacctcctcagctttgagtgttcagtagctgaaggactcctcggagtccgtggcacaaggagccacctccgaagtgctggggtgatgagttattggcccctgtgactccaactccaaacccctgccaagggccagaaaagcccccctagaagagcacttctccccactagccagcagaagccccagacgagcggggaagagcagggcgccgccgccacaacctgctttctcattcaaatcctcacgctcacacaggagcccccctccctctcggccccgcagcttccgaggaaatcaggaactggagttgcggagagcggactggagcgcctgctgcctcctctggcccgggcgggatgggtgtacggaaccctagggctgcacgtggaaccccaaggctgcacc

SEQ ID NO: 229908 - DNA, 90 bp, Homo sapiens
  chr3:155524159-155524249
  hyper
agtcgccagtgggcgggccccagatatcagacgtcttaacagtgccccaaccgcttttatgcagggtgattccacgatgcaggagatctc

SEQ ID NO: 229909 - DNA, 352 bp, Homo sapiens
  chr3:155572031-155572383
  hyper
tgaaggagacccccgggcagcagcgccgggctcgaggctggaggtgtgtgccgtggtgccaggatggaaaccagctcctacctgcggcgggatcgaacggctggtctcccgacccaacacctccagctctcgctgctatcaatgcggcagagagcactttctctacaggactccagaaaaagcatataacttcctgcctcgcgcttcaggaagtggtcccagtctctaacaggtcccttcccagcctccagagcaagccaatcagggacacgctctcgtggcccagttcggaaacaatgcttggtgggaacctgcaatcttggctgccggaaccttcggggaggattaacgc

SEQ ID NO: 229910 - DNA, 734 bp, Homo sapiens
  chr3:156009078-156009812
  hyper
acgtcctcccggagcggaggcgggagggagctgacagccggagtggatggagaccaccagtccgaggggacccgcttgcgattagctgcttcttgggatgctccgcgcgccagttgagcatcctgcctgtggtccaggggatgctggcggcgcatcttgcggtaagcctgcgctgatttgagccatcgcccagaagcgagcccgcattcagacaccgcggaccggctccgcgaagggctgcgtgcagtcaccatgaatgctcagctctaggcttctgtaaaaacctcccccactgcatggatttggctgtttaatcagccgagattacagcccgggaagatttgcaaacctgattctccctccagctgctgtgacaacttcggggccgtctgtttacttctctgggtccccggggactctttcctgcatcgcagccccttgtgccactttgtgggcttggctcgaaagtcagccgccaggactcctctgacggcatccccaggaagggggagcaaggagggcttaaaagaaaagcagaaatccccgcaactgctcaacctctcgtgactgcctgtgttctggggttctgagagggaccgtgcgctgcctggggaagcaatgcaagtctccatagcctgcacagagcacaatttgaagagtcggaatggtgaggaccgacttctgagcaagcagagctccaccgcccccaatgtggtgaacgcagcccgggccaa

SEQ ID NO: 229911 - DNA, 65 bp, Homo sapiens
  chr3:156273035-156273100
  hyper
ttggccagcttggcgccactagataggcttccgggcgtgattgggcgagcgggccagacttccgg

SEQ ID NO: 229912 - DNA, 34 bp, Homo sapiens
  chr3:156392398-156392432
  hyper
agctggctggactcggagcgcggtcgaggctttc

SEQ ID NO: 229913 - DNA, 719 bp, Homo sapiens
  chr3:156533965-156534684
  hyper
tttctcagccccgacggctgtggttactcaaactgatctcatcgcaggtcgtcacgacacgcgcttcccctcgcctgcacgcggcgtggcgtgagaggggccctggcagccggcgcgcccacccctgatccttcgaggcccacgatgaagcccatcctacttgcaataacggccccgttctcattcttcaaaagacggctcccagacgtcaacaaagaatctaacctacacagcgccggccctcgctcctttcagcctcagcgagcgctgcccttcattaccccccagcgcacttctggacactgcgccgggtcgccggggtcagccgcccggccacgaaagtcgcccccagcgtgccccaggcgtcagtgcacgccgggctcccggctccaggcaggcggggtgaggcagctccgcgaaggccactcgctggcgaccccttcccgggtctcctagccctggccgggctgcccccgcgcccgcccccgccctcgaaatccaggcagtgcgggaggccgccttgctgctctctccgcccgcacagggccgcccgacggagcgggcagggagcaggcgccaaggaggccgagaggggcccaggggcgaggtcgactctcagcccgctgtccccttatcccacgtttcgcagcctgaggtgtttgttgtatatcgggaactgacacttttcggcgttaaaatgagggcgtcacctgctcgaa

SEQ ID NO: 229914 - DNA, 244 bp, Homo sapiens
  chr3:156877883-156878127
  hyper
agtcttagcgagccgcacgcaagcccaacgcagccggaacccgaaacaagactaaccagcgttctcggcgcgacggatattcccgtgaccgccgggttctgggccgcttcacgccgcgtgcgcttccgccctgacgtcaccacgccgggcagccgcgcgccaactagtccctccaggccgcgcctccgccctcggcatctgggcctgcgaggggagtgttgggtgctgcgacagaccttgggat

SEQ ID NO: 229915 - DNA, 213 bp, Homo sapiens
  chr3:157154537-157154750
  hyper
ttcaggggaactcccgttaccgcagtgccaccagcattactcattcatccccattcaggctttcctcagcatttattaaggactctctgctccagcctctcactctcactctcctccgctcaaactcagctcacttgagagtctcctcccgccagctgtggaaagaactttgcgtctctccagcaatgcatctccttgcgattctgttttgtg

SEQ ID NO: 229916 - DNA, 1106 bp, Homo sapiens
  chr3:157155188-157156294
  hyper
ggaatgccaggaacgggctgcaacttggcaccaccgagggaggtcagcttttacaaagcacatccaaggcaggcctgggcgggctgctaacgtgtgtgtatcccgtactctagccacgccgtgcgcctgcggtcaggagcactcggaatgggacaagctcttcatcatgctggagaactcgcagatgagagagcgcatgctgctgcaagccacggacgacgtcctgcggggcgagctgcagaggctgcgggaggagctgggccggctcgcggaaagcctggcgaggccgtgcgcgccgggggctcccgcagaggccaggctgaccagtgctctggacgagctgctgcaggcgacccgcgacgcgggccgcaggctggcgcgtatggagggcgcggaggcgcagcgcccagaggaggcggggcgcgccctggccgcggtgctagaggagctgcggcagacgcgagccgacctgcacgcggtgcagggctgggctgcccggagctggctgccggcaggtaaggaggcaagcggggccgggacctcccactgcggctttgttccgggagcgcgcgtaacggcaagccaagccaggcaaccttctaggggaagctttcatgggaagcgcgcgcgcgcgcgcgcacacacacacacacacacacacacacacacacacccctatttctgcatgcgcggtcacagagctcaggcacaccatacaaggcgggaaaattggctttaaaaaagtattcctcagtcctaaggagccctaaagagagttgtggaggtaaccatcacagtcttgaaatagacgtctagggccccttacacccgatccgactaagcgctgcaggagtccactggcccgttataaccgtgatccctcttgccgcccagcttccctccgttagggatttccacgtcttctaattttatcctgcctctgtctttagaggagctctggtttcccgcactatttcagggcccaggctaacgtttagggatgttttccagcccctcagccggcccctcctctccgcccacccattctcagcaagaaacttgaggctaaagctaatctcccgaagggtcagcggaattcttcaggg

SEQ ID NO: 229917 - DNA, 632 bp, Homo sapiens
  chr3:157217106-157217738
  hyper
cacaaaaacagaaatgatggcgcaaaacgtggcacatttcagggagtcacagctgtcccgcgcaaactcgactttacctgcgtgctactcctcaaaggcgcccttgcagttactcagctgcatggtttgagactgggcgggagattcaggcaggctccgagggcacagcgagtggaatccgctcagctcagtgaacctgaagttgttcattgcggagccggtgccgggtggaagaattcaaggaatgcagcctgatgccaccggcagccccagagaccggtcaggtgacaggctgcacctcacccagcggagttacctcccagtgcaacgctctgtttcctgaggtgaaacacaaagcctgctccagtaaaggagagttgtttttaacagagaaaacagaactccctgtgttcgtgaaaatctatactttcccagggaagaatggggggcgggggcgagccacgcaggaaacaattttcaacagaactcaagcaggtgaacggaatggctgtagggagccacctctcagagctccaggggaggagaagagaactgcagcttcattaacacttccctctccctgagatctcacaaacgttttggaaacactgagtgttcgtccagtaagagtc

SEQ ID NO: 229918 - DNA, 325 bp, Homo sapiens
  chr3:157260919-157261244
  hyper
ggaaaaaaacgaggcggggtgggggaggtcgtgtcccagggttctgacagtggagccaggacgtccgggagctgacaatctaaacgcgacctgggaaggggcggtagcgggagtggctgcttcctgggaggtggtgctcgcaaacctggcagctgactgggtggggcgtgccttccctggcagtcgcggaggggaaggctgagggacccggtccccgccccgcgtgctcaggctgaacagcttttcttccctgatctctcggaggcgccggctgctggccaacgcagggcagcctcctgcgtgcgtgctgtgggtttctccttca

SEQ ID NO: 229919 - DNA, 1654 bp, Homo sapiens
  chr3:157812191-157813845
  hyper
ctggtcccacaggccgtgcccgagtggagcactgcgaatggggccaagaaattttggcctttctcgccggacctggctgcctccgcgggcctctccgcctaccgcgctcccgccgcggcccgactcccgcgggtctccgcgccgaacccacctggctcctatcgcacgggacattcccgacccacccacgccgcgtcactgagcctctgtaccgatacccggcgcctccgccagcagggcctggacgcaccgcctcctttgacctcgggcttcccccgcgctccgctgcttggggcagactggccccgagagggagccaccatctcccctgctccagggtctccagggtccgaacccgtgttgggatctgggttaggattagggtttggagcttggagcctgcctgttaggacccccggccccggcgccgactggagctcgctggaggccacaggaccacggcggatggcctggctgcttcagggcgtaccatgcccgcaggcagatgtttattattaaaaactaccgacgttcatcaaccaggagacccgcaaggcctgcgcactgaatacggcccaaatcctgttcagtggtctttgaaagttaaaagaaagaaacctatcgcccacgtctatgctgaggaacagctttgaatacgagctaagacctgggagagggccaagtgggggtggtggggaacactgctggaggatgtggggctttggcaggggttttacgcaccctccagcacgagggtggggggtcccaggggacgctcaggactctttcagtctttgcggaaggtcccgtcatcacaagagcccgcgcgggaaggaaagttcctgccttggacatggtcagggccgagtcttcaaagtctccaactatccccacacaggcagcacctttgggctttactagtgggatttcttccagaagggggccacgacatggggagagagagctcctcattattttcaaggccaggcttttcctaaacccgattctggcttccaccttctaaatttaaccaatgaagaagctgcttcagccaaccctaaacaggagtgtcagatggggaatcctccctccacagtgccctggcctgcccgcctttgcggctcttttcccgctccgaagtcagcacctgccccgctccagagagggtcaacgaactgggactgattgtcgattatgccataccaaacccaggttgatttcgctccgcaggatccctccttccttcctcccaaaagtgtccccagataaagactggaattatagcaaaacgaataacgagagtccatcttggggaaggaagttactctatcctatgttattttacttcttatctgttctttcattaatttggtataaccctgtttctatgctgggtggataaaatggagggggccggcggaaatgcgctcagcgctaacgacagccacagagccacccttcttactgccccttgactgcggcacgtaagagcagaggcaagcgcttttccaagttggtatattcgagagagtgatacgcattaatcaaaagggaaagactatcccggatattttaatagtaacaggaacaaagatgactcgaaccccatcaaatgaaacgatattttcattcaattgatcgcaaagtgtcttca

SEQ ID NO: 229920 - DNA, 1126 bp, Homo sapiens
  chr3:157815379-157816505
  hyper
cccttcctctttttctctcccgtttgtctttcgatttttttgtttgctcattttttcattgttaacaagatttttttttctatgcaagagtccatcgttgcagctttgcggtgagccaaactccgcggttccagcactcccctgtccagtctctctccagactcccccaaacccgctcctacaaaacccaattctaggccctcgagtaggaaaacgggcaggagccacggagcctgcgtgcctcgtgagatccctggtcctgcgtggagtctggctttccgagtccaagatgcgataggggacgagggatggtcagtgaggcgggaagagggccggctcccgaggtctcaaaggggtaacggagaagcagcggggcgcggagggcgtgcaggctgagtgccgcgggacaggcgcgacattggtgctggcgttggcgtcacagacccagggctgcggcgtgctttttggctttcagtctgagatcggcgatgctggagttcttgctggtggtcttggcggctgctgcggccgccactaccgaggcggcggaagccgaatccgcggccagcgtggcgagcggcagtccgaagggcggtgctgggaacatcatgtagggcgcgtgcgcggccaggtgcggatgcaggtggtggtgcgcgtgcgccacagcgctgtccagctgcagctgcgcctgaacctgaaaggacaagggcgtcacgttgcaatgactatcctagggtgacaacagaatagaaacagagcattaacggcgtccagcttggccagagagagagttgggttgtgtttgggcacggggagagggcatttggctgtgcatcttgttccgacagtgaccttctcagcctgttgctgaatctggggttccacatggatactccagtgtcccctgggtctccgaaactcgcttagggtaggcttatttccccggaccccgggaacccccttctgcaggaatgtggccgtctcccctgggaactgggctgaaatggtatattggaaagactgcgggtgaggacccttaccctcttctcttgatgctgccatgcatctcttaccccactaccaaaacaacggagtatcaacaagcaaactacgcaactttttaatg

SEQ ID NO: 229921 - DNA, 1352 bp, Homo sapiens
  chr3:157820689-157822041
  hyper
ccagcggggccacacgtgcatccacacgaacacacacacacacgcacacacacacggacgaaaacagcacagcaaatcctgttaccagatttgtcgcaaaaaagaatagagaatccttccccctcgtggaatcctggtccggcttctcaacccacccggaggaagaatatcccggagaagcgcaaaggtcaagtctgagcggccgcctggggcaaggtgggcagtcatccaccacctccttcacaaacgtacctcgactcaccgcctcactattcaccccccagtcaccggccttccccagcaaacaccaaatggtttccactcactttcgcactcacttgctccgcagcactcacagaaatcaaaggcgcagcgccaggcctctcacagagcaaagtctggacataagggcgcggcaaggccacccactggcctctcacaccggccattcccagaaggctggctcgttctcaggccagctctcaccaccgctggctctctgcctaccgcaaacttgctggtctaatttaggaacaattgggccgaaaggtatcagcgagagcaacagaccccggtgttgtgccgcacagggagccgcatccgcagacgcccctcgctgcccctgggctcgggccaaaccctgcataaggtcccctggacagccaggtaatctccgtcccgcctgcccgaccggggtcgcacgagcacaggcgcccacgccatgttggctgcccaaagggctcgccgcccaagccgggccagaaggcaggaggcggaaaaccagcctccggtggcgggcgaaagcaaccgctctttctgttctctcttcgccctccctcgtggaaacgcagactcgaccctaaacgcttaacccacagagatcaacaggttcaagcggaatattcgcgatcctcggtttctattggttgctcaaagccttttcatgcaaccagcagctcggatgtttaataaaatatgaatttttctgctctgggtttgcacacatccgttgccactttcctgtccttctcctccctttaaaaacaggagctcttctagtgtgagcatatacagccaccatatatatatccccctggaacctttatcctctgcgcccgaatcagagactccgggttttaagaagtcaaagctgagtttagatagtcgaggctgtttgcagttcttcccagcgcaggatccaggccagcatgggtgttaaaaatcatttccggaagagccggtctgcagagaaattaatacttgccctgagcttggaaatcaacaatcccaggaactgcgcccgccgggggttcagacctgaacctcgccgtcaggcgcgctggcgaacctgt

SEQ ID NO: 229922 - DNA, 879 bp, Homo sapiens
  chr3:157822953-157823832
  hyper
ccaaagattcaggggctctgcggagttcgaggggtcttggcggccccaaacacctaggcgaccggagggttaagctttccacctctgccccttctccctcccggcaaactctgcgctagaggctagctttagtcccgccgtctggttcagcaccccctcctgcagcccggccccgcgaacttccacgtccgcctgcgggccatccgggctgcgggcccatcctcccgctggtgaaaaatgcatttcggtggaatgggaacatctgggaagggcgcgcacaaaccccacacgcttccccccacgccacccccacaacacactaggaccccacccatgaccgagcataccaccggacccccacccttccactatcactctagctgacaaagctggggtccagggccctctccgtgtccctctcccctccccgctgggcctcggagtcctctcccgcccgagaggagtccggaaggcgggaaggggaaccgctgccgggggtcagtcaggtcgttaccctccgtcagtcgcgggctgcccggctccctgcttctctcggcggcgcccatgtccagctcccggacgggagagcgccctcctccagctcctccgcctgctcctcctcctcctacacctcctccgcctcctccgccgccgcctccgcctcctccgccgccgcctccgccggccgcccggactgccgggctgctgcggtcgtcgcggcccgcctcggtgcagccggtcggctccttggccccgcgcagcggcccgctctccagcacctcccggtacgtgatcgcctccttcttctccttcactttctggtcaaaagacttggagacgaacgccgtaagttcttccatcgccgccgcacgtcagccc

SEQ ID NO: 229923 - DNA, 264 bp, Homo sapiens
  chr3:157824081-157824345
  hyper
gaggaggagaagagaaggggcgggggctgccggagggaaatgggaactgatgcttccctgccggagcgcgcttgttcaatgttaagatctttgacaattcttcctgcggagagttcagatctgatagcgacgctgcgcttgaagtcccactatttatacttcctaacggcggcctcttgttttgagtaaattacctcccctcgcaactcggagtgagcccccttcccgggtagcagtcgcgcctctaccgggggttggggaggg

SEQ ID NO: 229924 - DNA, 1164 bp, Homo sapiens
  chr3:157824405-157825569
  hyper
gagaagaggagagagagagattggagttcgggcgggctggggctggagtggtagggcagcacagggggaccggagggggcggggagagaaggccggtccccggccgctcaggttttcagatagcccctgccgcctgtgctcttggccattaatccaggattgacaagaatccctaattaatttaattaggcgtggattttgcgttggtgtcacgacttagttaaacactggggagctggatagaccccgcggggtggggccaagaggaaactgacaagtgcgcagctcttagagtcagtcaggtatcccgacactgcatccttccctacagccttgcttcgagtcagggtgcctcgcaatgctcagcttcgcattgcttttcctcgtccctgccctgcatcaaccgcccagcagtttacaggccccgcatcccattcccgcatcctgaccccgcatcccaattctgcatccccgcctctccctcacaatcccacccctgccggccgtagctccaccgcccagcatcatcctgcccagagacagggttgcctgcaccttctccgacccgcgcagcttctcttaggagcttcccggctcgcaggcaggctgagtccgggtcttctccaagctcctcgcccctcggtccgtgttattcgctctattattcgtgtcctggagcccagctgactcctctatggacagaccccgctaaaagggaccagtcgatttaacaagtttccccagcagctgttagctgacagatctcattttaaagtgtttccttagcgcccggtcaaggacagctcgacttcgttcgtttcctctctgaggtctcagaactcccacccttctcccttactctctgcactcggacccctctatggtgaattacaggacttcttctttagcatcttgggaaacatccgagtttatttactaatttgaaaaacaagagattatccctcttcgagtctgaaaaaaaaatcgacgttaagtttgtaccccctctaatttcatttattacggagagctaaaaaagagacgctcgccaggagtaaaggtctctctgcctaccccccccaccaccccgcttacgatttaaaattctatttctgggctattttcatcggaacggtttgttacgttagaggaacatctatattc

SEQ ID NO: 229925 - DNA, 402 bp, Homo sapiens
  chr3:158288780-158289182
  hyper
ccatcccacaggagccttggcgaaaagctccccggccggcgcaaggccagacttctcgcctccactgtgttgattgcggttgccagggcagcggcgcattgctccccgcctcgtcctggtgacgtcacagagcaatgtccaatgggaaagcagctcggtgtcacgcacctcctatcccggcgggcaccgcctgcgccgcggcgagtgaggcgtcgtccgtactggaggctagctcttgtcgcggccgcggcgagttaacatcgtttttccaatctgtccgcggctgccgccacccaagacagagccagaatgttcaggatgctgaacagcagttttgaggatgaccccttcttctcgtgagttacgggagccaggagtccggggtcgcgcgggaattaaggt

SEQ ID NO: 229926 - DNA, 288 bp, Homo sapiens
  chr3:158362204-158362492
  hyper
ccaagtcggcagacggcgcgcgagcagcgtaggcactgctccgcctccaatccagttgctcttctttcttttcctcactctctttttcctcgcgtcctttgccccggaagtgctcttacaacattggctgccggcgtgactttgaccgcttcccggtgcgttaccggcagctgaacccacccggcgccacgggactttgacgcgtgctctgcgcttgccatgagactcctgggagctgcagccgtcgcggctctggggcgcggaagggcccccgcctccctaggctgg

SEQ ID NO: 229927 - DNA, 742 bp, Homo sapiens
  chr3:158449684-158450426
  hyper
ctcataaatgctggaaggaacgagccagatttctgcagacgctgtgcaccgaaggggccccttccacgccctgggatacttcaggggcgccaggcccagctgggatctccccgggcgtcgtgcgcactgcaccttccctggcggaccatccgttgggccggcaggcgcgcgtacccaggtgtcacctcccagcgccgtgcgcggacaggcaggcgcgtgccccggcgcgtcgctccgcactcacccacgcgcggccctcctgcacctcggccagcactcgtagcgcgctgggcgagccggaccggaagttgaagaagtgaagcgccgcgcgcgccgcctgctgcaggagcctgcgcgggaccccagcatcctgaggctgcccagggtcgtcggggtccccggaccccgcgggcgccgccaccggggcgagcaacagcagcagcgcgagcagcggggcggtggggcgcgggcccctgggcccggaccagggagcaggcagccgttgccggcggggctgcatggacgcaggaaagttggctcggcacccgacagacacgggctcggagcgggcagtgccggcgctcgcggaaataaggccgtggtgggcccctcccctccgcccccagggcgaaggtctgtagcgagcccgggtccccatggggccactccttttccacgtttcccgcagcccctgggttctctctgcccctccccgctgcccgggcttagtgctaggatgcgg

SEQ ID NO: 229928 - DNA, 160 bp, Homo sapiens
  chr3:158519500-158519660
  hyper
gaagggcagcgcgcgtcttggcgaccccagcgcagttcgaactactccggagtctggtgtggagccgagagggagccccgcacttttctccccgcggagctgcgctgagtctgaaataggtgtacgcgtcagcggggcaggaaacggaaagacagtgcag

SEQ ID NO: 229929 - DNA, 1077 bp, Homo sapiens
  chr3:159480856-159481933
  hyper
gaggtcatcctcagcgtgcagcccggaggggaagggaaacgtgagctaaagcaacaggttccacccacagcctgaacttggaaggggatgcggcggcggcaaggcggctggagctgcgcggtggagggagaggaagcggcgaggaggaaggtggaagggaaatgatggtgcatgaccaccgagcacacgtcactcgggctcccacatgggcttgtgtatgtgcgtgtgtgaggggagggaggtccttcacagggtcactcgggcacttccgcgtggaataggaggcgccaggctcgtgctttgggatgccgggtggcttcggcggggtaacgagtcacgcagagacggcttgaggcaagccaagaaaatacgggtgtcggcgtgaaaatacaccactcttcccagcgcgccgcccttgctaactggctggacctgcgcccctaacgcccagtgcccccttcttttgggcctatcttggcccctccaaccccatcccagcctgcctcctgctccagcctgccgccgcgaaaaccgggactgcggactgcgccgcgcccggcagcctctgggcatgctcggtggcgggaccggctccaccgccaggagggcgcgtcctccctcccctagggcggtgacggcgcctgcagcgacttgccgccgcgccccggccaggcacaccttttggggaggcgggggaccaccctgcccggcgtgggccgagagcgccccccaccccgagccttccggcgggtgggaggaggggccggccagggagacgcggaggcgggagtgagacctccgactgccagcggttccttacaaagtaaagctcagctcgcgcgcggacccgggctcccagccgcgggcggggaaggggcggggcggggcggggccgggccgggccgggccggggcggggggtggtctcagcgcctagagcgagatgcgaaattagtagccgcccacccccttctcagttcccgcccccagggaattataatttcctgggaaagtgtctggttctcggagaatccttggggcggggtaaaggggcgcgcctggcgcaaaatggttaata

SEQ ID NO: 229930 - DNA, 883 bp, Homo sapiens
  chr3:159482434-159483317
  hyper
tgatgagtgggcgccggaggaggacggggaggaggaggaagaggaggacgagcgcgaccagcgagggtaccgggatgaccgctctccggcccgggaaccgggggacgtaagcgccaggacccgcagcggcggcggcgggggcaggagcgccaccaccgccatgccgcccccggtgcccaacggcaacctccaccagcacgacccccaggacctcaggcacaatggcaacgtggtggtggctggccggccgagctgttcccggggcccccgccgggcgatccaaaagccccagccggctgggggccggcgcagtggccgcggcccggcggctggggggctctgccttcagcccccagacggcgggacgtgcgtccccgaagagcccccggtgccacctatggattgggaggcgctggagaagcatctggccgggctgcagttccgggagcaggaggtacggaaccagggccaggcgaggaccaactccacctccgtaagttggccggggtgcgtgcccacgcgcgcacacacgcgtacacaccccgcgcacagcccgcacgccccctccctgcgctcccgcccgcccgcggccccattcattcttcctcgagggtgggggccaggccagagagcctgccgtctgctcccctggggataaggttgctcggtctgtgagctgtctgggtttgcaggatgggcggagaggaaggaggagcagccagagggcagcggaaagtcgggttagtggaaccggcgactcattttaatggaattacttatggagaccaggttgtgagtcacttgcctgaaaataaatccggggagattctggcaccaaaagtcagtgcctgcgggggatatttcaaatcgtaatagttgtggc

SEQ ID NO: 229931 - DNA, 424 bp, Homo sapiens
  chr3:159756612-159757036
  hyper
ggcatagcctgtcctgttggcggggccgtgggacccggccgccctttctcctccgtggctccccagccaggaggctgcgcttacctgctccgcacgacctctgcggcttgggggctctcagctctgtcgctgcggggctccaggctggtgcttgtgctgagaatgactgcgggaggggctcgcgtgcccagcactgcaccgcgaggcgaccaaccgctgacatgtggggcgattgggtggacaggaagactcggcgagcttttgtagccgcgggtagggacagcctgggctccctgaaccaagcgcgcgtgggcggcgaccccgtccctgtgcaccgacccgccagcgcgcagcctggtgagagcacttgtgcgccttgggatcgcctgggctgcttcttggcgctctgcctagggggaacctg

SEQ ID NO: 229932 - DNA, 1450 bp, Homo sapiens
  chr3:159943210-159944660
  hyper
tagcagccgcctcccgcagcctccgcgcgccgcgggctcctcctcccgcccaagcgtggccaagtgaggactgctccggccgcaggtagctgaggcgcgggaggcggcgcgcgcgggacccgagcggagcgccggggaggggccgacggacgcgagggcggacggactccccagcctcccgtcccggacgttagccgaggtctgcgcgggccatgtggggacccggggtcactgctgagggcctgtcggtggctccggcgccgccgcctctgctgccgctgctgctactgctggcgctggcgctggtggcgccctcgcggggcggcgggggctgcgctgagctggcgtgcggcgagcgggagcgctgctgcgacgcgaccaacgccacggcggtgcgctgctgcaagctgccgctgcacgccttcctggacaacgtgggctggttcgtccgcaagctctccgggctgctcatcctgctggtgctcttcgccatcggctatttcctgcagcgcatcatctgccccagtccacgcaggtacccgcgcggccaggcgcgcccgggacagcggcccgggcctccggggggcgccggaccgctggggggcgcggggccgcccgacgacgacgacgactcgcccgctctgctgcgcgacgaggcggcagccggctctcaggactcactgctggacagtggcggcggcggccggggccggggaggcggcgggcgctcggacccctcctgcgcctcagagcacgagatgcgtgtagtgtcgccggtcttcctgcagctgcccagctacgaggaggtcaagtatctgcccacctacgaggagtccatgcggctgcagcagctcagccccggggaggtcgtgctgccagtgtcggtgcttggccgccctcgaggcggggtcgccgcggagcccgacggcggcgagggccgctaccctcttatctgagcgctcggggatcggcggctggtgcagggctgggggctgcgggtggcaagcaacggccggggtgccgccgccaactgcctcagaccttatctggcaccctggcctaactgcccggcaccccgcgactgggttggggtcactcgtctccctcgcgttctcccgggatcttatgtttctctgcgtttcattccgttcaaagaaacgtggggcacgcgcggcgggtgcggctgcagcaggcgaccctccagcgcaccttcgaaggacgtccctgccctctgccttgcctcgtattgtggttcactagtaagtgcctgcttccctagtcaaagagaacacgtgagccctttggtgcgtcgagagaagggcggtcttctttagggctgaggagaaaggaccgcagttccactcctttccctacctgccgcctggacaggtctcccagggtgggcagagggcgaggagccgttgaggaccagccgcgaccagggactgct

SEQ ID NO: 229933 - DNA, 83 bp, Homo sapiens
  chr3:160117326-160117409
  hyper
gacaataagatggcggtgataatcgccgcactttttttcaaattagtggatcccagaaatcattgcgcgcatttgtaacgaat

SEQ ID NO: 229934 - DNA, 35 bp, Homo sapiens; identical to SEQ ID NO: 199169
  chr3:160118170-160118205
  hyper

SEQ ID NO: 229935 - DNA, 69 bp, Homo sapiens; identical to SEQ ID NO: 199170
  chr3:160167183-160167252
  hyper

SEQ ID NO: 229936 - DNA, 186 bp, Homo sapiens
  chr3:160167469-160167655
  hyper
accttctccgcatccgtaaaggtccttagactcaccgcggggaggaagcggaccaggcaactccacagcacggaaacacagcgccacgagctccaggcggatgctgagagccgccccgagtccccgccctcctctgccccgaagggcttcaggtgcccagaccgggcggggcctcgcggagcctcg

SEQ ID NO: 229937 - DNA, 800 bp, Homo sapiens
  chr3:160822407-160823207
  hyper
ctgtagccctagccccgtgggatttccttctctctccgcccgttctccacattccccacttagtttcacattccttcccaatccctccgacatccctgcgccggggcccttccctagcgctccgggaaagcgttcgccgcaggcctgttaggggcccaccaataccgtaacaccgttcccgtcctcttcctcggcaccgctgcaaacgccccgggtcgctacccggatttgacggtggctggagcggcacgggcgacgcaaggcaggtattgcaccctggggcaaggcaaggtggacaaccagcggatgcggcgcggccgcggcctgggcctgggccctccgcgtcgcccactgccccactgggccccttctcccgcgctcaccggaggcgggcagctgctcgtcaccgagacccgagacccacggtgcggcggctcaacctgggccacgctccgctctagaggagtgggcggtgcctcccggcctagctgccggggtctaggcgtttccgaggacggcgcgttccgggaaaggcgggtccggtggctataccctccacccagtggcaggactcaaccgcctcggagaccctgcagggccgcccttctcactcacctcctgtgctcggcgcgcacccagctcggaagcgggaaggtggccggcgttctctccctgcgcacacacgcagcctccccgcatccgcacgcacggccgggcgcgcgcagaccacgcgccagggccgcggccggaagcccctggctgcacgcgcgggcccaggcggcccccagccctgtgagctc

SEQ ID NO: 229938 - DNA, 211 bp, Homo sapiens
  chr3:161089233-161089444
  hyper
gtgtatctccctgcggcttaggtgagcgccgaggctttggctcctccccagctgctgcgagcttcccactgcgccgggcgcctgggagcctcccggagttaggtgttcggccccgccctcaggactcttgctaaaactcaaattctacctggctaattccggtgattaattattgacaaaaggaaaacactcctacgcaaacttgtgtcca

SEQ ID NO: 229939 - DNA, 768 bp, Homo sapiens
  chr3:161090004-161090772
  hyper
gcgcagcaggactgcgtctgaaactcggcatcaggctgctaagtgagcccagggctcgggctggggcagcgggcggccaagcaagcatcccaccccatttatttgtcaaaaaccgaagaaagcaaagccttttagcactggcagctaattttggtgcctctgaacgtgtgaaacgcccctccccgccccactcgcatcctgccaccttgcccgcggtagctaggaggttaatcgttaaaaaggtggactcccccagggaaatagatgaaaggatcgtgcccggagaacttgtgtgtgcccactcacaagtgcagagaattaatctcggcccggactgcggcaggagggcaaactggggaaagaaggctgggaggcggcccggtggtgcagagacgcgcggcgcctgctcccgcggctcccggggctggcgtgccctgcgcttacgctccgcgctcgaatatcttccccggagggctcgggaccagcgcgagcaccttccctggaagcccacatccatcacccagcgatctcctctccatcgagagcagggcttgctgagagtggcggaggaccttgaaggctcccggttctgtatctccgtggccgagacgctttctgctcgaggcccaggggagtccgggagcgaaagcctcttttgatgaatgagcatttgggcagtatctgcccatcagcccccactgccgaaggaggagacactgcacatgctcggccagggctgattgtgttaaagcgcgaattttagctgct

SEQ ID NO: 229940 - DNA, 329 bp, Homo sapiens
  chr3:164911333-164911662
  hyper
tgaaagacttggaccgagtttctcctgcattttgcttcgatcccgttgcaccaggaattcttttgttgtgctgcaggtcaaagccttcgatagcccctggattcaacagcatttcttttcttccactttttaaaaacagagacaagccaattctctggaaggagatacagaccacttgggtaacaatggtacatttcacattgcgccaccgggaaagacctcgcgggattggggtggatttaaggatttggatgcttttgtccgttctttctctttcttattttttaaactcaaatatttctccgtgaaattttcggggagtgaatcct

SEQ ID NO: 229941 - DNA, 292 bp, Homo sapiens
  chr3:164912384-164912676
  hyper
cagctgccggcacccgcaccctcccccccatcccccgcccagcactttgggtacccaatgtgcagaggcggtgactatttatcgggtgttatcggaacccatgatgtgatggaatcgatgggtaacccggaggctgccctgagcttccagatgacggtaaatgttgtctcggcaatgaagtctctgttatttcttgaactaaaaccccttacgttctggacctgggctgtgtcctaaaggctatctcacctttttccttttctttagctcaggatagcgcgtctaaaggaca

SEQ ID NO: 229942 - DNA, 1660 bp, Homo sapiens
  chr3:164912983-164914643
  hyper
gtcgtcaggcgaaacgcacaatggtctgtttagaaacggaaaattattaaaagctcaagcctttttccttctacctcttacaacaccagcgagcattccactgggggaggggtccttcgctccgccacctggcctatttgttggagttacttacgatgtcttcacccagaaaagaggtccgagggtatgttagtctccggtacccctccttccaccaacgtccttacacctaactgatccaattcaaaactgcaacaaacccctagcacctgtgagcgtacagaatacaccgcggccaaactcgatgtgctctacaatgcacatcctacatacgagaaatactggtttcaattaggcgaagtaggaaaggatggcggcgagtacctatggtgcagagcgctcaggatctccgaggtttgctgcgaggggctacccagcaggaggggcaaactctctgcgaagctgaattgtatccatcatactgtagccttgtagcttctcctcttctggccaccaactttccgaaaggctaccgaatcacgcttgtaatccgtttaaatgtttccacctttgagacttgcagggaaatggtcgctgcataccaatgggagagcggggcgcgcacctagcgcggcgatgccagcgacagggagctcacgaccacagctccctatgccctcgatggttggtaggcaggcaggcagagtgagtgtcccaggactaggttcctttgatttaaaatctcggtgctctggatcagtggagagcttcgttgttcccgagagcctgagctcagtctctggatttctctctttctctcttcctcaaaggttgtcactcacagcgcaatccctgcccgaggcctccttccatccgagaagatggaattagcccttgcttttccagggtgtctttgctctttgccctttaggtgggtgggagtgggggttggtggcgtgtagatgagagaagaaaagggtggggagaggcggaaaggaggcaggaagggggcgactagatctcagatcccagcattggtcagacggcgaaggtggggggaaagaaggagagggggagagaagatacaaatacacagtatggctgtgcacaccaaattccacttggatttgggagatctcaggcaaagcacgaaggtgaagcgataccgttggcagagagtgagtcctctgaccgctcaccattcaagcaccctcacttctcgagcgggagaaggtgcgggggaggggggtgggagggggaggggactgctgaacgtttcaggccaaggagacgctcgcggcggcggcggcggcggcatcttttaagactgacctgctttaaaagtgccactttaatggcctaggaaataactaaaatcggattacacgttacttaccaacgtctcctcctaaactggagcgccaggtcgtgtataaggagtcaatataggaaacgcagggctggaacctgaatgcaaatccatcagccgcccccaaatcgcgcaccaagggagcggcgctcgggagcccccagatcagcccatcgccggagctccgccagcgcgtcccccccgcacccccggcccctcctccgcgccaactgtgtaaatcagccgccgcagtcctctcgccgcgcatcgcaggcaaaatcccggcttagg

SEQ ID NO: 229943 - DNA, 280 bp, Homo sapiens
  chr3:164914763-164915043
  hyper
ctctctctctctcgctttcgctgtccgcctttccctctcccccattatcggtcacaacctggcagctcttcaagagacaccctgtgaaattgagtgtcgggaagtcagcattctgtacccgtggattgatttgtaacttttatttgcaaatgagagagatgcctgtttggaaaattacagcccaaaaggtggagggtgatcaaattaagaacatctgagctgtattggtgggcggtatcgctaaacgcctccggggagcggtttccaagtgatttgcagt

SEQ ID NO: 229944 - DNA, 157 bp, Homo sapiens; identical to SEQ ID NO: 199177
  chr3:164924661-164924818
  hyper

SEQ ID NO: 229945 - DNA, 422 bp, Homo sapiens
  chr3:167097866-167098288
  hyper
tcagcaaacacttgctgggccggtgcctccagctccacccgagctgagtctgcttcccagccgcgctgcccgctctgctccccgcaccaactagcccgggcttgctgcccgctaggcggactcagagaccatcctcccctctcatccacccgcagacagacaacccacctggagaccccagcctctcgcgtcaccaccgccggatggccgcggatagctgccgggagtttccgtcttggtctccttggttaccgcgttacctcggtacccatagcaaccagaaagctgggttctgccactgtccgccggcagagggcgaaaaggagcctgcgaaatgagagagaatggtgatcacaggaaggaaaagggcggaaaaactcaacaggctctggaagctttccgccagagaggatcttggagat

SEQ ID NO: 229946 - DNA, 351 bp, Homo sapiens
  chr3:167453720-167454071
  hyper
ggtgcaaaacctctcgggtgaaagatttacatttttcgactttaagggcaaaaaagcaaaaggaagcttgactctgggtataaagggcgtggttagtgtttttggtttgagttgcaccagtaaaactgttctgggagatctgaagattgagaaaaatcctgctaattgaggacgaggtggatgttatctggtggatgttataggtgcgtagcctataaaaagcaaaaattttgctattgatatagaataacttctgaactatttcactaggaaaataactttgcattcttcttcagtgtctaccctttacgttggtttatcagattgtcctgctaccgacctgttatccag

SEQ ID NO: 229947 - DNA, 411 bp, Homo sapiens
  chr3:167966491-167966902
  hyper
atttttattttcacgaaacagactccagaggtttgtggccttccagacaacagctggcaccgggcagaggcacagcctacggcctgagctgctggcgactgcatcgcgcttggccgtgcgtcccaggctgcgctggccagcaccgcagccagagagcttcccgctccgagcaggagcggacgctgttcgtctctggaggggccatggtgctcgcgactggctgttcctccttatatttgggggaaaggagctggtttgaaggaaaggagggattaagtttgtaaaagcgttggctcctccttataactctggtgcctaaagggggtgagatgatagccaaataaaacgaagagagatgaccccgttttgagtgaggaggatttctggatgagccggcgatatgtcctgcaa

SEQ ID NO: 229948 - DNA, 1249 bp, Homo sapiens
  chr3:167967246-167968495
  hyper
cgcccagcccccgccgcggctgggtgaagaggaggggtcgaggagggcgcagggcgtgggggacgcccagcagcgcctcaagcccgtggtggcggcggggctgtctctttaagcgctccggaggggctggggcgggagggcggcgagcgcgtttccatggcaccggggctgcgggggctgctgggccactgggctcactcggtttcagttgctcccggcggagcaggggcatgcagctcagcggccaccgagcctctggggctcgcccggccgctcctcgcgctcccagacgcctgtgacgcctgttggggccaagctgctgccgttccctccgcagacagacgcgccgcgccagcctcacgagccctgcaccaacttctgcccgacaagcccaacttctgcgccgggttcggacttgcggagccggaacggcgcaccgcgcgcagcccgggcggcggccagggcggatcagcctcgccgagatgtcctcgcgactgtggctctggtgcttctgcctgggcggttgccggctggccgccaggaagcgccctacagctccggctgggcatgtaagtggcgcccgcgcgctccggaacgcttggagagagcagacaacagtatgccccgccccacctcggacctggtgcggacaccgcggcccgagcccgggaagggatggggggcaggaggtggggacagacacctgcgggggctgcgggctgtcccgggcggagcgcggcggaacgcagtccccagctagtccttggggagcgccagcccgggagcggagaccgcgaccggggcgggtgtgctctccacccggtacttcctcagcgcctgacagatttttgtcccccgcccccaggtttgggtgtgtgcgcgcgtggtatgtgtgtgttttcgttatttttctgttttaagagtaattggctaatgactaccactttgtgacagggttgtgaatgaaatcctgtcgaacaccgagtttgacatttttttctttgtagagaccaatgagttcgtgcacatgtattctttctttttttgggggaagtatcgccgagtcggacggagtggtttattccacaggtttgaccagaggcaaatcctggctcgtctgccgaagtgaggagctggggagatgagtatatgaaggattgagtgctcggccacttagctgctagtccccttattagagaactgaagagttagtaggaaggtgactcaaacgcatcgtctcaggatgggc

SEQ ID NO: 229949 - DNA, 1001 bp, Homo sapiens
  chr3:168863846-168864847
  hyper
taaaataaagtaacgacacatcttcagtcatttcatataacacactcctgtgtttttaaaagctgtcaacctccaaagatagcttaaaaaaaaaccgtttaggtagactttagagaaaggccctttcaaaaaaccaacagcaaaaggaaaaaaaaaaaaatccccacaatctagccaaagggtccgaatgtgactttctcgcgaagcagcacacgatgttggacagcaaagctgttacttggcaaggtggaactcggccgagagcggctccaaagtcgcgtggccagtgccaggaattcagattttggcaaccgcaccttgtgcgtccccgaaaccgacggacagagacacacggagggaggggaaggaggagaagagcgcaaggaaaagaggccgacaagccggcagagaaacccaccgaaggccggacgacccaccccggagacgtgtccagaccgcaccgtttcgcaggaggaacaaggaaatcgcccggcttagcaacgtagataagcagcagggctccgcgagactgcgggcgaggaggaaagaaggctgggggcggggggcgcccgtagaaacggtgccccggcaggaaactgtccgaagtgacaaactttcacatcgcccagactttttttccttttaaagtgaggagttctcttacctttagatttctatggcctcaactcagcaataataggcattcacagaagaatcaaaataaacaaaataaaataatcagcagcccccaacgctcctgcacgaaaatcctttcaaacgatcccgagcaacatttagagatgtttaaaaataataataataattttttaaaagcctcgcgtctcgatttccaaatgggtctctgacaactttgtccgtctctaggatctgctctccaggaccacgcgtttcggatttattgtccgccaacagtgtatttttaatacaagaaatgaagtcttctttcgtctgggtgacccgggtttggtgtgttttggctt

SEQ ID NO: 229950 - DNA, 378 bp, Homo sapiens
  chr3:168865075-168865453
  hyper
agatcctccgcagcgccttcgcgggtcctggaccctcacgggatcgtcccctttcgcaactccaagctcagccgccgggtttctatttcatgaactgtctctttaaagaggatctgctcggccatccagaaagaacccggggcgagggagaaagggagctatctcccgccgcccagagtgatctgatcggaagccagacgggctcctcttttaaatttttaaagtgacagcagcctcctctggcgggagaggtcacaaaaaggtcgccaagacccaagtcctatagggacagactgattatggatgcaccatcccccttaaacatgtagatttctccgggtaaacaaccaatggggagatctcgccaggcaggatttc

SEQ ID NO: 229951 - DNA, 234 bp, Homo sapiens
  chr3:168867255-168867489
  hyper
aggtacggcaggacgccggtagatggcattgcgctccgaaataaagcgcagcgccggcggctccagccacccaggtgaacccgcctctgcccgccaggcgccggcaacacagctctgccttccgcctcgcccgccgttccgcgtccttccgagctacgagaggaaggcacactgcagtccaggcatgtagacatcagcctgagagaaggctattcctacgtctgagcttctctt

SEQ ID NO: 229952 - DNA, 266 bp, Homo sapiens
  chr3:168960221-168960487
  hyper
ttcttggcaactccactctccgctgataacgctcctgcctgctattctccaaggagccggctgctggaagactgctccgaacctcatccccttggtgctcctgatgcgggcgatcctccgactgctcggcgccaaccacaacatgctacccaccgtgagagagcaggacgcgggctgctctagtcaggacttatcgtctatcatactgattgacgaaaccaagagtgagcagaaaaaataaacacgaacagaggctgcagtgtatg

SEQ ID NO: 229953 - DNA, 897 bp, Homo sapiens
  chr3:169375890-169376787
  hyper
tctaattttagaaagaagaccgtggctagtggagtggggaagtcgggagggaactaatgatttatcctgcgccgtccaggagaaaagaaaagcagaccccacagaccgttttagaaaatgcctagacagcggcttccagcggaagaagggttaaccgtcactccaaaaaaatgtacctggcatcatcagagtgtaacttttccctcccaccccatctcttccccaaactcactctcccttgccctatgaggctaggaaggagcctgtcccaacagggagagtgaatgagtgagtgtgtgcctgccctccgcgcaagagtgctccttgtcttcctgaagccaagacgtgtgtgggtgtgcacacgcatgtgtgggtgtgagtttacactgtcaatgtaaacccagctccgagggaagcagcgcgccaggcacgcagcccctctgagactagagagggaaagaagagttctggccaaaccttggagccctgagctgagcagcctgaggagcgaggtgtagggggccccctgagtgagaaactgcctcccacctcactggggcttccccagtcccacccccacgtccatcttgggccacttcctcagcaccagacggttttgagatgaagcgtgggagggctcagctcttgggaacagggctctgggtgccttgggaacagggaaaaagccggtgaccaggagatgacaagtcaaggttctccatctcaccgcccgcttccagcggaggcaacgcgcaggggggtgccgggagagagggggccgagccgggcgtgccgggggcaactccgctctcttgtccttctagcccggggaggagggcgtccccccttcctgccccaggtcacaactgcagcctcggataacctggccccaactta

SEQ ID NO: 229954 - DNA, 1397 bp, Homo sapiens
  chr3:169378540-169379937
  hyper
cgccacgcgctactcgggggaaggaaatcgcgctttaaaatacaaaaatctgtagttttaatatgatttcctttattacccagattgtaactgaagaattgcaacgcagcgcttctgtctgggaaaggcagctgcggcagcaacagctggagtagtgcaagcgggaatctgaggctcagtaaaagtttgtaagagttgagatctagctatcagaaagcggcagcggcatccttagagaccctggggacaaaataaatgggtctcccaccagttgaatgacaagtatcatcagatcggaaacgaggctcagtttctggatgctgagtggactgtgcgtgcgggaatattttaagacggcatcgtatgtcttgcttggcaattaaaatagttgaaaaagttgctcaagaaaattcgaagggttttgtgttctgctttcacttcagaagttatcgggcagtgagttgcggcgcgaagccttaagctttcacttcacaacttaggcatggttgaaaagggctacccacccccacccaccatcccactcccgccaactcccccccccacacacacactctctctctctcccaacctttagtccaaatcgaagcccgcaaacctcaagtatatgtacatttatttcccttcagatgaaaataaagacatcggcctcatttaaaagcaaacagggaaaacagttccaccggcgccctttgacactgtagcagcgagtgtaaagaacaacacccaaaagagaaacagatggactgatgacccaaagagccctatatttaggttgatttctcagacccaggggaaaggaaatgtatcggggagtgtacgagtgcttgggtgaggactgcacaaagcactggaaaggcgcctgggatgacagcatctcgcggggctacaccgccgactccaatgcccgcgaagccgagcctgctgaggtgccgccgacttcccgggctgctgcagggacgcagtgagcaaggaggcgtggatacgatacctaccgtatttggttctaatgtgcgagggtcgcgcggggggagactgggatttcactggggagaagcatcccacccatctccgatctctcatttctgcgttccgtaaacaacacaattagagagttttgttttcggcgagtgcgagtgtgggagagagaaccgcggcctgtccactcccgaggcagctccagccccgcctattgacacctcaaggaagagcgctcccagccgctccggggctcagtgtccctgagtccccttcaactcgaagtagaagcatttggacaaacgcagtcctgtcgtctacagtcctggcggagcatcacaccgtgtgggaaagtgtgggccccgccggcaaagccaggcgagtcatccaacacttttgct

SEQ ID NO: 229955 - DNA, 99 bp, Homo sapiens
  chr3:169381571-169381670
  hyper
ggcggagaaagggagccgcggggagggcggcggggggcggggagcgaacgcagggagccagaggggagcagacacctcgcccaaaaaaaggggaggggg

SEQ ID NO: 229956 - DNA, 681 bp, Homo sapiens
  chr3:169386025-169386706
  hyper
ggagggtggagacacgcgcgcactcacacacacacactcacaaaagtttgaacaaacctgataagcctcgagatagaacacgtaggctttaatgttaaagctacctgatttgtctgacattgtcagagaaatacacacacatacacatataagcacacatccaggcagcagcggctgcatgaaggtgttaactttgaatgatccgccacgctttgccctaaaagggaagcttgcagagaaatgcgcgctttgaacgccggcgaggcgacagctcagggctagctcggcttccacgtccagccagggaaagggagccacgggccgcaaagggcgcggggcggctgggggcacccctctccacagcgtctcgacgccggggcctgagacacggaacagcctcctcttcctgcgaaatcctcgcgctgccggggcggcatggcacagcgaggcgcgctcgggaccagccggctcagcgagtacgcgcagctggtgttcggcggccgggcgatttctgcccagttaccttctctacctcgtaaaacttgccgttttgtaaattgcgttttcggtcccagatttcttagcaaatcattcggttttacaatcctactccctccccctagttcaacatcctcccatccaacttctgatgtgtatataaggtacggggagcagggagcg

SEQ ID NO: 229957 - DNA, 322 bp, Homo sapiens
  chr3:169386973-169387295
  hyper
ccaggtgctaagctcgcggtcccccaccagccgctctggccgccctctccgggctcggcgcggcctcctcccgcacagcctagtctgcggcgccctcgcctggtttctttggccgcggcagctctggtgctcacgccgcttagggctccagctgtgcacagtagccgcctgggcgtgggggtgggaaacagctggagcgccccggggaggcgcgggttggggtggaaaggaacccagcaaggaggattatgaggcgagcaaactcctggagctgctaccggtttagaatcaggaggagcaacttcacggggcacggaacttg

SEQ ID NO: 229958 - DNA, 360 bp, Homo sapiens
  chr3:169482162-169482522
  hyper
ccataaaaggcaacaaaaagcggaagacgggagaacccacgcaggaacggctccaggcaaccccggctcactgcccattcattttggccgactttggaggtgccttcacgtctcctgccaatttgcagcacactggcccagtcagtcaggtttgggggttcacaagcccccattgccggcgaggggtgacggatgcgcacgatcggcgttccccccaccaacaggaaagcgaactgcatgtgtgagccgagtcctgggtgcacgtcccacagctcagggaatcgcgccgcgcgcggggactcgctccgttcctcttcctgcggcctgaaaggcctgaacctcgccctcgcccccgagaga

SEQ ID NO: 229959 - DNA, 384 bp, Homo sapiens
  chr3:169482762-169483146
  hyper
agcaaaagcacggcgcctacgcccttctcagttagggttagacaaaaaatggccaccacccctcccaggcccaccctccgcaacccggtgcgctgccgggcgagtcggcttataaagggagcggccgccgaccgcacggattggccaagctgactctcgcggctctcgtgagagtcactctctcgggcgggctggttggggggaacgggaaattaaagttccatttccggccatgaggaaggacgttgcccttccgcacgtccgggaaaggctttgcgtctttacttccgaccttctttaaaggtgaaactaacttgaggtatcagagggccttttttctatcctctgcagaccagacgcggttcacctcgactaccttaaaaa

SEQ ID NO: 229960 - DNA, 259 bp, Homo sapiens
  chr3:169487221-169487480
  hyper
aaactggggctcccggcacccagccacgcccgccttgatcattcccgagccgttgtcgatcaccaccggtagctggcagtggttcatgccgccgctgctgccgccgcctcctgtctctgagccgctctagctacgggctcggccggggccgagtgcctggaacgccgcgtcacagaggccccggcacggccgggtgaggccagagtcctgggggcgcaggcagggggtcggcagggccccaggcggaaggactcgctgg

SEQ ID NO: 229961 - DNA, 315 bp, Homo sapiens
  chr3:169684381-169684696
  hyper
tctgcttcctccacgtcctaacgattctccagttcccgcacagcaggagcggagggaagaggggagagaaggcaccgctaaggaccgctggccccgccaggcggccgacctccccattccaggggcgccagccggcggattacataacgggcctcggggcgcgttctcgcgaggtttccaccgccccctcctcgctccacgtcagagggaaccgggcggagcggccaacatggcggaacgcaggagacacaagaagcggatccaggtagcaaagccgagctctgggcagggggcttcggcgcgctggatagtgga

SEQ ID NO: 229962 - DNA, 405 bp, Homo sapiens
  chr3:169684928-169685333
  hyper
gagttcctgtggtcgcgctgtcccgggcctgagctggaaggtcagcctcccctggggcgcagacgctgacccttcccggggctcctcccctcccttcaccccatcctctggccttagctggcctgaaattaaggccacggtaataggggtagcaggaggcggcggactgacctaaagcagctggttctttgtgcgcatagaccgtaagggggaatgatctggacttggtcagctgcctcggggcctaggcagggatctgctcatccagatgttcagttgcgttgcccttctttcccttcaatattattaacttaatagtccacttgaagcttgccggcttttttccgggcgacgtggtgtaaacaaccacaacctcgttggtgctgcaacgagctggtggagccc

SEQ ID NO: 229963 - DNA, 182 bp, Homo sapiens
  chr3:169755581-169755763
  hyper
ctgagcccccaagcggctcccgcactgcgcacccctggctgcgtccctctgccagcctcaactcagccctctcctagccggcggggggtgacagtctctgtgatatctttccgtcccgccggcaggcggcgccctccggcccttgtttcgttgggcccggacgggacgtgcgcgctcaaagg

SEQ ID NO: 229964 - DNA, 56 bp, Homo sapiens
  chr3:169899556-169899612
  hyper
ggagaggcggggtcggctcagcccccggagccagaggtcacgtggcgtcctcagct

SEQ ID NO: 229965 - DNA, 67 bp, Homo sapiens
  chr3:169940144-169940211
  hyper
ggctggatggttgcgcccgccctaccccggaatgtgggcctttggagcgagcgaagtgggagggacc

SEQ ID NO: 229966 - DNA, 32 bp, Homo sapiens; identical to SEQ ID NO: 199189
  chr3:170073884-170073916
  hyper

SEQ ID NO: 229967 - DNA, 254 bp, Homo sapiens; identical to SEQ ID NO: 199190
  chr3:170074116-170074370
  hyper

SEQ ID NO: 229968 - DNA, 77 bp, Homo sapiens; identical to SEQ ID NO: 199191
  chr3:170075432-170075509
  hyper

SEQ ID NO: 229969 - DNA, 458 bp, Homo sapiens
  chr3:170136455-170136913
  hyper
gttttactttgcatcgccggactgcgctgcggacggggtggggcggcccaatggcccccctggggttactctgctccccttcacgcttccctcccggccccgccccgcgattggccggcgcgccccggggctgccgccgattggtgctcgccggccggagccgcggggcttaaagagggggcgggggcgcgctgcccagcagcgctgctgtccccgccgtgcgcccttcgccgctgagctcgcagcctccggcgcccacctccacctccagtgtcccgcctcgggccgtcgccctccagcggctcgcgagcgtgggagacgtacctgggcaggcactgtccagcccaggcccaggcacagccgtgaggggcgaggcacggggacatcctggcggccaccatggtggccacgtgcctgcaggtggtgggcttcgtcacgagcttcgtgggctggatcgg

SEQ ID NO: 229970 - DNA, 234 bp, Homo sapiens
  chr3:170137518-170137752
  hyper
caggagaatcgaaccggctcaggctgagtttctcggtcctcatgggatgggcgaagcgcccccggccaggttagagccctcctagctccgtccgcgcagccgctgagcaattcacgtccagggctctctgggctgcctggtttgggaaatgtcacgttgattcccgcacgtgcccagggccatctccgctgcccccgctacccccgcccctgctgtgggcgcgtcagactgcgg

SEQ ID NO: 229971 - DNA, 1242 bp, Homo sapiens
  chr3:170302490-170303732
  hyper
aactttcagcaccgcggacagcgccattccctgcactcagtcggaggaggagagctaccttgcccccagcgctctcctagaccctatacctagggggaggcagggtgacatcctgcggcccttgggcaattcgggccagtgacgttcaccgacactcaggcggggatcccttcgccagagccagttcctttgagtgtctccgctcaaaatctcaaggaaacgagcttcacacaggtggggggatgaggagtgccagaacaggagcgagccccgctgctctagccttcctgcatctcttctcgcctttgctttgctcactcttcaatcgcaatataaaatactcatttggggagggggcagggtgacacaggagagagaaggagggtgggggctgcatcccgcgtggccacgcagccctaacctggccctcttggattagaggggagctgatgtgctttggaatgggagaagagaggagactgagggttgaagcagtgcaggagagctccccttgctggggctgccggctctgggcagggagcttccctggacaccgctcccgtcacgtcctcttcgccgctcccgggagagtcaccactctccggggacagacgcccctcggggcgccaccatcctggtcggggtgctgggctcggcgggagtccctttgaggagtttgctcccaggtaaaagggcagacgttgctcccgacctccccggagtctgcggccggaaaagcgtctccgtttcatggtctcggtccgaggcggagaacggagctgcccgtgcggggtgcgcgccaaggcgggggacaggacgggcccggcgtctgccgagacctaggctgcccgcattccgctcgcggctccccttctgcctcccgctctagcggcgccggagccgcgctggcccccgccccgcccggcagctcccgcgagtcagagcccggtgcccccagaccgcgggcagtcggggcctcattccgggccagagcaggaaagagcccgacccacctcctcggttcttccagggaaccccttctcggagggcgccctgggcctccgcgccatattcctggtcccccgctcccggtgactccggctccctgggtcattccgggagaggcggccatcccagttgcaggggtcccgctggggcgcggggggcgcggagggggacaaacggcagcgaagggggccgttcacttaccggggtcggggctggaggcgacgagctggctgc

SEQ ID NO: 229972 - DNA, 492 bp, Homo sapiens
  chr3:170625811-170626303
  hyper
ggggaggtgggatgagaagtcgcagaggagctcgctgagggtggggacacccgccctgggcgctcctccgtgctggaaacagcaggttgcggcccccatcgccccaccgcagaagccggcgaccttcccccgccgcccagccctcggccgccgccccgaaccctactgcgggggacccagcccaggccgcaggtccccgcgaaggatgcggggtaacagaacctggccagcagcacccggccctctgctagctggcgcgcaccccgccctccacccttcaacgtcgccgccgcggccgcacaggcgccccctgttctgccggcatccagggctcagctcggcccggcccggccccactagggcctgagccccggcgggtcccgcgctcgcctctgttcccccatccattctccttctttctctcggtcagcgctcagttctgggcgccttccccggccctgcctcactctggccccatccccaccagctttt

SEQ ID NO: 229973 - DNA, 349 bp, Homo sapiens; identical to SEQ ID NO: 199194
  chr3:170746074-170746423
  hyper

SEQ ID NO: 229974 - DNA, 59 bp, Homo sapiens
  chr3:170878716-170878775
  hyper
ggtctctagaaagttgcagttttaagtatttttagtcctgcattgcccagataattagc

SEQ ID NO: 229975 - DNA, 60 bp, Homo sapiens
  chr3:171176895-171176955
  hyper
caatacaatgaaacggcgtctgaggtaattcacgtgaaggtaaacgcaaaccagtggggc

SEQ ID NO: 229976 - DNA, 284 bp, Homo sapiens
  chr3:171178162-171178446
  hyper
tgtgcgtggatggcggctgcattggctgttataatgagacacatcaactcctccactcagcagggggagggtgggggtggagaaccacgcagaactgtctatcaccgcttcctgggaggagtgaagggggagtggggaggcggaggaggcgtggtcttggactggggagaggccgcgcttcctgacccggtccctctgcaccagcgtggaggggggaggggcgcgcaccctttccgcccaggcttttgcgggctcctcgggccgaacccgaaggggctgttcct

SEQ ID NO: 229977 - DNA, 1009 bp, Homo sapiens
  chr3:171527555-171528564
  hyper
caaacaccttcaatcgtattgtgaggaagaagaccttttacacactccctgctgctggcccccggccccctcgccccacctccgagtggtcacatcacacggcgggagccgcggtcagcagctgtgatcacacccccaggaccgtgctctgcgggctgggctcgaagccttgggacgcggcacttcctggttggtacgggatgccggtcccatcgcccccaccagcccagtcatgccaccgcgcacccgaaccaagggcgcccggatgacctggggacaccacacacactgcacccgaagccctgtggcggcgaggcggtgcatcctgcagaggacgcctgggcttcagcctgagcctgcgcggctctgcgctccaggcagccgcccgcgcggcaaaagtgcgtgccagagttgtcagctttcaccctgcaggaattccacccgaaggcgtgcgagggaggcccttggggatcgctagggagtccgccgccgactcactcgctgaaatcccgtccaagttgggcggggagcggccagctgcccaggttgggcggaggagggacggagggcgagggcagtggaaacccggctcccacgggcgcccggtgatccgggtctcggcgcggctcctacctgcagggcgaaggggccgctagcacctgcgcgttggcggcggactctcagggctcgggtgcctctggcacagctggagctcagcgggagggagggagagagggcgggccggagggggctctgcgctgcgcggccggcaggaactctccgcccggattcgccccggattcgcaggggtggagcgaggcggtgccaggtcccggggcgtcgcggtgccggctggaggccccagcggggcaggtctcgcgactgggcctctgatcgcccgcgttccttgttctcttttcccaaagtttcataactcgaccgcatcaccctagggaatgctcgctattaggaccattatcaggtcctctcgagccgccaaggaccagcc

SEQ ID NO: 229978 - DNA, 196 bp, Homo sapiens; identical to SEQ ID NO: 199198
  chr3:171757155-171757351
  hyper

SEQ ID NO: 229979 - DNA, 1304 bp, Homo sapiens
  chr3:172165380-172166684
  hyper
aaagcctgagcgcgcgctgagacccacccagcattttcacggtttgcttgtggttctggtccctgagcgaggcacccacgacagcatcgccgcgcctcctccgccacagcttcctgccgatgagactgtagaggaccgtgagacagaagacaggaaggaagaagaagatgctggacacccacaccatgaccgtgagcagtccagagcgcaccgcaaactcggtggggcggcactcgttggtgtcccaagggtcggtgccgttctcgtgctccaccccgactagcacgaagatgggcccggcgctgcagaaggccacggcccagatgacgaagatgaccagcttcacccgccccttggtgaccaccaccttggcccggagtgggaagcagatggcgaagtagcgctcgacgctcagcgctgtgatggtgagcaccgtggcgtaggtgcagctctcactgacgaattggaagagtttgcagaggaggtcgccgaagttccagggccggtactgccagaggcgaacgaggtccaggggcatgcagaggaagatgagcagatcggagaaggccatgctggacaggtagaggttggtggtggtgcgcagctcgcggaagcgcgacaccaccagcatggtgagcaggttgccagcgatgcccaccacgaagagtgccacgcaggtggctgtgacgcccgccagcagcggcgcggggaagagctgcagcagctcgtcgcccagcgagtcgttgccgggggaagcatcccagtccaggtcggccagtgtgaggttgaaccccggctcttcgctgggcgtcgcgttccacatgctgccggctcagctgaacaggctctgggacgtgactgcgctgggaggctggaccgagctggctcccgaggaggtccgcttaggcgcgggagggtgcgagggaggagcgggtgcagacgcgtagggaggatgcttggagaagaaagagagggaggtgagaggcagaagccgaggaagaaggtgagatggggacaaggaagagggagagagactggtggtcagtgggtgagagagtgacccactgctttctctgacacctcccctttcccccaccaactcccccaaagtttctcccaacacatcctccggccggcgcccacacgcatacctgtcaccagccctgcctcgcatttgcgttctcgatccagttccatctcgcacttcccaaagcgtcgcagcgagtggggaccgcagggaccaggcgccgcgaagcgggagcgtgaggcgctctctccgaagccctgggcgacgctggactagt

SEQ ID NO: 229980 - DNA, 554 bp, Homo sapiens
  chr3:172167332-172167886
  hyper
cttcaacctcctgagcattacgtctttttctttgaattgcaatgatttgtgcggaccactgggggtgatatcaagtgtcagggaccaccggaggcactcaataaatagaagacgcgttgctgttgagaagtagaagctgtgccggtgggaacaggtcaaaggccacccctacactagcaaggtgaccctctggacgcggtctgtgcgtctcctgctcagagccagaaatcagcacccgaaggcatgagactgccagttgccagcgaattcacaaatccgaccggcccctcccggcccaccgacctcgggaccgccccaggaacatattcagcactgtggccagcgccacatccatcctaccgcaaagcgccgctggaggaatggcttccctgtcactcccaccgtttttaacttgcgcttctaacgcctcagtcctaccccacggaggagcagggcagactcccacgaagcacaggccggcgttagtcactgccttgaccatacacatcggcgctcacccgatgagataccacgtactgtgtatgagagagtat

SEQ ID NO: 229981 - DNA, 287 bp, Homo sapiens; identical to SEQ ID NO: 199201
  chr3:172240998-172241285
  hyper

SEQ ID NO: 229982 - DNA, 162 bp, Homo sapiens
  chr3:172313933-172314095
  hyper
ccaagaaatagaaacgaatagaaatagaaatctaatagaactagaaatagaaatatttcccaagaaatagaaagtaaaactgacaaagccaatgcaaagaaatcagttcggaagctgttaattttcacacgatctgtgttcagtaaccgccctctatcggct

SEQ ID NO: 229983 - DNA, 230 bp, Homo sapiens
  chr3:172428841-172429071
  hyper
gcaactttctgcccgcggcagctgctcattcacgcgtttcttataagcccaggagccaatcagaggctgcgtcgggaggaagttggagcgcggacatgccccctctacggtgtccttgcaaagtgtggcagtcactacaggtttgaggaaggctctgtcgctgctctggccgtaggcacagcggactctggaggacactggtttgtactgcatgcgtgtgaggatggctt

SEQ ID NO: 229984 - DNA, 120 bp, Homo sapiens
  chr3:172468995-172469115
  hyper
ttatctcagagtgcgccgtggttttattctaggattcatcctggcttctttgcgggaagtttaatttttcgtttttgcaagataaatccaggccatccgcccctcgtcctccccagccac

SEQ ID NO: 229985 - DNA, 846 bp, Homo sapiens
  chr3:173113091-173113937
  hyper
gcgttcacactactcgcacggaacagtctacagccaacgaacgcttcaattcagagattactctgcctctagctagaggaagcagaggaaagagaggggagtttggtggctagagatttaccaaaaagaggggggcgggggaaagaagaggcacagtggaaggctgttgcctccaactccgcgctctccgtcaccaagacgaaaacgcctggaaccggagcacgatgacgccgagaagacagaaactcagagcgtccgacgcctcgcgtctgggcggtcgtgcccgttcactcacacgccgctctgagtggtttggcgaacctcacacgtgactccctgggcccttcacccctcctgccgccgcgggcgctgcggaagctgcgggcggaggacgctcggctgccgcgggaggagtaagggaggagggcggaacttgtaaagggaggggccatcaccagcaccaagtctgccaccgccggacccgcgcccccgaagcccacccccaccaagatcgcgcctccgaccggcgggaggggcgcgcaggggaggggacgctgtgcaataaaccgggcggggagagggaggcagcggagggagtcctggctctgaggggggcaggattgggtctggaggatggtctggcttgattcagactcctgcacccgacaacgccacggagtgaggggagagggagagagagaaggtggcagtgtgtgtgcgcgcgtgtacgtgtgtgtgtgcgtgtctacaggtagcagtggcggcggcggcggcggcggcggggaccggagcaggggacgcatctgcagccacctccccgcctatgattttcggaggcgattgctc

SEQ ID NO: 229986 - DNA, 611 bp, Homo sapiens
  chr3:173114150-173114761
  hyper
tcgctgtcccctcccgtttacagaagcatctgtggtgcttttcattttggatttacatgcaggaaacgtatatatgtttatataccgaccgcataatatataaatacatatacgcgtgcccaagggcctggttttcgtctctcctccccacgaaacggaatgttttggagccgatggataacaagaacactattaacattcttttgagcctgttttttaaaagggggagggagcgtgaagaattgtttaacatttggccatcgtttggctgcacactaagcaccacgaagtatttatggttgcagatcaggtgcaaacggggcttagagagaaaggtaagggagcttcctgcgtccgccgagctccggcgtttaccttaatcccggggattgccgagaacttcctattccctgcctctccttcgccttccccaccttccacccacccttctctgctctctctcttctgtaaactcaacccttttccaatcccattggggtgggggtggggggtgctggaggtataatcgtctatttgagtttaaatgcgtctctctttcccaggctagtagctgagttttccaatagcctttctggcggttttaggaaatc

SEQ ID NO: 229987 - DNA, 1015 bp, Homo sapiens
  chr3:173115048-173116063
  hyper
ttgccagagttgagcgagacgaagccgtgtctaaataagtacatgacactaaatttccttttaaatccaccttttacaccatggccagtcgcttgtttaactcccgttcaagggacacggttttcaaacgtgaccttttggggagatgtgggaacttcccctcatttcttcttctgtgccgctaacctctttcctcctccgcgcggcatctccagccccggcagtttgtaaattgcccgttttgcccaccctcctggtgggcgttctctcccccactccactcctgccccctctgtcctttcttcattggcgtcttcggagcagatgcatcttctttcttcttggcctcactctcccgttcccccgtcagtccccccacccgcggctccccacttgccccagctctcctcgccgctcctccccgcctccccgcggagggttgacccttcaattcggagtcccggcctgtgggcgggcgggggagcgccgcggctgtaagccgaggatcaggcggcggcgcggagagcgcgcccgggcggccagcgccgagcgcgcggagctggcgtggggagacacggcaggaaaggcgagtcggagtgggtgatgagaggccgggagagcccgtccgagccggagagaccggagagaagggagcgagcgactgtgcggcgctcacgctgccagagcccgggcggagtgcagtcgcctccaaagccttagagcggcgccccagtcactgcagctcttcaccctagagctgtgccctgggaccacagagaccaagagcatggaaatcggctgagaggtacaaaagaaataaggaacagattacgagaaagcggggagggtttcctggcgaaatacggaggctgagcagatggaggaacaatgccgcctccagaagaaaacccttgcctgaaccctcggcggagcgcagaggagctgctttcagccttctgctctccccaggccctccggctagttctggggttggttccgccggttagtttgacag

SEQ ID NO: 229988 - DNA, 1009 bp, Homo sapiens
  chr3:173302412-173303421
  hyper
gccgaaagaagtaacgttgtttgatcatttgtatttcttgcctgatggtcggatttacatggaggtggctttgggtccccaggattctggatcgtggttgcatctggagagaaaaaaggatcaatcgacacgttttagaagtgtccgtgggtgaataaaaaaggaggggggggtgcaaaactggggttgcggatgcttaaagcaaaaaaagagaaaaggaagcgtcttgaatcctggaacaagaattaccgggtgctcgagatttcaaaaaagcgtctagaaactggtaaatacttggaccatttcagcttgaatttgacggcgaagtgttgtagagaccgtctccttgaatcattgcaaagggaccggggaaagatgagggggctccctctgtggatttatcttgctgagggtaagtttgtggctcttttattgggagggggctgccagggttttgtgccactgcgcggaaggtgatgcggacgcggtgcctgtgaaatggagagagaaaggggaatataaaaccacctcgcgcatccccggggggatcgctagggagctacctagatcgagctaaaaaaccttgtttttgtggcgtcggtgggggagccaagcagctctccaagctctcaactttgcattgaaaatctctcagttgggagacgcttcccagatccagtgctttctcctagcaatactttaaggagaggaggcagcggtgccttggaaaacctgcatgtagagcggaaaagcccaagtagaaatcgctggtgcttcggccgccgtttctgcggctgtcgtggcttctagggggatattttgcagggggaattggctgttttcatgttgtctcctcccccacccctctcttcctaccccttcccgcttcccgcttctctcaaccggacactaaagggttacagggtcactgcaccggatagagacagtagaagtgggtggctggccacacatgttgtcttgtaattcacttgcacgactttccataata

SEQ ID NO: 229989 - DNA, 201 bp, Homo sapiens
  chr3:174158463-174158664
  hyper
gtataaaatatatgcaaattataaacgaaacatatcttttgatgggcaccatgggggcaagtttccagttttgcccattaaaaaaaaaatccttcccaatttttgaggcttgtgccattgaacactgctgcccgcggctcttcttcccacttggctcgacaaacgcgtcttttattatgactcagcccagcccgttccttg

SEQ ID NO: 229990 - DNA, 47 bp, Homo sapiens
  chr3:174159384-174159431
  hyper
catggaaagagcagcctgggatcagagcctgcgctgctggttctacc

SEQ ID NO: 229991 - DNA, 159 bp, Homo sapiens; identical to SEQ ID NO: 199208
  chr3:178789082-178789241
  hyper

SEQ ID NO: 229992 - DNA, 321 bp, Homo sapiens
  chr3:178789520-178789841
  hyper
ccccctccgcagccgaaggctgactgtcaaaagtcagtccaacccgacccacagggaaacagctgcaggaagtgactgcggaaccgggaggcggtggaggaggagactgagggcgccggctcggcgtcgccactgcgcatgtgcttggcggagcaggcccggcagcggtggcagcggtagcagtggcggctcccgcatccccggcgggcggcgcgtgggtcaggtgccctggccgcgagcgcaggggcgcggggttaggccggcgtggggaacaaaggcacgagtgagaggcgggagggtcccgccgccaatctcagcaga

SEQ ID NO: 229993 - DNA, 157 bp, Homo sapiens
  chr3:178865536-178865693
  hyper
tagccactgacagcggcggttagccaccgcacctcctctcacccccgaactaatctcgtttcctctatgggtgtaaaagtgaaataacccacttgctcccaatattcctttctatatctctaccccagctcgcctgctgctcgtagaaacaaatata

SEQ ID NO: 229994 - DNA, 176 bp, Homo sapiens; identical to SEQ ID NO: 199209
  chr3:178866990-178867166
  hyper

SEQ ID NO: 229995 - DNA, 444 bp, Homo sapiens
  chr3:179065418-179065862
  hyper
cctggcatagatgcgcttccggccacggagccaaacagaacagaggaggcaagaggccggaagtgaccgccctttgccactccccctgcctcctctccgcctttaacttctcgggaagatgaggcagtttggcatctgtggccgagttgctgttgccgggtgatagttggagcggagactgtgagtgccggctgcctcgacagcacgtttgcgacgctcggagtgaccttcgagcgactggggaccgggggcgggagtcgtgcatgcagcgttgtgtgacgaggcgccgcccgccgcggtcctgtgggaaaggagagagccagctgtcgggcgaacggggctggcggccgagtcgagcccacggagcccacgaggccgtgctcgggggtgggattgggggatccggacctagacggtcgtgcgcggggcgggggtgggctctgg

SEQ ID NO: 229996 - DNA, 97 bp, Homo sapiens
  chr3:179168656-179168753
  hyper
tggactaattttggactcagcgtagaacttttatgagtcttccaagcactctccacccaacagccctgctgggcagtcccgaatacccgttattttg

SEQ ID NO: 229997 - DNA, 194 bp, Homo sapiens
  chr3:179169593-179169787
  hyper
ctgacaggcgccagtttgcttgttagcaggatcgaagggcagagctagaagaccccaaaggccccatttaggtttcccattctggaattctaaatgtcagaaagtaaactgaagcccagagttgcacaaccttgcgttgcagtccccgctcttccatcactagttgtaggaccgtgtaccgtctcgggcctaag

SEQ ID NO: 229998 - DNA, 116 bp, Homo sapiens
  chr3:179280318-179280434
  hyper
aaagaaagaaatccgcattccccacagtcactggacaggaatctcggcgtggagacacccgttcaatttccaggggtctaccttcccctacccgggttcccgccgctcctcagcgc

SEQ ID NO: 229999 - DNA, 127 bp, Homo sapiens
  chr3:179281448-179281575
  hyper
tgcgccccatgcgcgagctgcctcacctttcagtaactcttgcctgttttttggctgcggagtctccagagtgactcgtgggcgggtctgtttgagatcaattcaggagcacgtgtaatttaaggat

SEQ ID NO: 230000 - DNA, 253 bp, Homo sapiens
  chr3:179322630-179322883
  hyper
gtttcggttactgcggtggcagctctgtctggccggccccttggcactcgcctcggatttgggggcttcctcactcgtggctttccgaaggctgctggtgggtgctggcctagggagaacgggcgtgaagcgggtgcggggcgagaaaagggaggacgcttccagggtgaccttggtgggatccggagggagccgggacaagttgtgggcttggggcttgacaggagagacggagcacgagctatatgagggg

SEQ ID NO: 230001 - DNA, 79 bp, Homo sapiens
  chr3:179367505-179367584
  hyper
atttcacgagtgccacagtaccaggtctgtaatgatgaggtttcttcacccgtccagtagagggcgcactcttgcggcg

SEQ ID NO: 230002 - DNA, 35 bp, Homo sapiens
  chr3:179370451-179370486
  hyper
cccctatccaatccggggacgtcaccgccctagtc

SEQ ID NO: 230003 - DNA, 378 bp, Homo sapiens
  chr3:179754078-179754456
  hyper
ggtttcctctgtttcgattccttgatcctgtttaaagaaacaggctcagggaatgcacagaaaacaaacttccccaatcgaagttctgaggtcttccctccccttctcccaccttcggaaaccggtctagttttcccggcagcaccggacagaaatgtcacggtcatgttgcatcacttcacttgttgagctgtgcgaaggcagcacttgaccacagaaacttggtgaaccgccttgctcttaaattagcccccaagaattctctccagccctatagaaatgtcttacctgcatgtgtccctggtacattctgcttcggtttcttcagggctccctgaggccaccggatgcttttcccccgtgcttacttgcccacca

SEQ ID NO: 230004 - DNA, 91 bp, Homo sapiens
  chr3:179755236-179755327
  hyper
tatcacccgttaaataaagactccccgctcccctcatccccagttcatcgccgagcattctatttaaaacggcaaaccctagtccctgagg

SEQ ID NO: 230005 - DNA, 577 bp, Homo sapiens
  chr3:180319829-180320406
  hyper
tccgtagtctcgctcggtttcgcgagatcgaggctgagctccgccgcgccgccgtgggggcgaccccagaacacttccgggtgtaactggttgtgctgtctgtgtacttccggcagcctccagacagtttcttccgcttcctgtaccacccggctcaagtagcggacacggaacagggaactatcagcccgtcggcctccgggccctgcattctctagccatggaccgggaccttttgcggcagtcgctaaattgccacgggtcgtctttgctctctctacttcggagcgaacagcaggacaatccacacttccgtagcctcctggggtcggccgccgagccagcccggggcccgccgccccagcacccgttgcagggcaggtaatgagacgttggtgccactgcgccacggaagaggggacgcagctctggcagccactaccgcagccccgggtttgcgtctagaggaagtggagccgcggccgtgagcacaggacgatcgcgcgctggtgtcttgggctgggtggacggggggcgctcctgggttgtgcaatgcgggatgcgggctgaacttttt

SEQ ID NO: 230006 - DNA, 47 bp, Homo sapiens
  chr3:180397084-180397131
  hyper
ttccagtagcttgttctcctcgttcgccaccgggatggcgaacccat

SEQ ID NO: 230007 - DNA, 378 bp, Homo sapiens
  chr3:180397671-180398049
  hyper
tacagtaggtgaaagtagaccgaagtgaactggtgtttggaaacaactctctctctggcatcactgggatgttctgatcgtcgcctgtttcagtcggccagccttcctcaccgcactcaccggccccatcgcggatgtcccagtcgatcacagacgcggaccgcgcggaggccgcacacttgtggcgcggtgtggtggtccctccggcaccactcccatacttgcatttttctttgcatttttgtttgctaacatttaaagtgtggaatttcgcataaacgtctgtatttcctctgcttgaaaaagggtaggtgacacaatccccattatcaaaaggcaatgttccgctggagaggcgccccctttagaccaacaaag

SEQ ID NO: 230008 - DNA, 190 bp, Homo sapiens
  chr3:180630143-180630333
  hyper
ggcactactcggccgccgcggtgcgaactgcgggcactgtggggcggagacctaggggcgggtcaacaaaggtcgggcgattgtgtctggaggcaaatccgacgtagacggcggcaggcggagcccaaagccggtgatgcagggtgcgcagggatcccacctggagagtcggggcggcacgttgagaccc

SEQ ID NO: 230009 - DNA, 39 bp, Homo sapiens
  chr3:180630766-180630805
  hyper
ttggttgctagtgcggttcttggcgggccggtgggaagc

SEQ ID NO: 230010 - DNA, 1323 bp, Homo sapiens
  chr3:181413014-181414337
  hyper
cgccgtttcgcccacggggtgcggggaacgaacccaactggacacactgtgcacccggaaaaacagacggttccaaattcatttccgcatttgagtctagagtcagcaagatcttggccgcccgcctgcgcctcggagcagcccacgagcccgtgaaggcgcgtggggaaggggggcctggaaagcccgggcttcgactcactcggccagtaccgctccgaggaggggcctcagcctccttcggagccagggccgcgcccgagccgcgctaggccagggggccggacgcgcacggaagggggctggcggacacggccgggtggtggcgcagttcctgggggcacagggcagcccagcccgccggcccgcgcctccgcttccccactccagcgaaactggacaaggccgacccacccagccgggcccgatccctcaagacactttcagcctcagcccccgtttctcctcgggtttccacagacccaggaaaggacagaggcggcgagcaggctgacaagtttattctagaggctttgaaaaatgaggtttccaggtctcttcgcacgcgcgcgcgcgcgttctcgggctaaaggttcgaagctagagtttgaatttaagccacgtcctgggacaggtcgcgttcagcgtgggcgtcggccccgccgcggccccaggcctcttcgaagtgcgcgtcaagtggggtgtcgggtcgttttgttttttctctaagtgaataattcaatcgtgttaggccagattacatgctcataatacccaggtgtatttaaaagcacccgcgtttctaaacctcccgcagaaagtgggaagcaatcgccccctcggacctggcgccgctgcgcctgctggagcctcgcttccccacagtcgggcggccagtggagggcgaggagcgcgcgcgtcacgagaggcggccccggcctcccagagcccgcaccgggaggccgagggctcgggactcgagccttctgagtccgatttctttccacgtgcagagggtagaaagtggccagtcagggcgtgattgattgcttaaggaaagagaagctacagctttcacggtagttgataactaaagcatgacatgatgccatctgtgtgaaactcgtgatgtgtgtggtcattggctccctggaacatccagaccctgatcgtgcgtatcgtgtttccttataagcagcactcgcgatttaaaaacaggtcccggtgcccctcttgctgatcctctctgccattagcccgcttaattccctttttgtaaattcccctctttacctttctttcgtccctccctccctctctttc

SEQ ID NO: 230011 - DNA, 236 bp, Homo sapiens
  chr3:181418234-181418470
  hyper
ggaaggggacatggcgatacctcgttttttataagagattgacatagaggaagatagaaatgcatgggggcagaataagcaggaaatattacctgagagaaggaattacagagcatggcgaagctggaaggtgggagggtttctgcgggaagtcgagcgaggggtgatggggcttgctctttggcgccctctaatggcaacttgaaccaatgttttactttcgtaatgcagtactg

SEQ ID NO: 230012 - DNA, 95 bp, Homo sapiens
  chr3:181418702-181418797
  hyper
ccaattagccattgcgggcgggggagagggtgtaggattcgtttcctacctgaacagcattctgactcttctaacatactcgagaggtgtagggg

SEQ ID NO: 230013 - DNA, 105 bp, Homo sapiens
  chr3:181419691-181419796
  hyper
tgcagtgttggctcagaaaccgtgtaatttctcatccgataggagtttctttatgagaacatcaaaggataaaaagctctgcattttcgtagttggttaaaattg

SEQ ID NO: 230014 - DNA, 644 bp, Homo sapiens
  chr3:181419916-181420560
  hyper
atttagcctttaatctctttttatccacgaagactaaagctctgtactcgaccccgcgagcggctctcgccttccggggctggaacccgactcagatgtgaagcggcactgagccgctgcgcaggttcgtgcccagcgccccctgttggacacagtaggagctgcgcagcgccagtcccagaaatcgctggaatcctgctctggggttagagaaaactcttttattgccctccaaaaaagaaacgggatgcgaaaacaaatttttatatccttgaaaaataatataatattaactcaataaaaaactaaagaggcgatactacaattttaattcaataaaaaataaagactgtcctcctcacatcccagccatcccccacccggtttggttttgtaactcttttgaaaggttctgcgatggtaaaacaggtaaagaaaagtgacgaaaaacaaagcatttttctgtagccgtggagaatcaagcaaagtatacttcctccgttttgtccacatttcaaaaaattaaacggaagatgctgctgcttgctgttttgacgttgtcagcagcgtcttgaatgccctcagaggtcctgcaagtatcgtaactgagccttcgagtaaacgaaataacttgcttttatgtg

SEQ ID NO: 230015 - DNA, 1093 bp, Homo sapiens
  chr3:181421145-181422238
  hyper
ttattgacggaaatcggcttaatttttcataaaagaatggctttttaaaatattgaatactatggctatgcaaggtttatgatacctttatgtttattcttcccacctcccaaaattagcgaattcgagataacatttcaaggggaattgctatttagtgcgatgagagatgacttctccatctggttccagaattagatctcggcttaggttttttagtaagtaggttcagatgcaatggaaggagagaagaatcaagccttttgataaaatctctaccccgaattctatggaaaagacaggcaagcgggattccagccacagcacccccaccttttgctctaccaaaaggcttgtccccattacagaaataatatagtcggtgctagttttgtgaacccgcgccaaccgataaggtaagaaacggtgcgctgacagccgaggtccgaaggctgctcagtggttcccgcagcccgtggggtagggaggccaaagccagcaaaatgttggaggcgacgccagaaagagagtatatgcctgctattcggaagtgatgtcgaacgtgcaatagcagagtcctggagatttccaccccgttccgcacccagggatcccagcctgtggggtagcaggttgttgggtgaaggcaggagggagaagccgcacctggctgagggcgggtgggcgtgccgggagcgagtgcccaactttctagggcccatggagaaagcataacccctagttgaggaaagagagctaaacaagtgggtggcccaggcctgggaatgccacccagctctcccgacgcagtgttatttctgtggtcccagggggccccagcacctgcccgaatcccactccccaaggccgccagcaggaaggcagcccctccatctttgagggctgaggagggggcagcgagtgacttgattccttagtagcagggaaaaccgcagcggctggcaacgggccgcgtttctccgcggcggcaaagcgccctttaggggcggggcgggcatttttggtctcctgtcccagcgtccaggcctgagcccgcgcgggttggctgggcgccctgctttgtaagtaacca

SEQ ID NO: 230016 - DNA, 454 bp, Homo sapiens
  chr3:181422662-181423116
  hyper
aatccagggcccagcggctacgtgggttgctgcggggtgttgaaaccacaagtacaacttgacaccattgagcccacggtgcttgtcaataatctgtgaattaggtgcagagattgtcactgtagatcataacagtttctgaaggactcattacagcctatcgtgtcaatgatcttcaaattaaggaggggaggtggggcgagacgaaaaaggagtggggagagccagcaaaaagggaagaagggtgggagggaagataaaagtcagagccccagctccgaaggagcctttaaagattatcaggccagcgatctgagaattccattgggatgggtttggaaacccaactccatctgagccaggactggaagaggggcgctgggggcaagcagaagtgggcccctgggaaggccgacttctcaggcatttcttttgaggccggaatagcttttgg

SEQ ID NO: 230017 - DNA, 610 bp, Homo sapiens
  chr3:181428196-181428806
  hyper
agagtggaaggaaacttagacgaggctttgtttgactccgtgtagcgacaacaagagaaacaaaactacctatttgtaacggacgtgctgccattgccctccgcattgagcgcctacctattgaaatctttacgtcgggacaatgggagagcggctaaaattaccctcttgggtcctgggcgggcaagattcctgagcccctacccccgcccccatctcatcctcctctaacccgggccttgctgggctcccccttccccagtcccggccgccttctcccagtgtgcgctgcctgcacctgtgcctggagagcatcgaccccgcctcccaggccttgagcccctttgcggcgcagccccagccttgcgcggcctgggctttgcggccaccacaatggaaatctacggggaaaatgccagggctggttctgctggagtcctgggaactctgcgtgggagggagtttgtgactgcggcccaaaagccacctccatacagtgccgtgggatgccaggaagttgaaatcaccctcccccatcgcctgcacttttgagcgcccttccgtctgtgtctttccccagcccccatttgaaagccgcacgaccgaaacc

SEQ ID NO: 230018 - DNA, 803 bp, Homo sapiens
  chr3:181429281-181430084
  hyper
cgagttggacagccgccctgagccacccactgtgccctgccccacccccgcaccttagctgcttcccgcgtcccatcctcatttaagtaccctgcaccaaaaagtaaatcaatattaagtttaaagaaaaaaaaacccacgtagtcttagtgctgtttacccacttccttcgaaaaggcgtgtggtgtgacctgttgctgcgagaggggatacaaaggtttctcagtggctggcaggctggctctgggagcctcctccccctcctcgcctgccccctcctcccccggcctcccccgcgcggccggcggcgcgggaggccccgccccctttcatgcaaaacccggcagcgaggctgggctcgagtggaggagccgccgcgcgctgattggtcgctagaaacccatttattccctgacagcccccgtcacatggatggttgtctattaacttgttcaaaaaagtatcaggagttgtcaaggcagagaagagagtgtttgcaaaagggggaaagtagtttgctgcctctttaagactaggactgagagaaagaagaggagagagaaagaaagggagagaagtttgagccccaggcttaagcctttccaaaaaataataataacaatcatcggcggcggcaggatcggccagaggaggagggaagcgctttttttgatcctgattccagtttgcctctctctttttttcccccaaattattcttcgcctgattttcctcgcggagccctgcgctcccgacacccccgcccgcctcccctcctcctctccccccgcccgcgggccccc

SEQ ID NO: 230019 - DNA, 207 bp, Homo sapiens
  chr3:181431104-181431311
  hyper
gccggacagcgaactggaggggggagaaattttcaaagaaaaacgagggaaatgggaggggtgcaaaagaggagagtaagaaacagcatggagaaaacccggtacgctcaaaaagaaaaaggaaaaaaaaaaatcccatcacccacagcaaatgacagctgcaaaagagaacaccaatcccatccacactcacgcaaaaaccgcgat

SEQ ID NO: 230020 - DNA, 209 bp, Homo sapiens; identical to SEQ ID NO: 199222
  chr3:181433437-181433646
  hyper

SEQ ID NO: 230021 - DNA, 522 bp, Homo sapiens
  chr3:181437061-181437583
  hyper
tgaaagctggaggtgtccttcgttttattaccctagtctgcctgcgtgtacagaatgaagggtgcactgttttatatagagttcggcgctttgaactatcatttgcctagctctcccagcttccgcgcgggccacggctccgggctgtgagcgcgccggcctcccgccggctgccctggggagcgcgcagtgcccagtgctgagagccgacgcgcgggcaaattgaggccgagctgacgagctccggcgggtggacctgacgtcaccgcggcccgggtcacctcacccatggggctccccaagaaggtgctgtgtggggctcgagttctctctgcccgggctctgctcaaacggtcgcattccctctccctcaggcaccgacccgcgtcagacaagtctagaaagtctcccgaggcgttggggccctcaccactccagagtcctctgcctcctgcgccccagcccaagccctctccatgttgacctcgtgacacgggagacggtgtctaggccccagattcc

SEQ ID NO: 230022 - DNA, 186 bp, Homo sapiens
  chr3:181438167-181438353
  hyper
gtattaaataaggagcggtgaattcttcccaagggttcttatcgctggcggccaggccagaagcgggactgcgcccccacccccacctcgtgacgtcagggcctgcagggctccggggatgaaatgattcgtttgagtgttccagaaagggcaatccgaacgcttacagggcgaggccagtgcagc

SEQ ID NO: 230023 - DNA, 152 bp, Homo sapiens
  chr3:181440930-181441082
  hyper
gcccccgcccacttcgccacttcttagtcccggatctgaacattttagctgaaagagggaggggtgaggaaagggccaggacagttccctcagtgccaccactgcgggcaaggacagttccctcagtgccaccactgcgcctggagagatcc

SEQ ID NO: 230024 - DNA, 528 bp, Homo sapiens
  chr3:181441349-181441877
  hyper
ggacaccaggaatgcggggtctggcggtgctgggcgcagggcgagaagatttgatgtgcagggtaagtaaaggacaagttatttaaaacctcaacacaggaaaagatggtaagagtgctgtgtagccctttgcttgcttgtgactacgagtcgctaggtggcccgcgtttagagtatgcctacggcgcctactaacgtctagacctaggagaggcgtctcccgcccctcgacccacagccagccgccacttgatagctaacgcgtcttccggccggtacacacccacaattaatctttcttattaaagcctccattctgtacccatggggcgactcaaacctatttagatttccgtggttggctgcacaaatttaagtgggcaacgagttataaacctaataacagaggacgagagagggtgatttgagtagagaagacgcaagattcactagggtcgtgaagatgctgcgggccttgcccaccacggcatctacctcggggtgcacgccaggctctgagaaaggtag

SEQ ID NO: 230025 - DNA, 2064 bp, Homo sapiens
  chr3:181442081-181444145
  hyper
agaataattaacactggagccgttaatcaccactttgctgctctctccctcctttcgggtctgcggcgtctgcctttttcgctcccgctgccggcgcgggtgtactggtgaaagtgaagacgtcgcggtagctgtcacccagttcggctgtacttttttaaacgctcgcatattgtttgattactaattcgagttaatatgatctttatggcaacataacagtggataattggcctttttttctgaacaacaatgtaaatcacaatcgctttattatttaataacgtcaaacgcttcgttggattggccccgaccgagaagaccttttctttctagacagtgttgtggaggaagaacaatgaagatctaattgtggagatttcataagttggctcccgtaaatgaacagcttagatatggaagttccagcagatgtgggtactattcgcctctacaagctctaccccccacccccatatacgcagtccaaacactctattggagggttttttttttttttttttttttgtggtggtggtggtcctcagatcctagcaaccacctaaagtttccagtagtaattagagcttttatcgggcttgctcttcagccctttatattgccgatttagcgttaaggcattaagtccacacaccaaattagcgcgactcccaaatagccacaaccacttattctccccttccctcattttggtggttggacaccaagagcatgggcctgggacttttttttttttttttttttttggttttactttgttttgatttgatttttaaaacctattcgctaccgcactgtcttggaatatacttgtttcaggcagagttttgcaagggacctgagccattattttgcaaacgcctggaagagcacatgaaactcagagaactacaatgcagacgacaacgcctagaaggaatgggtccccgctgctcgaatgaaagattaattacatttgccccaaaagccccaattctaacggtctctatcgcggcttttgccgtcactgaaggaccgctgtctctggggtcttcagacatcggagtcctttgcaaatgaagagcccccaccatttggaattcgggtcaaggagaaagactctgagcctgcagcagtttttgtttttgcgtgtgcccgcctctccattttattcaacttcttctgcctgtcgggaagcagaacaatcgctccccacccacccccctccgccccgtttctaagataaacaggaggtgcaaaatgctttgcctgcacacgcgccctcgtggcccagtcttcctgcaacccccagcgcaccggccatgcatctgtctcccaaccagacgtgggagaagacatccccccttcactcttcccacctgcatttaaaaaccatcacattgactgctctagagtcaggttcacatttttggccctccatgccaccttccagtttcttcccggtccactctctttctcaggacctaaaaagtgacggggagagggtgaagaattggagaaagcagcggattttcaaaacgtatcccccccgcccccccatcttttaaagtagtatgttaccacaaggagtgcatttgggaaactttccctaacaggagctgggcgcagtgttattcttctccatgggtctgctggcctccccgcccccgctggacaatgcgtgctttgagactcggtggcctgcaggcagcgggagacgaggggactgggcagccttcctccaaggggcccgcagctgggggagcgccaggcagggagcagggacaaggaggcgagccacgcaggaaggaaaaccataaaagtgccattttttcccttagccctgcacagaggcaggctttgaggacctaggggcagggcagctggggcggggtggggtgggggtgttgagaggttttgcgtgttctttttaccccctttccccccactgaaacattttatttcggcacataattatgcactgcagattctccagcctcctcgccctcaatcttggtaacctggtctttggttaataatatcgcaactcgggacttcaacgct

SEQ ID NO: 230026 - DNA, 1331 bp, Homo sapiens
  chr3:181444664-181445995
  hyper
cgggacggtggcagcaagggagaaaggacgggatggaggagggggcttcgcggtaaccacaccccttcctaatgagttaatttccatatttgcgcctcccgcatctagcgccctctttttttttttttttttttttttttttttgcctgacgccactgtgctgttgcgtcttgcgcagcgcagacacctccactctggattgaaacgaaaaagctcgcggtaagagcagaaaattggtctattgatacattcgctccgagtgttgatcttggcatcaccgatagccggttaattcccccaccccgcccccgccagtgggtcgcacgcggattgccgagggcttgcaggcactcaggcagacgcagacagaaacccacatcgaccccccccctttccccgcctccagctgtccgaccctcaagtctctttctttttcttttttacccaactccggattattttccccctcaaggtgagggcagtgagagcagcgagggcacagtccgcacaaaaagggggaaaataatcgcaaaccaaggaaccaaaagtgaaagtttcaaactagataccaaccctgatggaggttgggtgctgacccgactgtgggtacttaagagaaggaaggagggaaactgaggtggtgagattatgtccacagtatgggtcggttaaaagttgtagtaaagaagttttgggagggccctcactagaaactcaaggcgggtttcagctgatttaacctggtttcctacacatttttgcggtgattctgctctggaaattggcgaaagagacagacctttgcaattgctcacccctccctgcccccaaccaccctgcttactttcgcgaagcgcattaggatgtgggctctggcttgagctccaaaatagcttgcttgtcaattgcgagctgcagcaatatcaaagtgaactgtcccaagtaactcttgtctagaagctgggaagaagcttaagcagctcgctttaatgatgatttgtagctcggcgaggggcacggacagcaaacaccccgcaggtgtgtgccgtaacaccatcatccggacttgaatgtagattactctggcgatcgtttgatcggccctttgaaaccctttacaattgcctgtgacgaacggccagtctcagtttttctctgaataatccctgagggtaagtcctccgggcttttaaagagctctagtattttttttttaaagaataaaaagaaaaacgttcgattttagtttagacctcgtcaacttttagtcgctaacaggcatcactcaagccagtcaatacttaatgaccgttagttacccttgctgtctt

SEQ ID NO: 230027 - DNA, 331 bp, Homo sapiens
  chr3:182399999-182400330
  hyper
attaaagaaaggttcgaagtttagtttgacattcacctctgcctttataaaacaaacacagcctataaaataacttaaacgcccagagtgccgagtttcgtcgggccctggctgcgccgggccgagccctgccccgcggaggtcgccgcccagcacggtctgcagatggcagcctctcgcggaaagccccgcaacgccgcttcctgcctgggggcggcacttggggcccgcgccggggtttcagaaacctgttcgagccgttcctttatggcggaacgttcttatttagtaaatatttattccactccccgaggacccagcactaatcact

SEQ ID NO: 230028 - DNA, 85 bp, Homo sapiens
  chr3:182510867-182510952
  hyper
gttcaggactgtgcgtatgcgtgtcgggagacgcgtgaaccaaagaagccacagagcccgaaaaagacctgcaacaggaggtaga

SEQ ID NO: 230029 - DNA, 36 bp, Homo sapiens
  chr3:182512112-182512148
  hyper
ctagccccctcagcgagagacgtttctccccaggac

SEQ ID NO: 230030 - DNA, 192 bp, Homo sapiens; identical to SEQ ID NO: 199226
  chr3:182697832-182698024
  hyper

SEQ ID NO: 230031 - DNA, 145 bp, Homo sapiens; identical to SEQ ID NO: 199227
  chr3:182698591-182698736
  hyper

SEQ ID NO: 230032 - DNA, 422 bp, Homo sapiens
  chr3:182833877-182834299
  hyper
catgaaggactggccggcggccaatggggggctaaaggggcttgttgtcatgggagcgaggatgtgatctatatgctgcacctgcggctctcctgctcatgcgcactgactgcacccgctgttcccctgcccatgcgcactgactgcacccgctgttcccctgccggtgcagactggctgcacctgctgttcccctacccgtgcgcactggctgcacctgctgttcccctgcccgtgaggactggctgcacctgcttttcccctgcccgtgcggactggctgcgcctgctattcccctgcccttgcggactggctgcgcctgctgtttccctgcccgtgcgcactgactgcgcctgctgttcccctgcccgtgcggactggctgcacctactgttcccctgcccgtgcgcactggctgcact

SEQ ID NO: 230033 - DNA, 445 bp, Homo sapiens
  chr3:182880264-182880709
  hyper
ggaagcccttggacgcgccacacctccctacccgcagcccgtcctgtggcgcccgggactccagagtgcgtttagatgaaaggggaccgacacgtcagggccaccgcgggaagcgctgagggccactcaccggccagggacgcgaagagcgcggccgccgcgctgagctgccggggcatggtgggcgctgggcgaggttctgcagcgtgcggcgaagtccgggcaggccccgaatcggtgccagagaaacctacctgtgccggagaaacgaaaccacctgcttatgagaagcagccgaaaagcccgcccagggccgctgggcggggagggaaactccgccggccccctcctacccctacggagcagggaggggcggggactcggcgcagccgccggggcccgggcctctgggaccgtttaccgcacgcgcgtggtcccggcagcg

SEQ ID NO: 230034 - DNA, 224 bp, Homo sapiens
  chr3:182896564-182896788
  hyper
aagcaatcttggcactaacacgaacaccccatgaacgctcgcagggatgctgggaggcggaccgggagctcccagtctgcggcccccgccgggttggagcggctccggctcctccaaggctcgggctaagcggctctcaaccgattcccaccccgccctggagaaatgcgggcgtgtctgcaggcatttttgattgtcacgatttgggggcggggtggaggatg

SEQ ID NO: 230035 - DNA, 643 bp, Homo sapiens
  chr3:182896848-182897491
  hyper
gtgggagcacagagaagcccacgcagcaaagaattgcccggctccgaatatcgaagtgcgcggtcgagaaggcgtgggctgcgggctctgctcgcctctgcaggcgccttagagcagctccgaggtcccccgtgcggagctaggcgcgcacccaggacacccctcgggctcctcggaggaggccctggttgtcccctttctgccgccgccgaggctccggctgctttctgcgtagctgggcagggcccgggcccccacaccgcctctcccgggaatgcgggcgctctggagccgaggagcgggggcgtccgcagggaggtcagctctcctgggcggaggtcctcgggcgcagcgccctcgcctggaaaccagccgtcgcccccgcaggagccagccggcccgtggacgccccagcgcgctcctcctcggtgctgcgggtcgccctgcaattccgagaagaaagtcagagacgccgtggcccaaagaggcgcttagtctttcctcgctcacactcacgtttcctcctcatcgcgttcttctttttctccctggctgctttctcccctctccaggaaagcagatttggaggaacaggtttcgtgactgtcgtccgactggaaaaggcccgcgagctggaagggag

SEQ ID NO: 230036 - DNA, 1655 bp, Homo sapiens
  chr3:182970889-182972544
  hyper
gaacaaactggggcggggcccatcaccttcacctacgcgccgggagggtggcggctggcgggcggggccgggctcgggccgtgacgccgagagtgcggggcgcgcggctgggagcctcgcgcccccgcccgggcccgcccccatcccgcccgcatacagcccgcatcccgccggggaagcgagcccagtccagcgctgcccgtccagtcctcgcccaagatttaaagcccgcaagttttgttcttgagaccagcgactttagctccgatgcgggaaggaaagccgacctccgatttggacatttaaagagctgggcttgaacttcgtgagtttcgctctaaactgcccttgaaatgaagctggacttggaggtaaagtcactgggaagctggcctggggcggggtttccccctcttctcgtattttagaaacggacagcggcagtgcagccctagtttgctgtaagtttccttactttgttactgaggcccccagagctccacgcataagtggtgtgaccagaaaccttttaacaagacccgcctgagcctgcgttagagctcccgctcggaaagtaaaagaccatcctaatccgcggcgctgcggaaccggtgtcccgtgtgggaggaaccgcggcgttccctgggcgtagggcccgcgaggccagcacagtccgcctcttggcggagcgccctgggccggtggttccgcgcggagttagtctgtggtcagttacgtggtgaaaacacggctgtgccgcggccgcatctttccgcggccgaggcctctctgggtgggagtgttggcttcctttccggatcgctaaatggggaaagttctggccgctcggcgggatacgtctccaggccacggatggttcgttctccgtgccgcggccccgagctgggctccctgggtctccagcgcgggctcccggcattgggggctgcgggccggcccctccgccccgcccccgccccgccgcgcctcctcggccgagcggctcgcggtctccggcgcgggaggctccgagtctgcccactccgggccgagcgaggtctctggaggagaagagtggcgaggaggtgagggcacgccggccctcgcccggcgggtggcgccaggacttcaggtgggaacgcgcgcttgggccgggggcgcgtggctggcgtggacaccggatcggggcccgccgccctggcccggaccgcgcacggcccagcgccgggaagtcgggaagccggggaggcctctcccaccgcgggccccggcagcccgccctctgaaagcgcggcggagaaggaggctcgtcccctccccggaacgcctttgttccctccggcctgcccgcgcgggtggccagcggctgggacccaggccgggccgccgcccaggtgcggcaggtaggctcgggggccgggcagctccggttggggcggcttcccggggcctgcgggtccccgtccctgaggagctccggctcctcggtggcgggacaggcccgtgcgcgggagccgcgaggcgaacgccgcgcccaccaattcggttgccggccgggggccccaggcttgcggccacccgcctccggctggagggctgaattcgagtcgaaagcccgtgtcgggctggaaagaagaaaccgccaacctgagaac

SEQ ID NO: 230037 - DNA, 1396 bp, Homo sapiens
  chr3:183145434-183146830
  hyper
gagctcaacggactcggcaaccacctggtgaaggcaccagcctcggccccccgacccccaccagcggcgcgccccagggatgccccccgctgggcaccgcaggcaggacccagagcagcgaggcccagatgccgggcaaccccccaggaagcgcgctgccccggggcagcgggtgaggccaggagccagatgaagcccagagaccatcctcacccgccattaataaaacgcaggaaaaattaaagcttcgtttaccgacatgagtgatcactgtggccagtcgccgggtgagctcctggggaggcatctcttcttttaagcaagacagcatttcactgaaaaaccattccgtataaataaagccaaacaaaactgtttctaccgctgcggtggatgattttttaaaggcatctccgcccaaggatgctctgccctcgccctcttcctggctctccaggcaagaaacgagagtccctcgcagcctaggccagctctccctcgccacgccccgcgggggctcccgtgacagaccaagtctggcgctttcccagcgtcgcagctggaccgagagaggagcggccgttctgcaaaaggaagcaagtcgccaatctcgccggaaccgcgccccggctcctccggccgggcgagctccggggcttccagaatcgcggtcccggccgccaggtttccggcgccgcctccagggactgtagagtgagggatgctccgccaggtgcaggggaggcggcaggtggccgtggcttctctgcgccgccggccccacgccccagcgcccacctcgtccagcccacgggtggcgcccggggctctcggggaggcacgcacgctcccaagcgccgctcgttttggggtcgggaacgctgcgcacctttccctgcggggagcccgcgctccacccccggagtggagctccggtccttactcggaaccgtggggcggggagacagtgactgaggcgctccagtcgcaccggggtccggatcatcagacgcgcgccggccaggtctccgcccctccttcttccgcgccgggtgtctgcggaggagccgcggagagaagggggctggcccggagagctgccgccatccggcaggacccggagcgggaggctgggtgaggcgccgctgcttgccccacctcctgaccccgggggcggctggcgtgtgttttcccccacttggggttgttccacgcagttcttgacctccgctggccacacctgcactgggagcccggcgcccgggctgcgctccgacaaggctgagcacgcgtgggcgcgctcaccccctatgtgggcgttttccttcgtgcagctgcgcccttgcctctgctccgtctgtcacctgtcaggcacgccagtgctaccttctggagg

SEQ ID NO: 230038 - DNA, 159 bp, Homo sapiens
  chr3:183165026-183165185
  hyper
acagtctcccgccccgtttcttcacctcagttctctaaagattgaaggtcaagaggagggtttcttgccctggagcctgcgatagggtgggcccttgcggttcttgggcggaaacggcgatagggacacccagggcctaaggaggctggggacagagca

SEQ ID NO: 230039 - DNA, 422 bp, Homo sapiens
  chr3:183165425-183165847
  hyper
gagacgcagccgcacttcaccaagcggccggtccgaggggacatggcggcaacctctgcagcgtcagtgctgctggcgggtgcaagaaactggtggcgacactgcctgagcccgctgctgttgccaaggtgacgaggcataaagccgcggtggatcggtgcgtgggggcgcggggtgggtggtgaagggagaacgaagctcgagcggaaagacaggaccgcgaccgcttgtcaggggattcggcttccagtcccccttccagagggcgtccttctgcagccaggcctctgtcttcccccgcccccacacggtacgagctacagaatgcttttctgttttctctttttctatagtaaggaagcgctttcctttctcccccgtttattcatttgcttacttctggttcccgtgtccttttaaca

SEQ ID NO: 230040 - DNA, 108 bp, Homo sapiens
  chr3:183353358-183353466
  hyper
cagggttcgctgacgctcagtgttttggcccggacggtcacatgtttcctttgttgtgagctgcggcagagactggtggctggaggagacgccggcgctggagagtgc

SEQ ID NO: 230041 - DNA, 79 bp, Homo sapiens
  chr3:183415419-183415498
  hyper
ggaaagtgatggacgactgtgcctttgcaagaatcgacgcccacactgcccaggaagtgccctcgcgggccggggtccc

SEQ ID NO: 230042 - DNA, 743 bp, Homo sapiens
  chr3:183542793-183543536
  hyper
gccgccggcagctccgaggtcgcgtgggatccgggctccaggcgcctccgctctgccgcccaccccatccctctggctccgggcctccgcgtcctcccaccacagggtggggactcgttgcggtccctacccagcccatacctgtacgacgtggtcactgctgcagccgcgtccgcgtcgccgatgggcagcacgtagaccccgcgggcgccgggcgcaggtggcgcggaggactgcgcggaggatttgcccctgcggccgcccgcccccggtccgcgccccggcggcggatccttgggcccggcgggcgtggtccacaagccgaagtcccgctggtactgagtgagcggcacgtcccggccggaatcccgggcgcccgcgggaggctggcccctgcgcgaggcggcgccgcccgtgcccggctcctcgctgtcgaggtccgagtagccgtgcagagtgagcggcaccgccacgtcggagcggtccagctggttccagcgccgcgccaggcagcacaggcggctgatacagggccacgccatgccagccccggcgcccgccgccccgctcccggcgcgcggcgctcccggccgcgcctcctgcgcccagcgtccccgcccccgcggcccgccccgcgccgccgcagcaccgccccccggcacgagggtgggcgtcccgggagggggcgcactcggcggcagccccacttggccggggccggctgcgcacggctggagctggag

SEQ ID NO: 230043 - DNA, 90 bp, Homo sapiens
  chr3:183602724-183602814
  hyper
gagcagtctagagcgcccccgcgcggctgagcggcagccgaaccagccacggtgcccggacgactggctggcgcccttctgtcccaccgc

SEQ ID NO: 230044 - DNA, 116 bp, Homo sapiens
  chr3:183736070-183736186
  hyper
cccgcgtctaacccgttgagagtcgtcaggccggccagccccagttcttatctgttgtggcagatacgattgcttgctcatggttcgaccctgcagtctgcgcagataccgccttt

SEQ ID NO: 230045 - DNA, 45 bp, Homo sapiens
  chr3:183852315-183852360
  hyper
caacttactggtgcgcctggatccacccccgtctccactctgctt

SEQ ID NO: 230046 - DNA, 52 bp, Homo sapiens
  chr3:183892563-183892615
  hyper
ccgcgaggcctgacgggatttgtagtcggcgctagacgccggcgcgcacgcg

SEQ ID NO: 230047 - DNA, 123 bp, Homo sapiens
  chr3:183904302-183904425
  hyper
cacagcggcagcgcggacttcgagtctgtggatgacctggtggaagctgtaggggaactattgcaagaggtgtccggggacagcaaggatgacgcgggcatcagggccgtgtgccagcgcatg

SEQ ID NO: 230048 - DNA, 117 bp, Homo sapiens
  chr3:183967307-183967424
  hyper
tagttttcccagccggaggattcttcgaagagcgcttagtaaaggacggaagttccacgtgtttgtgttgagcaactgcaggtggtgggcggagacaccagcgccccgccttctgca

SEQ ID NO: 230049 - DNA, 135 bp, Homo sapiens
  chr3:183979774-183979909
  hyper
gactggggaaggcacgaacccacagcgcgggaagagctcgggccagtgggatggtgcccttgccgctgacgcgctcttgtactagttgctctgctggtcttaagtagatcgtcagggtccgtgcgcctctgagtg

SEQ ID NO: 230050 - DNA, 457 bp, Homo sapiens
  chr3:183980144-183980601
  hyper
actgggccgacgcgcgcgcaccagggcagacacccccagccctagtccggtggctgtagccccccgcggctctggagtggtgcgctcgcagtgtaggaggaatgaatggcggcgtcgcggggggcgccctgggctgcgggtgacgcggggaagctcggagcacctgaggacgcggagcgcgccagtgtgtgccccgagggagtgcggtagagatggagggtgccccccgccctcgttgctttggaccacgggtgagttctcgcctcaccgatgggaacatgccctcttctccccttgcctcccgcccccacaacccccgccctggctggccgtcacccgcggcgtcacctgcttgccagcgcgcaggagctctggcgcaatcactggccttggggaggagggggtgtctcacatgcggcgacagtgacggcagcgctgaaaacggtaatgatcaccc

SEQ ID NO: 230051 - DNA, 72 bp, Homo sapiens; identical to SEQ ID NO: 199239
  chr3:184053512-184053584
  hyper

SEQ ID NO: 230052 - DNA, 249 bp, Homo sapiens
  chr3:184080988-184081237
  hyper
cctattgcttccccgccctgggcagagccacctggacatgagacccgccctcaatgccgaagcctctcggaagcaatctttcgggacggaagttaagtagccccgagcgggaggctgtggcggaagtggtcgcgttaccgcttgtttgtgcgcatgcgccactctcgtctggccgccgcgctttcaggaggtgcttttggttctctccggtcttgtccacgctagggggtgcacgtactcccaactgtg

SEQ ID NO: 230053 - DNA, 119 bp, Homo sapiens
  chr3:184097793-184097912
  hyper
cggggcgtcgggcgcggggcataaaacgggccggagccggcgcccggggcagtagagccgcgtacggcccgggtcagcgcccgcccgcccgcgctcctcccggccgctcctcccgcccc

SEQ ID NO: 230054 - DNA, 403 bp, Homo sapiens
  chr3:184243072-184243475
  hyper
caccccccacaaacgcacgtaaaacctctataaagggagaaccgccttgctgctgagggcgcggtgggacccgtcgcagggccagctgctccggcaggtgcccccaaagggtcccgcaggtgatcctcggggactgagcgcccatcgcccttcctacgcactcagatccgccgagcccagcgcccgccagagcccagagagtcctcggggtcagagtggtcacgtcaccgtcattcttttcctgcccgactagtcgctctgggctccccggggccgggggccgggggccgagccgccgccccgattccggcttcacccgcccgcagcgcgcggcgccccgcgctccattcgcgctacctggcggctggcaggctgccccaccccaccgcgggccacacacagc

SEQ ID NO: 230055 - DNA, 293 bp, Homo sapiens
  chr3:184278877-184279170
  hyper
cggacactggccgtcgccctcacgtacgctcgaggaactcttcctcctctgcaataaagctccttacactctacagcgatgacttaatcccacgtcctccactgctaagctagtaacacaagcctctgtcttgtccattgcggtagcacccgcaggtactacagtctgacacattgtgggcgctcacaaagatgtgctgaatgaatgactaaatacgcagcccagtgaaagaatgaagaaacgatgaagtcccttgtcacaggatacatcgcggtgggggtccccccaagtag

SEQ ID NO: 230056 - DNA, 940 bp, Homo sapiens
  chr3:184279350-184280290
  hyper
atcttttccttagccccgcccactccggcccctgagaccccgagggtgggcctggcggagacaccgccaactgaactccagctgagtgctctcgaggccgaaccagcgggcctggcggtctgtgagtgggtggccagccgctaggggcggggcctcagcgttgacgggcaggcaggccgtcccacccctctcgcccagagcggccgcgccagcgctggggacagcagaagtgagtacgtgagcggcgcagcaagatcccagctcggaccccggacggcgcgcgcccccgaagccccggatcccagtcgggcccgcagctgaccgccagattactgtgcatcccgaatcacgaccacctgcaccctcctgccccggcccgccccccaagtcctcaggcacccagctccccggcgccccggatcctcctggaccggtccgtccagattcccgcgggaccgacctgtccgcatccccaggaccgccgggctcggtgcaccgcctcggtcccggagccgcccgcctggattgcattccctcctctcctggatctcctgggacccgacgcgagcctgccccggagcccgccgagcgcaccctctctcgggtgcctgcagccccgccggcgcggcccggcccggcgcggcccggctcggctcctagagctgccacggccatggccagagcccgcccgccgccgccgccgtcgccgccgccggggcttctgccgctgctccctccgctgctgctgctgccgctgctgctgctgcccgccggctgccgggcgctggaaggtgagcggcgtcggggggcgcgcccgggaacaaggtgcctggggtcgcggggctgcgggctagcagcgtgggtccgacccggattgagcgcacgtcggaggaggccccgccaccggcgcccgctccggggcccagggatggggtgggga

SEQ ID NO: 230057 - DNA, 69 bp, Homo sapiens
  chr3:184280320-184280389
  hyper
agctggctcggaggcaggcagcccgcgggttggggggtcgcggggagctagactcgggacgaacgtccc

SEQ ID NO: 230058 - DNA, 491 bp, Homo sapiens
  chr3:184301275-184301766
  hyper
cgcgcggaggaggccgcgggcgaaggttgcagggtctgctgcgtggcgcactcccggccgcggaagccgacggcgatcggaggagcctgggagcggccctggcagcggccctggcacagctggcggcggcgcgggctcctcaggccgcccccgtccttcaccgcgcgctcccgcgctggggctgctcggcggcgcccgctccttagtattccccccacggagcccagccgcgccgccgcagccggcccgggggaggggcgccccgcacggctaagctctctgcgtccccggggcggacgcggggaggggaggggaagggacgcagcctctccgccgaggcctccttcctcccctagtgggggggaggggctgtgcgggggcaggggcgggcgatgcgggggcccaaggtggcccttggactaggcgccggagctgtcaacggggcgaggtgtggcgggcggccgggggaggggacgcggtgccgagtggcc

SEQ ID NO: 230059 - DNA, 60 bp, Homo sapiens
  chr3:184319911-184319971
  hyper
tgtaaagtgtttaaaaagaaaaactctccggaggaggacgtaaccttttcttaacatctg

SEQ ID NO: 230060 - DNA, 93 bp, Homo sapiens
  chr3:184321763-184321856
  hyper
caaggtaggtggcttggaaacgttcagtagtcggacctgggccacggagggcacagcggccactctttctgagaggcagaggtcggtgggctc

SEQ ID NO: 230061 - DNA, 311 bp, Homo sapiens
  chr3:184322276-184322587
  hyper
ggggattggggccggaggggcgcgtcccggcggggccgggcgagggtgggtggggggtctggcctggggggcgcctcccgccccctcttggggaaggtgctcggagactcccgggccctgggcggagagtgtggggaggctgggctaaaggcagagacccaggccgagggctctgacccacccaagaggaaatagctactaattagggacgggacgtttttatgctaatatgcacctggctgggcttttctggaggctgagaaagtgtggagtggaagggaagaagttccggagagcgggaaacttccgga

SEQ ID NO: 230062 - DNA, 155 bp, Homo sapiens
  chr3:184429620-184429775
  hyper
ggcaggtgcagagcgcgtacacgggccgaggggtgtgggagccgccgcgcaagccccgggggaggggttggacagcggcagtgacggcgggagtacaaggagcaatggcagcgggagctttgtggctgctgggccgcaccgcacgggagtcaaac

SEQ ID NO: 230063 - DNA, 63 bp, Homo sapiens
  chr3:184430244-184430307
  hyper
agactgaaatttattctggacgtaaagagaaaatactgcagcgggatttaagcaagtgagtgt

SEQ ID NO: 230064 - DNA, 229 bp, Homo sapiens
  chr3:184530229-184530458
  hyper
tcgtacgttggcccggaactgggtcgggcaatttccacttactggttccaaatgaatgtgaaaattcaaatgggcttaagtaaaaagggatttattggctccaaacctggaaggggctgaggtatcactaaatccagtgactccggtgatgtatttgtgtatctctccctttctgcaaagggccagtaacccctcagttccctatctactttgcgactataattgcaag

SEQ ID NO: 230065 - DNA, 404 bp, Homo sapiens
  chr3:184870948-184871352
  hyper
gtcggcgtccccgccggtcacagcgaggtcctcctcacatactcactccttcctcggagaaagaccccgacggagggccgtggtgaacacacactcctcggccgctttgtactcacatgcacgccagcctacatatgcacttccccccgagtgacactggccaccgagaactgacacacgcgtccacacgctccacggagggctgcgcacacctggcccacgcccacccgaacctcctagtggcccgggccgggtgcatcgcgtagcgaggatctcacacacacagcctgtccccacaggcgtctcacatctccctcgtacacacctccccgtgtctgggcatggagcccctgggaggcgcgcacacgctcgtgcacacgcgcgcactccccccacccagggcg

SEQ ID NO: 230066 - DNA, 165 bp, Homo sapiens
  chr3:185303809-185303974
  hyper
gggccttgtcccacgggccggctccggattggctccgccgaagagaaaaccctgccgacagcccttccgatctcgtcagcgattgggccgggaccgtcccacaattactcttgttgctgggctcggaaatagggagcggtgctaggttgcgcgtgcgcagattga

SEQ ID NO: 230067 - DNA, 372 bp, Homo sapiens
  chr3:185541060-185541432
  hyper
gggggggcacgcacggaactccacgctcgggctccgccttcgggcgcccccaaggggtctcctacccggatcgagctgggcgaacttggttcccagtagaaagaaaggtgggcgccccgtgtctcgggacaaggcgaggagggtgcgagcccgggtcggaccccaggtatagccgtgggtggcattaccggaaaaacaaatttaataaagagcggcgccaatttgaaaggatgagctcatttgaaactcaagctgcagggctggcgcggccccgctgctctcccggcccccacctctccattccgctaatccggggcccgaaggctccaccgggctcccctccctgccctctcctcccggtggccccgagaa

SEQ ID NO: 230068 - DNA, 137 bp, Homo sapiens
  chr3:185541795-185541932
  hyper
cgggaggcggggggacgggcggcggaaagcccccagccccgagttcttctcaataaaatcggacaaaaaattcagagaaaaataggagcgcttgagagagcaagcgagaggggactgaggttcgggaaaggaccgag

SEQ ID NO: 230069 - DNA, 236 bp, Homo sapiens; identical to SEQ ID NO: 199248
  chr3:185542334-185542570
  hyper

SEQ ID NO: 230070 - DNA, 827 bp, Homo sapiens
  chr3:185543197-185544024
  hyper
cggcagtggctgctcgggctccggccccgcgccaggcgggcggaagcgggtcgcggccccgggctggggctccgggcgccggaaccccgggcgggcgcggcgccgaggccgggcgagcggcggggcggggaaggcgcgccccgggcgcgggtgggagcgcgcgagggggcgacggggagccgcgggcgtgggagggagaggggctgcgagtgagcgcggagaggggtgtgcgcaaggtggaccggatgtgagtgcgctgctgccagggcaagcgggaaggtgtgtcccggaggtgagaggcgagggcaggctgggagacaacaactttcgcagcgacttggccggggctggcgccctgcgcgttcccgggccgtgcgctcgctctgagacccgctccccgccacgctctctgaggtgaccgagcggcgcgtgtggtcgaaggatcgcgcgcgggagtcgggacgcctaggaccggggttggccgggccctcgcggaccgtgctcgcggggaagtggttcccggtcccgggcctcagtttcccgaccggggagggaaggcggaaggccagcgcggagtcacgtcctctccgcccagaccccgcgtgtccggaaccccgcggcaggcggcagcctgacgttggcagctgctctctattctgggaagtgccgagggcttcccgggcggcggcggcgaaagccaggtggcgggtggggaaacgaacgccgaggggccagggactgcggcgaggccggagcgctggggtcagcggccgggggacggatggtcgccgcccggctgcgcggccggttcagctccaaagccaggg

SEQ ID NO: 230071 - DNA, 301 bp, Homo sapiens
  chr3:185825460-185825761
  hyper
cccgcgccccgggcgcccccaggaaaactttagcacagcgcagcggcgcgatccaggcccctcccctgtggcgcgcagcgggcccggttttatgaatgggagagcgagccgcggccgccacatcaggtagaggctgtaactggatctctagcgctgggccccattcacaaaacaagacacacttccacccaattctcagccttccccattcatgaaaactccttcagctgcgcccccgcccccatttccaacgcacgcccagcctccgacgcaggcccctcaccccagcgttttaggaaga

SEQ ID NO: 230072 - DNA, 172 bp, Homo sapiens
  chr3:185826001-185826173
  hyper
ggaaccctaatccgctgcgaggctgcagcatctttcggtgctgtcccctccacacccgtgttatccccaccatccccaggccgctgttccggtgcgccccgattttctcgagtcgccgcacagccggacgccctcagcctgctgggtgggagcagggcgactggatgtccac

SEQ ID NO: 230073 - DNA, 37 bp, Homo sapiens
  chr3:185826637-185826674
  hyper
tcagcccgtgaactctagccggctgggcctgtcggac

SEQ ID NO: 230074 - DNA, 105 bp, Homo sapiens
  chr3:185826974-185827079
  hyper
gttcccattggccagaggccgttcccgcggctgtccatcacctcttgtttaccctgtctgcgggcaaatccaaccaagccgccccatcaactccggcccccattg

SEQ ID NO: 230075 - DNA, 181 bp, Homo sapiens
  chr3:185827319-185827500
  hyper
cacgactcttcccccttacccactcacccccacttctccatccagcaaagccccgaccagaattgggtctcttggcgccagacgttcgcagctgcagcaccaagcaaagttatcattttagaattcaggggagaggaattcgtcattccacacaaactcgctgaccgacctgggcgtttag

SEQ ID NO: 230076 - DNA, 53 bp, Homo sapiens
  chr3:185977470-185977523
  hyper
gacagccccgggcccggggccggccagtagagggctctcgagcaccggcccgg

SEQ ID NO: 230077 - DNA, 100 bp, Homo sapiens
  chr3:186078690-186078790
  hyper
cctccccacagagaggtcatcgtatgctaatgaagtccgaggaggcagcggcgcagcgcgggagagcgcgcccacgggttcacagcgctcccgggcacca

SEQ ID NO: 230078 - DNA, 113 bp, Homo sapiens
  chr3:186079390-186079503
  hyper
gttaagtccagaagaagaaggaaatccgaccagttgctttagcaaactgcctggagcaaggccgcctcccacccgcacagctttgaggcttgagggggcctctcagtcgcaga

SEQ ID NO: 230079 - DNA, 164 bp, Homo sapiens
  chr3:186285249-186285413
  hyper
tctaggctggggtcgagagtccgcaacagtggcacctggagccagacccaccgctttctggtgtcgcgcctttcaacccgggggggtaggaagctttctgttgctccgcataactgtggtcagctaatagctgctggtaagatcagcacgctttcatcagaaat

SEQ ID NO: 230080 - DNA, 81 bp, Homo sapiens
  chr3:186287892-186287973
  hyper
caccactaagaagcggtggaagccgaatccgaacttaagtcggtctgtcatcactgtagcctttccgagacagttgtctta

SEQ ID NO: 230081 - DNA, 48 bp, Homo sapiens
  chr3:186288738-186288786
  hyper
gggcggtgattgccgggtgaggaacagacactcgcagacaacggggcc

SEQ ID NO: 230082 - DNA, 130 bp, Homo sapiens
  chr3:186334979-186335109
  hyper
agccgaggacgtgcgcaaggtgtgccaagactgccccctgctggccccgctgaacgacaccagggtggtgcacgccgcgaaagctgccctggccgccttcaacgctcagaacaacggctccaattttcag

SEQ ID NO: 230083 - DNA, 138 bp, Homo sapiens
  chr3:186500725-186500863
  hyper
catttttccttctcgcgctgcaaaatgtaccggtaaaccggacttcccgggactcgctgggtggccgacattttccctagcaggaattttacgtttccaagatctgaatggatgttaacggtcgggctaaatgccagg

SEQ ID NO: 230084 - DNA, 40 bp, Homo sapiens
  chr3:186524286-186524326
  hyper
cggtaggaatacgcgggcacgtaacgcgtcacttccggtg

SEQ ID NO: 230085 - DNA, 342 bp, Homo sapiens
  chr3:186648468-186648810
  hyper
aggggagtcctgggcagggccgggctggggaagacgcctggggcactgcccggcgttaacaaagggagccgataccgaccggcgtgggcgcggagcgggcggccgccaccgagcgtgctgagcaaccgcagcctccgcggccgagagtgcagcgagtgagtagggggtgcggtgggcggcggcgcggcccgggctatcccgggaggagtgtgatgcaaaggggcgcgggaggatagcggaggcgcggggcccgcggcgcgcgtagggcgcagggaatctctctccagctccgcctcagctgccttggctccggggctggccgccttttggttgggggtgtgt

SEQ ID NO: 230086 - DNA, 495 bp, Homo sapiens
  chr3:186649397-186649892
  hyper
gctgggtgcactattgtccccgcactccggcgattgcctctgtggggatattttggtcgcctcctcagcctgcgggaagaatgtacgagtcgcccagtgcggtcttgctctttgcctctgaggcccgtgtccgtgtgcccagacaccccagatgtcactagccccttttggcttgttaatgcattttcgcaagcaaggccagccgagacctcgtattctagctggggacgtacaattttcagttctgagtttatttgaaagaaattccgaggtccggaaaaagagaactcttgtttgttttgctttttctttgcttacatatgctcagctcagctttgcagatgttaatcggacacgatctgcagcggggagatggtttcgcggtgaattggtctctgaggcgatggtgttggtgcaggttgtgggcgtgcagtgtgagcaggaatggaggcgccgccgccccagtgtgtgcctgctgagcgggcgggctgctgc

SEQ ID NO: 230087 - DNA, 638 bp, Homo sapiens
  chr3:186857083-186857721
  hyper
gcccagctccctcaggtctgcgtgtcaccgacccgaacccgctccgtcgtcctgacgcccccggcctagctgcagccaccttgtcgcaggggccttggtgtctctgagactccgagacgcctcgcccccacctggcgttcggaggcggttgcctcgctgggcgcagcaattcaaccgccgcgcgccggatgctaagaccgcgatttccccggatgctagggcggtgatttcccccgtgacaggccccgccccggccccgcccaggcccgggcggtcccgccccactgagctgtggctcggggagccgtgggtccgactcctgcgtgtgatgtgtcaccaagttgactttggggtcccccattcttccttagttctctattttacctcagcgcgttgtctagctgctgcctggccacggtacttagcacacagcgtgacttaatactggataaacgaggaaaggattcgtacgccctggcggggccagaggctcacagcttgggttcccgcgagcacacgagccaggaaccgccaatgcctccagggggcgctctccctcccatcgagccaccgccgggccattggagaccaggaggacctctcagctccatccctgcgtctctaacaattgtctcatt

SEQ ID NO: 230088 - DNA, 401 bp, Homo sapiens
  chr3:187387845-187388246
  hyper
gaaggactgagcatcccttacgtccaaaccaatggggcaggagcaaggcttagggagggctggagaatccgggagacgtcgagggagtctccttacctgcttccccgcggcagcagccagggacttctgcagaaactgacggagtctggggtccgagggagcgccggtgacacagcccagggccaggacgatggacagcgcagccagcgcgcactggaggcggcaggacagcatctcggcgccgcgaaagccgagctggagagtggctggtcaaactctaggcgcggatcagcaggcagcagcgatggctccgaacctcgctcctaaagcggcttgtgtgctctcaaccgtctccctctgttttaaactctctctctgacgtcaggctaggaggcgccccc

SEQ ID NO: 230089 - DNA, 1145 bp, Homo sapiens
  chr3:187455539-187456684
  hyper
ctttttttttttttttttttttttcctgttacgccgtcaatgcagcaggcaatgaggggaatgacacagccctctcattcccggaacgtagtcaatctcggctctgcggatttcacagaacacactttgcctattgccggctccaacaagaagtaactttccaggaagctgccggccccggcagccgccaggatcgctgcctgcgctgcgctggccgccggggattcacccagggaggcggggccgctggggaaggctcgcggggaatacagcacactttcccctaaatccctcgtccgcgccgagtgcagggctctcagagttcacctagtcccacctctcacccacaacagtttataaatggggaaggtcagacaagttagtagcagagctgggtctagaacccaggagttcgaatacaatccgaggctcatatcgagactttaagttgtccgattccgaagtttatttgcttttttccctctttttgccttccattctccctcacccccgttcttttaggggaatgtttgagcgagacttcaaggtcaaaagatggagtccctaggggctgagggtctccatcataggcgccccaggcaaggttggagaaaaactaaacagaaagccccttccgcctacgttggcaagaacgggaacccagctccacttggtttccgcccaaagtctttagaacaggagctgccaagccgtaaggatttccgaatccgatttccccgaaaccgtagagacacagcttggactcggcaaaggccggggccccgacccctgcgcgcgcactggcactctccaaagttgcctcgccttcctgtggccctcccgggaattataacccccgggtgccatgtcctaattggtctcggtagcaggctccggggtgcgctttcgggggctaggggacagcgaaagactcagccacaaaggccgcagtctggtcctaaaactagccagtggcgtcacactgcgccgctcatcccttctgcggcaagcggaagggtcagagtcggtctgcaaagaacgagcctttggcctcaaaatcctacattgaggctttctcaccccttcgcccggtgggataaaggtgaaagagacggttgggatttaataaggggtagggatgagaa

SEQ ID NO: 230090 - DNA, 1253 bp, Homo sapiens
  chr3:187456924-187458177
  hyper
ctacagaggctgttggattattggtaatctaataactccaataacccgctgaaaaatccaaagggaaatctgaaagtgtaaagcactgtttagggacaaggacaaggaattttaataaggctgcaactgccgtagtgaaccccgcatcaggggccctgccgtggggctcccggtctcagcagtgtttcagccaactagctgcacggctgcagacaccaccgtggtccggcggcagggggtgaggtcaaatcgcggagctgtttttattcttgggggaaaacactcttcgccctcttggctggggaacgggagggtgcaggagacgacagtaaataaaagcgaatttgataacgcgatggcctcgacagccgctttggataaccgaggtgttcggggacattgtgtcctgactttcatttctatcacgtttcctgccaacagtgctcttgcaagcctgcaagcttctaggaaatgcaataaaacagagggatgtgttttatcatcaagatctgaagaggagttgcagaagggacgttccccatacgctcagcgcgagacagccttccagaagggcccgaagacaatgccagcaaatcgcgtcccggagcagagatccctcggccgtcctggctggactgggctcagcctttgcaaaaaggctggcgggggaggggagaagcatgatctcctcaagcaaacaatgcctttaaaaatccgatctggaaagaagtcagccaaggtccttattcacgttaatgaagatggaaggcactaactgtccttggaaagcgatgagtcaaacttgaccgcgcttcaaactcgttcccagattcgtttccagtccgaacagaggcgcgtttctccgacgcggcctccgacggctcccgcagtgggaggggccgaactcgatccccgccgacccgggcgggggcgacggcgctgtctccccctgcagagcgcgcctgctgccgctaggggccgccagcatgcggacgcgcgtttgccatcttaagtcacgagctcggagaaagaaaactttacggaggaactgttgtggcacaaattctggcctatccacatgacccccaccccctcacacacacacacccggtttctcgccaggctactatgcagaggatgttaggaaggggaagagagcgatttcagaatcgaggctcgccctgcaagtctttggtccaggccttaacccccctcttaacacgcaaacccccgagctccgagacccacaccct

SEQ ID NO: 230091 - DNA, 1089 bp, Homo sapiens
  chr3:187458574-187459663
  hyper
tggtgtgttcgaagcgggttatttgtggtttttcttagtgcaaatagatgctcatcgctgagtgatgggcaagcagcgaggcctttctgattttcatccctcttgccaaaactttggaggttgtatgccatccccattggagggtgccctccttctgtcagtcctagcatctggtcagggtaccgccgcccgggaggtggaacggcgagcccaccgcccatggccgcgaactcgatctcagcccaccgctaggtggcaggccagcccgtccgagaatcgccgcgcggccgcagcttccacaccgatccctacccgcccctctttattttctgtctggtgggggcgagggttgggggtgtgattgcctctaaaagcaaagctagaaaacatttaatttagtgtatgtaattccgttcctcccgatgctcccgcctctagcaaccacaacgcggtatctggagctggtttcatgtatcataagttgatttctcccccagcctccgaaaagctttatgtactgggaagggaaagaaggtgcacttgtcttcaaaaggcagaatggcactcgacagtattggcagagattcttgccaaacactggtcatccagcaaagaaagtcgggaataaactcctgatcttctcggaggaaaggggcgctgggggccgagtgctggatcccactcaggctcactgcgcctggcaaagcgggggagtggggagtcgggtatggtcttttggtgaagttgtgggtctcggagtggacatcgggagggttgggaggggccgttcctggtttccactggggcaaagagaaaccagccagttctgccaccacgctgcaccctcgctgtgctcgcggcggcagcggcggtcccacttgttgcgcagtgctggaaaccggcacgcgccattcgatgttgattcacagagggctacagaccagcctaccattgctccacgccatccacaaacctcctcaacacaccccctacacatacgtcctgccaccgccggcaaaactacagcatttccagccactatggtgttttacaccaaaacatccctcactatctcggtatcagacaggc

SEQ ID NO: 230092 - DNA, 56 bp, Homo sapiens
  chr3:187461961-187462017
  hyper
caacacagagtcacgcagcgcccaaaatacaaacaccgcagcggccagaaatcccg

SEQ ID NO: 230093 - DNA, 223 bp, Homo sapiens
  chr3:187462445-187462668
  hyper
aaaagaccgaggccgatggaagagagccagcggggcgagcgagcgggcagcctccctttttgcctcccggagttacccagaaggacaggggaagggaaggaagaagaggcgaggaaaaagaggagggagggaagcggaggccaggagcgacggagcaaggaaagcagtttgcaagcgagaaaagagggaaaaaacacagccgcacgaatccagagagatcaca

SEQ ID NO: 230094 - DNA, 72 bp, Homo sapiens
  chr3:187463255-187463327
  hyper
taagaatcaacagagctcaattctcggaatttgagcttcggactttaccactgctacgtggcaggggaggac

SEQ ID NO: 230095 - DNA, 228 bp, Homo sapiens
  chr3:187871096-187871324
  hyper
cctcacgtgccaagcggacgggttggaagttggtctttgccagctctgacaccttgtaagttttgagtcttgctgggaatccagggcggggctcacgaggaaaatcttggaaggggatttcatggctggatctcttccactcaagctcagtgccctaatttgacgccttaatagtagacgcaggcttttccattttccaggagccccctgacgcggccgcttcctcct

SEQ ID NO: 230096 - DNA, 91 bp, Homo sapiens
  chr3:187871524-187871615
  hyper
cttcgcgggcacacgccttcccataccttacatggacaaatgcgtgcaggcaaagtcaggaattcaggcccctgacgtcagcctccagcgc

SEQ ID NO: 230097 - DNA, 833 bp, Homo sapiens; identical to SEQ ID NO: 40065
  chr3:189838066-189838899
  hyper

SEQ ID NO: 230098 - DNA, 61 bp, Homo sapiens
  chr3:190164468-190164529
  hyper
gtagcctcagctaccgctaaagtcagcataaaaactttcttaataccgtatgtttctgtca

SEQ ID NO: 230099 - DNA, 73 bp, Homo sapiens; identical to SEQ ID NO: 199262
  chr3:190231324-190231397
  hyper

SEQ ID NO: 230100 - DNA, 31 bp, Homo sapiens
  chr3:190231801-190231832
  hyper
ggccgtggccaatcgcgccgctccgggggag

SEQ ID NO: 230101 - DNA, 37 bp, Homo sapiens
  chr3:190232236-190232273
  hyper
cgcggttgtgggacgtctgctcgttgccgcccccatc

SEQ ID NO: 230102 - DNA, 83 bp, Homo sapiens
  chr3:190529734-190529817
  hyper
tctttgtacacgtccgctattgattcctaattatcaccaggagatggcgctgtgcattagtaaacatccggcttacaaaagta

SEQ ID NO: 230103 - DNA, 448 bp, Homo sapiens
  chr3:190580490-190580938
  hyper
ggagctaggagaggcgagttctaatctgcgggagctcccggtgacgcccagagctcccggcgagcgccgctctgtgatttggtgagaggctgtcaaaccggtgacgtgagccaggagtcacccagcagaagacaaagtcactcgcgctctgggcggccaccgcgccgggaccagggacctgccgatctggccaccggccgtggggcagaggcaggacctccggccctctcgctccgggtgcgcggcgctgcttcacacccggccccagtgtggactcgccgcgggcggggagacgggcggggagacgggcggggagacgggcggcgaccccgcagccgggaccgaggcgagggccgggctccctcccgctccacgcgcagcgcggggcagggccgagccgggccgggcgagaagatggtccaggtgcctggacgtggggtaagaaaag

SEQ ID NO: 230104 - DNA, 1364 bp, Homo sapiens
  chr3:192125784-192127148
  hyper
gggagcccactctccgggcttctactgacctggtctccgcctcaccggcctcttgcggccgctgcagaagcgcactttgctgaacaccccgaggacgtgcctctcgcacagggagcgcccgtctttgctggggctggagcggcgcttggaggccgacactcggtcgctgttggactccctcgcctgccgcttctgccggatcaaggagctggctatcgccgcagccatagctgctcagcgagggcctcaggccccagcctctactgcgccctccggcttgcgctccgccggggcgagggcaggacctgggcggccagggaaagggcagtcgcggggaggcagtgctaaaatttgaggaggctgcagtatcgaaaacccggcgctcacaaggttagtcaaagtctgggcagtggcgacaaaatgtgtgaaaatccagatgtaaacttccccaacctctggcggccggggggcggggcggggcggtcccaggccctcttgcgaagtagacgtttgcaccccaaacttgcaccccaaggcgatcggcgtccaaggggcagtggggagtttagtcacactgcgttcggggtaccaagtggaaggggaagaacgatgcccaaaataacaagacgtgcctctgttggagaggcgcaagcgttgtaaggtgtccaaagtatacctacacatacatacatagaaaacccgtttacaaagcagagtctggacccaggcgggtagcgcgcccccggtagaaaatactaaaaagtgaataaaacgttcctttagaaaacaagccaccaaccgcacgagagaaggagaggaaggcagcaatttaactccctgcggcccgcggttctgaagattaggaggtccgtcccagcagggtgaggtctacagaatgcatcgcgccggctgcggctttccaggggccggccacccgagttctggaattccgagaggcgcgaagtgggagcggttacccggagtctgggtaggggcgcggggcgggggcagctgtttccagctgcggtgagagcaactcccggccagcagcactgcaaagagagcgggaggcgagggaggggggagggcgcgagggagggagggagatcctcgagggccaagcacccctcggggagaaaccagcgagaggcgatctgcggggtcccaagagtgggcgctctttctctttccgcttgctttccggcacgagacgggcacagttggtgattatttagggaatcctaaatctggaatgactcagtagtttaaataagccccctcaaaaggcagcgatgccgaaggtgtcctctccagctcggcgcccacacgcctttaactggagctccccgccatggtccacccgg

SEQ ID NO: 230105 - DNA, 36 bp, Homo sapiens
  chr3:192127508-192127544
  hyper
ggcgcaggcggggcccctaggcctcctggggctacc

SEQ ID NO: 230106 - DNA, 126 bp, Homo sapiens
  chr3:192128084-192128210
  hyper
gtcttctgtctctccccttttctcctctctacgcaatcctacgtgattgaggtttggatgagaaattctcagaggcagagcgagggaactgcagcttgggtctgctccgtccggtccctcccacaa

SEQ ID NO: 230107 - DNA, 397 bp, Homo sapiens
  chr3:192231878-192232275
  hyper
ttcccagggcacccggttgaagcccaaggctaactgggaccctcctacttcagcaccaaggacagaaatcgctaaatctccaggggaaacgtacccctaaccaccgccagatgtctacttttcagacaaagcaagaaaaagaaaatatacctgccttgccagccatctgtttaaaagtcccctctcctgtggaacgcacgagcaacttttcggagacactgaacaactccaagtcgcgcgccgccctcgcaaatcgcagagagggccgcgagaaggtgcgaacgcaggtcacggccagcgccgcttggagagagacccgcaggtttcagcccaggcgcgcccggcgaaagccaacgcgctctccctacaaagcgtcgatgacttcagggatttaaaa

SEQ ID NO: 230108 - DNA, 63 bp, Homo sapiens
  chr3:192233286-192233349
  hyper
tgtgtccttgggtaagtcacttaccaccctgggcgtctccccgtcaatctgggtggggaagag

SEQ ID NO: 230109 - DNA, 313 bp, Homo sapiens
  chr3:192445296-192445609
  hyper
agctgtcctccgagcgtggtgctgcaggtgtagtgacagatcatcccactttgctctctggatgcacagcagatttgcatgggcgctggcacgcatgcgcagggcgtcccccctccccttttcaccgcctcccgctcccccgcccccttcgcctccctccccaatacggtcctcagttatcccagctgaggagctgtagcattcggtcacagggaagcgctgctaaaaataaacgccggaccggattttcctctgcaaactagaaaatggattggactagtactgcgtgcatcaggacgaattactgaagtct

SEQ ID NO: 230110 - DNA, 760 bp, Homo sapiens
  chr3:192634599-192635359
  hyper
gcccccgacgtctccgcggttggaaactctgggcacctctttcggccagcgctaagacaatacacaaagagcagggaaccggcgctcctctgcggccagagctccgcgcctagtcacggaagagctgggaattaagaattccgagctcagcgagagccctgaagaagcaccggaaatgcttccgatcgcttcataagagaagtcaatttgcaaatcaaagttgcaggaactccggacgcctagactacttcagcgggttactcgggaacacccaacaagtttggccaccgggggctcggcatgacagcgccgcgccgcgagacgacagaagcaacttgtcgctcgggcgccaagccagagccctgagccgtctccgctcccaagctcgggagagcacccaagagccggcgtcgggaaagcggaggtccctgcctccggcagccaaatccctcaactgaaggcacctcaggggctcacctggactgcactcgcttccaggggcttcccccaacagtgcaacgcttcaccgcgaacgcctcacctgcctgccagccccaggtggcggagaaattaacaaaagagcaagcgaacagggggaaagggagacccggcgtaaagtatagtaaggaggggagggcaggcagctcggctttcggcggagaaagaagagagaggcggaacagagatggcttatacccaaggcaccggctcgggaaggcaacccagaagggaagaggtcgagaagcggcaatgggttttc

SEQ ID NO: 230111 - DNA, 312 bp, Homo sapiens
  chr3:192635856-192636168
  hyper
ccttttctccggccccacgcccgccccgatgctgcgcgtccctgccctgccctggccctctctggcagcggcaacggcggtcgtagagccaactggagcctcccccgggcgaggaaagtgaagtggaaacaatgtgaaattcaccagctctgaaatcaacaagctgccggctccggtgttacggagccagcaccagcgtctccatttaaagggacagcgcacccagtggaaaggaaaataaataaatgacagaggtctgcacgcatataccacttgccaatccgtacttgggaagacgcgcgaggtgtggat

SEQ ID NO: 230112 - DNA, 196 bp, Homo sapiens
  chr3:193310837-193311033
  hyper
ggaagcaagagggcggggccccgtgagaggcgatggattgctccagtccgttcccgacgcactgtgcgcatgcgctggtcctccgcggaccgttcgtgctgcccgcctagaaagggtgaagtggttgtttccgtgacggactgagtacgggtgcctgtcaggctcttgcggaagtccatgcgccattgggagggcc

SEQ ID NO: 230113 - DNA, 174 bp, Homo sapiens
  chr3:193506053-193506227
  hyper
ttcacggacactcccgtttcagtgtgactgcctttggggcctatagggggcactaaggaactatgggatcttgttgcctctgtggcggggtcagcgctcagacctccagccaacccagccagcaagaagaaggaatggggctggggctgggacaagggtcggttatagtgggta

SEQ ID NO: 230114 - DNA, 103 bp, Homo sapiens
  chr3:193721474-193721577
  hyper
ggcgtttccctagggtggagctcctgggcctgggttgggcctgggcgtgtggctccgtgatcgtaagtcccctctggctcttgcacaacagaccgaggctgga

SEQ ID NO: 230115 - DNA, 477 bp, Homo sapiens
  chr3:193775945-193776422
  hyper
agaaaaaaagaaggaaagagcgctgaaggacccacccagggaggaggctgagccgcgctccctctagcctccccagaggtgcattcgttaggttcccgccccggccccagccccagccccagcatcagctccggttcctctgcagacgttcagccccttcggaaatgtaaaacccgggaagcgaaagctgcggcgacctcccagagcctctcaggcacgcggcatctctccccaccggcagcgccttgaaataccaaaggcctagccaaagatggaaccgttttgttgggagctcgggtttcccccgccgcgaggctgagccggtggcgcagctgctcaaaggtcacgcccgagacacgtccgcacaagcccgggtggcggggcgggcagcggggagagaagaggggagtggggagggggacgggggcaggggggaggggcgccaccttctccagggccctgcggggtgggctccca

SEQ ID NO: 230116 - DNA, 211 bp, Homo sapiens
  chr3:193852799-193853010
  hyper
cccgcctccctgcccccggggcgcgcgcacacacactcactcacacacgcacgcacacacacatcctcccggcccggccgcagccgcggcggcaataaaacatcctggcacgtgctccggctccaggcgcgcccacgccggccggctgatgtcaaactgcagctcggctggtgtagctcttaaagggcccgcgggcgccgggggccgaggc

SEQ ID NO: 230117 - DNA, 151 bp, Homo sapiens
  chr3:193853736-193853887
  hyper
ccctgggctcaggcgcgcgccattggccgccagaccttgtgcctggcggccaatgggggggcgcggtccacgagcggtgccgcgtgtctcctcctcccattggctgaaagttactgtgggaaagaaagtttgggaagtttcacacgagccg

SEQ ID NO: 230118 - DNA, 304 bp, Homo sapiens
  chr3:193854067-193854371
  hyper
ttgtgaaagtctcaagtaaaagagacacaaacaaaaaattctttttcgtgaagaactccaaaaataaaattctctagagataaaaaaaaaaaaaaaaggaaaatgccagctgatataatggagaaaaattcctcgtccccggtggctgctaccccagccagtgtcaacacgacaccggataaaccaaagacagcatctgagcacagaaaggtaagggcggtacctgtatctctttgcagcccctcaaaattaagtaggggttggggggcttctttctgtcttgaaaccccgggatggcagattc

SEQ ID NO: 230119 - DNA, 158 bp, Homo sapiens
  chr3:193859073-193859231
  hyper
ccgcgcgcccgccggggcggcccgggggttccagggaggccgcccggggccctccgcccgggcgggagccggccagggcggccacgccgggccagccctggcggccctgcggccaaggtggttcgcttagcaggcccggctgctttctggcaggaaat

SEQ ID NO: 230120 - DNA, 40 bp, Homo sapiens
  chr3:194207834-194207874
  hyper
gatttataggccccgcccacccatcgcctttgccaccctc

SEQ ID NO: 230121 - DNA, 246 bp, Homo sapiens
  chr3:194393108-194393354
  hyper
atagatttcctggcgaatgtctcgagtttggataaatgactgagttaaaagaatggtccattcttaatttgtgcgtcggtctttagcgtccggcgagaaactagagcacgtcggaaacatggcggttcctattcgcggcactagctccgccttccgctgcttccgtcaggaggacgcggagactcggaggaagagtgtttcggtggcgctgggacgggggcgtttcccagcgctggttttctgctg

SEQ ID NO: 230122 - DNA, 630 bp, Homo sapiens
  chr3:194406436-194407066
  hyper
ggaccggtctccccgctccctcgaccaatggctgtcacgcggtccctttaagaaaccaggaatccgcccggagtcggagcccaaaacagatcctcttctctgctcctcccctgtccccgcgcggcgaatggttcgcgccggcctatatttacccgagatcttcctcccggacggcaaggatgtgaggcaggcgagccggacgccgctcgcagcaccggagagggcgcactgcaaaggcgggcagcagaccgtggagagcccgggagcggagctggacaccgcctcggagggaagaaatgaggtagcggcggttcccggacccggccatgcccgtcccctgttctcggagcccagcgccgtctcggccaggccagcccggacactgagcgggccgagcgcgagtccccggcgtccggcggagcgaagatgcagtgagtccccgcgggactgctgcgcggggcccgccgcggccagccggacccagcatccgaccgcactttgggcgagctgctgacttgagaccagcccaaacggggggctttccatctccagcacccctcggaggtggggagcaccggcccctaggcacactcgctgtagagtttccgcgggttttggccccagtcctga

SEQ ID NO: 230123 - DNA, 1840 bp, Homo sapiens
  chr3:194407279-194409119
  hyper
attctgtgtgcgcgcgtgtctcccccgcaccaaccttttttgcacactcgaagctgaatattttcttttttagagaatttacccgcacctcctgcggggttcctaagcactctctctgctcccctccccccaactccctaccacagggccgctcccagtagttttattcttcgatcttgcccgggccgagcctggcaggggccggtggctcagcgggcctcgcacccggcgctccgccgccgccgccgcccagctgcgccggggcgccctccggagatgctgccgtggaagaagcacaagttcgagctgctggccgaggcgccgccgcggcaggcgtccaagcccaagggctacgctgtgagcctgcactactcggcgctcagctcgctggcgcgggcgtgccccgaaggcgcgcttagccgggtgggcagcatgttccgctccaagcgcaagaagctgcacatcactagcgaggacccaacttacaccgtgctctacctgggcaatgccaccaccatccaggcgcgcggcgacggctgcaccgaccttgctgtgggcaagatctggagcaagagcgaggcgggccgtcagggcaccaagatgaagctgacggtgagtgcgcagggtatccgcatggtgcacgccgaggagcgcgcgctgcgccgcccgggccacctctacctgctgcaccgcgtcacctactgcgtggccgacgcgcggctgcccaaggtcttcgcctgggtgtaccggcacgagctgaagcacaaggccgtgatgctgcgctgccacgccgtgctggtgtccaagcccgaaaaggcgcaggccatggccctgctgctctaccagacgtcggccaacgcgctggcggaatttaaacgcctcaagcggcgggacgacgcgcgtcaccagcagcaggagctggtgggcgcacacaccatcccgctagtgccgctgcgcaagctgctcctacacggaccctgctgctataaaccgccggtggagcgcagccgcagcgcgcccaagcttggctccatcaccgaggacctgctcggcgaacagctggagcaggagctgcaggaggaagaggaagaggagcaacccgagggctgcccggaggaggaggagaaccgtgcggcagagggagatccagcagaggaggaggccgaggcgcagcgtgcgctagtggtcgccatgcactttgagtgcggggacttgttggatactctggagaatggccgtggggaggcgctaggaggcggcgggggctccctgggcccgggggccgggccgccgcctctgctgctgggcagcgcctccgacatgaaggctgagctgtcgcaacttattagcgacctgggcgagctcagcttcggcaacgacgtgcgcaccctgcaggccgacttgcgggtgacgcgcctgctgtcaggcgacagcacgggcagcgagagctccatcgagggcgggggccctgacgccacctccgccaccgccggggactcgtcccgccaggccgacggcgccagtgcagacgagccccactcgggctgagctcctccgcgcgtcgccggcgctccaccgtggctacccatccgtggtcccgacaacctccctgtcccttgcccgcccccaggaagggggaaatggggcatttggggcccagacctacacttggagcccaggtccagcgttcccccgaccgctttcccctacctcccggcccccgctcccgccccagcacttttggctctgttgcgcgtggggatgcggggagatttgagaggggaaaaccccgccaggagggagagagaggcacccctctgggatgcgggtgagggaaggt

SEQ ID NO: 230124 - DNA, 252 bp, Homo sapiens
  chr3:194827128-194827380
  hyper
gaaaggttctggccccagcacggccccgcacacaccctctctcactggacttgccccttcccttctcccgggcctcacggcggtgtctacgccgggctcgctggaaccttccagggctcggtgattcggggctgcggtgggagggccctgagttcttagacccgcgtgcagatccggccgcgacacaggcgagacccctgccggcgaggcgcggaactgcaggcacgccgcggcagggagggccgcagagcg

SEQ ID NO: 230125 - DNA, 194 bp, Homo sapiens
  chr3:194992081-194992275
  hyper
ggctgagaaatggcgccctacgcggcgagccccagaggatatccaagctgagtgttgaagggaatggaggcgcccgaacagaggaacttaggttagccaaaagcgaagctggaggcaccaagaggtaaaactttaatctctgcaccttttttccctcaatttcttggaggctttaagccgtctcggcctctccc

SEQ ID NO: 230126 - DNA, 287 bp, Homo sapiens
  chr3:195163846-195164133
  hyper
ggcggccaaggggcggggcatccggcagcaccgcctgcgggcgcccgggcaacgggtctgagcgacggcaacccgagccaatgagcagcgcgaccgtgggcacctccttgccacaaccgcccccgagggccaaccgggatgcgcgggcgtcgctaggcgggacgcaccggttgctgggaggccggcagctgaggttccttgggaaggaagtcacgtggctgcggccgcgcttccctccgagcccccgcctcttctcctgctccccgagccccgccctgctgagctgc

SEQ ID NO: 230127 - DNA, 1081 bp, Homo sapiens
  chr3:195621965-195623046
  hyper
ccacataaacacaccgctctctgtcccctggcccaggagcagacactctcactcctgaggccgccgcagggggcagggctgagcccggctcacagcagacgaaggggtctggggcccaggtatctggctatcccctagccttccccattacctgcggtccctcctcgcccccagccaggcgctggtaagcagatctctcccccatggagccccaaatcccagcggctgcggtcagggagagaagcagcgcccgcagcccccgccccgcagcggcaccggcagcgtcactgccctgcgtcctggggggccgggcctcgagcatcctccagaagtgcagggccgctactgcgtctcagcccccatagcctcatccgccatcggccggcggccgggtggtcgcgcccctcctcctgccggcctgcggccattccctcctgcagcccgtcccagctccgttcctcctctccggggcgcggctcccaccctctcccagtgagccagctgtgccagccccgggctgacccccaccgagagccggggctctgccttcgccggccgcggaaccgggctccactcagccctcagcccgcctccagggccccagagccaccaactggggccttggggattcacgagtcccccgtattcacggtaaggggccatccgagaagcccacagcagaggggcctccgtccgactccatctgagaccccctcctccgaggcatcccggggctgcagcccaccccgcccccagcctgccccggcggccactctgctcccagaacgccgggcgcccacctgccccgcagctcggccctgcgctcagccggctccgcgccgcctcccagcgcccgcctcccgcgcaggccacgcccccgccccgaggcccccgcggccggttccccgcgcgccactcccgcaacgccgcacgcgctgtgcgctgggcacgcactgacctccttgacttcagagcggtgacacgagggcccggactcctgctcaaaagccgcccaacacaggcccacgcgggggtgccgcgcccagcactggcgcgaggccatcgccggcacaggaagtcc

SEQ ID NO: 230128 - DNA, 142 bp, Homo sapiens
  chr3:195808865-195809007
  hyper
tgaagggaggacacgagggtcggtgtagttctagaagcccgcactcacactagcgcgtcctccgtcccgagccgccacccgatatcccgacgctctgaggggatggcggcccctaaccggcggtttatagcctggccccgcc

SEQ ID NO: 230129 - DNA, 183 bp, Homo sapiens
  chr3:195809187-195809370
  hyper
gcgcgatgggcgcactggcctctgcctcggcgccttcctccaccctggtagcctggcagcctccgcctgaccttgaccaacctccagtccctgcagtgctaggtccaatctgttggcgttgacgcttaaatgttggatattgcactgcggcagtgccttgaaatgtacgtgcaggatggaatg

SEQ ID NO: 230130 - DNA, 158 bp, Homo sapiens
  chr3:196014679-196014837
  hyper
gacacagtagttccgcctcctcagaggcccccgggatgaagtgacccagcagaaataccagagaccggagacggaatggcccagggtcagcctccacccggaaccggaggatgcagcgaagacgtctccttgaagtgggatacggatgtgaaccggcc

SEQ ID NO: 230131 - DNA, 175 bp, Homo sapiens
  chr3:196158444-196158619
  hyper
caggaggccccggcgccatcgtctccgtctttatgattttattatggggaggtgggaaacgccaccctggattcttccaggcctcccctattcagcttgggggttccccctcattcttccctcaaagcctcagtccctgaggtcctcctcagcaccccccgcttctggcggcctg

SEQ ID NO: 230132 - DNA, 42 bp, Homo sapiens
  chr3:196230643-196230685
  hyper
gcaacgtcacaaccgcccgccaaaatcgcacttcccacccag

SEQ ID NO: 230133 - DNA, 81 bp, Homo sapiens
  chr3:196366355-196366436
  hyper
gcccctagctggccgcccccagccctgccaaggcaccaacgcaagaaagccgggggagcctcggtcgcattgctggaagat

SEQ ID NO: 230134 - DNA, 46 bp, Homo sapiens
  chr3:196466463-196466509
  hyper
gtataacagcaatcgtctgtcagcgtcttccgtcggcagagacctg

SEQ ID NO: 230135 - DNA, 522 bp, Homo sapiens
  chr3:196755864-196756386
  hyper
cggggcgggggtggcggtggcttcatcgtttgcattgatgagtgcgtcgcctgcggccacagcggtgccacgaactccatcccctcggcggtcgccgcccgcgatccccgcgagccgctccccgaggtcccgcctcccgtcccaccatcccgggccctgactccccggggcgccgacgcgaggggacccggcctccgtctccacctccatccctgcatgtgccagaaacccccgggcggactcccgcgcctgccggtcagtccctctgaatcttctcccgcgggggctcgggagaaagagctgctccgagcccccaaagtcttcctgagttcctgcgcccgtcgggaggggccgccctccgggagctcctctccacaccccgaggcctccccaccacgcctcagcccgcgcttctccttggagcgtcggaagcctcgggtgttcgaggccgcctcctccaagaagccttccagacttccccgtctgcgcttcagtgctagttccctccgccgtcctcactcg

SEQ ID NO: 230136 - DNA, 239 bp, Homo sapiens
  chr3:197023961-197024200
  hyper
caaagttacacaaacgattctaaaacggcaatcaaaaaactgacacacggaaaagcaagtgacatcgacaacagagttacggaataaactctcaccttgcttccggaccggcatttttctccagaatcaggaagagggcacacacctttaaaacacacaacggaaaggaaaaaggatagaatcatgttaaactagcattttcccctatcgaaatagaaaaccctcgcagcctatttgaa

SEQ ID NO: 230137 - DNA, 677 bp, Homo sapiens; identical to SEQ ID NO: 199283
  chr3:197025626-197026303
  hyper

SEQ ID NO: 230138 - DNA, 502 bp, Homo sapiens
  chr3:197183233-197183735
  hyper
ggaactaagggaagcggaagtatcagtaaggagcctccgacagaaatggtaggctggcaacatcctgatcagcagcagaagtgattttcccgtgtccccgtgtccctgctcaccacccacgctcccgagagctcccaggccaggcctcacagggctccttccctgtgggagcggaggtttgccgcgagccatcgcccggcacgggacacgtctcagggggaaggaacacgttttctctcagactgagcgctcgctgaccccggctcccaggcaccacgtctaccacgtgactggattcctgcggccgccgcgagccgggagaattctaatagcgcagatgcccggaaccgctgcagcagcccgagccggaagtgccagactcctacttcccaccggatgcggggctcggcaggctcggcaggctcctccgcaggccacacagccggcggcacaggcctcctgcggggaaccccaccccaccggccagcccggtgctctgccc

SEQ ID NO: 230139 - DNA, 293 bp, Homo sapiens
  chr3:197237062-197237355
  hyper
gctgcttgcttctttgttcccggtttccgaagcgcgaatcccgaacgccgtgagaaacctcaggctcgggcggcagcgcgggagtctggggcgctggaggccggcgccggctgcggaggaggagcgccctctagcggcaggtccgcccagggagaggcggaaacgcggagtctgattcgaaggcgggcactggggaccctgccccgggccgaaagccccctggaggacagtggtgtttggcttcggtcccaacatacaggccctgggcagtcgcagggatggcagctttcaaa

SEQ ID NO: 230140 - DNA, 246 bp, Homo sapiens
  chr3:197476866-197477112
  hyper
gtgggagccacggcgacttcttcgccgccgccgaaggcccgcagcaatgaaaacctcgacaaaatagatatgtctttgggtgaggggccgagttggaccgagttggagtgcgggggagggcgcgggtggaagccggcggcgcggtttgtgggggcaggggcggtcggcagcagttgccggcggagttttctcgctggtgggcggacccgagcggaggcccggaggacagccgggagcgcaggctcg

SEQ ID NO: 230141 - DNA, 190 bp, Homo sapiens
  chr3:197517983-197518173
  hyper
cgcatcatgtgggcgggggcaagcgcctggctgcgccggggggcaccacggtgctgcccatcacgggaaccgtccggggtcggtccgtgagcccctttctccgcccacccagcggtccggccgcgcatgcgctgagctggcgggcccgagtgttgtcggctgggaaatggcggccgcgggcttggtcgct

SEQ ID NO: 230142 - DNA, 1179 bp, Homo sapiens
  chr3:197807082-197808261
  hyper
ctgagggtgcccagcgccctccaaggcccccgtcccaggggctgcggggctgcggggaagccgggcctggggaccccctcccaccccggctgagcccccgctacctgtcctgggcatccacgtcccggcacctgcgcgccaggcggcgctccacctccgcggcgtcgcccttgagggccgccctgtggatcttccgcagttccgcgtccctggtgtggtacgcgggacccgggtactcgtggtcgatggagcccaggaccgcccggcccgggcgtctcccgaagctgaagagcttcctcatggggcgacttctcctcagacgcccaccaccggctcctgagcccccgcggctcctcgtggcctttccactaaccctaaccccaaacccgagatgtagctcagaatccgcgacccggccgggtccaccacagccttcagcagcgacactcgcagcctctgacctctcagcccgcgaagccgttaggcgcgcgcctgcagctcagcgcccgcgcggactccggaagccgctcccaagcccgcgctgccggcagggggcggctgcggctcgggcgcaggcgccgctggcttgcgggttctcctgggctcgcccgggacgtcccgtagtcgcaggcgcgcaacccgcccggcctgagggcccgcctggccgtgacccccgccccgctcctcctccgaagagagatcggggccgctggcaggggccctccgcagccaccagggatggggctgtggggcagttcccgccccggtgcagccgccgccgggcagaccgcctggcttggctgcagccgcggcatctggctccggttctgcgaggctgggagctccagcgagcttgggagctgccaggcggctgctgcgagcaggcagagggcgcctggagcttgggccctcaggcggcggagcatggcctgggcggcctctggatcgcgagtgcacctggcctgagagcctgccaggccctgcccccgctcggctcctcctctgccggagctccggaccgctagccaggggccctctgcagccaccgggaatggggctgagggcgggttcccgcccctgtgcagccgccccagggccgactgcctggctcggccgcagccactggtacatctggctccggttctgagatgttgggagtgcgggcgggctcgggggttg

SEQ ID NO: 230143 - DNA, 99 bp, Homo sapiens
  chr3:197808321-197808420
  hyper
aggggcatggcctgggcggccccgggatcgccagcgcgcccaactgagggtccccaggacgtacctcccgccccactcctccaccgcagggagttcgag

SEQ ID NO: 230144 - DNA, 602 bp, Homo sapiens
  chr4:107282-107884
  hyper
gcgccccgcagccccgcacgaggcgttcccagggccccggcgccccggccgggaagagccgcccaggaatcaggcagccgccgggcctcgacctgcgacgaggagccgacccgccgtgtcccgtgagtcgccccgggccctccgcccgcccctccgcgctgggcagggccccagcagttgtcctcctcccgctcccgggctcggcccgggctccatggggctccaggcgggcggcagcggccagcggtcccctgaagggccgagtcctcccttccctcctcctgctcctcccccgcgcggtcgccgagggcgagaccgacttttgccgcaaggtgcaggcggcccgggcggcggcggctcgggaaacgcatggccctggggacgcggcgaggacaggagagcccggctgcgaggtcgggaccctgaggcccaggggcgggtccgcggcgtgcggggccctggcggctcctctgtgctgcgctgggctccgggcgcgcgggatgcgggcagcggcgggacggtccacacgggcggggcggccgggttcaccctcctgttccacccgcggggtctccttcactcgcagccgccatcgccagccc

SEQ ID NO: 230145 - DNA, 1901 bp, Homo sapiens
  chr4:330311-332212
  hyper
cggagcggatgggcctggcccggctccaccccgcggggctccgcggctcaacgggtcgcccaggggcgcgggcccggcttcgtcctcgacggtgtccgccccggccctggctaggccgacggcagccgggtccgggtggggctcgggctcggggcgcgcccctcccatctctccagggtccgcgtcctcgctgccgccaggtcccgccgagatccccggtggccccggctccagcggctgcagcgtcgccatcgccgggcagaccccggccgacctcaaagcgaccgcgcggtggggccggcggggactggggctgcgcagcgcggcctggggtgggggcggcggggcccccaggagctcctgggaaccgagggtcctggggcggtcccgccccgcacagctccgggtgagcttggggagggagacacactctcagcccacctcgccccgcccgacagcgctccgagtcctgagtcccctcacccccattctacagacacgaaggtgaagccaaagacgggacgctcacttcctgagaatttgctgcctgctgcgtggacaccaccgacctattgtttacagcggtcagggacccgccccccagacccccaggaccgcgcttccgggggaggagggtgtcctcagcaacggtgacccgcaccaaagccctcctcaccggggtcaccgccacagccggtgcgaggcccgcagggcgctggggatgcgcgaccgactcccgtgaacctgctcctcgcgcgtcagggagagctgtgcacccaactaggctctgtgaggacggactgaggtcggcctgcaggctgcggccccgaaggcaggatttgtggagagatgattcgcgagccttggaggaaggatgggctgtgcgtgcgtgggtgcgtgcgtgtgtgtgtgtgtgtgtctgtgacttttgtatgtttatgtgagactgcgtacgtgcgcgcgtctgtgtgtgcgcgcgcgcgtatatgtctgtgtgtgtgcgtgcgtgtataatttctaaatggacgtcaccttacacatcacaaggttaaaaaatgacccctgggctgtgccaggccaagcacgaagagaaagccccgcctgaaactgcctggaggccccccggctgtcactctcgccacattccgtggagtatgtggttgcaacttctgtcactcaaggtctgatggcggggagattggagccgtatccaatcagcgcactggagtgaaaactgcccaatcaggcacgcagccagagaggaggcggtggcttccgggatgtggcgcgggtctttgcgtctggctactaccagaccgcgggttaggggcttcatctctctgcgttctcagttgtgggaggccttggtgattcggccacagctcagcctccgtcgctctgtgacctgcgggtattggatgattggtagctaagactcccgaatacttcagaagtggggaaatggtgagtgtgcggggcagggcgtcccaaggctgaggaggtctcatcggagctggcgggaaatggcggcgggaccgagtctgcgaacggagtccccgctgccgccgctcagccctggggcctcagtaccctccggtgagggacctgggctcctgtcggtccccgcacagcggctctggcccagcctgcagccctccttgtgcagctctgcgcccgcagccccgcaccttccccaggctgtggggtgaggagtagcttatctggaagccgcccgcgcggcgtgcgcgatgccggcgtgggaggagctgtgggagaagctgtggtctggggatcccgtccctgctttaccctgttcggaatgagatcgaggccccatcaaaacagagttcatgtgagcaaatggggactcattaatgggacagcgccggccgtggctcgtg

SEQ ID NO: 230146 - DNA, 31 bp, Homo sapiens
  chr4:379916-379947
  hyper
catccgggatctggcgcggcttttgcctttc

SEQ ID NO: 230147 - DNA, 236 bp, Homo sapiens
  chr4:380158-380394
  hyper
ggaaatggcggcggcgggaccgagtctgtgaagagagtcccctctgccgccgctcagccctcgggcctcagccccctccggtgagggactctggtttctgtcggttcccgcagggtggctctggcccagcctgcagccctccttgtgcagctctgcccccgcagccgcgcaccttccctgggctgtggggtgaggaggagctcatctggaagacgccgacgcggcgtgcgcagtgg

SEQ ID NO: 230148 - DNA, 234 bp, Homo sapiens
  chr4:492842-493076
  hyper
acctcgccgtgggcggcgaccgtcgcggactcgccgggaagacggccccacggagccgggaacaccgcccgctgttcgtatgtccgaggtgacgccccgctgtggcgggctggcggaagtgacgcgctgctgtggcgcgccggcggacgtgacgccactgtcgctgcgacgataaggcctggcgttattgcttagaggcggctacctggagccggaagcgcggctgcagcaggg

SEQ ID NO: 230149 - DNA, 926 bp, Homo sapiens
  chr4:568246-569172
  hyper
ctgaattaccagctgctctgcgtctctgtctgctcttcctccgtgggaagtcgccgtcctggggcgctcgctctgtccccctcgcctcggaccaccaggcagagcagccccagggtttggacttgccaagaaaagtgcagtcgggctagccaagcccaaacatttattgtaaacttgaaaatggaatccagatatgaacgacacaaataagaagagaaacctcccagatacagaaatggtcacatcaggggccccctcctgtggtcacggagcccgcagagggggccaggccggaggctgcaaagccacgtggaagaggcggcgcccctgaggcctggccctggaccccgccccgctgcccgtcctcccttgccgcgggggtcctgagcggggcggggtgggtggaacgcaagcgcggtccgcgggatgggggtccggcccgcgggatcagcaggcccgatgggtctcccagggccgcggcgtctcgcagggcggccggcagcagtaggggtaggaggcgttgaggtcggggtccgagggcgcgtaccccggcagctccaccgacgggtgccccccgcagcgcacctccgcgcccgcctcgtccagcgcgtggaggacgcctacgttgatgtaggagaccgcgtggtgcgccgcgaagcccgcgcagtccccgggggcggccaggtccgactcctccggggacaggatggaggcctcgctcggccgctgctgcagccgccgcccccgccggccccgccggccccggcgcgcccgagaggcgggcggctgcgcgcggagcccggagccgccgcggggccgcgccagggcccggcctcccctccgcctgccgcgccgaccgcgccgggcctgcgacgacttgtagttcttgacgagcaggaggctgagcaggcccagcaggcactcaa

SEQ ID NO: 230150 - DNA, 83 bp, Homo sapiens
  chr4:569352-569435
  hyper
ggctcgaacctggcgcccgcgggggcaggcagtagtgcgagtacttgcgctccaccagggacacggtgtcgccgtcgatcacg

SEQ ID NO: 230151 - DNA, 159 bp, Homo sapiens
  chr4:570311-570470
  hyper
ggcgcgggccgctgcggaaacgcagctctccacccccagctggctctcccggaccccctgggccccaccctcagcgctccccaccgctcggcgcccctgcgtctgcgctcccctctctcccctctctatccactgggtctgggccgcacttcccgccca

SEQ ID NO: 230152 - DNA, 1039 bp, Homo sapiens
  chr4:570831-571870
  hyper
ggttgttcaagggatggggacgatcagggtctctgggaagtgctgacgtgtgcgcgtgtgcggtgtgttgcttgtgggtgcgtgtgtggtgtgtgcatgtgtgtgcgcgcgcgtgtgtgcggggtgtgccgtgagcgtgtgcccgcggttcgggggatgagtaggggcgctgacttttaggaccagccatttgagtcaagctggagacgacgtcttagaacctaggatgagtctcgtttggttttagtctgcaaagctcgtctgcatcagacaggaattttccccagacgcgggtgcacgtgaattaattcatcagaaggcggttcacggcctgagtgagggggacgagggcggcgaattcctccgcctcattcctaccctgacgattcgaggtgggtgagaggaaggcgtggggcggctgggtgcgtggggtgggggaaggtcacctcttcggcctctctgggccctccagcctcttcctgagaggagctcgcctcggccccttggttggggggatgggagcgtctccggaaggccctcggccgagcagctgggcctgcacccctggtcccttccagttcgtttctgctgcggcggcaagaggctggggagccgatgactcaccctgccggctaattgcagcgttaaataactttgcgccggattcggtggctgcagcagggaacgcgctccgggcgccgggggaggtggagggacgccctgagaacgcacctccgtccctgtcaccagccttagcaagttctggcctgtggagccgtcatccagagcgcacagcttcatgcccttgaagggcgcagtgtgtcccgtggtgcccggtgggcccggacagagaccccagaggctctgtctgaaggaagctgcacccacagactccatccaggcagcgcgggcgcggtcctgtcgcctacctttctcggaagccatctgcccatgtgaatctatgtgaaggcccttcatgcgctcctggacatctgcgtgggatttacttcaactgctatcgctgcgaggaggacgagca

SEQ ID NO: 230153 - DNA, 79 bp, Homo sapiens
  chr4:667540-667619
  hyper
agctgattccactatcggggtcacgctcggtggaggacacggtcctgcagcctcgcatgcgtcccaagcccccttccag

SEQ ID NO: 230154 - DNA, 457 bp, Homo sapiens
  chr4:779829-780286
  hyper
agcgatccgaaccccggagtccgcgtgcaggagggggacccaggccccgccgccctcgccccgcccgcagccccccgtctgctatggctgtgctcctgagtgcgggcccgacaggcgcccaccgccgcgaacgcgcgcacaggggtggtcgcggggctgcccttcggcggccctggcctcgggcgctgctgggtgggcggtaaacagcaagagaaaggggcgtcccaggcgatggggctccagccacccgcgggcagaggagcacggggcggactgggggggtcctgggggcgcgcgccccttgccgggtgagggaggcggcgggcgcgggcagggcgggcctggggctatggcttatatcggcgtgggggctgcgctctgctcgtccctcaggggcctccgcggaggatctgtagggggaggggcgggggctccgcggggccgctgtcccgcgcgc

SEQ ID NO: 230155 - DNA, 344 bp, Homo sapiens
  chr4:785955-786299
  hyper
gcagggctgcgcatcggaatgcgggcctaggaagcccgccagggctggcgctgtggtcaggagcaggaggggctgggccccacagagggagcccaacccggagcccccacccctcacccctccgccactctgaagcccccaaagggtaggaggcccagggggacgcccgcccctcttccgggcagccccttccacccaggcgggatctgggtccccgctggactcagggccgccttcccgcaggcggggccggcccggcgcgcaccttgtctcggatgccctggcgcacggcctcgcgctccgcctccatcttggcgtacttggccttgcgctcctcctccgcc

SEQ ID NO: 230156 - DNA, 155 bp, Homo sapiens
  chr4:819437-819592
  hyper
aagcgaggaggaggccgggcgcgggccgggaccgcgggggccgcttcagcaccgcggcagtggacagcgcccgccccggaccccgcgcgcgcggagcccgggagagaaacgggggctgcggggagaagccggggtcggggggagaaacgggggcc

SEQ ID NO: 230157 - DNA, 143 bp, Homo sapiens
  chr4:926347-926490
  hyper
cagctcccggtaccgttccccacatggtctgttttgtgggaggctccttctcaggtgtctccggtttaagcgcttcgccatcctctgggtggagtcagcctcccgtttgctgttagcgccgcgtttgcgaatgggttcgcgaa

SEQ ID NO: 230158 - DNA, 244 bp, Homo sapiens
  chr4:995826-996070
  hyper
cggcagctcttccccaagttcgcggacacccccatttacaacgacgaggcggacccgctggtgggctggtccctgccacagccgtggagggcggacgtgacctacgcggccatggtggtgaaggtgggccggcccaacgccctgcgcgccccccggccaccttcctcccgagacgggacaggcgagcggtggccgcgccacccggtcccagctgccctggacacccgcaggtcatcgcgcagca

SEQ ID NO: 230159 - DNA, 123 bp, Homo sapiens
  chr4:996993-997116
  hyper
ggggggtggggtccggggcgggggctccgaggcggtgtgggtgggaggtggagcggtgggccgggggcgttcgccctgaggtcgggccgagcgtccccagctcccctggagaaccctgaggac

SEQ ID NO: 230160 - DNA, 291 bp, Homo sapiens
  chr4:1004498-1004789
  hyper
gctggaggtgcggcctgggagccctgcgtgctgggccctgggcagggacggcaggcgaggcgtgtggaggaagagccgcgaagagctgggcgctgtcttctccacgcctccgtttcttcatctgctcctggggccgcctgcccggtagcggagattgaatcgcatgttgacgtctattacgatgattaatgttcttgtcattcccgtcactagcaggtgagaggctgggaggcctcaggtgggaacatacctttggccaaaggcaccaggtaacccgaacgccccggggag

SEQ ID NO: 230161 - DNA, 333 bp, Homo sapiens
  chr4:1049472-1049805
  hyper
cttcacgtggtggtcggctgctgttaactcggttaactcgagtgagataacaaagttctttgacactttttaggtaaatgcaaactaaaagattagaactaaccccataagcctcttttccaaccctgtgtggtcccggctggcgggagagacctgggctctgagactctctgggagccacgtgcacgggggcgtctcctgcaggagaccccaccctcctgacggatgaggaggctccacccacgcaggccgcatctgcagggtgagctcaggcccggaattcatctctggacctgacggagattcacccgctgaagccggcatcacaggccc

SEQ ID NO: 230162 - DNA, 1219 bp, Homo sapiens
  chr4:1165383-1166602
  hyper
gcccccagtcacgtcggaccgtgacaccctgtggctgcccctgccgcgacccacctgcgccctccccgtgagcgccccctgcccccaccgcatccccggaaccgcacaccgcaggcgctcggcaaacattctggtgttagagtctcccgacgtcagcacgccccagactgggaagcgccgccgtgcagctgtgcggggggctccggcgccgcagccctcctggtggagcaggaggcgaggagggggctgtacttacccagcagcgaagaccactgcgcaggggggcggaacagggggtactgcttggggaaggccgtctggctccacttgcccgtgaaggtgatgctgtatttggccagggctctggcggaacagatggactctcccccaagaggctggccggcggcgccgagagtggccaggaggagagcgcagagggccttgcccagggcggcggccgggctggggttttccatcacctgggagcacagaggggagcagccgcgcgctggcaccgtcgtggcagcctcggggtggaaagccgagagggctgcggcactttgggctctgaggacggccccgagcacccgcgaccccctccctgctccgcaaagctctcctgcggtgcttccgagacccccatcagcggaatggacggcgcggggttagatcgcccgtgcgcctgcgagcgaccaggggtaacgggcaggttttcagtccgagtccctgcagcttgccgggccggtctgggtgcggcctccgggatgccttcgccgtcgcagggacccggggccttggccgactggctgcccccgggactagacccttaaagctcggtcgcagccagtcctgggggtccctctggaggtgccacaaggttctgggccgcggggaaagtgcaggaggcccgggccctctctgggtgtcccgggggcacgcagtactcacccggcaggagcagcgggagcgcggccggcagcggtcgggtcccagccagagcccggagctcctatttaagcccgaggccggcgccccgggccggccaatgaggctccagttcctcctgtcttcgatgctgcacggcctggcctccagcgagaggcagataggacgtgggagaaaggaggagaaggggctgcgggggcggcgggggctgccgctttcccaactcgccctgcccagcgaccttccccgggtcggatcaccctcttcccctggc

SEQ ID NO: 230163 - DNA, 2832 bp, Homo sapiens
  chr4:1395972-1398804
  hyper
cccaggcagccccttctccccggggaaaacaggcaggcgcttcttcctccaggcagtagccgaagctgacaccgcccccaagctgacacgcctagcccggtgctcccttgcggggctgtggggcaggggagtgggaccggagcaggctgcaggggtggggagcaggaggcggaaaatgccgcggccccaccagctccatggctaagaggagaggcgaagaggaagcagctggtcactttccgagacctgtgatcttttttgggacggggagggggcggtcagggaggtgacgctgggacctgagcctcagccagcttggcgggtgagcccctgcgctcagcccctgcgcccacgacgacgggcaggcaccagcagagtggcctgaattccggccgggggacgccaggccggtgggaaaacgggctggagtcccgctcaaggccaacacccgaggagccttggtccccaccggagaggattcacgggtgggcccggccgggcggagggcggcgcgggagcctgggagaagggggcgcggccgcctgcggtttattgattgagtgaagttccgcaaagtgcttcgcagcgggccgagcccgcgggagccacctgcccggccccgacgcgcatggtcatttataaatttaaaactcttccgtagcaaccggttatgtacagagtcaacgactggaatcgtagaaaacagccgggcccggcagcggcctcggaggcggagcggcacggggctcagaggtgcggcgcgtagaaggcgggcgccccgtaggtctgcgagcccagcacgaagggcgagagcaccgccgggctcgacaggaacggcagctgcgcggcgcacaccaggcctccggggccgtgcgccgggtacccggccgggccgtgcatgccgagcggggcgcccatgggcggcgaggggctgagcgggctgaggccgccgggcagccccgtgccaggcccggcccccggtcccggtccgcccccgccgccggtcggagcgctggtgtcggcgcccgggttctgcttcttccacttggttcggcggttctggaaccagatcttcacctgcgtctcggtgaggctgagcgacagcgccaggttgaggcgctcgcacaccgacaggtagcgcgtggccttgaacttgttctccagcgccacgagctgctcgtaggtgaaggcggtgcgcgctcgccgcggcttcccggacttggagtcggaccccgtgcgcttccgcttgggcttcgccgccgtcgccgtgccctgcggggtggtccccgcgccccccggcgccgctgcacctcccggtgggccctgggcaacgggcgagttctcgcggggtccgggggccgctgcctcgtcgacggtggctccgggggacgcgtcggtctcagccgcgccctggcaacccgacccgcgggccccgaggccgccgccgcctccccgcgcctcctccgcgcctcgcgccgcctccgtctcgggcgcttcgtcctcgtcgtcgtcctcgtcgtcgggaacctcgtccccgctgtccgcgctcgggctgtggccgccgccgccgctgctgtagccgttggtgtcgttggtctcggcctcccctgccttgaaggggtcgccggcgtctgcgggagggagggacaaggacagggcagggcagttaggaccggccggttcccagatcccgccctccgcgcgccccgcttcctcccccagggttccctcccgccccctgctcagcgcctcctgcttcgtcacccgcctcctctctctctccttcgctctgtcgtttccctcccctcggcctgtccttccctcccgccgcccgcgtctcctctcggtcccttgcttgtttctttctatggagagggtccccctcgccccgcgctgcccgttctcgcggcgccgggcgtttttgcctgagcggggctggacgggtgctgcgggccgggcccggctgcggagatcacagcggagtggaagctctgatcgatccgcagggctgatacacacttaattaaactcattttgtgtagtgtacaaactagttaaggccatttaatttatttcggcgtatattaccccccaattaccgccggcgcagggccagccaattgccgggcatttaataacaggcccggcggtggggccggagccggccgagagaatggggcttgggggacccaaatcctatgccctggccccgaccctacctcaagcctccaggccctgagcttcggtcgcgagggtcagccccggctcccctgcccgcgcctcggcccctgcgcagagttgccgcgggtagggccctgctcggcctcaccaggagggctgggcgggcgtgcaggtcggagtggctccccgcggcctaaaggcccggtcggccgagtctgaacagcagctccgcatcctccaagcagaggccctgaagtgactgcattttgagtctctgaaatttggaagaaagcatctctcccaggcagggtcgcctatgccccggcactgggggcctaagtcaggaggagtcggggcaggtgccctccacagagctgcccagcggcagccgcggcctgctctccggccaggtcggaaccgaaatctccggtaagaaatgaccaatcgctcctgtcagattcctccagggcgactggccacctggcatggaggccagcaggtggtctgggtccccgcgaccctcagcaggagtaggatccgcccctagacgaccgcgagcgccgtcccagccctgccccgggtgcctggcccagatgactccccggctgtagtatgcgcgcgccttcccggcttcagcgggatcccggcctt

SEQ ID NO: 230164 - DNA, 365 bp, Homo sapiens
  chr4:1399208-1399573
  hyper
atgggatatcgacccgaccgggggcgcgggccgccccattaccggccgctttccgccgctaagcacatttccccttaactgtaatcgaagggatttaattgtttttccagcgataaccagcgttttgtcacaattagtctgatttgtccaaaaaaaaagagagagagggagaaaggagggagggagggaggcctcgggcgggcacagtgggggcggggaggtcacgggccagccaccgcgagcggcccctcgcctcctgcaccaactacccttctaggccggagacgcgcggaggcgaaccctggaccggcctcacagccctgcagcccctgggcctgacccggctaagcttctccagaggagcc

SEQ ID NO: 230165 - DNA, 58 bp, Homo sapiens
  chr4:1399873-1399931
  hyper
gcatggggccgaagcgcaaggggcgcacgcagcgggagccactgggcccagcagcacg

SEQ ID NO: 230166 - DNA, 843 bp, Homo sapiens
  chr4:1400351-1401194
  hyper
cgcgccctgcgcttggccggtgctgccttcgccgccgccttaggcgcccgcggcgcccggtccgcgcatttatggcagccccgccggaggcgcccacgcgcccacacgccgaacacacgtgcgcccgcaggcggccgcggggctccgccgccctcgttagcgcgcgcgcctaattggctgcgaacggtcccgggccgaggaggcggaccccgcacaggacacacggacggagccgccgggcgggacgaacagacacgcagcccggagcccagagcggtccgcaggcggctgtggtggtcagcggcgcgtcgctgcgcctccgctcgtccggaaacggcgcgccagcctccttggctaagggggaggagacagccccggcttttaaataattgcgggatcaatctgcggcggggccgcagcgaccccagggcgcgcgggccagcgagcgccaagagttggctgggacatcccggcgcaggatgcggtgactggcctggcctctcctccgggcccccagcgcgcagggccctgagctccgaaggctcccacagctctggcgcccctcggcagttggggtggggatggggggagaggttctcacgcgcgattctccgagtctccgccgggtctgcagccccctcccgcgcgttccgtgggtctcggtcccgcctctctcacttgctcccgcttggggtctccttttgcgtctccagggtctctcttgctcagggtctgtgcccctccatcccttcccacgcccgcccctttcacgtcgtcaaattagggcccgacctggagtgccagcagaggggcggagccggcggtccccgggccgctcattag

SEQ ID NO: 230167 - DNA, 429 bp, Homo sapiens
  chr4:1401440-1401869
  hyper
agggccctgcggcccgcggccctcggccctcgaggattgggcctggcgtccggagtcccagtgcgggatcgtggtagctccccggcgggtcgctcctctccctcctcctcctgcccacgcagcgagcagccagacgcaggtggaccctggtgggcgccggcagtgcgagcgcgcgcgcttcttcagggtgtgagcgcgcgggcgcgtgcaccggcgggtgtgcgcgccgccttacactgcggtccccggagcctgttccgcgcgcagggcggtcctttgcaattaccgcgggcaatgatcctttggaagcagaaattaaaagttgggagaaataatggtggaccgatcggctgtaatttgggccaagctcggacacgctgagccccagggagcctggaactggttgggcggggcggggggggggcgcag

SEQ ID NO: 230168 - DNA, 251 bp, Homo sapiens
  chr4:1402197-1402448
  hyper
cgttcacgagcatccgttcacgagcacccaggcacacaagccctgcagagccctcacaaacgcgctggcatccctgcatctccctcttccccgccagcgccagcgccagctccgcgctggtgttggttcctctttcactgtttcccgaggaggggcacaccagacactttccagattgctgcgccccctccccaggagaccgctgggtggcgggcgaggcctgggtcggggagggccgggcaggtctcaag

SEQ ID NO: 230169 - DNA, 66 bp, Homo sapiens
  chr4:1404153-1404219
  hyper
ttgggaagtcagaggggagccctctgctttcaggcctgggttccttctctaagatatgcccactta

SEQ ID NO: 230170 - DNA, 215 bp, Homo sapiens
  chr4:1407788-1408003
  hyper
tcggcaccgtcatcccgccctgcagggccgctctgggttcggagggcgcgtagggagggcgggtcaggccgcacaatgagcttaattgaggttaatgcctcccgcagctccgcgattattaaattatcatcatcacgcgcgtgaatcataattaggagtttgaggaacgctcctgcggaagccttggagagtgattctggcgccaccgcctgctt

SEQ ID NO: 230171 - DNA, 241 bp, Homo sapiens
  chr4:1408542-1408783
  hyper
gcgctcacgtggcgcgcccccggctgagcccaaggccggggtctcagaaggccccgcccaccccgcagcgaccccccccccacgcccctcgcaccgccgagcccctcccccaggggccgttcccttccgggcctgcaccgcccccgcagctgccctccccccagagcagcgcccgcccccctcctctcggcggttgggagccggccccgccctcgcccgctccccgcgccgcccctacatt

SEQ ID NO: 230172 - DNA, 54 bp, Homo sapiens
  chr4:1714965-1715019
  hyper
gctgacggccccgcggatccagccaactagaaccccaacgggtgcactacacct

SEQ ID NO: 230173 - DNA, 36 bp, Homo sapiens
  chr4:1795146-1795182
  hyper
cggagcgggagccgcgcgtagcgagccgggctccgg

SEQ ID NO: 230174 - DNA, 703 bp, Homo sapiens
  chr4:1796442-1797145
  hyper
ggggaggggaaggggcgcccggccggacctgcacacgcgccgcggttcctcgtgggccgggccgagagctccggtgccgccgccgcgtacacccgcagccggctccggacgggcgaggggggcgcgcacagctcagcccggcggccgcgcggagggaggccttggcccggtgagctcgcgccccacccgggccgaggcccgaacagccgcttctttgtacctcgacgcggccacagaccgcgcattgatggcggctcggcggctcgcggggaggtgtgagcgaccgcgggcgcggcgggccggggagggcgcctggagggccgaggcagatggcgtccgccccgcccgcgcccccgcgcccctttctccgtcggcggctgcagcctcccggaacaatgtcattttttttatgaatgaaagtggcccggcgcttgaatgtgcgtgtcattcagcggcgtgacaggggccgtcgggaggtcagcgcgcgcttttagcgtctgctcgggcggccccgcttccaggggtgccggaggggcggccgcggggggagcttggctttcgcattctcattcagataaagatattactccctacggcccgggaatgtcagccagccccggggaagggcggcggccaggctgcggagcctctcctggaccccctgcgggcgcgcggggcctcccccagtcgctcctggaacgcc

SEQ ID NO: 230175 - DNA, 41 bp, Homo sapiens
  chr4:1811797-1811838
  hyper
tggggctcgaagcgcgggccgggagcgccccctagcgctgg

SEQ ID NO: 230176 - DNA, 42 bp, Homo sapiens
  chr4:2010687-2010729
  hyper
ttgggggaaagcgcgcgccgctgccccggcatcttatgaaga

SEQ ID NO: 230177 - DNA, 47 bp, Homo sapiens
  chr4:2011067-2011114
  hyper
tgcaggtgtcaagcgccgcagacttgctgctcgcgcggtggggcgga

SEQ ID NO: 230178 - DNA, 1870 bp, Homo sapiens
  chr4:2042559-2044429
  hyper
ttccccaacccaccctcccacccactcttagggtcaggacacccgcgtccggccggggcaggggcggctctgaccacgcgagaagcaggtgcgtccgcagtcccagcttgtgccgggaagaccaccggccagaaccccgggggttgggggtagaggtcggctaggctggggaggggggcgcccgaggctccgggtcctgcacggcgagcggggcggcctccaggtaggggtgcggctccgcccaccaagaagagggtctggcgggaggtgtggttagtccctgagctcccggccacagcgcgggctgctgggtggggtggggggggagcgggggcgccagcacccacgtgcgcctggggcgccttctgaggaggccaccgcctgtgtcggtgtcggcgtgggggcctggctccgacggctgggaccatccctcccagggcgtccggggcccagattcgcacttgccgggcgcccccgggggccactggctgcacggcgctctttaaggccaacagccctgagttcacgggactgaaatcggcacagagaggccgaggacctgtggtcggggctccgcgcaagcggttctccggtctccgaggacaccgagaggcggagaggaggaccctgggttgggggtgggtagccgggagggaccgagcaggctggtgcccaccctgacgcccgaggatcggggagaggctgggccagggaaaagccgggcgagggcggatcccccgagccgatcccccagaccagctctctccgggcggtgcgaccccacactggaccccactcgcccgcggtcggaggccaagcgtttgcatgcgcagctccccgcgcctcgcgagcatcgagcagctccctcaggatcgctcctgacctgctgagctccagccacagatttcccacttcctcagcttttctcccgccggccttgcgctctggaggtctcgccccggcgccgcctcctccaggcagtcctctagactgcatccgccatgggcctggacgctgctcccgggggcagcccccggccagggccaggcacacccgattcctggagcgtcctaggttcctctaaacccgcggccagcgcagtctcgggtttccatgacgacgacgtcggatggggaacccgggcggggtcgggtcggagcgcatgcgcgttgcgcgccggacgcggaacgtctgccggtgtccccgcgctgctggtcccggggtccctgaaccgcggtaagggcggtggtgcgggcgtccgaatgggcgttttctagatacggggcgcggactagaggctcgctgggcccggagaccggcggactggagtcggggaaccggaggtggggagggggctcccgggcccggggtgggtgggtccagggctcccaggcctggggcttggacaagggtcgtggggcccgcgggaggggacgggggctcaccggcccggggcgggcggggcgggcgccgctgacccctcgctggcttcagggcggccccgctccctctgctggccatggcccccccgcccgcgtgccggtccccgatgtcaccgccgccgccgccgctgctgctgctgctgctgagtctggcgctgctgggcgcccgggcccgcgccgagcccgccgggagtgccgtccccgcgcagagtaggtgccgggggccgggttccggggagcggggcggggctggcgacaggggcgtgcggggccggggctctgcggggaggaccgcgcctcgcctttgttcccgggagcgggtcctccccttcgcgggagatggtggcttggggagtggggacgtgcgctctttggcactgggtggacgggcccagagtgcgtgggggccttgcgggtgaccccccctg

SEQ ID NO: 230179 - DNA, 256 bp, Homo sapiens
  chr4:2060072-2060328
  hyper
ttcaggtgacctcagctgcccggctggccccaactccaccgcacaacgcagactgcgggtccccaggcctggacccctggccccgtcccgcccgcgcatgtcggggaagctctgctccggcagccctcggggtggtgctgggaggtcgcgcagaactgaagggggctaggttcgagaagcgccgaggatggggtctgcgaccgcctccccgcacctgagcttctccgccccagcctgcggcgtctgcaggtcctac

SEQ ID NO: 230180 - DNA, 527 bp, Homo sapiens
  chr4:2060920-2061447
  hyper
tcccccacccccgcgatcacatggtgacccccggcagccaatgcagtggacgctaggaccctgcgggccgcgggcgccgcgactgcaccggcgccgccgcattataaatacttctccaaaatgcggcgcagctccctgcgcgcgccccggccgcccgccgcctccgccccgcgcccctgagctgccgccgccgccgccgccgctgccgccgccgccgccgccgccgcgggtccgagggcgccgcgcccttgccctgggcccggccgtgcccgccgccgcccggccgcgtccccgctgccgcgccgcccggccgggtgcatgcattgtgggcctcccgacatggtctgcgagacgaagatcgtggccgccgaggaccatgaggcgctgccgggggccaagaaggacgcgctgctcgccgccgccggcgccatgtggcccccgctgcccgccgcgcccgggccggccgccgcgccccccgcgcccccacctgccccggtggctcagcctcacggcggggcggggggcgc

SEQ ID NO: 230181 - DNA, 999 bp, Homo sapiens
  chr4:2418904-2419903
  hyper
ccgcccttggtcgccgcggtgaccccacccgagccgtgacctcccccaagatctcagggcccgggcctccccgctgcgccggccccagggtgccaccctcggacgcccagatgcgccctggaccctgcgccgggatcctgaacaccgccgcgccttcatcccgcgccgagcgcgcccggccctgctccggctgcagcgggcacgagccccaggcgggcggcggggacgcagcgcccgcagtgcgactggcgcagccgctgaggcacggggcgcgccgcccggaccccgaccccgcggcgctaggagaggcgcgggcgccggctggagagccgcacctcccgccccgccgaggctgctggccacgggcgcgctcgccccaagggccgggcggaggacctgtcccggattccagaggacgtgggtggggaagggacaaggatagggacaagggaggggacgcgaactgggccgaggtgtgggtcagtcctggttcgggaagggaggccgttggcagggccatcaggatcctctctggacatggaaggacgggtctgccctggacccagggattgggaaatgtgggttctctcagaacctggggaagtggggagagggtctgttctggagtgcggagggagatctattccgggcccaggacaatgggggtgggggcaggacgggaatgagggggcattcctggtgcagggaggggagacggagaagtagtagggggtctgctccgggcccgcgggctggggaccacgaagtgtaggagggcaccgtccaggaccgggatgaggagggagaggggcccgttgtggccctggatagagggggagggaaagtgcgccccggcccgagaggaggagcaggagggtcagtcctggacccgggcttaggaagccgggagggaggttcggatccgcctcagagacagggcgatgaagatctgtccaagtcttggagtggagggaaggatgtcggcggtgggggaagagg

SEQ ID NO: 230182 - DNA, 68 bp, Homo sapiens
  chr4:2421165-2421233
  hyper
ggcacaacgaggccggcgtgccctggctgtgggggttgcatccagatcacggcggatctgggtcggcc

SEQ ID NO: 230183 - DNA, 90 bp, Homo sapiens
  chr4:2470686-2470776
  hyper
gcggaaagaggcgcgttttaaagtggtaacagatggttttcttatccaataggattaaaaaatttgtccttacccggccgaccgcggaag

SEQ ID NO: 230184 - DNA, 501 bp, Homo sapiens
  chr4:2765729-2766230
  hyper
cagcgggggtgcagcggggagagccagggcctgggcgcggaggaggggctggtatgggaccctccgggtgggcgcggccccgcggggccttgcggccacaccgccaccgtgcccagcggccccatcagcgcatattcaggatgaaccccggacacgcgcccagaaccgtctggtgacccagtgatgaaagctcgaatcttataggatccgtattcatttcccgtgggctcaagcccagcctccgcgggcggcgcgggccctcgcggcgagtgtccacgaggaggcggtgtggacccgcggccccagaccaggcctcaggcagaaggcgagcgcgagcgccccgcccagcccctccccgtcccgcaacccgcgccccgaccagcgcccccagcacctctccaccctcgctctcgagcagtctccacgtttgtctcagaggagacccactttgctccccagcgtgggcccctgagcgctgggggaagttggttggtttgttaa

SEQ ID NO: 230185 - DNA, 330 bp, Homo sapiens
  chr4:2795141-2795471
  hyper
cagcagcctcccccgggccccggggcctccgtgtccttgccaaaggacgcacggggcctgggcacggcgggcagtgcccgagggagcgcggcttcggggcgggggccgggtgtcccttgccgggggctcaggggtgggaggcggtgcgacgcgtctgtttcgcacccctcgcgcccctctggccccgcggcggggcccctttacgcgaccctccccacaagactcaaaggctgcggcgggcactcgctctccgcccttcccggaatccaaacttccctctgcagcggccgcgcttcacggagggcaagaaaagccgcccactggcgctga

SEQ ID NO: 230186 - DNA, 230 bp, Homo sapiens
  chr4:2965177-2965407
  hyper
gaagtaaacaccgcgcccgcaggctcggcttactcgccgataggctcagcgactacaactcccagcaggccacgcgccgcggcccgccgtgtactcttggcgcagggccttctgggagctgtagtgccccggccgcggcggcgaggggcgctccctcttcagctaagccgttagcgccgagcccgcccgggagcgggtcgccggccgcggcgggcgcccctgccagtgag

SEQ ID NO: 230187 - DNA, 136 bp, Homo sapiens; identical to SEQ ID NO: 199303
  chr4:2965827-2965963
  hyper

SEQ ID NO: 230188 - DNA, 168 bp, Homo sapiens
  chr4:3076404-3076572
  hyper
ggggctgccgggacgggtccaagatggacggccgctcaggttctgcttttacctgcggcccagagccccattcattgccccggtgctgagcggcgccgcgagtcggcccgaggcctccggggactgccgtgccgggcgggagaccgccatggcgaccctggaaaagct

SEQ ID NO: 230189 - DNA, 174 bp, Homo sapiens
  chr4:3371551-3371725
  hyper
cgtgtgccagatcccgctggctgccacccagtaagctggtgcatgtggaggcttagaatagattcattggcagctgtaattaaggttgtgaactgcaccacgatgctaaaaaaaacaaattctctgcagctgttttactgactgagaaattacccctgtcggccgaagttttat

SEQ ID NO: 230190 - DNA, 154 bp, Homo sapiens; identical to SEQ ID NO: 199304
  chr4:3445267-3445421
  hyper

SEQ ID NO: 230191 - DNA, 206 bp, Homo sapiens
  chr4:3464873-3465079
  hyper
cggctccagtggccgccgcgggacggtggggccagaggggcccgtgggggtgggggagccgcccgcaggagaaggagccccgcccgcgccggccctggagtcgccggtgtcgccgccctgcccgcgggcccgccctcctggcccagcccagggccctgcgagctattttgaaagtgaccctgggctggggcgccggggcgagcgcg

SEQ ID NO: 230192 - DNA, 275 bp, Homo sapiens
  chr4:3767151-3767426
  hyper
gctctgacggggagcgccgatccaggatctggtccggaccctgagctcggcaggacctgtgcgcacgcaggtagcgtcgcgtcctcccccaggctgcgagaggttgctctgccatcaggccatggaccccgagccgcccgtgctgcgcgcgcgcgtgtgcgcgcccccgcctgcgcccatgcctgcgccgggggaggcgaaggaggctccagtcttagaaagagcagcttctggaactcaccacccaggccggccgccgctcggccccgtcccgc

SEQ ID NO: 230193 - DNA, 203 bp, Homo sapiens
  chr4:3768906-3769109
  hyper
cgccagcccgacggcgccgcctacccgcagtgcggcctcaacgacgagacctggtacatcctgtcctcctgcatcggctccttcttcgcgccctgcctcatcatgggcctggtctacgcgcgcatctaccgagtggccaagctgcgcacgcgcacgctcagcgagaagcgcgcccccgtgggccccgacggtgcgtccccgac

SEQ ID NO: 230194 - DNA, 166 bp, Homo sapiens
  chr4:3769396-3769562
  hyper
tcttcctgtcgcgccggcgccgggcgcgcagcagcgtgtgccgccgcaaggtggcccaggcgcgcgagaagcgcttcacctttgtgctggctgtggtcatgggcgtgttcgtgctctgctggttccccttcttcttcagctacagcctgtacggcatctgccgcga

SEQ ID NO: 230195 - DNA, 33 bp, Homo sapiens
  chr4:3873189-3873222
  hyper
gtgggctccgcggggacatcacgagggtgagca

SEQ ID NO: 230196 - DNA, 439 bp, Homo sapiens
  chr4:3873582-3874021
  hyper
gcggggcggtggaggggtgagggggaggggaaggacggcggcgggggcgggggaggtgcacggtggggccgcggggacggggcgggggcgtcgcagggcgagtgcgcgcccccactgccatccaggccgtcgcggcgcggctcgaacactcacagaggaagcacctactgtgcgccaaccctgcgcccggcagcgtgcgggagacagaggggaacccagtacttccctgccgtgggggctctcggtgggctcgaggtcatgtcctggtgaggaattacggtcccttttactgatgaggaaacggaggcgcagacggcactgggtccaagttgcccaggcctccgaggtgcgcgcagctcctagccgggccttctgtttggagacgcggagcgcgggctgcgagcccgggtgaaatggccttaacgcacggtacaaggca

SEQ ID NO: 230197 - DNA, 358 bp, Homo sapiens
  chr4:3882077-3882435
  hyper
aggtgcggactaagcgtctgctgcgctgccagggcgctgtcaggatggcgcccagaggacgggctgctgccctggggctgcctgaggagggtccgcagaagttccctctcgagcgggaggaggggatttgcatattcacttagaaggatgaagcgctgcggggaaccttcccacccccaaggagctgttctgcccagatgctgagctgggagccgtccctcccccggccacacgcctgcaggtgacccccctgccccgccccgccaccaggcctgggcaccccaacctccacccctgccagaggcgcctgcaccgggttcctcctgcagatctgcaaactcacgcccgcccagctcag

SEQ ID NO: 230198 - DNA, 74 bp, Homo sapiens; identical to SEQ ID NO: 199305
  chr4:4250037-4250111
  hyper

SEQ ID NO: 230199 - DNA, 864 bp, Homo sapiens
  chr4:4387593-4388457
  hyper
cggctgatggaaaacgccccggaccctccgtagtgccgcggggaagtccccggaaagggtgtgaaaaagtatcgaatttgggtgatgcctcctcctcgtccagcgcctgacagggcccagctcctggcccaggtgcccaggaggcaccgatccccgcagccggcctcctcccgcgcgggctccactcccatttcggcctcgcccccacaccccatagtctttcatccgtgagtcctgcaggcaggacgggttggaggtctgcaaacaggaccctctctgggaagccgcgacagcggctgagctcggggtttgggggcgcaggtcgggctagaaccaccccccttctctccgcgtccgggcatcgtcccagcggcccctcctctgtgcccaggatgctcgggcggcggctgcagtgggacctccaccttctctgccaaccagagcggaggaacctttccgcctccctccaagcggcgcactgagcgctctttgcctagaacgacttccctcccgctgcctggggcagcctcaccctgggcgcccacaccccagccctgggagagcgctactccgcctcccgcaccaccgaaaacctcctcctcctttacgggccgcgcctcctttacgggccgcgccccctttatacgcggacgcgccctcttttggtcgccccctccccaacccagcactaaggagcaccctgctctggtctccgccaccacccagcgcctcctggacccatccccccaaacccttgaacgtcctcaggacccccaggtgagcgcggcgcgctgcgggcggggaccctctctgcacctccccgcacccctgggggtcgctctgtccctacggtccccgcctccc

SEQ ID NO: 230200 - DNA, 84 bp, Homo sapiens
  chr4:4388637-4388721
  hyper
gccccgcactcctttgtgcggccgggcgggcgctgcgtcaaggtggaggcgcggccacacgcgcgcacccacccgcgcgcaccc

SEQ ID NO: 230201 - DNA, 74 bp, Homo sapiens
  chr4:4389741-4389815
  hyper
gtttttcctgggagcctcatccgagagggccctggccccgcagctgccctgctcctcccttgccccgtggcccc

SEQ ID NO: 230202 - DNA, 239 bp, Homo sapiens
  chr4:4543750-4543989
  hyper
gcgcgaacccggccgctgaaggactggtcctgccccacacgcctccccccggcaacggcgacgcgagaagaaaggttccggcctgcgccctgctaccgcggcgggaggaaaaaggttccggcctcagccggcgcacctggcggaggaggaacctcgcgacgcgctctcgggcatcggtttctcccagcaaagcttggagggtttagctgcgcggagagctcagcgagctcttctgtgtc

SEQ ID NO: 230203 - DNA, 1162 bp, Homo sapiens
  chr4:4854482-4855644
  hyper
ctcgtgttctaggacggcagggatgaatcactataggctggctctctctagctcagcccggcctgctgcggcctggggccactgctcctgggtcctcaggactgcctgggggaaggtagtgcattgtgcagcgcgcggtccagaagtgaaaagggaggcgcggagataagctgccggcggaagttccctctcctgcctgggccgacccggcgctttactgcttctcacgaaggtgcgccggctgctccagaaatcgcagactgcctccaggaagaacttgctggagtcacagcagcttctcagcgacttgacagcagtgattcagacttcaacttgggcggaggggcgggggaggagaaagagatttccagagaaaacgactgagcggtagggaggggaagagagaccgagccacgcgcctcgagaagcagtgcagagagcggaagagacagaggctgcgagacctacccacagagaccaagagagacgctcggaggggagaccgccttaggcgcagagattcagaggcagacagacaggcagacagaaggatacaggaaaggaatgtcgccgaaaggcagggacaaacctgagtcccagaaaaataagagacaactcccacacaccaggctgtccgcgggccgccttgtcacagaaaggcagctccccagccccgcagagtcccgacagctgcccccgcgaaggtggggcgaggggcggcttttccgggggaaactctctccctggacgcccctcctttccagcctcagctctggcctttctcggcatccccagcttgccttcagtttcactccatatctgggtctctcagaggcctcgggaggtcttccgttctctctgtcgccgtgtccacggaaggagcctccccaaccctctgtggctccgcgcctcttgggccggagcatctctgtcttccggagtctcttgatcattgctcctgcccgtcctcgcccatttcaaagacgaccaacagaggcttagaaaaattggccctccaccctcggctggttacctggctcgtagccctgggtctgttttcttctcagagagacctgagatcctcgacatttcctaaattcatggaaaacctcgacagtgttcaggactcccaaagaaggtggtgggcgggagggggaggagc

SEQ ID NO: 230204 - DNA, 1289 bp, Homo sapiens
  chr4:4856359-4857648
  hyper
tacaagtcagttatcttcctcgcattccctcccaccccctgccggaactgagatggggcccacggcgggctgcgcagggcagagctggaggggagaagggccagccttcctccgccggggtgggcagagccagaatggaagacgtttggtcgaccctggagcctcggggtctgcctgacatctccgggcttaaataaccgtgcgcctttgttattcgtcagcagcaaagtggttcgttacgcctgattggtctaattgctttgaaatgggatatattatctataattatagagctctaggagagccggccggcctctcctttcatcttcccaagtgcaccctcacgtcgcgatcacattaatttgggccatttgaaagcgaggggggaggctggggctctcttctcctgctgatcctggtcctgctcacccccttccaaatttaaagacacaaggaagcccgggcctgggacggtagggagagcagacagtgggggaagggggggggggtgggggcagaagccgggagtggggcttgtcaatttcgccttggcgccgggtgaaatccactccacgcggactgtaccaccgcacaagttgcacccactttgaggaggatttagcaagaaggaggaaacattttcacaaagagtttgtattttgacttcgctgttaaaaggaggtaccaaaactcctgaaaagcgcaagttctgcctaggtctccggaaagcagaacgctgtttttctccaggtctgtgtcgtggatcttcaaccagtagctgaagactccctggagttctcagggctcggagtttttctctggaacgctgtgaagtcctcccgaagttagtgactcccagtttgctgaacctgactcccagcccctcacttctaggcgacagaggccaaaagagtggagatggctgggtcgggaggcccccttcgcagattgggagaccccgtgacagtgctttctgtctgcccgtcaacccccaccccctccccgggacaaaatacctcctctctctccccctccgtcgccctcctggcgattggtgaattcccaccaaaataaatcgttccgggtaatcggttttcatagcacattcattctattaaagaggactgtttggggctcgctaattgccgggggatcccactgagctgcacatttttaaaaaatgcacgcgggattcctgggccgaggtcacaaaatgcagtggaaagagagggagggagcataaacaaaaacccgacggaggcgacaacaaatgccgaagtgagaagtca

SEQ ID NO: 230205 - DNA, 1035 bp, Homo sapiens
  chr4:4857871-4858906
  hyper
catcttcaggatccgaaatgcagaggccctctacttgggggcggggagtgctttaggatgcctgaaaatgaggggagatggagcgagaggggaggggagagaagtctagaggatggaagcggagcgccagtccccgagctttatctgctggggccagccctgcccttgccaggcatgaattactgcccggctttctcggctgcagcggcagcgcagagaaatgccgggggtacaaacgcctcgaggttagagctggcggcgagataacaggctcagccccagggcctgcctgctcgctgaacccctgggccgggaaatcggtaaagtcctagacaaaaaataactcagagaagtctccctctcactgcccctgtaactcgtggctttcctcccgcgggaacaaacaacgccctgggaaacaggcagacattttatttcttttatctgactcctttctcttgagactgccggcacctttctttctctcgcaatccaggggcagagcaatgggaaagccccgcgcttttctgacacggaattgagtctgaacccccttctctgccgatgcactcttctcgcctagcaacgtttacacgcggttaacctgccgcgcggggcgacagcagacacgaacccaggccgaacctataaagaagacaccgtggcgttcagacccggctcgggaagccgaggggctggctgcggggccggtgctgcggggccaggcgatttgctccccggaggcaggggcgcgacttcaagggcccgtgcgccgggtgcagcctttgatccggccgccgctggcgccttaaaacaacatcctagtctgcctattaggcgcgctgaggaatcgtgacacattgtttatccccgcaattagcgatgcggcccttttcaggccgcccgcccccgggccccccgcccccccccccccccccgcggcggagtccaggccttgctgcgctcctcaactgcgaccgccgcaagttccacactagcccccgctgcaccatgcggcttcgctctctgagttca

SEQ ID NO: 230206 - DNA, 379 bp, Homo sapiens
  chr4:4859757-4860136
  hyper
taaaattcagatgccggtattcccgaacttccccaggcctcagcatatctcggcggcctgtggacagatgggaggctaccaatcgctccggcgtccgcagcccgacccctgccgccagaccccggacgtcttccggataataaagttcccgctctaattcattttccctaatctggacgcccctaatctacagcttttattgcgcccagttaaaagtcgagggaattcgctgtccctccgcgctcggataattacccctaaatggccacggcagccccttgtgtttcctggagattagaaccccgcagtcatcaatggcagggccgagtgagccgccaatcacctccgctcactccctgagagccgctggcctgggccg

SEQ ID NO: 230207 - DNA, 570 bp, Homo sapiens
  chr4:4861087-4861657
  hyper
agaagagaaggaacgagaacaagggaaaatcccccgggaacacagaaagatagagacccaggggactcccgcagagagggcctcttgggcttcagcgcagaggaaagtttcccgggcaccccctctcctcccctgccctccgccgcctgggccctgccctgcgtgcccccaggcccagcgcgcctccgggcgagtccccaggagcgcggcccaatggatcgctccgggcccgccccctcgcgcgctgattggccgccgccccgctggcctcgccttattagcaagttctctggggagccgcggtagggcccggagccggcgagtgctcccgggaactctgcctgcgcggcggcagcgaccggaggccaggcccagcacgccggagctggcctgctggggaggggcgggaggcgcgcgcgggagggtccgcccggccagggccccgggcgctcgcagaggccggccgcgctcccagcccgcccggagcccatgcccggcggctggccagtgctgcggcagaagggggggcccggctctgcatggccccggctgctgacatgacttctttgc

SEQ ID NO: 230208 - DNA, 776 bp, Homo sapiens
  chr4:4862557-4863333
  hyper
acagaattctacctccccatgccctttgagtttgaggcagatagttggtgctttgggcggatggatgattcaggggtggggacattcaggttccagtggagggggcggggcaccaagtcaattaggggaaggcgcccccgctaatcctatgggaagctcccaaacgtctaggactgagccattaaagtggactccaggtgcccaaggcggttcgctccaaggcctcacggccccctggctgctctactcagagaacacgctcggagatatttcaggagcacgggaaattcccaagttttcctcgtttcctccgattattttgctcggcataatagcagccagatttcaatggcgtgatgctgaggaatgatttttatctggggattaaacgtctttgaaaggccagtccctccctaagcctaatggccggagaaggtggccccgctctgggttgtcgccgctgaagggagtgacgtttctctcggcgcccgcccctcgggcggcccggcggaaagctagttgggggccaagcgcttcccggactcccggtggcctccagcagggaagaagcggggtgttaacacgagatttcgtttgactcacatcctggtggtctgaaagtccaaaggatcgttgtgttttctttgttttgttttgttttttctgtttgtttgtggttgttttttagagaggtgtgaaaaaatgcatacttaggcaaaacccgcgtggtgaaacatcttcgatttgaattcactttctgccgggaaagctgctgc

SEQ ID NO: 230209 - DNA, 2108 bp, Homo sapiens
  chr4:4867441-4869549
  hyper
cttggcttactgcgcgcccgcagcactgaagtttttttccgcgcgttcgtgatagggaaatggcagggcaggatcgggtgtctcccccggccccggctccaggacctcctggctccttggagtttggcaatttagggtagaggcaaatttagagcaacataattgcggtaatgagcaacggctcaccctctgcagacgcgtcgcggctccagcgaggcggtagctgcaggcgaggcgggcgcgcctccccgccccctccctgcgccgcagcccgggtgcgagggcccggcctccctgggaccccggcccgcgcgcgcctccgcctctggctgctggccttggctaggggcttccttccacttctgggcctccgaatctccccatttttgtttctgtccgtctagcccattctttgccccccttttgtttccgcattccctctctgaacagggtgtgcacacagaaggtgctcgataattgtttgctagatcggagcggcacgctggtgtggggagaacacccagagccacagtcagccgggtccggccggaaatcgcggctgcgcttccggcactgcttctcgtccatcccagtccttcgaactgtgttccctggtttatcaaccgagggcggagtgggcaggggtttcctgggtctgttcctttacggaccaatttccttctctggcaagaaacatgggatctaccaggcggagaggtcggccaccttccgcgctgggaggtagtgatggagcagtctgcactcacagcctactgtgtgccgggagttcccgctcacgctgactcccaacacacctaggagatttttatagcgcaaaggactgcagctcagagaggtgacatggttttcccaaggttacacagttaatgaaggacatagcaggaattccaacacggattccactcgaggatccggtttttcccgcattgcccatctccatctggttgagggtcacctggtgcctgagcagctctcctgcgaagtgcgcgtcgcgctggaaaacggagcgcagaatccgggaactagttctgaatttaactccttgcgctctaaccacgaacaggcactgtcccttgaggaatgataggggcgtctcaccggccctgcacgctgtgaaagcgttttcgttttgttggggaggagacggaagcctcattttgcaaattcagcttctgaccacgcagtcaagaccaaagcagtccgtggcgtggaagcggggcagaaatgaggttacctggcggcaagggacctggggcgcctcgagctttgagcataggtccgcagggccggggcggttggggaccgggaggctggggtggggctgaagacctcgcgctaagagcgccttactttaaggttagtttctcggatcgctgaacccggggctgaaggaccagattgagcaggaggcccagtgaggacagttactggtgaggcaggggccccgagtgcgaatcctaccgctgcgccctccttagtgacccaaggccgggaggtgagcccagccgggtccaggcctgcgccccgcctagagccctcgggggcgcaataggaagcggcgaggagaggccgcggccgcctttcaactctgcggctggcgccggcctggccgggcccccgaggccgcgcggcctccaaggttccgtcccgccctcccagacgctcagctcgcatcgccccacagtggaacagtcccccggccccgacgccggactccctgggaagcccccgacccccaagtgccaccaccaagtgcccactctccagagcactcccaggcccccactccagacttgcggaatttgttccgctccactcaacagctcccacgcctgccgcgcactccgcccccttcccaggcccagggggaccctgcctccaccccgcctgcctcccccacagcgccctcccgcggccctcagctcacagccagctctcccagcgcctgctcactgtagttccggtgctggacgctggccttggctccctgcgttacaagtagatcctcaagtgcgcacacgcacacgaccaacacacgtcatccacacgacataccaacacacaccgaaacagacacacatgacact

SEQ ID NO: 230210 - DNA, 1642 bp, Homo sapiens
  chr4:4870849-4872491
  hyper
ggctagcgcaccagcggggtgcaataaagatcggcctttgtgtgtgtgtggtgggggggaggagtggggggtaggtagttaaaagcgaattcaaaagcccgccctcaatttggggcctgattaggggcagatggaaggaagggtccccgaccctacgtggcagcctttgttgcacattttacaggcgaggagacagtggtgggatccaagcccgctgctgtgggacctcaggagttgctttctccttcaccagctgggtgcagattttgatgatgcacagggcgcggcctgacagtgcgtgtgtgcgcccaccgggcgctgctgccagagtttgcggggttcagggagcgggaggagggtctgagagaccccaaagcctcccctttgcgagaccactccttgcttcccccgcctggcgctttccataaccctctgcggcgccctgcctctttgttgccccttagatgagctgccccaagggcgggctggactctagtgctttgagtcgctgtttctctgacgatgctgcttttaaaaagaaaaccccgttccctctctgatgactctcgtggcacccgggtggcagcaggggcttctccaccggagaaacagccacatcgactaaaagggaatgtgtgaggcaggctgagaccttgggtggggccccccacctctcgagttttccaagactcaggttccatctctgttaaatggacacaatcctgacccctggcaggtcctgaaagagtagaagggaaggggttctccacgggctgtaccatcacttgcgtccccagttcggtgatggtggtgaggtcatcacagttgttccgcctgcggtgactgcagctgacatgtatgcgcgcttgcctatggatcacaacccttagaatctaagttttccacgcgggttatcccaacgaatcctcactaccaggtgggcacgtgccattgtgacccgtgtcatagactgaagcatagagagttgaatgactcagacaagatcacacagctagtgagagtgaaacagagcttccaactcagacagccggtgccaccatctggcgcccctaaatctcagttccctggtccgcggaatgggaacactttcgggctggtgcagaggaaactatgggtgactccaaaggcagcgcgcggtaagaactccgggtgagaaggggagcgcgcgaggagagcgccaagcgtagcgcggagcatagaggcaggatggtgacctgagcgctctttgctggccggctctgctctccgcagcgccattggaattccttactctccagtcccccgagggtgtgtgtgggtgaggggaggtccctgaggcggaagggatgagcggagtggaagcggaggagagtgttcttgctcttggaaagtgtcagaaagtgcctgtgcgccactctggacccggaattaagacaccttcacctcttttaatcttctccctatgacgcaggcactcttattaatctgtttcaagtgagaaaaccgaggcacagagagcgtatgtgacttgccaaatgtcacataggtgtctaagacccggcctgtatttcccaccaacctctgccgctgcttctggcatgaatgcagaaagcagccaacagccgaccggcaactgggaagc

SEQ ID NO: 230211 - DNA, 1982 bp, Homo sapiens
  chr4:4872706-4874688
  hyper
gttcgtgatttggccgagatccggcagaaaggctggacagacccggcatccccaattttagtccagcttccttaaattaattcattcggcggggttgaacaagaccagcacactaagaaataacgaattcgggtagagctgaatgcttctaaggggaaaagtaacaagacgggggcaggaagcacagtcggagcctatttttggcggagcggtcaaggcaggcctctcggcggaggcgacttaagggttgagacttgaagggtgaggtggagccgtagtttgaagaaggaatctcccattgagaggggtcggcaaatgcaaaagccccaaggagagctgaggccggcgcggctggaaccggccttaggcgagtttggagtaggcttagcgttttgtgatgctctggcggccacttggaggagaaagatgggggcgaggtagaaggggccgcgtgcccttgtaggagagggaagtgtcaatggccgggaccaggggtggctgcctgagacgtgcctcgtctttggtgattcccctacccccaaatcagagagggttccggaagaaacttcgcagccttgcagagtgaagcatcgccgggacccaaggatgtttctcttccctacggagctcacccggattccttggcgcccagctgcggccccggagtccccgaactcggctgtgccagcccggggcggggccagctgaacctcagttgtggggcggagtccgttgcggacaccctcaccccccgggcaaccgcagctcccaactccgctggctttcccctccctctgacaccctgcgcggctcctgcgacccaggtgcgtgccagctgtaggagcctgctccgcctgccctcctggaacgcagtcatcctccaggccctgcccgcgcccatttcgcggcccaggaaactgaggtgtggaagcctgtgaagggagggactgctacctatcgattcgtaccggatccagaccctgtgctaaacgctcggcgtgcatggtgccccttaatcctcacaaaagtcgagcgacttagggaggaatattatcccattgcacacacgagcacactgctgcgcagaggcacgaaggtacctgcccagggtctcagctagtcccatttccaacccaggaaggcaagggagcaacccgggaagcaaaatgtaaggagacactttcagggttgtgcaagtgtggggtgggcacccggggagaagggaggagggatgaactatccagagaggaaggcacgcccggccccgacttatcggaataattgtctccattccgcttcggcggtgtctgttgtgtccattgaacagaagcagaacgtgagtccgtatctgcccctcgccaccgccaccagcacctgggatttgactcacacttcaattcctgccctaggaattgatgccagcgcccagtatggccccgcgtggggaatcgagcgccccatccctcggtgagggcttactctgagcctgagtctgtggcaggcccccccatagctactgtctgccttaatccacgccaaggcctctaaaggaaaacattgccttggttctttttcacagacgtgtcaactgtggaccagagatgtcaagccacgtgcccaaggtcaccaagcagtttctgggtgagccctcagggaatcctaaatcccgacccaaacccgggatttcccctcgccctcggggcctccaaggggagctgcgagaggcggggacgcaaggaggcgctgggaccagtttgctctgagtgctcctgctccggactgctccttggagaggcggggccttgggcagcagaatcccaagctcctcccggtgggaaatccggcagctcccgtctgagggtagggccagcagaccacctggcccagtaaactccaccggcttcgggggtggggagttggggcaggtgcgccccaggggctcggtatacaaagccatgcctgagccacgtccttaatttcca

SEQ ID NO: 230212 - DNA, 143 bp, Homo sapiens
  chr4:4874973-4875116
  hyper
ctgccccgcagcagcgcaggatctgagtggaaactggtggcactaagaaggaacggaaaaataacactaccaagccaggcagtacataaaacagagcggcgagatagcgatcggggtgggggttttcccgaagagggaacatg

SEQ ID NO: 230213 - DNA, 92 bp, Homo sapiens
  chr4:5052697-5052789
  hyper
caatgaaggggtcagattagtatctaatcttaaggggtcagaaagtaaacagatactttcattcattaaacactgagaaaaaccttaagagg

SEQ ID NO: 230214 - DNA, 160 bp, Homo sapiens
  chr4:5053809-5053969
  hyper
tctgctgaggcaactcctaggtacccagtgccgtttagtagtcgggacggtgcctagcgcgggactggggaggcggcttcagagagttgaacccgaaacctgcacttgggggtgtggaagggaggagttgacttcggaggccagtcgggatggttctagg

SEQ ID NO: 230215 - DNA, 795 bp, Homo sapiens
  chr4:5709720-5710515
  hyper
aggagtgaactgccctaggtcgaagctcgtaaaatggagagcaggattcgaaccagggtcgctggtgaagtccaagccggcagctgccacaccccgaggaaggtctccagtttccctcgaagctttctggccgtgagcgggatacacctaagggccgcgaagcaccctattcagatcctgccctcccttcctcattctttgcgaaatactaagggtcctccctgccaccgccggtgtagacaaagtcaaaccactacagtcagaccggagcctggggtcgggccctccttacctgcgtgctgctctcgggccccgccccgctccgccccggagggatcctcaggccgggcccagacctaggagccacctggggatcccggggtggctgcgcgccgagggggcgccagcggggacgtgagctggcgccgagacagcctcggccccccagcgccagggccactgccaggagacccccggccagcacccacgtggggcgcccccgggagcccgaggggtccatcgcctgtcgggacccgctacctcaaagcggcgggtgccgccgagtcgctggagcttccggaccccaggcccgccccgccgccgagcatgctcagtgcgagccgccgccgaaagttttctggaacaaacacccgcatctggggcttggcgggccaggaggtgccggacgggcgtgggagggggagagcgagttggcgcggcccaggcgcccggcggccaggcctgggtttgcttgcgcccaaaccgaatcagagcgggtcactcccctgctccccg

SEQ ID NO: 230216 - DNA, 687 bp, Homo sapiens
  chr4:5712784-5713471
  hyper
aaagttaaaggggtggaaaccgggcccccctccggaagggtccggggctgggaggcgcgtctgtctctgggcatgctcagtgcaggggcagggctggggcgggggtggctgaaagttttgagcggtgatccaggctcctccctccggctcggcgaagcagggaaggggagagaagcaggagtcgggagactgcacaggccagaaagtctgcggagcgggccgcgcccctggcccgcccgggctccaagtcccgcgtcgccgccctggcggggacggtgcagcaggcggcgggatgcggcggggcggcagcctgagcgccccggatggcccgcggcggggcggcctgcaagagcgacgcgcggctgctgctggggcgggacgcgctgcggccggcgcccgccctgctggcccccgccgtgctgctgggcgccgcgctcggcctcggcctcggcctttggcttggctgccgcgcgggccgccagcgcacgcgacaccaggtgggtcggccgagcagacagcggcggggcggggagcgcggggcgcgtggcttctgggtcctgcgggcccggagccccggctctgcgactccttgagcctggttgggaacttcgcacgcaaccgcttaggcgtcgggttccccttctgctccaggagggaggtggcggcgtgactaaagggcattggcct

SEQ ID NO: 230217 - DNA, 336 bp, Homo sapiens
  chr4:5889853-5890189
  hyper
gggggcgcccctgccggcgccccgtggatctggaccctgccgggcgcccactcccagcccacaaaggccagcgcggggcggcgggggcgggggccgcttaccgtgatgtgcgggatgctcttcttgccctggtacgacatggccccctctggcgccctcggcccggccgctgacctgcggggctgtctgactggaaccggcgctctcggccccgctcccagcgggcgcgctgacaaaggcccgggagggatagagacacggacggaggctcggcgcccgtggatgcccacgcgcggctgccccggctgctcggcccgcccgccgccgctccggctg

SEQ ID NO: 230218 - DNA, 54 bp, Homo sapiens
  chr4:5890489-5890543
  hyper
gcccgcgggcggcgccacaggtgtgtggccgcgcgtctggaggcctccccggaa

SEQ ID NO: 230219 - DNA, 49 bp, Homo sapiens
  chr4:5890723-5890772
  hyper
ccatctcggaccccaagcctttattcacgctgtaccctctccctgaata

SEQ ID NO: 230220 - DNA, 715 bp, Homo sapiens
  chr4:5891819-5892534
  hyper
ccctgtcaatgaccggaaattgcagatggggacactgtccctccccaactcctacactcccttccttggagttgttaagtcctaggttccccgtaccagggcgttccctggggtcagtctggagatctgagcagaaagcccctacagcaagggacaagaccacgtgcgtatcagggggaggagcatccgcctgccactggccaaacagatcgctgctcccaagcagatttcgccggtacaaagcgccgcagccgctcagcctccggcagcggcaatccttgcgcctgcgccgcagaaacccctcctgcagcccagggagaagcctggtgggcggggggggaagggccggggcacccgttgcgaagccctggagcggtgaggcccgccccggaacccgagcccactgtaacccaagcctcaaggccgctctgccggcagaaagtaaaaccctccctccgtggagatcgcgagcccctgagttccacagtcgcgaagctcgagtgctttcggagccccgggagcgccagaggcgctgccttttgtccggtgcctgagaagccatggagaaaggcagaggggaccacagggagaagaggaaggagtaggggagaggaacgggagaggtgaagcgaccagcgtccccaagggtcagggcgcagctgcggggctggcccaggctgcgccctgggggagatgctggcgttggtgacattga

SEQ ID NO: 230221 - DNA, 1191 bp, Homo sapiens
  chr4:5893913-5895104
  hyper
ggaccaacacggaacggagctccagttcttttcacaaaacagaatgaggggcctgggttagattcatcccagaggttccttcgcgtttaagcgtccatgcggtagctttagccaacttcccctctcagaacctctctccctttctgtagaagaggagccgggactggacccgggcgatcccttccgagtctcacggaccacgccggccagccccgaccgagtcgccccagctctgggaacctcttgcatgatgaggtgggggaggggccgcgccgtggctctccccagcctggcggccgctgccccaacaccggggcccgggcatggccctcgggcgccccatgccctgggtcctcccggggcccgcccccctcgtctggcccgcgcgcgccccgagggtacctggccattgtcccggccgaggggcaggtcgcggggcgcggggcggcggatgcgcagcgtcggcggccgctcgtcgcgctctccgggagagctgaccgcggagcccgagggctcgctcacgtcgctggccgtgtcctcgctgcctcccggccctggcagcccgaccgcgtcgggccggccagcgctgcgcggcgtgcgcgccgagccgcggcggcccacactgtaggcgtcgaagtcgatggtcttgttctcgtaggcgccctccaccgcggcgaacatgccgccgtacttctggcgcggggtctgcgccgcgctgcccggccgcgccaggtacacgggcaggtcgtcctcggtgttccacgcgcgccgccggtccgccatacccgtccaaggccggccacccaccgcgctcccgcctgcccgcccgcggccctgggcaccgccgtgcgccgcgctccgcgcctcggtgcgggcctgcggcggcccgggcgcgactgcggcccagggaggggaggggcggggcgtggcgcgcgccggggcggggccggggcggggcctctgggcggctgcgggctagcggcgcggccagctacaaaggaccaggaggcggggatcgcggctggggcggggagggacggtgacgctcccgagccgcagcgcggagggcgggccgcggcaccgcagtgccctcgccgcaccccccactctccgcccccaggcggagcgcagggcgcgaggagagcgcggggcaggagccgtgtgcgtacactcgcgcgcccacacgctctg

SEQ ID NO: 230222 - DNA, 1858 bp, Homo sapiens
  chr4:6200873-6202731
  hyper
ggccaaggacagtgtgcctgcgagtgtgcgcagatggggcgggcggcggaggagggctggcggttagatacagtatcgctggagctcagagagccgggcagaggctggcggagagccgaggctggcccagccttcaggagaccggcgagctggggtgtgtgggagcgggatgcttctaaggcgaaaagaagcgccagcctcgtaagcggcctctatctgggctgcccaggccggatgctcaggagcccacagcaggggggatggagcgaaggaccgaggggctgggaggcgaggccgcagcgcactgacgcaggccagcgaggccgctggccccgacgcagggcgcccggcaaggtgtctggcaccacgagagtcaatccttgcgcgccatctccggaggccagtgcgcccagggcgcgccggcccggcaggagggtgggtgccagcctttcttcccatctctcgagcctcctccccggcgcccacgtgggcggagcagcgcgagggtgtgcgtggcaggggccgcggcggcgtgtgccgtgcgtggggtggggtgcgggctgggcggcctcgccttcgggccccgcgccgccggggcgcggcccccagctccatcttctttgccacctgggcggagatctgggggactgtgacctaccctgcggaagacacggaggggacgggccggccacaccccccgcgccactccggcaggcaccgggtgggtccccctcccgctccttggcttgagggcggaatccggagaagagtggaaataggggtggcgtgaaggagagctgggggctgggggcgggaccgggagggggtgttgggggaagcgacgcagcggctgggagattttgcaagggggtctgaagaggagtgggggatgggtatggaagggtgggggaccactgaggtgggatgcgagagtggaagggggacccagagggggcgcgatggccggaggagggggagatggacgatggggcggggcggcaccggtcgccgcgtcccttgccgccaggtccgcccctcggtcgccgggtccacgggttccctctggccagcgctcgcctcccgccccccggcgcacctgtacccacctgctcggcgctcaggcccgagccgggcagcagcagcggacgtagcgagcgcagccccgcgccgcatcctccggccgccccctccccgctgcgagcttacgccgctgtcgccgccgccaccgccttaaaaaggacaaaacggaacagaaaatgaatgcatgcacaaaaaaaatcgtaaaaagcaattgaggaggatggcagtcgcgcgcgcggctcggcggggcgggagtcgagaggccgcggcactggtggccgcgatccgggcaggcggccggcgcgtgccgcacgcgggtggctgcagctccctcggtcgcccgcgcccggctcaggcacggcaccgcccctccccccggggagcccctccgattggtctgtcttcctgccagtcaggcaggagggcgcggcgcccgccccgccccgcccccgcccccgccccgggcagatgccgggagctctcctgccgccgtgggagggggagctgagctgccggagcgtgcgcactgggccagcgggcggccggggcagggctggggtcccggcgctgagcgcccccagccgcgccgggcagcctggcgcctcgctgagtcggagcaacccccggcaggagctttcaggctctggtcaagcctcgggacccgggaagctatccctgccctcgggggctcgagcctggagtggggcttgcaggtaaagcggggctggggccgtcctggccgtcagtggtcaggaagacgcagcgaccccggagatcc

SEQ ID NO: 230223 - DNA, 38 bp, Homo sapiens
  chr4:6223661-6223699
  hyper
gggggcggggctgcccggagcctcggccccgcccaccc

SEQ ID NO: 230224 - DNA, 426 bp, Homo sapiens
  chr4:6271755-6272181
  hyper
gctggggcagtggcgcggtggctgtgggcagcgcgcaggaggcgggcaagagccctgaggcactgtcctcttcgggcctcagtttccccttccgagctgatgggtggctggccccaaagtcccgacaaggtccccgaagttggagggccgggggtcccgcccgctctgcaacgcgcaaggcgacccctgttccgggcccgaacgggtcacccggggggcgcgccccggtcccccgcgcgctgtcgcctggagccccgccgcgggcgggacagcaggcccgagaggcggagcggccggcgggcaggccccctccccgcgccccgcgccatcccccccgagttgccccgtcatgcccctcccccgcggtcccgggacccacggccgccctcggtgcccgcccggccgttggaacgcgcctgggccccc

SEQ ID NO: 230225 - DNA, 382 bp, Homo sapiens
  chr4:6339372-6339754
  hyper
atcacagggggcaccggtgctgggtgtcacagggcagaacgagtggccaagtatcctaccagcctccagcaggaaaaaccgcaaagatcaaaggctgagagaacaattgaatcgatagtggaaacaaagccaaacggcgctggcccttgtcgccccactgctggctgtactcgggcatttctgagggtttttaaggacacaaggaacaggaatgcaaacgatagatcggaagggatattaataagcctgaaaaaccattcctaaaagttcctctttttctttttagacgtttctatgaaatttttgatacaatagatttttttccaaaagatagtggaatctactattccatatcaatcgctgcccccgagtacgcacgcaa

SEQ ID NO: 230226 - DNA, 348 bp, Homo sapiens
  chr4:6472724-6473072
  hyper
gctccggctccgctcggcctcatttccggcagagccaggcttcgaggaggcggacccagccgcaggagcccggtctccgccgcctggcccactcggtctccctgacacaggcacccacgcgcacctgccccgcgggacccgtgcccagggcccctcccactggggcacccacccggggaatccgcgcacacttctgcggccgggccgccagcccgtgggttagcggctgacagtccccgcactcgggcagggctccagcacaggcggccccgagcccagacctcccggtccccatcctccatcggggtcactccgcgggccctgcctgcgcacggaagctgtccccac

SEQ ID NO: 230227 - DNA, 914 bp, Homo sapiens
  chr4:6473623-6474537
  hyper
tgcctcccggagggcggcgcggaggagggcgctgccctgtgccggcgctgggcagcggaggccggtaccctcgggctccctccctcctgggccccgggcagggtgggatgggatggggtggggtggggtgggatggggtggggtggggtggggcggggggacacgacacacatcgcgcggtccaaaccttcggagggcattcggtgcgacggcatccccacgccgcggccggccggaggggtctcagacaacacgtacgttaccttcagtcacatagctgtggtcccgcaggaagctgtggttaattttccgcgtgtccgtgtcctcgcccattgaaggccgtgcccggtgctctgggcatgccccgccgccacacaccgatgcaatccgcagaggtcgcgccgggcgcgcgggccatgccgccgcagcctagcaggggcgcgggccgccggggccccgaagggagggcatcgcggcagggggacgggcgggggcggccgggggcgggcgccgcggtcaagcgagcgcgcggtgggcgggcggcggccgcgggttcgggcgggccggggcccaggcgcgcatcccggccggcccgtgcgcgctgcgtccgtgcgcccggcggcggggcctggtgccggtgcgcctggctgcggcgacggcggcgaggggacgcgcgcggcgctgcgctgcgccgaccaagccggggccgagccgggctgcgcgggctggggccgccgccgccgccgctgtcgcaggcccctccctcgcgccgcccgctctccgcccccgcggccctgcaggtggagccggcgcccaagccgaggctgcaccgccgtgctcgggccctcgcggtgggcaccttggtgctgggtgcgccacgggggagggaggaaggagaccgccagcttgcgggg

SEQ ID NO: 230228 - DNA, 1048 bp, Homo sapiens
  chr4:6564716-6565764
  hyper
accagagcagcagccgggcctgactcagcacccaccggcgcgggcagcgggaggagcgcgtagacgctgctggatggtacccgcggccgggactgaactccgccgcattgggtcttaccccggactccgagccggaccccgcgcccgcaccttcagccgggcagcgagggggggctcgagcgcgccggttctcggccgagacgctgtggctgacaccggtggagcgatctgccctggctcgcgcggcgagcaagtgctggaggcagggttccaagccggttctgtcgggttccctcaagaccccgagagcacgcgctccggagggaccccggcacttcggaccctagcagagccagccctgccccaggaccgccccggggtcggtgcccgggctctctgagtctcgcttctggcccgcgaagacgcgccctctcctccagtcgcgggagtcccgcacccgagggccgcgtccccgggcagggtgaggtcctgcggggctgggggtgaggcggggtgggcgcgaggcggctccggagcggcggggccgggcgccctgcagcccgcgcttaccttcggaaacttcgaggtcggcggccccattgagctggcacaggcaccaggagccctggtcggcggcgggcgcggcgggcgcggcgggggcgcggtcagctggcaaaacagcaagggcgcgtgagcgcgggcccggggcggggggcggggggcgggggcgcgcggcgaggctaacccggctgctgggccatgggcggctccgcaggctgcgaccgcgacgggcgtcctccgggcggctgcggggggccgggcgcggcggccgctcctcctccgcctcctccgggctcggctccctgcgcgggcgggcgggcggggaggcgcgcccagaaggctccgcccggagcgcgggtgcggggcgcggggtgcggctgcgggcgccgagggtgggcgcggggcgacgatcgcgaggcgcggatcgcagggcgcggatcgcggggcgcggggccgggcaccgggtaagaggcgcggggtgcgggcg

SEQ ID NO: 230229 - DNA, 426 bp, Homo sapiens
  chr4:6675573-6675999
  hyper
ggccctgaccctagaatcaacgcccaaagagctgtggcgctacagcgggcggggacatggggtgcgcatgcgtgcgggggggtacgcgtgcgtgcaagtgcgcgtgcgcgcgcaggaccgctgaggcgggagccccgaatgcggttctcgcttgctgcgtggcggtaaaggaccgcaggtgtcgtaaaagggccgcagtggcagcgtcctggccgacggctagtagcccattttggataccgtcctcgctgcggaaagttggggcaacctgttgctagtctggtcgttggtgacagcgaggcttccgcgctcgctgctggtgagcagccccggcgtgccccgcgggctggaagaggcggcggcgtgatgcggcccgtggacgcggacgaggcgcgggagccccgcgaggagccgggcagcccgctg

SEQ ID NO: 230230 - DNA, 340 bp, Homo sapiens
  chr4:6894039-6894379
  hyper
cagaataagtgacgcgtttcatctggaggagacacagaagggtccgtttccaccccatgactctgcagatgcgccactgacagtgtgtggtttccttcttggcagcgtccagctctccggcaagtggctgcagatcaaagaaagcagcggaaacctctaggggacacagcctcccagggactgtgaagctgaacagggcgtggcgggaggagccctggctgacagaaatgcaccccctccccttttccagggtcaagccccactcccagccctgtgggaggagggagcaggaagaacccagtgtgtggcgccagagtgcctggctcgaaattaatcctgg

SEQ ID NO: 230231 - DNA, 223 bp, Homo sapiens; identical to SEQ ID NO: 199332
  chr4:7069843-7070066
  hyper

SEQ ID NO: 230232 - DNA, 155 bp, Homo sapiens
  chr4:7070680-7070835
  hyper
agaacagagggccgcgtgttcttatggccccggtgccggcccccaagcggggttcccgcaggagatagggcctggctcccgcttcagcaccgcgtggcctggagtgcagttctggcggccaagatctgagggctgtagcccgtgccctcaccagg

SEQ ID NO: 230233 - DNA, 1016 bp, Homo sapiens
  chr4:7194115-7195131
  hyper
tggaggtggggccgcgctcgggtacgccgggcttcccacgagcgcctgggcggcgggccggccggcaggtggcggtgcgcgctcggcgtcgcgggtggcgccggggccgccgagtcccctcctcccgccgctccctcccctcgccggctcctttctctgcgctctcgctcgcgctccccagcgccctcctgctctcccggccgcggtcccctcgtccgcgccgccccgccgccggctccgctgccgcccctggcgaccatggcgcaccgggggccctcgcgcgcctcgaagggccccggccccaccgcccgagccccgagccccggggctccgccgccgccgcgctcgccgcgctcgcggccgctcctgctgctgctgctgctgctgggcgcctgcggggcggcggggcgctcccctgagcccgggcgcctgggtcctcacgcccaactgacccgggtgccgcggagccctcccgcggggcgcgcggagcccggtggcggcgaggaccggcaggcgcgcggcacggagccaggcgccccgggtccgagtcccggtcccgctcctggtcccggcgaggacggcgcccccgccgcgggctaccggcgctgggagcgggcggcgccgctggccggagtggcttcgcgggcgcaggtctcgctcatcagcacgtcgttcgtgctcaagggggacgcgacgcacaaccaggcgatggtgcactggacgggcgagaacagcagcgtaagtgacctccacgcgctcgccgcggcccctacccgggacaccgcgggacacccgggcgggaccgccacggcccccaccccagatccccactatggtcatcaggggcgggttcttggcgacttgggcacttgggtcacctcggccgcgcccctactggcctctggtcactggttacttggggagaggtcctcagattcgtacgcttgtctcaccgcaggggacattcccgcagatttcgggatcctgggccacctccgatactcccccactggcct

SEQ ID NO: 230234 - DNA, 156 bp, Homo sapiens
  chr4:7195161-7195317
  hyper
gaaccttcggaagcctgcaggtccttgagggtaccccagctcggcgttacctcccctgcccccagactccaccagctgagcgtcgcgttctgggattttgggctccgggatccttccctccctggtctaccagggactccgcggtggcgcctccgc

SEQ ID NO: 230235 - DNA, 1369 bp, Homo sapiens
  chr4:7940410-7941779
  hyper
cttccactctccaggcgctgagagctacaaagttcaatctggctttccagattttttttttcttcccattactaacggaagaaatcaagaagctccgggcagtagggccctgctccctccaatcagagcccagcccggggccagagcaggaagcgcggcggtgggacgcgcggtgacagccccgcgccccccggggcccgccggccaggggagaggacggtgcggccgctgcgcgacagctccgggcccgcgcctctcgcttccacccgccgggcaggtgagaggataaatcacggggcggggcagtgcgcccccaccaaccgcgccccccgcgcacggacccccattacactcgcgtcccaggcggggtcgacccagacgagccacggggcggcgcagagccccactcgcagggcggccgggacccacgcgcgtgggtccacgcaacaacctataggtgacaaaacactcaggaagccgtcatgcggggccaagaaagagcccccatccagagtcacggaccccctcgtccgagggtccgcgcagtcccctcggtaagtcggacgaagcagtctcgctacgggggagggcggcggagcctcccactcttggtgacccggaccccgccccacgagtgggtcttcgcagggccccctctgacgcacacggggaccagccacgccgcgggggcaccgggcaggagccagcgcccgggtccacgcagtcccctccgggcagacgcggggagctggggagcagtggggaccggcccccacccgcaggacgaccgggacccccgcgcgggcccacgcggcgtcgcagcaggcgcggagcccccggtaccacccgaggccgagacaaagcccaggcgcacggaccccggaccctgcggagccccgctcggagcttccacgcccggggcagagacccccgccgggtccggagaccctgccgccagtcgcgccgtctcacctcaggccgccacctcgcagcgctcgctcctcgccgcggcgcctgggccgactggagcgcagctgaacagccgacagagccgcagccgccttaacaatggagccccggggcggggccgccgccgccgcctcagcccgtgtaccccgctcgagatccggctcggctcgcggagctgcagccggcgtggggctgcggccgggacagacaccacgcaggcgcacacggccccgcccgccgcccgccgtcccgcccccagcggagccgggcgcccagggcccgccccccggccaatgggaagcgagctgcgcggagtgggcggggcctgagggaacaaagggaggttgggcggggcggtgctgggactgggcttgcggggtcccgcgggaggacccgcctc

SEQ ID NO: 230236 - DNA, 679 bp, Homo sapiens
  chr4:8159729-8160408
  hyper
gcggctgggctccagcgctgtgggatttttccagccccgcacagaggctgtcagatcccggagggtgggtgcggcgggaaaggcaggggtgcgacgcgcaggggcgaggggctggagacgcgcagagatcgggtcggggccgggtctgacacatgcgggctccgggtccccagatctgctgcggagagtcctgggcgccgagggtcggcctgacgcccccaacccaggcgctgccagagcggcgcaagggcggcgcccccagctgcaaagccccgcctatcatctcacctctgcgtgcctaggtctgctggggccccggcccttcgcccggaccccaggcccccgcgcggaccctgaccgctttctgcagcctggaacaacccggacccccgtgagaagcaaagaaggggcgccttccagacatcctggcgcagccacgccggccggcgcgctgggaaaggatccccggcccgcgccactgagctacgcgctccgggcgcagggcagagggctgcgctctggcccctcggggctgcaaaatcctggagcaaaagttgggtggagccgctgggtgattttccccggcgttgcaggtgcagcctccgaatgccacccagcccttgcggcgccgcgagccagcgcggggacccgttggtccctcggtccccagcacccacct

SEQ ID NO: 230237 - DNA, 911 bp, Homo sapiens
  chr4:8200618-8201529
  hyper
tctgcatgcacatgcgtgtgtgtgtgcatgcatgtatgtgtgcaggcatgcgtgtgtgtgtgtgtgcagtaaatggaagaggaacagagatcagagctgaggctggcagggctgaggcagccggtggctggtggacttccccaatcccagcctggcgggggactgggtgcccctagcctctactacagagcctgggggctgggcagcgggcaggcaggacagggcctggacctcgtccaggaaagagctaatgatcaaccggctgcggtgtctgtgcagccgccctgggcctgcctctccgtcaccggccctcaggcgcagggaggaagtagggcaggaagcagggggcggaggccgctgtgcagtcagcctggctgtgggcggcccctgcctgctccgtccagctggagacagccccgtggggccagccagcgctgggccaggagcggccacctggttcctgcgtgctacggccctgtgggcctgggagctgcctctgaggaacacgccgcaggtatggggggctccggggcaggcggggcgtggactggccgagcaggctgctgtctgccagtcttgccatggttggatctttacactttcttgaggacttttctgacctgtttgggatgggggtggagcgaaactgcgagctgggggcctcggggaggtcgtcggcaccctcagcagaccccactcagagctcacaggtgctggcagtgccaatccgcagtgattgagggcaatgatttcagctttgaccaagcacccttgcttctgggacctggcctgaccccgtgctggcccttggcatgagcggccctgggggtctgggagcagagccagcctgtcgctggattccaagtccagcggatctcaggtgtgaccccagcgcccggttagcttgggcc

SEQ ID NO: 230238 - DNA, 769 bp, Homo sapiens
  chr4:8271295-8272064
  hyper
gcctcgggttttctcgaccaggccgaccagagtcccaaggcctgccgggtgggtccaggcccggaaggccaggcggggccctgtcggggcctgggcggggctggcggaggggccgggccgccccttccagcgagggcgggctgggcggtcgcctttaaaggcgcgggacccgccgcccgcggaccgtcaggctggagggagctggtccctgcgctccctgcgccctggggatgcccctgccgccctgacgcccgccagcctgagccaccggcgcatgtgaccgcgcgtccgccccagtcccatccgtaggcgcccggcgcccggccccgcagcggcctcgttgtccccgccggcccccgcccggtctcccgcgctgccacccgccgccggccctgccgccatgcaggcgcgagcgctgctcctggccgcgttggccgcgctggcgctggcccgggagccccctgcggcgccgtgtcccgcgcgctgcgacgtgtcgcggtgtcccagcccccgctgccccggcggctacgtgcccgacctctgcaactgctgcctggtgtgcgccgccagcgagggcgagccctgtggcggccctctggactcgccttgcggcgagagcctggagtgcgtgcgcggcctatgccgctgccgctggtcgcacgccgtgtgtggcaccgacgggcacacctatgccaacgtgtgcgcgctgcaggcggccagccgccgcgcgctgcagctctccgggacgcccgtgcgccagctgcagaag

SEQ ID NO: 230239 - DNA, 38 bp, Homo sapiens
  chr4:8582087-8582125
  hyper
gccaattcattcccgcccctaccgcccctataagccac

SEQ ID NO: 230240 - DNA, 1399 bp, Homo sapiens
  chr4:8858767-8860166
  hyper
acactgcactccagcctgggcgacacagcggaccatctcaataacaaaccgaaactctggctatctccaggtagtcgaacttgggatgccttttgttttcagtgcttgtaattttctgaatttttaaaataacgaacagagtctccttgcgacattaaatgcaatgcagccgccgaggaagcgtcggggacagatggggttggacgccgtccccacttcctcccctgcagccgcctccaggccgccaacctcgcccagccggagcctcagtcctggagggtcgggcggcggcggccttcccctggagtggcattcttgttgcccgtggggccccctccccaggtaggaggcaggaggcggggtctggggcagcctccgctttctccttcctccttcccccgcggcttccctgctgcgccgggcctcccaggtctcaccccgagtttccgcacccggtggggcgcgggttccggcccagcttctctcggaagtgacggctgacctagagcccatccctggcctcggcctccgcacccccccgcccccctgcctgtggaacccgcagcccagaagcctggagcctctctgcgagcacgcaggggtctcccagcttccggatcgttccgccgttcgccctgggtctgagtctgggggttcgggaaacaattttggacgtttctggttggattgtgtctaaatcgtgcattttacgcgacaggggactcgaggtccttgaggatcccaaactgccgcagcccctccctcctcctccccttgcccttgcccctgcccagagaagtgcgctcctccagggtcatccacacgcgccgtgccgagccccgggccccagttccaggagccgcgtctctacgggccagtgggtcctgagagagtagggcttcgggcgctcggggagaggaggcggaggaggggtgaagccgaggggtggcttttaacgaaaaagaagttgaagcatcagctaagccattagggctaatgcgatgtactgtaagacggggatcaatgccgggcctcggggaccggcgtgggggagggggcagcaggccgaccgcccccaagccggtcgaggcccccgtccatttgggggaaatggattttcgcgatttaagaaacaaacccaaatcaaatgagcgaggcccggatgtgctgacgctgcggttacgcgcgcggagctggagccccgagagcgctctaggaaaggcgcagcggcgaccgcgggagggggtgagaagccgaggcagagaggtccggagaagcagaaagagatgccgaccggcagagaaagagcgagacagacacaccgaggggtgagggggcaaaagggagcagcctcgcaattttcgcagaagaaaacaggccggcgcggctggggatgcgc

SEQ ID NO: 230241 - DNA, 223 bp, Homo sapiens
  chr4:8860366-8860589
  hyper
tcgcttctggcggccgggagaggtcggcaccgtgacactcaggcacacatacaccaatgccccgggcccgctagggacgctgagctccaggcaacgaaaaacgaaggtcctggagtcggtcctgagtgcattcctccactgggccccgtcgagaatgaaactctcggagcatcgtcactgggaggtcctggggggacactggggtgggcgagcttcttcaaag

SEQ ID NO: 230242 - DNA, 371 bp, Homo sapiens
  chr4:8861437-8861808
  hyper
atgtgacgtggagtcgcactgggacccgaatgaggacatccccccgccccttcgtcatcgtgggaataccgtggaacaaggcgggcaaagggctgatcagctcccgtcccggcccgaagaaagcttccaggggaggcggaagggccattcgccattccagagcaggcgcgggcagtggcccacggctctgggcccggatctgtgtccacctctggatacccaattcccgccaccatgttgttgggagcaaggaggcacaactgcccgtggtgggagtggagggcttaggtccccattagaaccggcagagccccgacggggccaacggcggtgctgacagcgcgaactgcgtcaggggcgaagccgagttc

SEQ ID NO: 230243 - DNA, 67 bp, Homo sapiens
  chr4:8862228-8862295
  hyper
ccagtgaaggcaccgcgcacggtccaggaatctaacccttcctggggagtggggagggaagggctcg

SEQ ID NO: 230244 - DNA, 956 bp, Homo sapiens
  chr4:8862475-8863431
  hyper
cagccccatgccctgcccgcagcttgagctcaccgcccttctcggggtggcggtgcggagaccggacggctccactgtgcagaccccgaggggtaaggggccgggtaggggaggggagcgagaagtggcgaggtgagaactgaggggcgaggctgaaggctgagccagacttccagacgccagagagacgccaggtgagccgggcgggggcgggggcgagggcgggggagggggcggggccggaaccgcggggagggggcggggcgcccgggagggccgcgagctgggaaggtcccgggcggccggagacggtgaagaggcggggccgagtcgcgtccgcggggtcccggacacagcggagctggcgccactgtcggggttccgttccatctaggtcgggcagccccgcgggtccgggcgccgctgccctcctctacctgctgggaagcgcaggccgagcagggatgaacctggctccagggccccagcggggcaggcagggcccggaccagaagctgcggcaccgacttcccactgcccgaccgggcgacgcggggcctgggaggggcgggtcgggatcagagcgccgctgcgccccggaggccgcgcttcccgcggcctgtgccgaggagcctctccgcaaagaaataaacacgccctgtctccccgaccccgactcgggccggtcagaagtagggagaatcacgctcgggaaaggggggtagggaacgacgggggagcctcggtgaccagggcagatgcacgcgcgcgcgggatcctcgtgcgccgcgaagagggacgagcagaggagcatcggaagaagacaggcgaaggggaccgcggagcagcgtaggcggagccccgggggcacggccgaggctgcgcttcaggagtgtccgccaggcgccttcccgggcggttggcgaaacccgaggaggcccacagctctggcctgg

SEQ ID NO: 230245 - DNA, 493 bp, Homo sapiens
  chr4:8864565-8865058
  hyper
ttagctgttctcggcgcccgatcctgtgtgtccttccgtgcatgacacgcagagcttagctctgtgaggacagggctgtcccctctccggcccacctatgaaggggtgtccacctctccgtttccctccagggcagtcattcattgggtgatccgccttggggacctggggatcggcgagtccaggaggcccagcgaacgaatttccggtggctgggacccacttcccagcgggaccctggataggcatgcccactctggctaccagaagggcagggtggccgaagggtatgaagcatatgagtgcacaggcggggaggaacagcagcagcaccagcgcaggagtagcccgctggcctccctcaggcgggtggaggagggcgccggggagcctcagtgccaccgtgctccagaattcctgcccctctcagaaccccggtttccctttccaacaagttgcaaggtggggcggaaggccacgaaagactcttggg

SEQ ID NO: 230246 - DNA, 1284 bp, Homo sapiens
  chr4:8868832-8870116
  hyper
caacccggaggctgcgacgtctgcagagagccccagcctgcctgctcctggaacggacgatgggacccacaggtccagggtcctttctccaccagcacccgcgagaggggtagcacagccctccgggccggcctgctgtctgggtcccaggaaagggacgtttagtgttgggggcagtctgtggggacagtcaccgctcagccttggacagccggttcgtagttttcctttgttgcgctgggcttggcctgagggcagctgccccgggtggccatggccgaccgctcctcgctgaggccggggggtggccgtggcgccgggggctgcgcagcccagagtctctgcatggccccctgttcgagtggggatccagcctggcaaatgggtggggcgtcccattacattctagaggcgctccccacagaagctgaggcccgcccggccgcggcctgcgctcccgaggtatctaggaggccgcaggagcgaccatcccttccctaacgccccctgagccctgcgcctgccgctgaatcgcgcgtccacacaggtccacagggtcgtggggagagggcccggcaggcggggctcacaccaggccaggcatctgcgcccgcagaaagggcacggaggcggcggccgggaaggcggccagcgggtaggcgagggccccggagaagccgagcagcggtgggggcggcgcgggcgcggcgggcgccagcgggaagggcagggtggccgggggcccagcggcggctgcggccggggggctttcgtggtagagcaccggcacgcggaccaggcgctgcgctcccggcggggacaggctggccgcctccagctcggctgccagctgccgcttccacttgttgcggcggttctggaaccagatcttaacctgcgtctcggtgagctgcagggaggcggccaggccggcgcgctcggcgctgctcaggtagcgcttcaggtcgaaggtggattccagctggaagacctggctgcgggagaagactgtgcgcgtcttcttctttcggccgccgcccacgccaacgccgccgcgtgtctccccagccgccgcagggacctcggccagctccgacgcctcctccgtgccggccgccgggccacgcgccgccagctccgctgcctcccgctgcaccgctcccggcccggggcctcgcggccaggcgccctccgcacggcccatctcctcgcccgtctccggtgagtcccggtcgctggctgcaggggagagagggcaccaccgttggttctagggcactgatt

SEQ ID NO: 230247 - DNA, 55 bp, Homo sapiens
  chr4:8873586-8873641
  hyper
ccggggcggcctcactgggggcggggagggggaggggccagcaggggcggggggt

SEQ ID NO: 230248 - DNA, 443 bp, Homo sapiens
  chr4:8874497-8874940
  hyper
gttcgggaacataacgcaccctggagctgtctccgttccggcgtcgacttcagacttacctacattaggtcactgcgcggacgcgcgggttaagccggcttcacccgatgcgagttatttcgcagagatacatccatcctcccagggccagccccgggcccctctccacccgagtaccgcccgcgttcccggaggtgaccgcaggcctggggcttccgctttgtttaattcttccaaaaaagcacggtggagggagcatcgcccccatttttcagcggagaaaactgacgggagaagagagaagagactcccccagagggtaggtggctccggcaagcctggaattccttcactgatgccccggagtccggctggttggcagggcggtggggctccaggagcggctgaggcctagccagctgggccctcgcggcctgggttcg

SEQ ID NO: 230249 - DNA, 167 bp, Homo sapiens
  chr4:8879495-8879662
  hyper
gagcctggaaccgccggggccagctgagaagccgcctccgccgctggagtccctgggaagggtcccctccacctgcccacagccagcctgggaggcagacgcgccaacgtctggcccctcagcagggacagcggctccaacaaagccacccccgggaggggacgctg

SEQ ID NO: 230250 - DNA, 50 bp, Homo sapiens
  chr4:8893425-8893475
  hyper
aaacgaatccgagccgcagctgcacgtttgaaccccgcaaagccactgtg

SEQ ID NO: 230251 - DNA, 443 bp, Homo sapiens
  chr4:8893685-8894128
  hyper
cctcctccccagctcggcgtttgcagccccgctgggccgcgcgcaactggagcgccaagttgcgtcacctgagcgctgttaccgtggtgcccggtctgaccgcgtgtgcgaacccaggcgtctgcgaccgcgaagctgcgagttgtctcgggccctcccggagctgcgggcggctcctcgagaaactcagagagcccaggcgcaccacgggccagccaggacatccccaggcggccctgttagccccattttatggaggaagactgaggctttgggttgcatgggacccgcggttaccccgcaaacacagacgcttacgaagacgctatcgcgagccgaacagtctggaggaactacactcacagtagctcctccactgggtctccgcgtcctcgctggcctaactccgcaaacacgccctccccggacgcaggctgggtttg

SEQ ID NO: 230252 - DNA, 1998 bp, Homo sapiens
  chr4:8894331-8896329
  hyper
cgggttcccgagagcggcggggggtccaaaggcgcgggcaccgatggcgggcggggccctcctgggtcctctgcccgccgccacccctcggcccaccccgcccgcagcatctgcgcgttttaagccggataagacgcttccttccctgtttgtctgggtttctttctcggttgctcaaggctctgatgtgacctctccaagaaaggacaccaatggccgcgcccccgccccacgacgctgcggacagcaagccgactccccccacccggccgcctgccccctccccgcgtcggtgcgcgccttggctccgggaaacgcctgcctccggtcggtctagcgcggcgtgtgcgagtgcagcccccgcggggacgtgggcaccaacagcaggcgagtgactaccgcggcgcagttcccgaggacccagcgcctctcccgaggccaccctcccgggcaggaattactgtctgccggcccgaagccgccaccccacccgccgccctgtttcaaagttggggagagtccatgccgcgacggagcgagcagacttggacatggtcgagtgcctggtgcgcacgattggtcttaagagtttagggaaaaaagcacgcggggaaaccacgcggggcccggcgcgctctcgtttcccaccactgcccccttcccgggcaccgtgggccgccgctgttgcccgtcccgctttcttctcgcctcggagcaccgggtcccccggagtgacctactgcagccgagccccggcggtcgggggcttgcgctgggttttgggacgcggtctcagacgcttggccctgtggccctacccatcggttccggtcccaagaacggtgctctcctgtgcctcgggcctttcccggggcgccgggccgcggcaggagcgacctccgcccgcgctaccttcctgccctgtggcctacctgggtcccccttacacctctgctcggtgcagccctgagcctcggtttcccagacggcgcagctgaggctctcgaggtgacgagaggctgtgggggtgaggtcgcagccctgctccctcctcagttccgccacccaccccttcggtagtaacgccgttctcaaaatgggcccagggccccttccggccaaacacagcctggactcctgggcagagaccgagcgcggcagaggtggcccgaaggccgggttgcgggggatcccggcctctgcccaactgccccggaatctggcaggcagacacgctgcgccactggggacaatgcgaccccaatgagctggcgctcccctctggcgaaggaccaggtggcgaggtcgcccctgtcgtgtggcccaatgcgttaccagcaagaacaaagtcccatcttaactgctcttcgcgcggcttttgaccttgggtcggggctgcgtctcagcgctcaacagccccgcttctccccacggttttaaattaccggaacgaagccactgccagcggcgcctgcacggggagggcagggagcgctcggggcgcattgggacctcgagtaccttcaccctagggagtgctcgtccccagcccggcctctgcggccgcccccggcccagcccgtgctgtcctcatcttatcgcggcccgccccggccctgcgctcccgccgctccgcagccaggtttctccgctgccgtcctcttccagggccaaggggccgtggcagacccggagcctcccggaggcgcttctgccggggcggattatctcccctctcccaccaggccccggcggggggcaccaactcgccccgaaagccgagaagcgctggaactccccctcctggccccctcctccgcttctgtttgtttaaccttccggcagggcggtgaccctgcgccctgccaggcgctgccatggggtcaggcgggggtggggggcgcctcaggggtccggcggcggctgggagtcccccgagcagcagagaccctcctcctgtctcctgttctgcccatcgtgggaagtgtcccaggcctg

SEQ ID NO: 230253 - DNA, 715 bp, Homo sapiens
  chr4:9154789-9155504
  hyper
cctaccccaggcttcgccctcatgacgttcatcctggccacaccccaggccccgccctcctaacgctcatcttggccccgccctagagtccgcccccaggacgcacctcctgaccgtatccccaggccccgccccctctctgcccccgcgcactgccctcggcccgccccctcttcagtccaggcccggcttcctccaggtctccaggcaacgctgcggctccgcccacgtcatggcgcccgaggagaacgcggggacagaactctggctgcagggtttcgagcgccgcttcctggcggcgcgctcactgcgctccttcccctggcaggtggccggcggggcgagcggagaggcccgcgggggtcgcgggagtccaggggcagacgggatgggtctcggtgctgaaacccctggcgctccggccacgtgcgttcctgggctctccccggtcagggccgcgagacccggtccccgtccctggggcctggccagagtcgctcgcaccccttctgccccgcgagctggcggcggaagctgggggcgtctccaccgccctggggggcagacgcgcgttcggtgtggggcacagttcacgatcattttcacgactttttaaaggcagtaatcgttctggtcactgggacacagctgcgctcgcccattctaaaaagtcagcgccctcaggcccgcgggtaaccaccgcctcctgagcgcg

SEQ ID NO: 230254 - DNA, 222 bp, Homo sapiens
  chr4:9499999-9500221
  hyper
gtcttcttgcgacccggccccgctccagatccccccagctctcggcctcggacccgggccgcgtgtgagcgcgctttgcacctcctatccccagggtccgccgagagccacgattttttacagaaaatgagcaataaagagattttgtaccgtcctgactggggagtcccaggccgcgtgggacggagtgcccctcggatgcaagcccgtctggcccagcct

SEQ ID NO: 230255 - DNA, 105 bp, Homo sapiens; identical to SEQ ID NO: 199345
  chr4:9534314-9534419
  hyper

SEQ ID NO: 230256 - DNA, 473 bp, Homo sapiens
  chr4:9783105-9783578
  hyper
gcccctcggacctgcgggatcgcccctacactctggcgcgctgagggcggtgagcgagggcgccaaggcacaggtggggcgggagtcgagcgcggaggctcggggggcgggacgcggggcctgggagcggccagggaccgcggcagcgcctcagtgccagcctggcgcccgcgactgcctgccccagcccctcagtggcggcttgctctcttctctcgctccgaaccagacacagccgctgccgctgccgtccggcgcgctacagactcccgagaacagccctggctgtcagcgagcaccagccgcttcctgtccccatcgcggagactggaggggcgcaccacggccatggagccagaggcgcttcaggaggcaagagaagtccccgcgcgctccgcagcccggcgcagctcatggtgagcgccctctggggctcgagggtcccttggctgagggggcgcatcctcggggtg

SEQ ID NO: 230257 - DNA, 70 bp, Homo sapiens
  chr4:10458331-10458401
  hyper
cgtcccgctcgccgcgagggaaggccggggttcttccaaccgaagaaaaccaaaaccgtcaacgctcagc

SEQ ID NO: 230258 - DNA, 33 bp, Homo sapiens
  chr4:10458821-10458854
  hyper
gccccggcctggccccgtcaggcccccgccccg

SEQ ID NO: 230259 - DNA, 613 bp, Homo sapiens
  chr4:10462856-10463469
  hyper
cgtggctaaggcagggaccacgtcccagccgccctttcccgccctgcggcgcaggcccactctcttggctctcctggcccgcacactcagctcggccgccgcggctgccgcggaagcgcgcagtgaggctagtggggccacgagcggcgcgctgagcatgcgcgcccgatagagcctcgagatgcgccgggccgcgctgcgctgcagtaccgcccgcggcctgcagtgtcgctgcgagcccggctggcccagctcggcgtgtagagctctaccccgcgcggcgggcggtgcagccccgcgctcacctgggcgtcttcgctcccgctcgccccgcgcttccgaaaatcgggaatgtaatgttttgtttttacattccaatttgctccctccccaggctggcgtggaatccgagggttcctgatgactgcagctcctcgcccctcccgctgtgttcccgccgcctctgggctgaaagcgccatcaggacccgtggcgcgtgggctttgttaagtcattaactgcttgggacatagcaggagcatggtgcgcggcacagaacaggcttggcttccacggcccatccaggcggagccgtcagcgtcccttgcctaga

SEQ ID NO: 230260 - DNA, 622 bp, Homo sapiens
  chr4:11429088-11429710
  hyper
ttctcggagcgcagcgcaaagacagtggatttggagtggcctccctagaatccccccaaaagcatcttggcacaagttgtagataaaaatagctcatgataacattgtgggaaagggaggagcgagactcgcgcaaggcgaggcaagggtaccactggatctgcaaaggaggaggaagagggaggatgcaacccttggcccaagagagcgccctgagtgtgcgaggaatcgctggctcccaggggagggaaagagatggaagacctatagcgcctataactgcagagttatagacctataactgcagagcccagcacaccccatcccgcgccggcacccggctttggctccagcttcttcttcccatcatccgcctacgttctgggtctgtcctccgcttcctgggacaggctggggctagaaggaggagcagcgcgccgtccgccccctggctggtagagcgcacctggagaggtcaagctccgcgaataagacccttcctgggagctggggtctaggcgttccaaccgcgggttcgcaccccgccatccctcacctccatccgctgccactacccaagggcccggaaatagaaaaccacgaagggggaaaaaaatcagta

SEQ ID NO: 230261 - DNA, 93 bp, Homo sapiens
  chr4:11429925-11430018
  hyper
tggtacccaggatccgttgagtgctgcgctctcgctgccctacagggtcctatggtgaagctgcggtcgcgaagcggccggcaggagcgaacc

SEQ ID NO: 230262 - DNA, 937 bp, Homo sapiens
  chr4:11430339-11431276
  hyper
ccagcccgtccggcgccctaaataggctcctaggctgggccatgggcagcactgccgagcacccgcggcgggtagagcaagtttctggatggcccggggcaggcgggcggggagaaggcgcaggcacccactgagacccggctgtcgtggcggcgactcctggctgccagggcgcagaggaccttgcaggcgggcgttttggtgctcaatcccgaggagggggaggagcgggaggaggagcgggagcaaaaggaggggacggaggaggccgggcccggagggagagcgcgttgggcagaggaggatcgcgagcgcccactgctgcccggcccgctcgggtgccgcccagagtccggcccgctaggtgcctggtgctccgctctgcgctcagctgctccgcacagccccgcctggcacgcagctccagcggctggtcgggtagtagtcggtcccgcccacccggtgcggtggcccctggggtttcagtccaaggggagggaccagcgctccaagaaggtgaggctgctgggatgggtgactccgccgtcactgcaaacacgggacgtcccgtctactcccttacgcctgcttggtctgagcccgagtctacctcttctctaagtcgccagctcggcacttgtacccgggacctgtgctcctcccacgtgagtctgcaccatgcgtattcccttcctggcaggtgacccaccttaggcgctggcgctccttccgccccccgggaagcaggaggtgccatcctctccaattcgctctgcagccggactgggaccggagcggcggcctgggccagaatccgcgtgaggagccggcttcaaagagcgccctgtcgccattgaacactccttttcctttggtttagcgtcggagagcggacgccaatttgccaggagagcgcggaaaattcagcttttttttt

SEQ ID NO: 230263 - DNA, 223 bp, Homo sapiens
  chr4:13486089-13486312
  hyper
ccggcgggagaggcgaggcgctgcgtttcccttcaggagacagttggctagaagaagaaaagaagtgttcgttcaaattaaggagagaaaacgggagcagagcagctttcaggcgttccatcaaattcccttttctccttccctcttgagaaagtctctgaagggaatggttcagcctgacggggtggagcagtgacgcccgggctacgcgccagggttgcct

SEQ ID NO: 230264 - DNA, 620 bp, Homo sapiens
  chr4:13524020-13524640
  hyper
aagggaactggggagaagcacgttccaggtgtgggttcagctcggcactcgccacaggcctccgcaggtggctctccttggcagcgaggcaaggcgcaaacccgctggcttgggaagcctgacgtgacccccgcccgccaagcctggcaggaagcgacgccggggttctccgcaagaagaaggcggcctccgggtgtcggccgcagccaggctactgtgctccggggcaaaccgctgcaaagtcctagtgaggcagaactcgacccccaacactcagcagcctgccgtccacccatccacacccccgtctcgccccctgccccaagctggcagatgccttgtcgcccctctaagaccgcacccggattgggtggctgcaaagacgctcgccaaagcgctcagagccccagggaagccgtggcgcctggcagctccctctcctctgggagatctgggggcgccagggctgccggggcctagcacagcgtgcgccacgaggcttaaggatgcgaaaactactgggaggccgagagaggtcccgggagcaggggcttgaggaggcaccttggggctacggacttcgctgccgtggtggcctcgcaggagaaagtggcttaaat

SEQ ID NO: 230265 - DNA, 84 bp, Homo sapiens
  chr4:13529795-13529879
  hyper
cgctcagcagtggcgcaagtgcttcctccacttgcgtgggtggcgtctcagcgaaggtccgcgcccttcgagtgtctggaaagg

SEQ ID NO: 230266 - DNA, 260 bp, Homo sapiens
  chr4:13536102-13536362
  hyper
cccccggcctcctccgcaaacagggattcctagaagccagtcaccttggtgacagctctgcaccccatccaggatgcacacggaggacgtcctgctgcagcctgactttggcaggaatactctcgacccgtttgtgagcaggtttactacttggtttttgaattctcaagagcatcaaatccattgacgcccttcccaaaaacacaagccaaaaggaagtagaccggcacaaaccccaggcctgccgatccctcgaagct

SEQ ID NO: 230267 - DNA, 147 bp, Homo sapiens
  chr4:13538786-13538933
  hyper
gagcctctgcgaaccggatccgaacaggatttggaaacgcatcacctgtaacgttccagacaaaagaatggagttgtttttgttgttcttcttattgttcaatattgtttggttgctcccccggccctccctcggattagaagcctc

SEQ ID NO: 230268 - DNA, 882 bp, Homo sapiens
  chr4:13543520-13544402
  hyper
ttggcggggcgccccgtgcaggctacagcctacagctgtcagcgccggtccggagccggagcgcgggaatcactcgctgcctcagcccaagcgggttcactgggtgcctgcggcagctgcgcaggtggagagcgcccagcctgggaggcagtagtacgggtaatagtaggagggctgcagtggcagaagcgagggtggccgcagcacttcgccgggcaggtattgtctctggtcgtcgcgcaccagcacctttacggccaccttcttggcggcgggcgccgaggccagcaggtcggctgccatctgccggcgctttgtcttgtagcgacggttctggaaccagattttcacctgcgtctcggtgagcttcagcgacgcggccaggtctgcgcgctcgggcccggacaggtagcgctggtggttaaagcggcgctccagctcgaagacctgcgcgtgggagaaagcggcccgcgagcgcttcttgcgtggcttgggcgccgccggctcctcctcctcctccgcgacgcctgccggcccgctgccgcccccgccgccggccccgctgcacagcgcggacacgtgtgcacctctggggccaacaccgtcgtcctcggtccttgggctgcggtcgcctgcggaccccggtgggaacagaaacaagagactgtcagcgccacagacgaggtgaggccgggcctcaactgcaggggtcacgggagtggggcggaaatacactttgatcccactcaagcggagcggaggtctgggaggccctgggcccgggagaccagtcttagactcttgccccactgggtatcccatctaggcctcttctggggagggcggcagactcagccgctgtgtcaacgctgtgttgtcgag

SEQ ID NO: 230269 - DNA, 126 bp, Homo sapiens
  chr4:13545288-13545414
  hyper
aacgcaaggggcagcggttctcccaacccagtctaatgcacattggcccaggatgtctcaggcctcaccccaggacgtagggctctgaggagctactccggtctctcgcgggctcagttcccgaag

SEQ ID NO: 230270 - DNA, 897 bp, Homo sapiens
  chr4:13546014-13546911
  hyper
ggtgttggcgccgcgcacagccatctgcgccgcgggcaggagcggccggcggggcgggcagctggggcgccgagcagctccgagcgggacagagagcgccggcggccgcagcgcgagtgagctgggtgtgcgaggccgccgccgcccactgctgcgcggcccagcagctcccgccccactccgtcccaggatcagcgccgaccctcgcccccaccttagaggcccaccccgcccggagaccccctccccccgaatccagagccagacgctctcctttcgcagctcagctggattatctcatcgcttctcgcccttaggggcgggctggggtctgccccctcgggggacgtgaaggaggattggcgggggcccctccgtggcagcagtcccctcccgagcgccgccggggcgcacagcccgagtcactttttctttgcgcgtctgtcccttcctcgcctgcaggatttcgctcctggcccgtcctccccttccctgctgggcaggctcttccggagcccacccccggcggcggcggcggtagccgcggccgcggccgctggattccgagaggcgcggggaacttttttaccccctgccctggttttatctgtttcttttctctttccttcccttgcgttccactgtaccacccccctcccgcccgggtgtcattcctcactgctgagtgacagcctgaggccacacccctccactgggctgtcccgggcgctcccggccgtccattggctggctccagttgggcgacgttgactttaacagacaaaactgggcacgttgcgccgctaaagacagggtctgacttaaccccttctctcctaagcctggtcctcgaagcaccctccagcaacaaggaggctcatccgacccaaaccacgt

SEQ ID NO: 230271 - DNA, 1320 bp, Homo sapiens
  chr4:13548570-13549890
  hyper
cgttccgcgtcttccggaggcgcacagcaagggagtctcctggtgtcatctcgggccattacggcgcttagtcgatcattaggtctgtgggtgactgtaggcagagccgggagttgggtgcttggcgcggagggtgaactcgcgggtcttgagctgcaactagaagctgctcctagcaaggggtcgggtggagatgaaaagactgtggggaaggggaggtggttgtatgcccagagatatcccggcgtaactacggagtccaggcccagagtggcggtgtgtggcgaaggcgcagcaggcctgcgcctgtcggaggacggcagatctggacgcgaccgcgcgggcgtgcctgggtcccgcttcctgcccatcgagggcgacttccttcgggctcagctgtgagctccaggaactctgcaacctcccgacgggcgccacgctccggcttgggccggcccgggagttggcggagctgcgcggcccggccgggcggccggtgaggctttcgagaggcaccgggctcgctcagcgtccgcgcctctctaccccgccgcgccccctccgcgcccacgggcccattttttcctagtcttctgcctctcttccttcttcctccctcccctcctcctccacacctttgtcttcttcctcctccctcctcctgcttctcctccgcagtttggatcctacgggccccctacgtgccgcgcccttcggtccccggaaccgcccgggctgggggtgctgctgcgcggtgagacttccgcgggcggcgggcggagagcgggatttgactgcgaaagccaagggggcggggaaggggaagccccggccctcgggggcgcgcagtaaactgctgcacacgtgcccgcgctcccgaggggggcgcccagtgggctcgggatttcctggctgcgccaccgcgcgcctcgcccccgacgcccgccacctgtgccctgggccgccttccctgacgccagcggccggaggtcgcgcgcgccgggtgctgcccagcaacgaaaggccatgcggggttcgtccctcagatgccggtgaccttgattgaagtcacctgccttctctagcttccagtcctttaaaacgagggtttggacccggtgccttctgaacccggtgcttcactgagtgagcaagtgaagggtgtgtgtgtgtgtttggggtgggggcgggggcgaggggagggaggggcagcgttgccggctccccagagccaggtccaggcagaggtcgcgcccagcactgaccgtcggtcccaatccgcagactcccgagggcgatccaaaccgcctaagcatccca

SEQ ID NO: 230272 - DNA, 44 bp, Homo sapiens; identical to SEQ ID NO: 199354
  chr4:13550560-13550604
  hyper

SEQ ID NO: 230273 - DNA, 69 bp, Homo sapiens
  chr4:13629534-13629603
  hyper
gggtttaggtcaccggcaggggtctggagtccctggaggttagggcttcgacccgcgcgacacctgggg

SEQ ID NO: 230274 - DNA, 33 bp, Homo sapiens; identical to SEQ ID NO: 199355
  chr4:13655883-13655916
  hyper

SEQ ID NO: 230275 - DNA, 122 bp, Homo sapiens
  chr4:15006620-15006742
  hyper
tcgggcggtcagtcgagccgctcccaaagctccgcccgatcaacctgctggcagcgccgcaccctgggccgccggcccaggagggagtcgggagggagcggccgaccgccctcctcgcagga

SEQ ID NO: 230276 - DNA, 109 bp, Homo sapiens
  chr4:15412532-15412641
  hyper
atcaacatcaatttcgagttacaacccagaaacaaaacagagttttgaaaagcagcagtgcctgtcatccaaattgcatttcctgtttcacacgcgaacaggaaggaaa

SEQ ID NO: 230277 - DNA, 107 bp, Homo sapiens
  chr4:15683192-15683299
  hyper
agagggccccaggcgcctagggagtcgttaccgccctggcattcaaataactcccgcgagaggcggaaatcccgcgagactgccgacagagcgtagggaagtggaaa

SEQ ID NO: 230278 - DNA, 1039 bp, Homo sapiens
  chr4:15780070-15781109
  hyper
gacaaaccctgctgccggctctctaggagagcccaactctgtcttggcgtcagtatcctggtcctgatcctcgtcgtggtgctcgcggtggtcgtcccgaggtggcgccagcagtggagcggtccgggcaccaccaagcgctttcccgagaccgtcctggcgcgatgcgtcaagtacactgaaattcatcctgagatgaggtgggttggcgactaaggcgcaccggtgggcactgcggggacagcagggccccgcgcgcagggaagccgcccggatcgcccggaaccgggcatcttccgtggcgggtcagccgagagcccgccgggtggtgctgagtagggagtcccgggctcggggctccgcgggccgctttcaggagcagctggccttggcaccgagcgtgcccgcgggaggcgggggggggcgctgctcggtggctctgctgcgtagccggtgaacacttggcaccgatgcccgccttctgggcaaggtgccctgagcccagcccctcgccgggctgcagcccaccctcggcgcgctcagcccgcttcaccgcttcagggacggaatagaactcgcagatgcagggtgtcgctgacattttcaactttttctgcggtttccgcccgctgtctctgacccgaaagtgcccccggacggttacagaggacacttaagtggtttgcaaagcctgtggtaggggaggagggtgtagaagggccaaaccacggaacttagttttattcatttatataaagcagcactccgattctttttgcgcggcctgaaatgcatgtgaccagagaagtaattaacaaaacaatgtcaacttctaaaaccgagacattacttagatgataaggcgcagcaactcggtgaatctgtacaaaccttggaaaaaaaacacattagtctatgggaccttccagttttctcatgctcctttccagctactaacctctcctaaagggaacaaccactttttggatttgattcccaggcctcgctttcaccgggaaattatcgttgcttgtaaaac

SEQ ID NO: 230279 - DNA, 1878 bp, Homo sapiens
  chr4:16083804-16085682
  hyper
gctcctaggataaccgggacagaaaggacggtgagaaaagaaaaatgagtaacatcacacaagttgaatcatatgaggttgacgatattcacatcttccatccaaaaaaccgacaatttcttatgattcaacccaacatatcgcagcggttgttcgtgtcgcatgagtctcggggggcactcaagaactacgatcgtgcacttgctttcttaacaaagaacagctgccgccctcaggaactccagcaaacctttctccagaaaggtcagtcgccttagcgggctccaggagcaacctgttgcagaatgaagcctggggcgccggcttccccgccctttacctccaaaccacctccaggccaagccccctccaggcctagctcccttctgggcggaagcctctcgcgagctgcgggacacaaaagaatgagcggcggggcgggcgcgggaagccaagagactccaggaattcgcagccgcgcaggggagggggttgccggagtaacttggctgctctgagcgcgtcggcgccagttccccgccgcggcccctgttgggcaccgatcgggggcgatcttgccagagagaaggggttctggagctagttcctccctccgatccgactccctgcccctccagacacgggctttcggggaaactgatcccgagcctctgactttctacagccgtgaagctcctggtctgtccacgctcctctttgttgtccggtcggcgtgttctggcagggtgcgccttgagcaccccagttctccatctagcgatagccgcgggtccccgcgcatgcaagcagaagggccgtggagcgagaggctgggaaggtgcttcaagccaggggtgcatgctttctcccacggacgcggggagatggcctcgctttgtacccccatatccctactcccgctgtggtcggctgcacagtgttggcccatttccgcactcagccagggaagctcagcgcctcacgtccccggggccatccctagagtttcctttaccgcagactcgttcccaagaccctggcgagtctcacctcggtcaccgttctccccgagagcgagtccgaagtctctggggccccggtccagttcgcacactcacctccgactcccgctccggaaccacggccgccggctacccccacccccgcccccatccccagtggatggaaagaagacccaagcggggcgtcgcgggccaccactcagactaaaaagtttgggttggacgggcaccggcaccaccacgctctccccgcagttcctctggcccccagccgctgtccgggcccgcaccacctgctgaggggccagggaggcggcgcagatggctagggtaaggggggcgcagagcgaacccgtccactcctcactgtacacccccagtacagtggaaggagtgcgctcagccccgcgcctggtcagcagatgcctctctcgctccgggatgaggacccagctactcaccgtgcacccggctcccgctcctgctcccgccctagtcaccgctgccgccgcccttcccttagctcgccagaccctggctcgtgaattatttatgacccggcttctgggaccaccgcgacggctttcggagagcccgcctcccactgccggccgcggaggggctcaggcggcgctgcggccggaccctcggacgtggcgggaggcaggagaaaggcccgggtgcccggggggacccgttgcggcttcctctgtcccggacggggacctaggtatggggccgccgtaatggaaaggattccttaaacatactcaccgcggcgggagagctgagagcatggccaggtgccgcgtggggatctgcctcagtcacttaaagatcgcgaaacccgagccct

SEQ ID NO: 230280 - DNA, 223 bp, Homo sapiens
  chr4:17578660-17578883
  hyper
agcgctccgcccacgcccgcttgcagaactcgccccgcctccgccccacccatcgtgtgacgtcaccatatcggtcccgcccctctacttcgcgttgctcccgggactgtcaaccgcgtccggaagccccgccttttcgcccccgcccgcatgcgcgggcgcacacgaatgcgggcgcacacgaatgcgggcgcacacgaatgcgggcgcacccttgagtccc

SEQ ID NO: 230281 - DNA, 271 bp, Homo sapiens
  chr4:17616177-17616448
  hyper
ctcggtcctgtcacgtgaccacgcctactacaccagccacgtgagcttctgagccggcttccgcgcaggcgcagtggatctctcttgcgccattccaaacatggcggctccactagggggtatgttttctgggcagccacccggtccccctcaggccccgccgggccttccgggccaagcttcgcttcttcaggcagctccaggcgctcctagaccttccagcagtactttggtggacgagttggagtcatctttcgaggtaatataagac

SEQ ID NO: 230282 - DNA, 836 bp, Homo sapiens
  chr4:17782723-17783559
  hyper
actcccggctcgggcgccccgggcgtgcagctcgctggcccgctgcgccccaccttaccttggtgagctgggcgatcttcttgcacattttcacgtgcatctggggatcacagtccattctccagccggcgccaccgtcggctttggagccctggcaagtgccgggcgggttaattttgctgttgagagcagaagccatcgctaaaacgcgcccagcactcagactctctcgttttctccctgcccaccgtgtgcacgtgcgtgcgcgcgcgggcgtgcgagcgtgtgggtttctcgggagaggtggcactgcagtcccgtcgcctgcaccgccgcgtggccccagcttcccgaaggtctccgcctcccgggcccacccgcgcgcccaccctttttcctctcctgctggttctctggctggctggctccgcgggcacccgcaccctgcggcgaggcgtcggcgccccgcacgtgccgctggcgatcagtctgcagttccccagccagtgcaggtttcgtgtgcaaggggagagcttccgcggctaggagctgccggccttggggggtttgcggtgggcgggcactgcgctcttggacacgtgggtggcgcgcggccctggacttggtggcgacggaccctgcccgaggtggggatcccaggctaaagaggaagaagagcctccggagagggacagggcacagtgactggcggcctccggagagggacagggcacagtgactggcggctcccgagtctccgagctgatagcggagatggcggtgggggacgagatgctaagagaggggcgggtaggtgagggcgagccatcgggact

SEQ ID NO: 230283 - DNA, 250 bp, Homo sapiens
  chr4:17812338-17812588
  hyper
ggcaaggccactccgctcagctcccgcgccgacgctacttccggccgagtcaaggcccctcccccttagaaacgccacttccctccgtgaaaacggctggacaaggttgaacctagacgcatgcgcccaaagcgcggggtgcgaggtgggtggacccatcgcttcccgctctcttctcccaaagcgcttacggcagtctcgcgggatttccccctctcgcgggaattatttgaacgttcgagcggtaaat

SEQ ID NO: 230284 - DNA, 3821 bp, Homo sapiens
  chr4:20253116-20256937
  hyper
cccccttaaggatcgcgtggcaaaagctgcaggagaggcactggcagggctgtttatttatgagccgcgttcaaagccgacctcttcccattctcccactgcaaacgactatctccgagcccaggtcacctctggggccaaggagttgggggctggggctcgggtggctccttcttcgggccaagtttgcccgcgcgtgggagcgagggggcgagccagggcgcacgggaacgcgcgccgccagccgccgcctccgcccagcgctggcagccccggcctcacctctcccctctccccagcgaggtgcgggctcccagagcggagccagggggcgggcctgggcctcgaggggcggggtcagggggcggaggctcgggcggctatataaggcccgcgccggctcaacttcggacttggtgttatttatttgggaagcgcccggacggcggagcttggcggcggcggtggtggtggctgccgcagactgtggttaaaaaaaagaaggcggcggcggcggcggcggcggaggcggaggcagctgcgaggcatgggagcgccgaagcgcccaggcgcaggccgaagctgccgcgctttctgggcacggcgggagtgctgagcagaaaggggagcgccgggggcccgcagccggctccggaggcgcgggccgggtttttgtttggctacgctgagcgccagtcagccccagcgaacaactccagttacgacaacaacccaccttccttccagacaagcgagacttgggctgctgcgtccgtcctattgtttagacacttgccaggggctccggagtcggcagagccaccgagtccccgctctgagtcgtcgccctccctctccccgacctcgctccctggagcgggaggccaggaaagcagcgggagaggggaaggggctagaaggagaaggactacccgggactgcggccgccgcgtcaggtgcagcgccaggagccgggcggcgtcgccacgccggcaggggtaccgccactgtggccttgggggacggaattcaaagcctgggaaaagttgctgcactttgagaaggacgaaccactagtgggagaccgccgggggccggccgtggctctgcgccctccggaacccggctcttgtttcttctacctttgccatcaggtgtctgccgcggagctgcggcttatctgggagacgagcggggttgacacgcgcgcacacactactgccattcagctgccgcctggctctgcctggagtagtggatcccacccgcccacctgccaccgagccattctccagtacgccccagcaggacgctgacacctccaaccttggcctttgcctttccactccttccggtctgcctggtttttaagtccgcccccagtcagtccccactcagtcttcgcagcagctctcatcctccacttggcctcttggagttcctcgccggagtgctgactagtggatatttctgcccggctgcggcggcccgactgcccttttgtcttttctgcgtgacctcggggcaggtcctggtgcagagcgtcgccaaggacgccgagcgggaggcgggattgcccagacatccttcagcgaagtgcatgtgtgtttgtaaaccatcgttggctgtcgggagaccgcgaggaccggtccaggctgcggcggagtcgagggcgagggagaggccgcgtgagtgagcagagtccagagccgtgcgcccccagaactgcgcgtccgccccgtgcacccccgcgcgccatgcccagttgccccgcgcgctctgctacgggcccgctgggcttccgcgccttctagcttccggagcccactttgatcggggccataatacctattgagatcccctcttctgtcttgtaccttcgccactggcatcggatttgcagaagcgtgcgtgggatcagaggaccgccctccccacaacaaccggcccctgcatcttagcagccgttggaagccccagctcttttaccgccaagttcatccttgggagacagaagacgcgtgatctcctctccgctgctcttggggtctccttgcagccctggccaggcggattcatcctcaggacctaaagttgcccaaggagctcctgctctgccagaggagggtggagagggcggtgggaggcgtgtgcctgagtgggctctactgccttgttccatattatttggtgcacattttccctggcactctgggttgctagccccgccgggcactgggcctcagacactgcgcggttccctcggagcagcaagctaaagaaagcccccagtgccggcgaggaaggaggcggcggggaaagatgcgcggcgttggctggcagatgctgtccctgtcgctggggttagtgctggcgatcctgaacaaggtggcaccgcaggcgtgcccggcgcagtgctcttgctcgggcagcacagtggactgtcacgggctggcgctgcgcagcgtgcccaggaatatcccccgcaacaccgagagactgtgagtatgcgctcttcgtcttcccctctccccatccgggccgcgcacccctgcctccactggaggaacctgtcagctcagggtcctgtgcctggggcagccctcgctagctctcccccatgcacatcctggggttgagctctccgggagggcactggccagggaagggcctctgtccaaggaggggcgggtccgctggcagctgcgctagttctccctcccctgctctcgtcccgccactcgcagctccttgctggctagttctctggggctggggagcgggtagataggggacaagtactggaggatgcccggggcaagtgagacgccactttgttctccagagtccataaacggagtcaccttgcgattgccagcatccaggtcggtttcagagcccagtcctcgctcttgtcgcaggctggcgcggaggggatagcagggagactcaaaagagagaaacttgccttccccgattttttgtcaccctcctgggggcgaaggttaggaagaaggggtcatggagtgcctgggggtgcttctcacaggtcgcggggagaagggtgccccaggacggcgacacctcgcatagtagcctcgcgcagccccccgccccccacttctccggggaggggaagacggcgtcaggcccctagggacttgtctcagcgggcgactgcgagggaggaccgtgtcccatccgttaagcgaagttagcactggttctccagcgcaaaccagcccaaccaggtcttaccactgcggcgacccggcggtgcccggctgccccctccggcccttcctgctgaacccctgcgtccccatccacctttctggcagtttctgcgccccttcacgtggcagcagttcccctgccttcccctcttcgcgctccgttgctcgcagacgtccccgcctccctgtctttgcgagtctctaatgaagaagtaaatgcagacccggtgttgacggcccacgcgctcctgatgaggcgcttccagagttcagcgaagtggagcatggaggccgttctctttgtgaacgccgaggccgccgccccgcgccagtccggccgccctaggcacgttccgctctcgcggttgcgtgtgggccgggagtaagcgaagggcgcggggctaggccggcaggggccagcgcgtctggattcgtcccgcggcctctttgcccccggggtgtaagggtttcgggccgtggagaggaggcgctctgacccgcacgtctccacccgcgcagcccattgcacttcaagtcgcccttcttatccaacccatttctctcgcccttagttttaaggcccaa

SEQ ID NO: 230285 - DNA, 152 bp, Homo sapiens
  chr4:20985813-20985965
  hyper
ctgcagccagcgggcgagtacttcgacttcagagctgcgagggaaacgtctgtcggagaactggagactttgcagtgtccgtggcgagaagggacactcctaggaaacttgcccgggagaacaccgcgcgcttccctcgctgaggacgcgag

SEQ ID NO: 230286 - DNA, 255 bp, Homo sapiens
  chr4:21305843-21306098
  hyper
cagaggccagaagtagcagccggataaagtcgggcctgtcggaattatcggcttcctcattatcactcttgcacagagagacagccacgcatgaagtcgcggcgcagatcacccgaggacccaggaggtcaccaggaacgtcccgaggaaacatgaggcccggcgcggaggagatggctctgcgccccgggactctgcgcgccgcgccgccgccaccagtggctttgttgggccggccagttgccttggaaacaa

SEQ ID NO: 230287 - DNA, 986 bp, Homo sapiens
  chr4:21949839-21950825
  hyper
taggggaaggaagcgtgcggtctggagtcatctggcagatgcataaacaacctcggaaattttcagagaaggcaaaagtacgcacaggatcgcaggggaccctgccaccggcgagtttcaaacacacttcaaacatcttttcttccccgacctggatcttgcatgcacccccctctcctttgcaccccattcctgccgctcccacctccccttcccagtcccgccaggtgactgtgtctcatgcagcgaaggcaacaagcgtccccagccgaggaagggaaggggcagccgtcttggctcgcgagggaaggagggcggaagcgggcgcccgctcgcaagcttattgcatcctaccgcctgtagagctggcctcctccagctgagccgaaatgctttccaccctcctcacattcatgtctagggacgcagggtgcagaagcgagactcgagagtccaccggccaggggcgtctgtccacgggtctgcacgggagcgcaccgccgctcggcccgggggcgtccgtggcgctgggagcgagagcttcggcggcggctgcgggcagggcgcgcggagcgggctgcaggtgcgggcggaggccggcggggggcgccgggggcgctgcgcggcccttggcggcgggggcgcgcggggtggcgggggaggccgaggcgccggcagcttcgcgccggcggctggaagcgggcgggctgcacgggcggctcgagtgcggggaccccagcccctcgccctcgtgagcgccgcccctgccacctgctgccaagtcaccggactggggatgcggggggcggggtgcggggagaggaaagcgccgcgggtggcacggtgcctctggcgacagagtagatggacccgaaagagacccgaggtgacttcgggctgggcaggacacccccgggagttgccagcggctctcagcgggcgcctctaggaccccttgtcactgcgagcagcgcctgctctgggga

SEQ ID NO: 230288 - DNA, 94 bp, Homo sapiens
  chr4:22517045-22517139
  hyper
ccacacaaaggcgcgtgggtgccggctggaccctgctccaaagttgagcggagagataagaaagagccgagcgggagaggacccagcgtcgcgg

SEQ ID NO: 230289 - DNA, 196 bp, Homo sapiens
  chr4:24471687-24471883
  hyper
tgcctgagtttcacggccccggggtgcaggtcggaggcacgcgcctggaaacttgtcctaacgcctctgactccaggactggggggcgcggcgctgccgaggatgcccgaatgccggccgggcttgtaccgggtgcgtggttcaagcctttcgtacccgcctcagtcctcaaagacgagcagggcttggtttctga

SEQ ID NO: 230290 - DNA, 1035 bp, Homo sapiens
  chr4:24471943-24472978
  hyper
cacactctctcacacaggcaggcacgcggacgcccgctcctggagagctggagtttgcggagccggagtggtcgttggctctcggcaatcctgggcggatgcaaggaagcgtggagagcacccaaggcccgccaggcggggcaggatagcctgaaggaagccaccggcgccggccacgggcagccgggcaccctccgggccccgatcgtgcttctccaggcccccagctccagcgccggcccgaccacctcagtagctcctgcaagtttctactcgcagcgaggcctcgtgtctcccggctgcctcaccgcgaatcctcactccgcgcgcctgggctgccctcccgccccgcccgaacggccggcgtacttcccgggggcagcccagacgcccccacccgcggcggcggcccgacggtctgcccagagctcgccgccgcctcccgctgctgctgccgcggcggcgggagcctctccaaggctccgggcggcccttatgtattattcactcggatggccgcagcgctttctggagagcccacgccggagaggtcttcacctggcagctagtagtttggcgatttgtttcttggaaacttggggtgatgcggaggcggcggcggcgaacatttttcggttgctttcggggtttgtcttctctgccgggagctcgcaggaacgcgctgcgccccgggcccgggagggagcgcgccagcgccggcgagcgcggcgggcagccccgcaagcggccgaggctggctggcgggctccggaggagaggcgccgcggaggccaggcgagccgggctgaacggagctcttttcctcgacaccccccacccctagcgggccagctccccccgcggtgcgcgctccgcggggcccgggaatccccggcgccctggaccgcccaccgagtagctaatgcctttcaccattgctcctccaccgctcctctggccccaactttccccagcccagacacgcgagcgcgcgcgcacacccacacacagacacacacccgcgtgcacacacac

SEQ ID NO: 230291 - DNA, 402 bp, Homo sapiens
  chr4:24473241-24473643
  hyper
cgccccccttccggcgtctacccccagcgtccctgggccccccgagtcacaccgacacgcacacctacaggccggcggcgtggagcgtctagggcacgatgcagccggactgcattgcacagtcatcaaagttaagtgtgtttgtggggtgcttctgtgccccaggggaggcgcggggtcaggaggagcggaggctccactctgcaccccaccccccccacctccgcgggtcaggggacgcctctacttgagattgcagccattttagggaaagaggcggctcgggccccgaggggagtggaggggggacagcacgtcgcggggggcttgcggctctgcagcccctcggcgcaactggaaggcgggtaggcgccgggcgcacaggggcgcggcgcccgcggc

SEQ ID NO: 230292 - DNA, 436 bp, Homo sapiens
  chr4:24474654-24475090
  hyper
gcgctgactccgccggctgccggggacagcctgtactacagccccggccactaaatcagaccacgccgccagaccttttgcagcccgcggccggccggccgccttctccgacctcctcgccatagccgccgggccatgcgcgtcccgggacggcagggggcgcgggtgaggccgcgggcaggtggatggatgggtggggagtgggccgccctgagcccgggaagaggaaaaatgctcgaggaaaaacacaggcgcccacccccccgctacgtccggcaacctcctggcaagccttccttccgccctgtttgaagatttttttttttattcctaaaattgcttttccatgcagagacccctcttccagccactggaaaattattttcacatagttgctatgtcccgcttttcttgctttcgcgatccctccagcccc

SEQ ID NO: 230293 - DNA, 392 bp, Homo sapiens
  chr4:24801470-24801862
  hyper
agccgcgccatccacgtgcaccagttcggggacctgagccagggctgcgagtccaccgggccccactacaacccgctggccgtgccgcacccgcagcacccgggcgacttcggcaacttcgcggtccgcgacggcagcctctggaggtaccgcgccggcctggccgcctcgctcgcgggcccgcactccatcgtgggccgggccgtggtcgtccacgctggcgaggacgacctgggccgcggcggcaaccaggccagcgtggagaacgggaacgcgggccggcggctggcctgctgcgtggtgggcgtgtgcgggcccgggctctgggagcgccaggcgcgggagcactcagagcgcaagaagcggcggcgcgagagcgagtgcaaggccgc

SEQ ID NO: 230294 - DNA, 49 bp, Homo sapiens
  chr4:24914265-24914314
  hyper
aagtgcaggaggagcggcgcacctggcggggtcgcgcgggtgcggcagc

SEQ ID NO: 230295 - DNA, 626 bp, Homo sapiens
  chr4:25031937-25032563
  hyper
ctcaggtcctcaccgtcctccccgggggccaacactccacccacgtcccccacacaaaggcaaagaaggggcctggggagtgggtcagggtcgcgctggcccggcgccagaggcaactccctcgcggcggcggacgcagggtggggcgggacgggatgggggctggaggggtcccactcacagggagctgatgtcgcccggcacgatcctgggcacccaggaagagcccacgcagatgatagactccttggtacagctgcaagtggcggggcagcgcgccagccgcctcacctgcgcgctccgcggtatcaggcacgcggcgcccagcagcagcagcagcagcccgagcgctccgcagccgcctctccgcagcgccatgcccggtccccgctccccgcccgggccccgacccccaccgccgcgccgcgcgctcggacccggcgccgctgcagacgcgggcgccgctcgctgctctgccgccgccgctgctggcgaggactagggagccgcgggtgtgggaggccgagccgcagccgagcagcatgctggccgccacccccactcggcgcccccccacccgagcccgggctgctgggcggccgccgccgctgcgcccgccgcactcg

SEQ ID NO: 230296 - DNA, 233 bp, Homo sapiens
  chr4:25161802-25162035
  hyper
gcaccagcggggacgcccggcggagccagagccccggggtcgcggcggctggggaggggaccgacagctcggtaccttctccagaagcagccgtatgaggtgctcatgcgagcggcgggcctcacagccctgccgcacgtaagccggcgacaccagccgctctcccgccgcgaagctctcgcggttcatgacagcggtggcgacagtggcgaataagcgggagcactagctcc

SEQ ID NO: 230297 - DNA, 127 bp, Homo sapiens; identical to SEQ ID NO: 199371
  chr4:25235355-25235482
  hyper

SEQ ID NO: 230298 - DNA, 158 bp, Homo sapiens
  chr4:25314271-25314429
  hyper
tgggcggggactgcgtttcggggcgtggcctccgccgcggcagcccccgcccaagctcctcctaagcgcctgggggcgctgtgggtcgctttgggtcgcgggggcgctctttctcagcattcttgtttcgtactgaggctttcgggacggcggcggga

SEQ ID NO: 230299 - DNA, 778 bp, Homo sapiens
  chr4:25656789-25657567
  hyper
acacgcaggtgacacgaggcagagcaggatgtgaaacgagcgcagtggtttgccaaacccgcagcaggcttaggacggagtggtgagaacagcccccttccttttcctcagcttgacggtcccagcctttcccattgcggacctagagcccagactcccagggcagaaagcgccccacagactgataaaggtgaacaatccaggctttgtttccaagggctttatccctgactttccaactggcttttatctgtgtcttcacgtctctgacctcttgagcctcacaggagctagactagaaggttcaagttcttgaggagaaggcaggggcgggagagccccacttgcgggaatctcgtgcggaccgagtcggggcgggagagggcgcgcaccagccaggctagggcgcgcggggcgccgaggggcgcggggccgtttggggccgttcgggccagttcgcgcggcggggcccgtcggagcttttctctcggcagcctggctggccgcgcgtcttctccgcgcagcgggcgaagtcgcgatgggttcattaaggcggcaggtaggcagtgccccggcggcggctgcggcaggcggtcctggaatgtgcgaggggcgtgatgacagcggccagcctctttgcgcaacaccttcgccatatatacccggggcgctgcgctccacctggccgccgcctccagcccagcacctgcggagggagcgctggtgagtaccgccgccggggcaggggcgcttcctcgctctttcaaggactttgatt

SEQ ID NO: 230300 - DNA, 423 bp, Homo sapiens
  chr4:25915659-25916082
  hyper
cacagcacggaatcccggggaaggcggagggcggggtccgaggccccgcctgtgaccccacccctttcctggccccgcccccagccttgaggccccgcctctgactccacccctgtctctttctccgctccgcccctcctcctcgtccctccctcaaggcccggaagcgaaagcctctccacctcttccgagcggggtcacggcccggccgtcggtaacctggtttccgagagtgccgggcggtcggcgggtcagggcagcccggggcctgacgccatgtcccggaacctgcgcaccgcgctcattttcggcggcttcatctccctgatcggcgccgccttctatcccatctacttccggcccctaatgagattggaggagtacagtgagtgatctctaaccccttgcggtgacctgactccc

SEQ ID NO: 230301 - DNA, 224 bp, Homo sapiens
  chr4:26030405-26030629
  hyper
gcctgggtgattttacgtgcggatgcagaggaggggcagcgtcggggcggcggagtccgacctcgggggattcaccctgagggttacaggcaaggccgctccaggcacgcagcacctgccgggcgccacccaggagggggcagcagcgccattcgcaaagccggcccgctccgctccgctctcaggctcagggctgcggagacaggaatcgcagcttcccctgg

SEQ ID NO: 230302 - DNA, 143 bp, Homo sapiens
  chr4:26321224-26321367
  hyper
gggcacgttctcgcgaggtttaggaaatttcccacggccgtgttgtgtctgagccgagtagtggaaggcggtgggaaggaggtgtagcgtgagactggactgcccgcattgggtacatgcgcagtgccgctcgcgcgggccgc

SEQ ID NO: 230303 - DNA, 68 bp, Homo sapiens
  chr4:26585707-26585775
  hyper
tgtaataaggtcccggagaagtgtcactggccctgagtgggacccggtagcccgttcgctccgcgccg

SEQ ID NO: 230304 - DNA, 182 bp, Homo sapiens
  chr4:26862030-26862212
  hyper
tcgctgccctctacgaggctgaaactcgccctcaggatgtgggacgtctggactcttctctccgtccccttgtagccccccactccccctcgcggtggtaccgtgaatgagggagaggtacacgtcccccttcttccccgcctcctatcttcgcggctcgctaaagcgttatcagccgcccc

SEQ ID NO: 230305 - DNA, 178 bp, Homo sapiens
  chr4:26862442-26862620
  hyper
ggttggtgtttggcggcgccagagcagcggatcccggtctcgccgcagcagcagcgcgggtgtcgtgcaccgcctgaagacgccgtacctttctaccccccaccttttttttttttttttttaaataaccggaaccaatgaacgcagccgggatcagagctccggaggccgccggtgc

SEQ ID NO: 230306 - DNA, 626 bp, Homo sapiens
  chr4:27086305-27086931
  hyper
tttttcctaatgaacgtttctttctctccttacgcttatcggttttaacacatgccatttaccacctcccacccgctgattagggggctggaaacgggcttacatcactgtcagggcaggagaggaaaaattgcaaagtaaacggcaagatgttgccgcgatagcgagcaggaaaatctgcagtgcttaggagaatgcgggacccaaatgaaattccgcgtctccccgcggcgggtgccgcagagccaccggcgaggggcgggcgccaccacgtgactgattattcaaatggaccgatgattaactcggtttatattgatgcaaataatcctgccggagcctgcaacggctaatgcattttggaactgtggtttttccattgatagcacaaaatattgtagaggaaagccattttcataatattaataatggaattacagaatcaggtcacttaaaggaacggcgctgactcagcgacagcagcgtggaggttgaatgtggggattagcactgagcaaaacgaatacaaaccttttgcagcgatctcattgcataaaacgcacatccccttccctttttctttttaaaagaaaaagagcttcagaaatgaccgtggctaagtacaa

SEQ ID NO: 230307 - DNA, 1383 bp, Homo sapiens
  chr4:30718954-30720337
  hyper
ccgtacccctaccccgcccatttcctttgcttgcccagaacggcgctgcagggcaaagccgccgccacttctttgctgctctggcagaaaggtcggagcctgggactgatgggggtgggagcaaagccagcaggcttcttggcccccgcagtctgtcctcgctgttctccatgcagcacacgtcggacccatttcccacgctggcttggctccgccgcgaagttggtaggaatgagagtgaggagggcgggctggagacttcctcccgctcgcaaagaggaaaccactccactgtgaaggacgcgctgcaactccctagtcatccgggaagaaatgtgcagcgcgctgaggaaaagccgcccactccttcgcgccccgctcaagtgtgcgcctggagagtgcgcgccagagccgcgagcaaatgctttgaagatgcggagaggcttattcaagtttatggtctggagagggaagagggagtgcacaacgtttctgcccaagcggctgcctgaagtttgcaaaatcttagtaaggcgatgaggggagtgagtgcactgcaccatattgccgcgcatcggaatgcacggcgcaaggccgcggagtggagacggcttctcccatttgcctccaacctgggaaaaaggggaaccagggtcggaggtttggagagaggcaggcgttccgataaacccgggttcttgccaaatgtaagagggatttggctttactgccacttagccggccgcgaaggcgctgcggagcccacccccgcccccggctcgagactgcggcggtgcgcactgagcctgcgcgcggggcttttctcgctgatgctgcagatacagagctgagaggttcgggtgccagcagcgggagggttagcgggaaggccgggttccctgccctggcctcggaggaggagccaccacccctggggtgatgctactttcacagactggaaaatactcgccagctccctgacacacacttagacacacttccatccaacgggcatctacgatcccctgtagggagagcttggaaatctctgccgcctctccctcctcattcctgttcctgcgcccgcccaaacaaccgcgcgctacatctgctcgttgactttattggtgtttgtcttgtttaaatcattctgcctcgtcacccaggtctcgtaaagaatacccacactggacagattttattttttcggctttaaatttttctttgaggggaggcccttaaatgtgtatggatacgtcaggcgagctgaagactaagcaaatcccagcagcggccctttctctctttcgagatggtaaaaattctccccaaatacctacagtccgtctcagtcgtcttaatcctagccgggcctcttcgttt

SEQ ID NO: 230308 - DNA, 1144 bp, Homo sapiens
  chr4:30720645-30721789
  hyper
caggcgcgcacacacggtctacccccgcaagcaagcacgacgacaggaatgtcaagcatttaaacaaagacagacatccttcaccctccacccaccgccgcccctgccccccgcaaccatccaaagtctgagctcccaaaaaaggatctttctccagctctctggagtttgatgttctctcttcactactgcagcccgtcatggtttttcagaacagagtggctttctgggcgctcgtaggttccccaggaccccgataaccatgtcctaaccaagatcctaaatcgcgaaccggagacactttccggggggaggaggacgtcgtctgagagggagggagaaggagaaacctatcctgacaccagctccgaaagctctcacgcgtgaactgggcattagtcaagggaggaggaaatttaccagcccgagggagggaaaacaagtcccccagagaagacggcggtactcgctagggagggggactgggctttggcttaaagaggactggctgggattgggcacactttgagcggcccctggagctgaggctgggctttcccgagcgcggcggctggctgacgctccctcccgcctccttatcccgggccctcctccctcgctctctcctagtgtgtagtttcggcggctcggctgctactgccgccgccgctgcagcagcagcgtcagggacaagcctgatccgtgagcgagcgagcacccagcagcaaccaccactttgggcaacttgcgggtttcctgctcgcgggtagcgaacgggagattcccactagcggttcagtgtctccgagccgctgcagcccgaggggcggcgggagcgcccgcaccagactctcccagacgcgaaaagggacgagacaactgcggaattcaccagccgtgccagggcacttccgaggccacaaccgactgacactttttctccccttggcaaactggatttttttttttaagctacttggcagctgtctctgactccacctccccctccacccccgcccgaaagcctttggcttttcttcggaaatccagacagaattgggcatctttgttaattgccgttggggacgcccggccgtgcgctttcgccggctaacgtcgcctgtgctccgagcctggtttgctc

SEQ ID NO: 230309 - DNA, 2421 bp, Homo sapiens
  chr4:30722009-30724430
  hyper
agatcccactgctccgacatgcgggccgaatgcaggtgagaaaaggcacggactctgcggctgcgaacccaaacttgggcaccgcacggtgcgcactgctcagccttcgcccccgtgggcgaaaggctgctgcggtttcaggcggctgcttcgtgactaatgaccttgcgcagagttgttaagaaaaaagagaaacccgcgctctccggggtgagaagggactgactctgggcgtctctgaagatggctcgggcttctctttggcgcgccggggggaccctgacactgaccgctctgtgacgcgagtagtctcccctgcaccgtgcccgaagcgacgtgccgggggatttttcattctcgatctgttgactggctcccccgctgcatgagcagagtcggagttgagactggcttgttgctggccccagcgcctggtgcaggaagcgactcacgtttgtctgggtggccggagccggagcagagcctgggtttggagtgagtgcctggaacgtgaattggactcaactcgagtagcagcaaagaccagcgggctggcaggcgggggaggctgcaggctcattccccacctcttcccagccccactgcccgtctgccggagcggttctggccccttccgacagagcggggactagagccggggattctccgcccgctgaggggatgactctgggttgggggagcgccgaacccgcggcgcgcagtgtcccgtgaactgtgagtactgcgactgaacggcggcaggcgagcgggcgattagcacccattgcatgaattatgaaacaataactttcggaagaagcaggaggaaaaaaagaagcatctatcgctgccctcccacccccattcccggccaactctccacgccgcttttgccccctccctcccctccctctcgctccttcctttccgggagaggggagaggactcgggggagggcaggcggccggccccggaggaggggggcgccgagggggctgtggttagaaggagcagtagcagcagcagcaggagaagatgctgaggatgcggaccgcgggatgggcgcgcggctggtgcttgggctgctgcctcctcctgccgctctcgctcagcctggcggccgccaagcagctcctccggtaccggctggccgaggagggccccgccgacgtccgcatcggcaacgtggcttcagacctgggcatcgtgaccggatcgggtgaggtgactttcagcctggagtccggttccgagtacctgaagatcgacaacctcactggcgagctgagcacgagcgagcggcgcatcgaccgcgagaagctgccccagtgtcagatgatcttcgacgagaacgagtgcttcctggacttcgaggtgtcggtgatcgggccctcgcagagctgggtggacctgtttgagggtcaggtcatcgtgcttgacatcaacgacaacacgcccaccttcccgtcgcccgtgctcacgctcacggtggaggagaatcggccggtgggcacactttacctgctgcccacagccaccgaccgcgacttcggccgcaacggcatcgagcgctacgagctgctccaggagcccggaggcggcggcagcggcggcgagagccggcgcgccggggcggccgacagcgccccctaccccgggggcggcgggaacggcgcgagcggcggcggctcgggaggctccaagcggcggctggacgcatcagagggcggcggcggcaccaaccccggcggccgcagcagcgtgttcgagctgcaggtggcggacaccccggacggcgagaagcagccgcagctgatcgtgaagggggcgctggaccgcgagcagcgcgactcctacgagctgaccctgcgagtgcgcgacggcggcgacccgcctcgctcctcgcaggccatcctacgggtcctcatcaccgacgtgaacgacaacagcccccgcttcgagaagagcgtgtacgaggccgacttggctgagaacagcgccccggggacccccatcctgcaactgcgcgcagccgacttggacgtgggggtcaacgggcagatcgaatacgtgttcggggcggccaccgagtcggtgaggcggctgctgcgccttgacgagacgtccggctggctcagcgtcctgcaccggatcgaccgcgaggaggtgaaccagctgcgcttcacggtcatggcccgcgaccgcgggcagccccccaagaccgacaaggccaccgtggtccttaacatcaaagacgagaacgacaacgtgccgtccattgaaatccgcaagattgggcgcatccccctcaaggacggggtggccaacgtggccgaggacgttctggtcgacacccccatcgctctggtgcaggtgtccgaccgagaccaaggcgagaacggggtggtcacctgcaccgtg

SEQ ID NO: 230310 - DNA, 173 bp, Homo sapiens
  chr4:37245416-37245589
  hyper
aagagcggctgaagcgcacacaagaagctgctgcccacagccagctccgatttctcgcaccccggtcccaatccacggccacctgcactttgcgtaacgttgcgctggggggcgctccagagaacccacaccctcccgcccggcccaggtgcgcacccggccgcgcggggctc

SEQ ID NO: 230311 - DNA, 615 bp, Homo sapiens
  chr4:37246729-37247344
  hyper
gagactctgcgctccggcgggcggctttctctgggaacctcacggccctgccctctcacctcgtgcccgccggccgcagcgtccgggtcttcatcagcgccaaccctgaaggtacgtccctcgctcgggtttgcccgtccgtccttctgtccgtcagcgctgcgggagctggagagtgtgtgtccgccccacagcccggtgcgccctgcgctcccttcctccagctaaagccgtggccgccctgagcgcgtgggaatttaatttgaatcactttttttctcccctcgctggccggttttgcctgcacacttctattaggacacccattctccaccccgggttattcccctgggtcaatccaagaaacatccaaggcattagccggcccttctggaagctccattctgccgccgccgccaccaccacctcctgtcccccgcccttttttttttttttaaagcggtttcttctccgagatgaccgcaaacacaaacagtagctctcctccccgaggcgggttcctgagtgcggggctacctccttggccactttttccagctgaggcgaggtgagttccttgagactctcctcctgcaggtgcgatggtgccctttg

SEQ ID NO: 230312 - DNA, 793 bp, Homo sapiens
  chr4:37455036-37455829
  hyper
ggtggtggcgcccccgctgtttctaggtccatgtagctcatacagggctggccatggaactcacagcaggtctaggcggcgaatgccagaaataaggaggaaactgaaaaatgccaagttctcggggtttgggagtacacaactatttgccagcgggtgcatttgttttgtgtatccccgtactccagtcccttgatcataggaagctcccttctctccagcgcaacattggagtaagcaccccggagtttcccgtgatggcaggcggttggcgcggtcgtttgtgctcagaggccaacaagcgcgtggattttctgcttcagtgcgcccgggactgccaccccggccccggggatgtcggacatcgtactccagggtttcgagccctagccccgccgcatcctcggggcgtgcaggtaaagggttacgcgtgtcgggaaggctcacccgcagcccgggccacgtgacgcgcgggcccaatgacagcgctggggcggccgctgcgagctcggcgggctcagggcagcgcggagccgctagcgtctcccggcgcggctgcccgaggccggcgaagccatgggcgccgggaccccgccgccgccgccgccgccgccgtctggccccaggtagggacaatcccccgccccgcgcgcgcaaagagggctttagtcctgcggaacttggctttggggcgagctttcccccacttctctccgagtcgcctacttttaagtttaatttcttgatttgcttttgccctgaaaaaaaaaattagagacgcaattcaaagttt

SEQ ID NO: 230313 - DNA, 211 bp, Homo sapiens; identical to SEQ ID NO: 3243
  chr4:37978651-37978862
  hyper

SEQ ID NO: 230314 - DNA, 155 bp, Homo sapiens; identical to SEQ ID NO: 199388
  chr4:38666037-38666192
  hyper

SEQ ID NO: 230315 - DNA, 354 bp, Homo sapiens
  chr4:38666434-38666788
  hyper
tcccgcccgctcacgattccctccaaagccccagaaatctccgtgctctccgcgtgtggcaacgttgtttggagaaaggtagcgccgcggccgcgcgctcctgctcctccccctcccggtgcccccccaccaccaccacaacccaggctcccgcgtccttcccctcccctccctccgcccgcgccccccgccgcccccctcccaggacacggcgcgcggccgctcgcccgccacagcaaacttggagcagtctcccggccctctggaaagaaacttagggcaattgggattggaggcagcatcccattctcggttctggagcccaggagctgccagggcgtctggatcctccgg

SEQ ID NO: 230316 - DNA, 87 bp, Homo sapiens
  chr4:38732942-38733029
  hyper
gggaggcccaggcacgcggagcttctagttcagggccggggtcctcttgagggttctcggagcaccttctcgcggctcagagggttc

SEQ ID NO: 230317 - DNA, 312 bp, Homo sapiens
  chr4:39047091-39047403
  hyper
actggaaaccatttcggattttttttttcctctccttattacttgcaggcaattttgacctaagtttttaagcttttcttttaaataataccctcgcccccggagtgtggagaataagacggggacttcattttcccgagacccggcgtgcctggtgaaacttttgcatttaggcatttatttcagtgcatgctctgggatcagaagctggcggtaaaagtttgctatgtcagagagtaaagcgttactgtcgttttttatcgcttcatttcattttcaaaaatattcttcagtagtcgacaagttcacaga

SEQ ID NO: 230318 - DNA, 157 bp, Homo sapiens
  chr4:39183999-39184156
  hyper
accctcgcagagggcggtgcgcttggcccggcccctcgaggcaccgcctttcaattagcactcgctgattggtcgctgctcgcgcggtctcctgggtgacgggaacgcggtagcctgcttggtggagaccgggtgcgcctgcgtacttcatagttcg

SEQ ID NO: 230319 - DNA, 166 bp, Homo sapiens
  chr4:39367987-39368153
  hyper
cgcgcggtgatgacgtcaggaggcgcgagctttgcttccgtcccgcccagaggcgggaggtgcgacgcctgcccaggtgctgccccgagggcaggcgggccgctgacatcgagaggaaccacggtgctttggtgtgagctcggtttttggcgggggcgctaaagta

SEQ ID NO: 230320 - DNA, 249 bp, Homo sapiens
  chr4:39529280-39529529
  hyper
agctgggcaaatccgctttggccagctcagcggctccgcccctaccgcgagcggcgctgggcggggctgcgtgcgtggcgtgtccgctggaccaggggacgggggcgcgccgcaggtgtaggagctttgcgcgcctacctggcggtcgtgggtcgaggaggggtcaagaattgttgtctagcagccctctccccgctgccctgtcctggccgaggcaaaggccgcgtgcgctccgcgtctgccaggctt

SEQ ID NO: 230321 - DNA, 350 bp, Homo sapiens
  chr4:39638992-39639342
  hyper
aaaaaatatctcaacggcaaacactggagaaaagattcgttaaggggttcatgttataccacaaggacatacccttcaaggaaataatctaaactcataactcttcctgggtttgataaggagcaattaactatcacgtactgttgttctttcttgctgttaaccactgaaacacctcaattaatgagttctcgggggtgaagcggtgttcttaaacaccacgttggaaaaaaaaaaaaagttaggacaaaaaggtttggttttctggtcgcagtgctgtcgacggccgcggagagcggcaagttcggagcaggctacactaaaggaatctgcgcggccagccaccctaa

SEQ ID NO: 230322 - DNA, 126 bp, Homo sapiens
  chr4:39639612-39639738
  hyper
gaaaacatcctaccgactctctacagctagcaaaccatctcggctaaaatcctggcacatataaacagccactttggtgaagtctgcctttaaacagcaacacgggacttcgggtagagccggtaa

SEQ ID NO: 230323 - DNA, 74 bp, Homo sapiens
  chr4:39699544-39699618
  hyper
ggagcggaggcgccgggaagggccgggggggccggctagggccggccagcttggaagccgcaccctcgcggccc

SEQ ID NO: 230324 - DNA, 232 bp, Homo sapiens
  chr4:39978126-39978358
  hyper
gcgatcttcccgtcggcactcacgacgccacagagggcagtggcaggcttgggctgcgcggtgaagtccatcctgggggacaacttttggttcacagtcctctaccggcctctatcggtcagaaaaccaaagttcagcgggaaaggggcgactttgtaacctcttttttcatttcaaatctctctaatctggaaaaggccctgtctccccagaggccggggacccggcagcg

SEQ ID NO: 230325 - DNA, 433 bp, Homo sapiens
  chr4:40058592-40059025
  hyper
gttgtgcgttcgacgacgcggcaccggcttcgacgccctctgcccgctccagaagcaggtaaaggcggcgggtgggaggcagggaggcgggtccaaggtgagggccctggaggttaggggtcccggggctccgagccgaagcggagggcctgaagcagcggcgggcggcgcggcgaatgaacccccaagccctgaatgtggggcccggcgcgggccgcctccgatctgacccgcgggcccggctgcccggacggaagggaagtgaggcgtcggcgagaggcgggccctggcgctcagcccgaggccgggcgaaggcgggggccgcggccgcttccttggcctccgagtgcctggcgggcctccaggccccagacacacccctctcgaccccccgaggtttcctcccagatctgttcccgccgggacctgacct

SEQ ID NO: 230326 - DNA, 53 bp, Homo sapiens
  chr4:40631725-40631778
  hyper
ttccacagtggaaagcgggagcggcgacccgaaggcagcgaagttctctcggg

SEQ ID NO: 230327 - DNA, 358 bp, Homo sapiens
  chr4:40632134-40632492
  hyper
ggttcaaagaaaatcggccttgatggcagagattgggggacttgaccagacggacttctctccccgccccaaaagtcacatgcctttcagacacccagaagtggcacctgctccacctgggggcatctgtccgagtcagacgctcggcccccttcgggctgctccgagaaacccagccagaaccacgttggagaaattaggaacctgctgctgaatttcaagccgatcggaaccgccccgctccccttcttccccccataaacaagtcgctggacgaggtgggatctctgcgacccccgcgtgcccggggagagctcccggggcgagctcccggggcgtccttacctggggccgagca

SEQ ID NO: 230328 - DNA, 40 bp, Homo sapiens
  chr4:40752533-40752573
  hyper
tagtctttaaggccacaacgaagggggccacccacagggg

SEQ ID NO: 230329 - DNA, 106 bp, Homo sapiens
  chr4:41218592-41218698
  hyper
tctggccgctgagctcccggggacgggttcccaaactcccccggcccgacttcgccacgggcggtgttctgcgccccgtcggggatacgccggagaagtcgggaag

SEQ ID NO: 230330 - DNA, 424 bp, Homo sapiens
  chr4:41258711-41259135
  hyper
gaacacccaccaacaaatcccgtctccacaaccaccagattatctcaccggcgagtgagactgcaaggtttgggggcccggccgtaccactccgcgctgcgcacggggggttcgtacccatctggccgcgaccgtccgtttccccctcgcttggttctgcccctgctccccctgcacaggcctcacagtgcgtctggccggcgctttatagctgcagcctgggcggctccgctagctgtttttcgtcttccctaggctatttctgccgggcgctccgcgaagatgcagctcaagccgatggagatcaaccccgaggtgagcgccaggtgcaccgctacccggagagcgcgaggccgagggagggggagccgagtcgctgatcggttcggttttgcctttttctttgcatttgcctttcagatgc

SEQ ID NO: 230331 - DNA, 420 bp, Homo sapiens
  chr4:41363418-41363838
  hyper
agagttggcagtgtcttcacggaggcgcatacccaccggagcctcttgctgtattcctggcaccgggtcaggtgtgaggctggcacagtgcgcagggcgggggtagcttgcaagacccacctgcgagcacgcatccgcatagacgctgcccagcctttggcaacccccgcccctctccatcccaaggactgcagggtcggttccgaagtacgggctacccggtctggttggcatatttcacttcttaaataactcgttggcaggccagggaaatcactggagctctcggctctcagtcccggaagcgctcactgggtgatcctgattcacgatgtctatcagtagatgcagcttggtagccccgagctcccgaaatgaactgtctgcggggttcaggacgcttgaagggcatgaagggga

SEQ ID NO: 230332 - DNA, 384 bp, Homo sapiens
  chr4:41746749-41747133
  hyper
tctgcagccagttacgtggactgcaattgaccccaatccaaagcagtgccaaaaagttcagtaaaagctggtggaagaagaaaatgccgacggggtaggcgggagcgagggggaaaaaaagagttgcgaaacatgagacacattttgcagagtttgcagatgaaaaggcatctcatggatagggcatctttcagggccgaacggctgcaaagattcggggttgggagttgcaactgtgtggggttccgatgcgctaatggcgggatggtgttcagcgaggtgggacaggcaagggggtgcgagaaagtcactccggccgccgggacagtctgagcaagtcgtcgccgcagtgacccgaacccaaggacacgataggaagggggg

SEQ ID NO: 230333 - DNA, 31 bp, Homo sapiens
  chr4:41747505-41747536
  hyper
ccccgcgtccaggccgcgctgctcacaaccc

SEQ ID NO: 230334 - DNA, 519 bp, Homo sapiens
  chr4:41747789-41748308
  hyper
gtcgccgccgccgccgccgccgcaggattccagatcagaacatactgctcttcactaaggcggctttggcaccgttgggtctttggagcgaagataggacgctggcgaagggacccccaagcgaatccgggatggaggtgatggggccggggccgggagcccagccttgtccagggcccccagccgcagccaggcctccagctgccgccgctgccgctgccgccgccgccgctgccgcggccgccgccgctgctgctgcgccgcccttgccgggttcgcctcccgggcccccgggccccgccgcccccggagctccagccgggctgggcccgccgccgccgcctccattcgccccgcagctgggggtggggttgggattgggacctgggcccccagtgctgtccgggtcagtgctcttggcctctttgctctcgtcgtccctggaagagtcagactttttgcccgaggagccgttcttggccgcggccgctgcggctgccgctgcgcgctcctgcttgc

SEQ ID NO: 230335 - DNA, 484 bp, Homo sapiens
  chr4:41749307-41749791
  hyper
accccacacctccccggaccagtgcggcggagcggggtcggtttccaggcgcgcgtacctggactcgcgcctctgtgaggtcgatcttcagggccagctcctcccgagtgtagatgtcggggtagtgagtctccgcgaagaccctttccagctctttgagctgggcactggtgaaagtggtgcggatgcgccgctgcttgcgcttctcgttgaggccgccgtggtccgtgaagagtttgtaaggaactagagtatgacagaggagacagaaagtgagcaaatcagccggcagctcgccggccgtggagctagaatgtgaggactccaaggtcaggtcatacggcagccgctacctacacccgcgcgagagagttgccgagagaagctgcgggaagaaaccgaggaaatttgttatctgcggaaacctgggctcaaacttcgggcttggcggagtcctttctggcacaagcgcctttgggtggat

SEQ ID NO: 230336 - DNA, 407 bp, Homo sapiens
  chr4:41750097-41750504
  hyper
taattattttctaagctttacgtctcatcgcaaagtaaataaattatgcctatcattttggcagcttaagataattttgttggcggttcgggtgtgactaggatagtgtaaccctgtaagtgaattacccctccctgcaatcgcttctaacgtgataaattctttcatttgtgtaagcaaatttcgtttggtaaatactaaacacatttccattttcaaatgcaatcaaggcttcctatatacgggcggaaaggcggcttcctccgctgagaaagctgaaggtccttacctgcggcgtacggactgctctggtggtccctgagggtgcccaggctgcaggatcccggcgtgagggaagggcagccggacgtggccccaaaagtggtccttatcgggttatactggaa

SEQ ID NO: 230337 - DNA, 395 bp, Homo sapiens
  chr4:41751611-41752006
  hyper
tctgtttgcattagcgcaagccttggttggtttgagtttctgtgaggttgttcgttttaattacaccataactggcaagcgagcatgaagtgtacccaaatgtatctcctctttcatctctttcgggcgctctccctctttctcgcctctttttttttttcaggtgcccacaatcctccacagacccggggattgtgtctgtttgccttttaggtttgcggactgtagtgagggaaattcttgccatgtaaatgcccaggcaagggctccaggtcgggcacctttcttgtccgattcctcaggcttttgggtgctggcagcgaggcacagacaaaggagcgagcagtgatttgtggacttcagtggccccatgatttaagcggagggtaattttc

SEQ ID NO: 230338 - DNA, 1879 bp, Homo sapiens
  chr4:41752227-41754106
  hyper
tctttataggggcatttaggcgttcagtgtttgccaaactaagtggtttaattcgatgctagtgccggggagtggatgggctcccgctctcccctgccaccgtgttttattgcgcactaaactgccgcggacgcagtaatggattaaacggggacagcggtcccccagccttgtgcttctttgcagggtgagtttcaggctcgtttcaggtggttgcaaatcctcggggcgtgaggaagcgctaaagtcgggagtgcagggagccggacctaccgaggatcctggtgatagttttatggggagggctgatagttttattgcagttgtatgttgtacaatgcgtatttgataaagaagggcccttggtgaccagtgtgcacttttttgtgcacgggggtgaaatgaaaataaatgtatacaaggttttactgcggcgggaaacaaattgcaacgctctaaatggtttttctttatggtcaccagacaagaggagaaaagggatgcaaacatctgtcttcagtcccctaaacctaaaggccagcaaagacggatgcgaatccaagtgctattacagcggagatttgtctttatttatcccgctctcatgaatatgaatttgcatttgggccgggaggtggctgtatccctttggactccacacatggaatttcccccacgctcatccccctccccaaccacttaagggaggtgggggataggttgtcaagcacaaggctgagatcgtccaagtttcttcgttccctcggatttcgggttgggggatgtgcttgctggttttctgaacgcaactctgccgccgaggcctgcactcaggagatgtggatgtagggagcacaggccggggtgtccaccgccagcccgctcctctgctgtagggtttaagcgcgtttccctgcagaagagagtgaccaggggtggtcaggaggtgatgaatttcggctccaaggcctatttttgacagtaaccaggttcacaccccgcttggcactagagccttactgcacctggggtgtgtctccgcgtggtgcagagcgcgcgctctactccggaagctacggccgggtgccgcgccaccgctgtgcgccctgggcctgatccctacgccctagtcgagtgcagggcagggcaatttcgccgtgggtcctagtttgctgacagttcccaggcccctttagcttttggggaggaggcgagactaggacctaaaaagtgctgggagctcggagtagaggggttcatgttgccagtttctgaggattgctcttaggtgaagatgtggaacttggaaatttaggtggtgcacagaggcacttcctgagcgaaagggagtgttggggtggggagttcagtgggcacctcaggggacctggatgctgacggggcatcagagggtgtcaaaaggagaagctaagggatctgggcgaggtctcagccgaagggcgctggcaagggaagtgcttggccggggagggtgcccggggggcggtcaaggggcaggcccggggctctgtccctcccggtcctggggtcccttcccgtcccgcggttccggaacgcctcgccagccctctctgggcgccccctgctgccgggcgccccctgctgccggccgccccgggtcggggtgccgtgagccttctcgcctttgtaccaggagacctttcagcgccgggcccacacggtcggatgagcaaatgcgcttgacttcattttcccctttgtagaccttgtaggtttattttgttcagtgtcaccatccctcccccaccacccctggcctatcgtccctctgcccgtcttttgtggcccggggtcctgcttctgcttggagatgaaaggcgtgcggggctgggccagg

SEQ ID NO: 230339 - DNA, 134 bp, Homo sapiens
  chr4:41867463-41867597
  hyper
ctgcgcgcgaatcacgtctggcaggctgctccagcccgcagtccacacacccccgggcctttgcgccaccgcaccaatttgcatccccaacgaatgcgcgctgccctgatccccgagcacgcgggtattaatga

SEQ ID NO: 230340 - DNA, 49 bp, Homo sapiens
  chr4:41868095-41868144
  hyper
cagcgagctaaccccgggacactcccaccccggccggctgaacaggttg

SEQ ID NO: 230341 - DNA, 314 bp, Homo sapiens
  chr4:41869045-41869359
  hyper
ccccattcagggaccgaattgaaatggatatttccctcctcggcccagctgaacgaggctcaatgcctcaaagatgcagagctgcctcggtggacatgctctgtggctgatattataattttcataatgcgcttttatgtcgcgccagactcctccggtgaggagcccgcagagctgctgaaaggggctttgagaggcccgggcgcgcggctgctgcgagctgcgcgccccccgccggcctgagtggcaccgcgtgcccctgccggggcgcggctcctgcactgcgggcgcgcaggcggcggcgggctctgccg

SEQ ID NO: 230342 - DNA, 332 bp, Homo sapiens
  chr4:41875455-41875787
  hyper
aggttgcggaaaggcgttcgcagggtggaggagcgggtagttggggaaccgggcgcgcctgatggggcgcaggaaggaaaaactgatcgacgcaatggcccccgccaccggccatttggggctttcaaacgccctaacgaggagtccgagcggccactgaaagcctccctgttcctgggcagggcagccagagtgccctcccctctcccttcccagcctcccggcggcgccaccattaacccggagccagacccaggcggaggccccggcgccgaggcccgcggaagcaagagacagccctgatagtcttctaaacccggtccagtttcgag

SEQ ID NO: 230343 - DNA, 261 bp, Homo sapiens
  chr4:41881170-41881431
  hyper
ggctccccgcgccccgctggccctggccgcgcgacaggaggctgcaggcacgtcctgcggctccggggcgaaggctagggaaggggatagagggaggtcgctgcggggagggggacagaggcaggcacagagtcctaaagagatttgagactcgcgctcctgcactttctatcccacgcgcccccatccgaggggacctcacccctgggaagactccaataaatgcaacccggcgccactcgattccgggataatttttaa

SEQ ID NO: 230344 - DNA, 82 bp, Homo sapiens
  chr4:41882156-41882238
  hyper
actccgcgccctgccgcggaaacccttcccgtggcctcgaactggtccccgacgactgcggggtacgcggggcccaaagcca

SEQ ID NO: 230345 - DNA, 163 bp, Homo sapiens
  chr4:41882549-41882712
  hyper
ttaatctgtaccaccgtcccgtaaatctgtcgctcagcccatagccggcctttgatctccaagcggagcagctggacaggtgtcgaactgcacttcccttcccgctctgagccaccgaacaaacttggccatgcccggaaaggattcccgtgctcagggaacc

SEQ ID NO: 230346 - DNA, 657 bp, Homo sapiens
  chr4:41883150-41883807
  hyper
gtgagggggtccgcgcagcggcggaccccgcaccccggcccccaacggcgcctaggaagttgtcactcctctcatttaaagcctcagaaaaatgcattcatgagattgtttctttatttttcctttctgcccctctccgcattctttgcctatttgctttacggcttttcagccttgttgaggccaagaaaagaaaccaggttcttttctcttgcgattggatccgtattcccagttagggcgccttttgatgtccccatttagcgcctttgactggtcagctgaatggggccgcctgcttttgtcctttcccacaagtcccttcagaaagatccctttaaacgcccggtacccgctgatggatccgttttcaaacggcgcggggacggcagtgccggaggccgcgtctccttagtaatcgcgcgggcagggctcggcaaggggtcgctgcaagggtcgcgctcacccgccccgggtttgggcgctgggggtggggaagggagagaaggttcgaacagttttgtctctcccgcgccccggctcccccagggtgctgcgcctccagccgccccgaggcgcttcccccggcgtccgcgcgctcctctccgcaggggtctcgcgcccacggtgccgcagccgcgcggctcagccgccctc

SEQ ID NO: 230347 - DNA, 177 bp, Homo sapiens; identical to SEQ ID NO: 199398
  chr4:41991961-41992138
  hyper

SEQ ID NO: 230348 - DNA, 63 bp, Homo sapiens
  chr4:42154408-42154471
  hyper
aggtaaagagcaagtgtttagggtaatatctgctaatgataatgggggcggggcggggcctgg

SEQ ID NO: 230349 - DNA, 436 bp, Homo sapiens
  chr4:42154651-42155087
  hyper
gcggggtccggcttccgaaacgagctcgtggcgccccctgcatgaccccaaactctcggggttgcacagaggaggggctagtcgttggggcggggtcgtcagagtacgtgtgtattacagcaagttcttctaccaatcgggaattgctctccgatccttctgaaaagaacctcttgaagatcttggcccgggtggtcgcgcggtgtttacggggctttggggtcctgctttccccgagcatcgcggcctctgagctcatgcggaacataaaagctcgcaaggcgtagaactttttcacgttttcatttgtttcccgtaggggccccgagaacgtgcatgacaccatgatttcccccccattataaagatgagaaaaccgaggctctgagaggttgaagggaattgcccaaagtcagacactcgggagtgtgcggct

SEQ ID NO: 230350 - DNA, 256 bp, Homo sapiens
  chr4:42398815-42399071
  hyper
tttgcgggcgtgaacggagaagtcgtgctctttgaggttttgcgagctggccttggctggcagaggtgaccggcaatccttcagccggcggaaaaagtgcgagtgtgtgtgtgtgtgtgcttgtgaaaatgtgccgttcctcccagaaaaagtggaaacgtaggtggaaagctcagcacatgttggcgacacctaaaaaccatgttctcggtcctgaacctttagaagcggtatcccaggaacgagtctgagtctg

SEQ ID NO: 230351 - DNA, 412 bp, Homo sapiens
  chr4:42400691-42401103
  hyper
gggtagacttgggttttggtggaggggccgagggtgtcccattgctcgcccttgtcacttcgggagcttcgggaagtgccgaatgcagggaatcgcgactcttgtcgcgcgctcatttgcagcccttcagggctaagaaaccccagtcactttttttttctgtcttaatgatagcgtttctaagccacggccccgttctgcagacttcctttcaattctctgcatcgaattaccctctccggcccaccccctattgtcacgcctttcagaaatgcccaggtcttcgaggtggagatttagaaacaagggtcgaaggggcttccccgccccctattctcacttcggaaaacacgggtcaaatttccgctgacttcagagcggaataaatcacgaccccagcagagaaaattta

SEQ ID NO: 230352 - DNA, 86 bp, Homo sapiens
  chr4:42657889-42657975
  hyper
gagtgggaatcagcgatgatggcaagatagatttctgaaaaacatgttattccaccctctgcaggattcaagtacaggtttatggg

SEQ ID NO: 230353 - DNA, 125 bp, Homo sapiens
  chr4:42658395-42658520
  hyper
ccaagggactacggatcaaaggatcctgcagccggggaaaagcaaactcgcttcgctgggagctcagatagggggttgcaaaacggtgggcgccggaggcaggggcggcgggctggggatctgct

SEQ ID NO: 230354 - DNA, 267 bp, Homo sapiens
  chr4:42658700-42658967
  hyper
gtcccctaggggccgggcgcgacagtcggactgccgccggggaagaggtaggatgcggtctcttccaggataaacacacacgctcacacacacactcgcttcccgaccccgggctagccccgagcctcggcggccccttaccttcggcgcgcgagcggatctccgacacggtcctccgcatggtgggcatcgcggcggcggctgcaggtgggtcctcagcccggactctgcacctgtcacggcgtggtacacgcgggagacccggct

SEQ ID NO: 230355 - DNA, 259 bp, Homo sapiens
  chr4:44448455-44448714
  hyper
ccagctggcttttcgtttgtccaaatcgctctctagtcgttgtcttttcacttcataaacgccactgagaattgtgcccaccacagccccaccccactcccaatcccactcccaatccccaggttcagattatggtatttggtatagttcttgaactccacatagcccgctccggaagcgcactgcaaaacgcaccccagatgctttcccaaatctattccttcattctctcatttcagaaaatcgctctatttattca

SEQ ID NO: 230356 - DNA, 31 bp, Homo sapiens
  chr4:44449062-44449093
  hyper
actggaggctcccgcgcggcagctgcaccaa

SEQ ID NO: 230357 - DNA, 1742 bp, Homo sapiens
  chr4:44449372-44451114
  hyper
agggggagtagagacggaaatatccgaatcggtgaaatgtaaatcgtgtctactgcataagggaatcgtgcagggagagccgctctctataaggagttaaccagcgcctgccccggacacccccgcggggcctccagcggggctcaaactggcggcggctcagcagggggcgaggggtgctgggaaacgccggggctgcgaacttacggaagaaaatgtactcggtgtagctgctccagatcttgtcgtcgcggtactggttgacgaaggcggcggtgcccgaggagttacacgccaccatgtggaagccggcctcggacaggcgatcaaaggcctgctccaagtaggtgaacttgaggtagaagcgggacgtgtacttctccggctgccggtcggggtcgcggctctcgttgagcgtgtccccgaagacctccttggccagcgcgatgcgcccgcacaccatgatgcgcgccacacgccggaatttggcgtcggcctggttgtcgcgcacggtggtgtaggagccccggtagcccagcgtgaggaagcccgagcgcttgtcctgcgcgccgccgccgccgccaccaccgtgcgctcccgggcccgagggcacggcggccgccgccccgcgcagcagcagcgcgtcgctgctaccctgcgagacgttgtcctccaggtcgctctggcagccctcgtcgttgagagagttctgcttggtgaccttgggcgacagcagcttgaccaagtcggtgagctggaaatactcggcctcgcgcagcagccgctccttctcggggaagtgctccggcagcgcgagttgcttgtcccgcagataatccagcacgtacctgaaaaggaagccgtcccggtcgatgaagaagcgcgcccggctgtccctgggcagctcgccccggcgccgggcgccgccacggggactagagggcgagaacatgctggccaaagtactgtccgggacgctgagcagcgtcgagtgcttggtcacataaacctggccgcctacgttcagctccactacttcagggaagggcgagggtgcgcagggccccggggcggcggcggccgacgcgccgggcgagctggacgaggaaaccatctcgctaatgggcaggatggtgctgccgccgctgcccgtgtccttcagagccatagtccccccgccgccggcccagtgacccgagagagctgcactttctcgttcccggagcccgcgccccagccctccgcgtgctcctggcgctctgcgccctcggactgggcggcgcgttcctccgaccggggcggccccgctcagggttcggggcagcggcggcgtcggcggcgcccgagctccatcggaggagagacgcgcgagagaggagctccgccggtgcggcggcggcaatggagaggcaagaaggagctgctgctcctttggggcgagggcggggaagtgtgagagagacttgcgagaggctctagggctgctgctcggctctccgtggggagggcgggaggaggggccgaagcaaagaaaactcgccgccccggcagcttgcaagcgtgccgcgaggccggagcgccgacggtggcgctaactactcctggcagcacgggaggaggcactgacgtcaagccccggactgggacccgagcctcagctgtcatttaaagagataggctgcagccgcggctcccgggctccgacgctagggggcggggccgagagccgagcctgcaagagg

SEQ ID NO: 230358 - DNA, 62 bp, Homo sapiens
  chr4:44680330-44680392
  hyper
tgtctacaccctgcgttttagggagtcaatcgaaagcctccactcacgtgaccactccacta

SEQ ID NO: 230359 - DNA, 207 bp, Homo sapiens
  chr4:44680670-44680877
  hyper
gcgcacgcgctctcgcgccacgagccactggggccgcgcttctggtggccccggggccccggtccgcgccgacccttggggctgctccagagtcctgggctaccgacaggctctacagctccgcagaattcaaggtgactgccccctggaatctgatttagccaagttttcaaacgttggagtgccccatgcgatcttggacatgta

SEQ ID NO: 230360 - DNA, 218 bp, Homo sapiens
  chr4:44728536-44728754
  hyper
acacccaaccacccgagagcgaccccagctgaccagtggagcgcgaatcccacggacccggatgcagataaaggcgcaggaaggaaccgcggcgtggctggcgggcgctgcgcatgcgcaccgcctttaggacgcctgaggtgagacgcgaggagttcggtccgagtgcggtgcggctgggcgctcttcttgcctggaagatcgcagtttctgggtca

SEQ ID NO: 230361 - DNA, 1527 bp, Homo sapiens
  chr4:46391145-46392672
  hyper
gatgggtacttcacgccacaaccccctcaaccaagaccacctccgcaaccacagcgggaaaagctaggggcaggcagcccacttttgcaattactctacattacagtgaactgcggtcctcacgtcttcttttcttcactccccttaacaaaataaaataaataatttcccttcctgcccacccacggttgcccaagaccaagtcttagaggcagccgggttccgatcaagtgctgcgaaacgacgcgtttgacagctgctctggagccgaggatcacaataagagaaggcgcgtgaggctccggcagcaaacaccagccaggcaggcagcggtaatcacagtgagcaaagttgaagactataaaagagccaggctaacgtgctgccgagcaggtgtcctggattttattgtagttgcaaatatgcttctggtgataagtatcgaaattattttttaagtgcgctggggaggagggaggtgcgggaattgagcctcctccgtttccagggagcctctgaaagtggggtggggggagatgaggcatgcacgcgaggcaaagacaaacaggaaagtgtctctatcgggaccaacgtgtgcgaccctacctgaaacggcaagcagaattcggtgttttcttccttttgccctgatcttgacgagataggaaacttgggagagagagagagagagagagagagagagagagagagagagagagagagagagagagagaccgagactgcagcagccaagagagcgtggagcgatgggctggtggaagccggagaggagcgctaggagccgcggcggcggcgcgaggtgtagaaggaggcgaaggcgttcgtagtggcggtgatgggcggaggaggaggaagaggaggaggaggaagaggaggagggggaaaacgatgacaggagctggggccggggggggaaattggggggacgcgggcggaggcgcggtgcgcgccggcggtggcgggcacgagccccgcgcctggaggaggaggagtcaggccgggtaggagggctaaggaggttcccgggaaggcagggccccccctcccccccctcccccccccccacacacacacactcccctgcctcgatccctcgatccctggtaactgaccgtcgcccgcctggcactagcagcggcgcagacccgggcggcgtcgggcgcctgggtgcgctcggagcgccgctcccctcgcccacacctcgccggaggagcggagcccacgcgcagcctcgggctgctccccgaggccgcttgctggggctcccgagaggccccaaggttcctgacagagctgctgttgggtgttggtgtaaagccgggaatgtagtgtggcggtgatgccctagatccctggggccgcgccctgccgcccgtcccccaacatcaccctactgtggagcgacgtggctgctaagaggtaaagaggttccgctcctgctggagggcaaggggactaatcacgcctttacttagtcatcaacgcatccacgcaggaccaagttca

SEQ ID NO: 230362 - DNA, 934 bp, Homo sapiens
  chr4:46995372-46996306
  hyper
gaagcgcaggagggcgaaactgaccccggcggacagagcgatcgcgggtaccttcttggcagaaaccatctttgcaacatgccatacttcaagcctgttcacgtttccaggctcttcagatgccctgagcagggtgcgaggagagggcagagaggctcccgcggcgtgcgcacactcgcgctcacactcgcccgcgctcagccagcccgagccgcggtgggcgtgtgtgtgcacggggccaggggaggcggaacctgccttcctcgccccctcctttctcgctcagcgctcaatgtgtatgtagagctatgtataccgctccacaccctttcgtgcccgcgcgctgaaggttctggggttcgtatccgcgcgcttgcgctgcaagactcggcaagtttgttccgactgtaactccggggatgaggaacggggtctctcgcccctcctccggcttcgcagcccccgaccccaagtgggctccccgcccacagcagtgttcgtcctcctacctcctggccccctcccttccgctgggatttggatctaaccaatgaagctcctctgtcatcaggttgtgcgaggacctgtttgtacccagagtcaaggttggaggtggagaaagggcgggtgacggggactgctgggcgtcgggtggtagcggtggtgaggagaggggatcaagtccgggctcaaaccacctttgagaccctcccattcaggtgttatggggggcggtagggagagcaatgaaagcagaaagattcttcctggtaacaggggttgcagctcacccggcggactctcgccaaactattgggaagtggactcgagccgcactctagtcccagtatttgctaagctattgctttaaagacaccccatttctttacccgcctccaccagacacgcgcacaccctccgctttgctgctcca

SEQ ID NO: 230363 - DNA, 254 bp, Homo sapiens
  chr4:47033394-47033648
  hyper
cgtttacacatgctcgtaggatcccctgcgtggaaacagcagcttgtctctgactacccggaggacatggagcaccccaaataggaactttagagggattgaaatctgttgcctgttccactaggaatattgtttgcaaggcacaaggtgtcttttggtagtgagcgcgctctgcgcatgcgcaggtccattcgggaattactgcccagcagccgactaagttgcattccttgaatcttcgcagaaaagacaat

SEQ ID NO: 230364 - DNA, 1090 bp, Homo sapiens
  chr4:47033893-47034983
  hyper
gctcattttgaatacggtccctacttcttccccttagcaccaatgaacccagcaacatgtcatacgtgaaagagacagtggacagattgctcaaaggatatgacattcgcttgcggccggacttcggaggtaacgcttcatcttttttcaacctgtaacccatccttagttctccttttctgtcaaagataaatgtcaaaaaaaaaaaaagaaaaggcatgtcattttcgtaagcgtgcactataccctgggcacacacacacacacacacacacacacacacaccccgggtccccagtctcaggtggatgaatcctcaggcggaggcgaccttctcccgggccgacacaccctctgcatagtcactgcatcacgcgtgtgcccacacctgttttcccaggcagtcccctgaaaggggtggtggggggagcagggagggagcccgttaagaatggagtaagggctgggaagcccccagaccctccccagcctgctgtcactgagagaatctgttcctaatgtggcccacctccccggcagggccccccgtcgacgttgggatgcggatcgatgtcgccagcatagacatggtctccgaagtgaatatggtgagtggcctcccgaggggcccggcggttcggcttacgcagatgggaaatggacaggtccctttgccctctgcgtttcattggcggtcacctcgcccctggcccctgaggtcccactccgcacccgctccccgctccggcacacacacccggtcgcccctggtttgtaatttcgacacacacgggctactgcggtgttccaggggaaacgtgctcggcactattttgggaaggacgagtgactgttgcgccgtggatctgctggggcggagtctgagcgttactttagctgggtttccctgcgtgtttggatgaggagggcaccatctgctggcagccgggcggcctgcactagggtccccggaccggtggtcggcagccatcacctccccaggcgcggtgctggcaatccccatggccctcgcagtccgcgagcccggatgcaccaaggccctgccaccgagagcacagtctgggtttca

SEQ ID NO: 230365 - DNA, 184 bp, Homo sapiens; identical to SEQ ID NO: 199406
  chr4:47465718-47465902
  hyper

SEQ ID NO: 230366 - DNA, 334 bp, Homo sapiens
  chr4:47487178-47487512
  hyper
ctcggtcaaacagctggagctgggagccggtcagttgccaggccctgccgctgctacgtcacggagggcggggcggtgggcgattggcggtgcactgcagctcgggctgctctgcagcctggcggagacgggaggaggagcggagggagaagtaggttgcgagctcagcacaggctccggcgctggctcccgcagctgagtttgggagatgtctaagtgattttttttttttcccggaaggcaaatggctggcgtggaagcacaacccgctttcactcttcgaatttgtgcttagctcttttcttgtaccttgcgactcgtgaccaacatgctg

SEQ ID NO: 230367 - DNA, 314 bp, Homo sapiens
  chr4:47838720-47839034
  hyper
aagtcagagctcccagggctcggtcccaggaaccgggagccgtgcaaaaagcgcgtacactgccatccactggccccgagcaggtagtagcaggagtgaggcgcctgccacgggagctcaggaactgggtcccagtaagatccgacaagacaccacctcccttccgcccgcacagcctgccctctctgcctgcagctagcgtcaccggtcggtccccgattcggagcagctgggaccctcgcggtagcaagcggattccggggccctaatgacaccgaaggagaggggcagccgcaaattagaccttcttcctg

SEQ ID NO: 230368 - DNA, 809 bp, Homo sapiens
  chr4:47839262-47840071
  hyper
tgggatgccagcacttaggacgggcgagtgatccccaggcaccaactgggggccggggaaccaagcgcgagcccgggctgtggagggaccgacacccaggcgctcgcagctggggaagggggcttacgtctggggcaggcaagactgctgcacagtccctccagccacccggcgcccgagacgccggcgcagacaggaagctgtagatccccgaggggctggctccgacagctccacctgcagcctcccctgccgccagtgtgcagccaagtccactagatgcttggagggcaccgtgcggaggagggactctgcaggaaaggtggcatcacccccggcatggagaccggggtctccggatcgagccgactcgaacactgaaggaaaccctgcccatgaccctgggagggtctcggacgccgggcgaccggggtggtggtcgggaccagggccgtgcgcctgggaactgggtgcagggcgctgagcgcggaactgtcagagcgggagctcaccggcggctggggaaggaggtggcatcgggcggaggagaggacgggggcgggaggggctgaccctgaattcaccgggactaagaggccatcacacctggctgcggtaggacagcgaatcatcgatcttaccggctttggggacccggctctgcggcagcgctcttccggagcgagggcaggagactgtttcatggataaaaagtctcgcttattcttctgtccacttttatcttggtcgcttttctctcctctacgtgtcccccggggaggcactacggatgattttctccaagctca

SEQ ID NO: 230369 - DNA, 400 bp, Homo sapiens
  chr4:47916484-47916884
  hyper
gaagacagaaagccggaggagaagtcgaaaccgcctcctcagcctctgcgggagcgtggtaggggaagagtcacagactgaccctgcgtctcccgccgggaaccaactgcagtggtacaccccacggaaagctacgtctccttaccgactgcgcacgcccccaacagactacaactcccagaagcccccgcccgcgttccggcgactgcgtggcagcacgggccgcttccttatccggtaaagtgcgggggttgggtgggagggaaaccccaagcgcctgcgctggcccgaacaggcctttgggaactacaactcccggcgtgctctggggctagggaggggtcgaaggtcataggggcgcgtggtggtggaggcgggcgggtccggagggtttcgtgac

SEQ ID NO: 230370 - DNA, 460 bp, Homo sapiens
  chr4:48271821-48272281
  hyper
gcgccgcggagtccggagcctagcgccccagagtccagagcaaagcgccccgccccgccctctgatctccccgtcccgcccccaatcaccccgccccgccccgattgctggccccgtggacgccctaccccgcctctgatcctgcaggcccgcccagtcctcgatcgccccgccccggtcgcttgggccctgggtggcaggtttgcgcagccctgcggcgatttcaaggcaagtgaccggaatgggtcggaagcgcgtcccggtgagtttcagggagcgtcccttaggtttccgggggcggcgttgaacctccctagccccagtcttcccatcccaggagacccgcccctagtggctcgaacgcccctagccaggagagccccgagtagtgccacttgtggaagactacgtgcctgtcggaattaggaaccgcacctccccttccgctaagcggtgggag

SEQ ID NO: 230371 - DNA, 1309 bp, Homo sapiens
  chr4:48485159-48486468
  hyper
agcccatcagagaacttgatcggcagccaggaacggttttttcctgctctggtcctttgtcaggtctttgttccgcccctggctacactcgataacagaaccacttactggcgattcacaggaggggaccgggcggcagggcggggcggggcctgcggggcgcggggccgcggcgcggagccggcgcagcgattgggttcacccggggggccgcgctgcgcggagtgccaggctgcgggcggctgcagacctgggagcggagaccggcccgccgcccccgacgccgccgagcacgtcagcggcgcgcagccggggctcggagaccgacgggcagaacgacgggcggcgactgcggcgaccgcgggacggcgagaggcacgcggcgggaggggaccggaatccgcagctccggccgcgccatggacggcaacgacaacgtgaccctgctcttcgcccctctgctgcgggacaactacaccctggcgcccaatgccagcagcctgggccccggcacggacctcgccctcgcccctgcctccagcgccggccccggccctgggctcagcctcgggccgggtccgagcttcggcttcagccccggccccactccgaccccggagcccacgaccagcggcctcgcgggcggcgcggcgagccacggcccttccccgttccctcggccctgggcgccccacgcgctcccgttctgggacacgccgctgaaccacgggctgaacgtgttcgtgggcgccgccctgtgcatcaccatgctgggcctgggctgcacggtggacgtgaaccacttcggggcgcacgtccgtcggcccgtgggcgcgctgctggcagcgctctgccagttcggcctcctgccgctgctggccttcctgctggccctcgccttcaagctggacgaggtggccgccgtggcggtgctcctgtgtggctgctgtcccggcggcaatctctccaatcttatgtccctgctggttgacggcgacatgaacctcaggtacggatctgtctattccttgggcatctgtctcatcccagacgcgcgtttacggccgtgggctcacgacgaaggacagaggcagtggaggggttggaattaggcgtggaggaaggaggagaaaaggagaggaagttgatgacgccccggctttagaagtcaaggccgacctgcaggttgtgctgctaggggagcaagctagacggcgagggagctgctccaaggctgggattccatgcgcagcgcggcccttcagcagggtccctcgccgtcctccccgagcgtcggggtggcagcgca

SEQ ID NO: 230372 - DNA, 848 bp, Homo sapiens
  chr4:48492097-48492945
  hyper
agggtcattgtgccaacatccgggcgtggagagtttctgtagggagaaggacgaagaggggccccctcggcggggacgcgggccggtggcaggaagggcgtggagggcggtgcagcgtgcgagcccccgccgagggccatccccgcctccgctcggccgcccgggcaagtcgcctatttagggtgcggcggcgggcgggagcagtgcgcccatggcggccctgggggacgaggtgctggacggttacgtgttcccggcgtgccccccctgctcgtaccggtacccataccccgcggccaccaagggcaagggcgcggcgggcggcagctggcagcagcgcggcaggggctgccttcccgcctcctccccctgctcggcgggcgcggcctcgttgtccttcccgggctgcgggcggctgacggccgccgagtacttcgacagctaccagcgggagcggctcatggctctcctggcgcaggtggggccgggtctcgggccgcgcgcccgcagggccggcagctgcgacgtggcggtgcaggtgagcccgcgcatcgacgccgcggtacagtgctcgctggggaggcgcacgctgcagcgccgggcccgcgaccccgagtccccggccggccccggggccgagggcaccacgggtggcggctctttctcccagcagccatcccgtcgaggcctggagcagggcagcccccagaacggcgccccgcggcccatgcgcttcccgcgcaccgtcgccgtgtactcgcccctggccttgcgccgtctcaccgccttcctggaggggcccgggcccgcggcgggcgagcagaggtccggggcgtcggacggagaga

SEQ ID NO: 230373 - DNA, 523 bp, Homo sapiens
  chr4:48833079-48833602
  hyper
agtgcctccgggtcgcggtcattttgagcccctgtctggatgacttcttgcggctgttctacccctccccctccccgcggtaccttgcacttttctccctccctgccccctctcgagtccaccctccgggccttctgcccctgatcgcttggttttccttgcagtcgcctgctgctgtcgtcgggaggtgggtgaggtgacgcaaacagccccgttgttgccctccgcgtatcccctcaccacctttgcggccatccacgactttcgcaccttccgccattttcctgcctgtgagggtggacagatcgcgctcgggtctcggcctcctgagtgccggtgactgcgggaggcgacggagtgcttctgggggtgtgagctggggaagttcgtggtcacggatgcgtgtggggttgctgctcagtctgtaacggcaggtgggagacggacactgggtggaggatggagtgcggtaatcagcggttgtaggccgcttaggctttaatccagcgttgttttgtgtaaa

SEQ ID NO: 230374 - DNA, 256 bp, Homo sapiens; identical to SEQ ID NO: 199411
  chr4:48908455-48908711
  hyper

SEQ ID NO: 230375 - DNA, 531 bp, Homo sapiens
  chr4:48988034-48988565
  hyper
cagcgctgcatccccggggttgcttcgggttcgggcccaatagcagagtcagagccgagacgcatgtcccctgcaccggccaagggtgccgctggggctcgcgccaaggaggcaaaggcggggaccagaggcgccggaggcggcgcaacgcgcacaggtggcgcccggcctggccaggctctggcaggcgaggctgggtgtggtcgtgaaggggcgggcggaccggccccacactgcctcggttcggcaagtgggtcagttggctggggctcacttggcaacgggacgcgggaacgaggggcgcggacgcaggcccgggaggacgcggcggcgggaacctgggggcgcagggctagggcagcgggcccgacccgcacggctttcctggaaagcgctgcccctcgccgcggcgatgccctcgctgtggagagaaatcctcttggagtcgctgctgggtaagccgaagcccctcgccgcgagttcgcgggtgccagctccccgggccatgtccagagccgtggagccaggcca

SEQ ID NO: 230376 - DNA, 293 bp, Homo sapiens
  chr4:52710793-52711086
  hyper
ccttagagggatggccgggccctaggccgcgccccacgcccggggggcgcgacttctcccaggcgtgctgggagggcgcttgaggggtttcctttagggtttgtctccagtcaacgggtatgaaggggaaaggcggtcccgccgaattctgggacttgtagtcgcggccgcgcccggccgcggttgggttgggtgcacgtgggtaactgtggaaacgggtcccggcatgcagcgcgcccttggagccttcctgctcggccaactcgtgctttattccccggccagctcctgcg

SEQ ID NO: 230377 - DNA, 226 bp, Homo sapiens
  chr4:52904486-52904712
  hyper
ccctgcgcgcctgcgcttgcgccctggcggggactgggggcacccgctgctcacaccctcccctccccagcccgcatccctgacgacccgcatcccagccctgcgggctcaggctctgcggcggcccctgcacctaggaccttggcctggggcgcgttgtattgcacaggggccagaaggggcctatggggattccgctccaccccgggccgcctgcagattcctc

SEQ ID NO: 230378 - DNA, 972 bp, Homo sapiens
  chr4:52917368-52918340
  hyper
aacttctgcttttctggacacgcgtgggcacccagaaccccgaatggggaggaatgctgtagacgccctgctgccctccagcccgcgcggctgcgcgtctcagtccacccctggggcgcgcggctgtcacccagggcggggcggcgcgggcgttgccacgacgcgggccgcgcgcgtccctggcagccaacccgtccacgtcaaggtttgtttaataatcgccagggtatctatggccgggctcaggcggctgctggggagccaggagaccgcgcgggacggcggatgaggcgcggcggctgcggcccagggcacctcccctctggcttcccgaacccggccaggtccgacccgagggggaggatggaaacacctgccgcgctctgagccccccagaagagaacacccttcccgccatatcaccccacggtcctgcggaggccaccgcctggtccccccaagtctccatcgcgcagcgtggggccgagaggaatagtgagcgatggcggaaaacctgaaaagactggtctcaaacgaaactttacgaacgttgcaggaaaagctagacttctggctgaaggagtacaacgtgagtctgggtgaaaaacccccggggttcgccctcccataggttccagcacagcccttgtcggggatttcttagggctggagttggtggccactttgcaaagcctccgcggttgcgattcctaaccaggatctcagctttcgaccgggatcgctggggaaggaaggacatgtgtgtacatgcccttgtctcagagcttcgggaggcggcgcgcaggcggcctgcggagcgcagcactaggctgcggagactggagagtgcttccaatcagtggtaactaaggacgccggcgacctagcaatagggaagccctgctgtccgcggctggtctggtcatgcctgccactctttcccatcccccttgccagcgcaatccacaccgc

SEQ ID NO: 230379 - DNA, 34 bp, Homo sapiens
  chr4:53578477-53578511
  hyper
cggccctccaccccgccccgctcaggatcttccc

SEQ ID NO: 230380 - DNA, 748 bp, Homo sapiens
  chr4:53617148-53617896
  hyper
ctggagcccaaggtcggccggggttgggttcctgtcgccgcacgcgtggcccgcccgaaacccgctacaaagtagcggcgtgtctgccctagggaggcaaagcgcaaacttgttaccgcgccgggacctgccccgggattctcccagcggctccgcaggacgcagcgcctgtgcctcgcgcggccctgggacgggcacggccgtccgccccctgggccgccgagggctgctttacccctccgttctggccgcgggcagcagaggagctcggggcgggcaaagctcgaggggacacggggcgagcccagaccctgcctgggagccctccccgccggagaccaaagggcagaaacgcactcacagtgcaactccgagggataaactggccgacgatcgccgccaggccagaagaccaagaagaaggctcgcggcgggaactgaagtgagcggggacacacgagggctgggaagatcctgggttggggcggagcggggctgggaagatcctgggttggggcggggcggggcaccgcagagcggacagccggattcaggcaccaggaacccaccggtcccactggccaggtgctccgagctgggtgattttctcccgctcaagactaggaacatacctgcgctttcggcgcagggaagactctgggcgagggcggggctgggaggagggccgcggggcaggcagccaatcccaggaaacttcgggacgagggcaggacgggggctggacggg

SEQ ID NO: 230381 - DNA, 909 bp, Homo sapiens
  chr4:53728017-53728926
  hyper
tgtacccaagccagtgcaatcgctccaaatcagggcgggcggcactaagccggggagcaaacaccgctcccggcccgcccagagcagacgccctaggttggggctgcagcgagtgcgcgcgtgggctgtggagccggcggaggcagcggtccggaatggctctgtggaggctgcgctctcttcctggccccgcagccacagcagctgccccatgctcgcgcggcaggacctaccaggcgcccaccctgggctgcgccgcctcggaccacccgctgctcccctccgcccgctgcctcttctccccgcgcctcacggggctccgcactgactccaggcgcctccgggggcgtcgcgcgcgcggagcggcgccgggggcggggcctcgtgtagggcgccccgggattggctgtggggagagggggcggggccggccgcggagaaaacagccggcgcgccgcgcgagtgcagtctgggtctggagcctgagccctgcggaacctcggcgctcggccccaccccgcccgtacctgcacttatttattgttgttatttcttaccgcggagccccgcagtcgggtcctcccgcccgctcccgcgcagcgctagcattctccagtccctcagtcccttcccgcgcggtgcgccgcagccgaggcgatgcgcctcattcagaacatgtgcaccatcgccgagtaccccgcgccgggcaacgccgcggcctccgactgctgtgtgggcgccgccggccgccgcctggtcaagatcgccgtggtgggcgccagcggcgtgggcaagaccggtgagtcgtcgcgcttagccctgggtctggtcttggacgacccctgacgggagttgaggctgaacaaggcgtggggagcggtgggagctgcagcccgaccgctctccgtc

SEQ ID NO: 230382 - DNA, 170 bp, Homo sapiens
  chr4:54244103-54244273
  hyper
tgtctctgtctctcgggttctctcaggcctcccctcttggccctcaaacggccggcgtccctggcctctcgcgccgccgcttcgggcctctggttgggagtcctgtccggcctgacttaggccgagcgcggcgtgcgcgtgcccccagtccccgcggcggtctcccgcct

SEQ ID NO: 230383 - DNA, 145 bp, Homo sapiens
  chr4:54774734-54774879
  hyper
cacttttttggggtcggcaccgaacaaccatcattaaatggtttctggcgcaaagtggcaggcttgggtaagctgaaatgtttatgacaccaaaataaagatgttccacactgctgaaaccggggagtcacgcagagaacaactg

SEQ ID NO: 230384 - DNA, 65 bp, Homo sapiens
  chr4:54930698-54930763
  hyper
tccgcccagaggccgacacctccacaagcacagacgccgctgccgccgccgcagcagcagcaact

SEQ ID NO: 230385 - DNA, 175 bp, Homo sapiens
  chr4:54931050-54931225
  hyper
ggaggccgcgacccgcgactccgacaacgcagcttggaatgtccagtgggacatgcagttccccaaagtcatctctaaccaaaacaaacaactgaaaagaaaagccctggctggaatagacacatttttgtgcgtgtcattgccagtttatctaataatcgcatctcgcttttcc

SEQ ID NO: 230386 - DNA, 67 bp, Homo sapiens
  chr4:54961838-54961905
  hyper
aacgcttggcttcacgtttgcaagttaaacgggcagaaacccggctgaaactcccacgccagacgcc

SEQ ID NO: 230387 - DNA, 1640 bp, Homo sapiens
  chr4:54965613-54967253
  hyper
aaacaaggaagggtcgttggtctgagtggccccaggagggccccaagtacaaagacacttcagaccttgtcgaacatcagcatgaaaagcttgacggtttcttagctgggaggcctcacagttctgcgccggacagtcctgaactaaccacctgaatgacctctgccaagtccaaaagctgtggacaggggtaggtgtaaccgtggccagagctgcgctcagggactggacgactgccagtccgtcgcccgcacaatcctgctccaaaccgcaggcctcacacttcaccgcgccgcagccacccctaccacagaggagctggaaacactgagcattcctattaaataagcctccaagtccccacctggtacgctttgcggtggggcgtggggaagagttgggctgcggccagggtagcgagagggggtgggatggaggatgcagcgctgtgatttctcagtaaagcgtggagaaagagggggaggaggccggcctccccgggaaattaacaaaacctacactttgcaaagtctcccccatccccctcccccgagttcttccccgccgcgcgcccgcccctcctcgcggcttctgttgtgactcgggcagcctatcccgagggtgcggagctgccgaggagcctgagccgagcggtactccgcagcatcacgtgccagggtggggggctataaaatacccgagccggggcgccgggcgggggacgtgaggaccagccctctccggggacccctttgttcccagcccagacgccaacacctctgcgtccccaagggcttgactgcccgtgtctgcgcggctcccagggcagagcttagaacactagaggagaggggtcgccgcgaactgccggggcttccagccacccacccctctcgacatgtcgcgctccttctatgtcgactcgctcatcatcaaggacacctcacggcctgcgccctcgctgcctgaaccgcaccccgggccggatttcttcatcccgcttggcatgccgcccccattggtgatgtccgtgtccggccccggctgcccgtcccgcaagagcggcgcgttctgcgtgtgccctctctgcgtcacttcgcacctgcactcctctcgggggtctgtgggcgccggcagcgggggcgcaggggccggggttaccggggccggaggcagtggggtggcaggggccgcaggggcactgcctctgcttaagggccagttctcttcggctcctggggacgcgcagttttgcccgcgggtgaaccatgcgcatcatcaccaccacccgccgcagcaccaccatcaccatcatcagccccagcagcctggctcggccgcggcggcggcagcagcagcagcggcggcggcggccgcggcggccttggggcacccgcagcaccacgcacctgtctgcaccgccaccacctacaacgtggcggacccgcggagattccactgcctcaccatgggtagggcggggtcttggggcacctgcgctccgcgcctttcgcgctcctggagcaaactttccacctccagtggaggaagtgggagcccggggacagggtgaagagagaggacgggcttttagtgtaaccgtagagtcagccacagaagttccacgaaagtggaagtta

SEQ ID NO: 230388 - DNA, 420 bp, Homo sapiens
  chr4:54967453-54967873
  hyper
tttggctaagcctgcgcgcttctccgcttggctcaaagggaggcgatcagatagtgcaagcccccatccctctttaatcctgtgacttcgcatcctgcgcatcgaagacctttatttgctttgcacgtctcttttcttccccgctaagcaaccacgtgccttgaaatgggaaagggatacagatgttcggctgggcttccccgggtgggtccctgaaatgcgtcctggttagcacatggggtgggagcaccttgcccgagccttacctctctaccctctcttcgccggtccgcaggaggctctgacgccagccaggtacccaatggcaagaggatgaggacggcgttcactagcacgcaactcctggagctggagagagaattctcttccaacatgtacctgtctcgactccggaggatt

SEQ ID NO: 230389 - DNA, 615 bp, Homo sapiens
  chr4:54969832-54970447
  hyper
aaggaaaatccctcttcgttccgtcaagggacatagggaggagggcccgcactgtgtgaggctgaaaagggagctgccggcgctttgtgcaatgtgctgagctctgtcctgcgcagaggtcccagacagccggctcactactgcctggcctgggaagctcaggcctctggatctctttcctcctgtctctcacgcgcagagctccgggctcttcgccctgcccgccacgaaagggaggaggcgcaggccggctgcctttccaaaagattctgtctcccttcttcccaagaagcaggcctctccgcgcgcgagaacagaggtgggaggacgggagtttgcaggcgcaaagaacaggagtttaagcagactatttccaccaggggaaataagaagcacaaagagcgcctgctgcagctctttgcgctcttgcccaaagctaagcttcctctgggctgtggggagactcctctggtccccgttccatctacccagcccggcccctctggggctcagcgcttgggtttagccctcccctatgtccatgactagccccgatcacagtctcttaagcctctcccggcccccggctcccaggccctgcggagccaagcactt

SEQ ID NO: 230390 - DNA, 120 bp, Homo sapiens
  chr4:54975352-54975472
  hyper
gggcctggatggcccgaggcctccaagatatcagacggaccggctgggcacccgcggcctgcaggccatatttcgcgtcctccaaatcagctgcctagggcgggccgtgacccgagggaa

SEQ ID NO: 230391 - DNA, 295 bp, Homo sapiens
  chr4:54975876-54976171
  hyper
tgccacctgaacaacgtcgcctctgcccacgtggaaagcctcgcttgtctggcagccggggttctgaatggttgccgcgacccctgcgctcccagcagggccaagaggacctcgcgggcaccagcgtccgggcgggaagggacgtgtgcccaagcctcgcctcctggccctcagtgggctgggacgcccttgatcaccggcgcaggaaagaggctccccagcccgtgagcttcgtccgggcgccagggcagggatggctggtggtgtgcactggagagcacgacggtgacgctgc

SEQ ID NO: 230392 - DNA, 1069 bp, Homo sapiens
  chr4:55093024-55094093
  hyper
cactgggagagcgcggcaagaactagccccaccttcccccgacgccccggactgactgccgggcgcagacccgacttctcccgaaccagcctcggaccagccttagaaggcggaaaacaggattcaaacccgcctatgagcagtggtaggggcgggggctgtgggggcaggactcggtttaaggaaccaaccgcctcggttcgagggcctcctgtccggaggttgctcctgaccactgggtttattttgcttttgcagaggaggcagatgttgacctctcttctttgcacagtctctccgcaaaattttcccccaaccatttgctttcttgcgccaccccccaccggggcactatccctggagtcagctcctcaggcctttaaaccttccagaatgtcacacatggaaacctttagcaaatgtttgttaatgatcataacaaaggcatcattcaaattaggcaggtaattactaccagaaggacaactgggtgctcgcttgctcatccattgctttctgctttaaactcccgaggagtcgctgcctggagacactcccgcccggactgcttctcgggccccattaaacggctctgaaatgaactgtgaagttaccatttgtgggcggagagcgctggggccctgcggacggaagaccctggcttgaccggactaacagtgtcgccgaagcaaagcagcccctctgggtaggctgtctgtctcgcctcctaccctctggggcaactagcctaaaaacccggttctcaacttaacagcatgtggcccagcacccgcttttgccttttattccgcactctgatttttggggggatcgtttgttcccgctcattttctacaaacattacggtatcctgttagcattccgaacaaggggctgttcatatatttgccttcaatgatttcctgaagggacatgtggaagtaatagcgagcggtgcagtcacccaagctgaagatgcacgagagcgggtcgcgtagaagaactgcggcaatgggacccccagcgcagccccaggcgccctgttttcgaggctgacatcccaagatcc

SEQ ID NO: 230393 - DNA, 455 bp, Homo sapiens
  chr4:55094320-55094775
  hyper
gcgatgaaggtgaacgcgctcccctcccccgctgtcgctgggaagccccactctgcccaggtctggttcctggagcatcagcgccccctttccctcgccggcaggatcgtttcctcccgacactggcctctcgccttgggcgcagggtttggggctcagctgtcaattccaaggaattcgtagggttcgacccacgcggcgggagggaacggagggagaatcaaaaggcatcctcccccacgacgcggaggcggtggtacgattcctcaaacgcccaagcttgagctttttttgtatgcgagatagaagccagggcaacctcgcccagataaccccgaaaacaaaggcacgaccagataagtgacttcaagggagtaaaggtcgttctatcggagaacgttccaaacctacacagaccctcttttctttgtaccgtatttcagaccacccagtct

SEQ ID NO: 230394 - DNA, 31 bp, Homo sapiens; identical to SEQ ID NO: 199417
  chr4:55095430-55095461
  hyper

SEQ ID NO: 230395 - DNA, 439 bp, Homo sapiens
  chr4:55096171-55096610
  hyper
aggcgggctgggctcggctggagaccggacctcggtgttggcctacagcacagggagccggccgaatgcgcgtgattactggacggcgctgctctgggagagagtcggggccagatttggcgcggcggtgaggcggctgcgggacaagcagaggcgcgcgggcgtgggcaagggtttggggcgctctggagcggtttgttgggtcagtgaggtgccagggagagcgggtgcctgccgggcagtgtgctcgggttgcacgccctagcgcgggggcgacagcggcggcgcgggcgggcggtctggaataatgacaaacacatttggccctgagtgaagaagtcgtcgtcgcctcgcattccagcaactgggatttgaggaatttcgaaccgcacaccaaggggccctcattgtgctccgtggcccccgcccccgcctgtct

SEQ ID NO: 230396 - DNA, 754 bp, Homo sapiens
  chr4:55097942-55098696
  hyper
ccgtcgttagcccccggtgccctggctcttgtttaaatccttagatcgagaaggacttgaaggagatcccaggctcccagctctgcgcccctgggccagtttcctctcgggacgcggactgaggagggatgcagggggaggggcattgggccgggctttccagctgcaaacacgtctggcgccgaggcgggcccattttgtgcctcctggggacggaccgtgggcggcgcgcagcggcgggacgcgttttggggacgtggtggccagcgccttcctgcagaccccacagggaagtactccctttgacctccggggagctgcgaccaggttatacgttgctggtggaaaagtgacaattctaggaaaagagctaaaagccggatcggtgaccgaaaggtgtgggtctcagggttccccgggtctaactcgccgggtccaaccgcagcatcagccttggggcggcagataatctttcggtctcgcctggggcgcaagatgcaggatcgggggcaaatggcttctcccaacttccccctaattcgggttctgccagatggttgtcgtttgctgaagtggctcggcggcatttccttttgttttaaactgatcaatgagcgaacctgggatgggctgaaaaagtagattgtaggagggaataatgggaaacccgacttggggcgcctccttccctgcctcctactgcagtttctcggcccccgcgaaaggggagcgacaagcgcgggtgggcgcggac

SEQ ID NO: 230397 - DNA, 1293 bp, Homo sapiens
  chr4:55099051-55100344
  hyper
caggaacggttcttaaatgccgagagggcgcatgctagctctcctcagcattcccggtgagccgctacccacggccgtgcggctctcgtgcccataggaggcgctggcgagctcctgtaaccctaaacccctcggcccctttccccccacccgcccggattctcttcccgctctcccccctctctccacacccgcccggccccctctcgggtctcagttgaaaacaatgcaaacgcagagcgtcgtgcctggggcgcagcggcctctgcagctctgaggttcagagcgcggcgcgcaggggcgcaggggcgcaggtccccggagcggctgggcatcgccgccaaccccgggacaaccaagccgccgaggacttggtggaggtgggagggagagcggaccgcgcagtgttcctctgggtcccggggtcagaagccggacagtggcgggggctggacagtccgagcgcagagcctcccgggcgaagtctgcgcgcagcactcccggctgcgctgtcggggaccaggagcctgggctgcgggcgagctagctggcgagccgggtaagattcgcggggctgtcgcgccctctagtgggctccggggacgcatcccgctttccccagccccgggcggtcggcgccgctatctcagtggagcgcagcgctggaaccccgggggcccggagcggaggctaatctgggtcacctttcccctcctccgggcagccagtggactcctcgcaggctctgtgtgggcccgggaggcgccgggtggacgagagggggccgaggtctctgggtttggattgagaatgggacgtccttgtaattcaatgtgggagaagcaggggagtgtggaggaggacgggtcccgtgcgttcttggggggcaggcgccgtcttctgcgttccagcccctcgccagctcccttgccccgcgggcggcctgttgctgtttgtttgttttacgaccctgcgttattgtgcaacggtaacagtcgtttccaatcagctgcgcggccgtcgcggccctcgccaggctggtttatgggggcggcggtggcgcgcggacagataggacagcgcggcccgggaacggcgtcgaggtccaggcggtccccctgccccgagggggcggaaatgctgaggtggcgagagcgtgggttgcacagaaccctagtagcgagtccggctgagcctctgcggcctagcccagcagcgtcgtcttcccggctccgaagacgtcttcccgaagccccgctgccccggcgcaccagctcccggtgatggggatga

SEQ ID NO: 230398 - DNA, 346 bp, Homo sapiens
  chr4:55523742-55524088
  hyper
caggtggcgggcccgtgccctaacgtgtgcgtggtgcccagcttcacaaagcgagcgggcagcacctccttggtccgggaacggcctcagcctggccgtccacatcccaggggtggaaaggtggagagagaaaggggctccggagtcaagagcggggagagagggcgcgcgcgccctcctcctcccggcgggcacggccccccggcattaacacgtcgaaagagcaggggccagacgccgccgggaagaagcgagacccgggcgggcgcgagggaggggaggcgaggaggggcgtggccggcgcgcagagggagggcgctgggaggaggggctgctgctcgccgct

SEQ ID NO: 230399 - DNA, 1094 bp, Homo sapiens
  chr4:55524328-55525422
  hyper
catccggagagaggactgcgggccctcagtgcccgtgcgttccagcctccggggagactccaggtggccctcggactctccggcgccctgcctcgctcacctgcgcgaggagaccccagctgctggtggtgggggacgcgaatccggggttcttcgggaatggggacagcaagagggggttaggcgtgagcgaggctgcaggctccgtgcgagtttggggtggcttttgtgccgacgttgcgcggggggcggaggcggggggctcaggggtttgcaccgagcgccttctcttgccgtgcgaggcgcggccgcagcttccttttgttaaaagttgcgtgtgtgtgaccggcgcccgggaggacctgcctgcaggttctccgccgcgctgagggcaaagttagagagccctttctctgctctgcggctactgccttccaaccgcaggcgctctttgtgcccagagctggggaccgacccgctgccgcctctgctcgcggcgccacccgtggagaccaatcgaaggctgcggcgtttccccgcctccgggttaggcttttgcgctgggagtgcgcggcgtggggctgttgtggggccggactcccgcgagcctggaggtggtggcgacagggacaacttgggcagggcgtgtggaaagcagccgctaggttgcagactttttgctttcgtacatcccgtgctcgcccctttctgccgcggcgccgtttcattcctgccgcgcgccccggggcggctggaggctgtgtttgccgcctgctccgggaaggcaagggacagcgtgctgggactctgcgttccctgactccaaccgcctagcacgccggccagagtgcccggcctgcctggcgggttctgaaagcccctagttcccggtgtctgcgacctgtattcgcaggtcctgttttcttcggaaatttttgagattcgtgaccgcccgcctccccgcccccgggacttctatacttcagggctgcctgggggtggggtgggagatggcgtggaactttctgcaaatcctactcagttcttaaagctataacagaaatccaggtatatccgcgcgggaactgggtctt

SEQ ID NO: 230400 - DNA, 269 bp, Homo sapiens
  chr4:55990892-55991161
  hyper
catgaagacaacaacgggccgggtcccgcaaagaggcagaaccgagtgtaccgtccgatccgggagacccggcctgagattccggcaaggttttcttccccgggcccggactaggatgttgcgcgcagccagacaacttttcaccgcctgttctcgcctgcggaggcacctcctgcctgccaaccccaggcgccttcccaccccagcctcccaagagcctgagggtgtgtcggcatctcaggacatgctccagccgaggtccctgtcgc

SEQ ID NO: 230401 - DNA, 867 bp, Homo sapiens
  chr4:55991393-55992260
  hyper
ccacagaggcggcccgggtctccacgcagagccacagggcgacggccagcagcaccttgctctgcatcctgcacctcgagccgggcgaaatgcccagaactcgggagccggttctttctcccagcgcctgtctagagaaggaggcgcggaggtggaactcgcggcaccccgcagcgcaggacagttgagcgcacagggctagggagcccgggcgccgaccgcggctgcaggggcgtctgcgggtgccggtaggagaggatatccaggctgccagacggactttctgcggcgcgcaagtgatgcccggcgcaggcagaggaaacgcagcgaccacacattgaccgctctcccggggtcccgggactcagtgcagggtgggagctggtgccgaaactctagagcgcggaggcggggccatgcggggcggggccggagcggaggaggggctctcccgtgcggccagccccgcccctcacccgggtacccggcggcgatctccagctccccaagcccatttacatctccccatttccccacacaactggactgcgctgggccccaagtcgcccaggagagaacatcccagagcaacaactttgtttctggtgtaaataaaaagtactcggtaacgggcgctgagcaactccaagatttaatcgcttgccggtccccgaaatttggggagcatcaccaggagcgctgcgaagagcagcgctccctcaccaggcgcgtcaaagtgcaggaccctcttcgccatcgcgcgcgtctgaagtggccgagaatctgcagcagtttggagccacaagggagaagcggatactcagccaagtatgccgggtcgcaagctggcagcgactcctgccagta

SEQ ID NO: 230402 - DNA, 109 bp, Homo sapiens
  chr4:56212201-56212310
  hyper
agacacgtggtctcgtctgttttgcgtctttgcttctgatgaatcatattctggagctccatctaagaatccccatgcccagattagggactgcgagcgaccacccagc

SEQ ID NO: 230403 - DNA, 267 bp, Homo sapiens
  chr4:56261513-56261780
  hyper
tggacaagggcaacgttagccatttttggtctggggtaattataggcagtatcttaaaacaaggcttgaaaaatgtcatgttatttccaaatcccatttcagaactttaaaaaaaaaatagcattttgagctcctaagaacgtttttggcggtaggtggccacatggagggtggcacagaggctcggcgggggagagcggaacagagctgggcgtggcagtgcctgcgagtcagcgccacgtaaccagaggcgctcgcactaatttg

SEQ ID NO: 230404 - DNA, 178 bp, Homo sapiens
  chr4:56413701-56413879
  hyper
ccagaggagggaagcgaaaggaggtcgggatttatttgctcatttggagatttttcccttgcccttttattaaaaatcaagtgacagtgtaatggaagatggagaatgaagcatcagaaataaaccaggaccctaatttgcatggatttcctcgttggaacaacgtgtgactactact

SEQ ID NO: 230405 - DNA, 201 bp, Homo sapiens
  chr4:56501427-56501628
  hyper
atctcccctggaacgtttgcgttctgctcggctatgtctccaaagcttcagatctccttccctgaccttgcgtttcctatttcttccctctaagccaagctcagcatgtccctattgttatcaaatcacatctgccatcacttgctgtagctgtcgcactgcctgaaagcctggcttgcacacttgcctctccgactttat

SEQ ID NO: 230406 - DNA, 91 bp, Homo sapiens
  chr4:56501808-56501899
  hyper
cagcggatgaagtatcaaactcactcttgttttgcttcaaccatcaatctctccaataattgcaatcaaagggaaaacattttaatgttca

SEQ ID NO: 230407 - DNA, 64 bp, Homo sapiens
  chr4:56502079-56502143
  hyper
gggaggcgacctgtgcctgggaggcgggaaaccccgcggcaccagagaagccaagtgaagtccc

SEQ ID NO: 230408 - DNA, 301 bp, Homo sapiens
  chr4:56502563-56502864
  hyper
ctacctcgcctcaccccgccccgctgcctgcccgcgccccaccctgcagcaggacccgagccccctagcctgagtttctgacccgagtaccacgcattttcgctctgggataaagagaatggaatttaaataatgcaccattcccacctttggaaggactggactgggaacagggtgtggatggcaaaccaggccgtctgagtttttaaacttggtagtggcgacgctctctggtgtcctgggtctacgtgggacaccctttctccttcacctcttccagagctccggcagtcactagtac

SEQ ID NO: 230409 - DNA, 84 bp, Homo sapiens
  chr4:56503480-56503564
  hyper
tcctgcccccgcaccgcccctccccgccccctctcccccgcgccataggccccagtgtgtgaaaaccggcgaaaaccggtctta

SEQ ID NO: 230410 - DNA, 356 bp, Homo sapiens
  chr4:56659665-56660021
  hyper
ccaggagtcggggtcgcctcgctgcgatggcaggttcagcttcggttcactaatcgcaaccagccccaccgcgggagacggggagagccctggctgctgcaggccggcacctgggtagatgttaccttttcccgcacagggtcagtccacagacgtgcaccagcaccccggcgaccggtcacagccttcccctcgccccgggcgggcgcggcctcagggagccctcagggcttggggccaggaccatggccatccacgcgcttcggcctcgcactccccgggtatgctgcgggccctctccatccggggaggcggggtccggggaggacacatccccggcccggcctctccgagag

SEQ ID NO: 230411 - DNA, 575 bp, Homo sapiens
  chr4:56719667-56720242
  hyper
cccttccctgacacgcccctccaatgaggccttgttccgcctggccacgcccgtcggttggcgccccgcccctccgcgtctattggccgctccctttttctcccatcgctgcttcttccttctctacgcggtcaacttccggcgcggagtttgtcacgtgcccggatataggaagtgttgggggaacggccgcttcccgttcaacgctttattgaggggcgtatcctagtggcccccatccggtctccgttttggaagacccgcctcggcacagccaggctcagtccggccttgcggtaagccttcggccgcggctgcccggtagtcccggcggcggcggacagacgagctgacaggcaccagggtctaaggcggctcctcagtccggctgctgtctccacgcctggggtcgggcaccgctccttctgaccttcctttccccgtttgtcccggtaagacgaagtttggtcagagcattctccagtcccttgtcctcgggtctaggagaatgcggagctgggagggcagtcctcacgggccccattacggttccgcccatcggaaccagattttgt

SEQ ID NO: 230412 - DNA, 177 bp, Homo sapiens
  chr4:57253559-57253736
  hyper
ttcggccctttcccggatagctcgtcgcggatacttctcacagcgaagcagcagctcccagaagccgtaaagctatcccagagcgaggcaccatacgtaaatcttccgcgtcgctacgtgacgtcagtgcgagcgaccccgggccggctgcgtggagctggcgctgcctctcctgaa

SEQ ID NO: 230413 - DNA, 172 bp, Homo sapiens
  chr4:57301958-57302130
  hyper
acgtggaaatctccgttattttccagcacccaacagtagcgtaatgggagtaacggacttaacctcatttctctttcagagcatttagccttcatatgcccttccctgcatgcttcccccaggccgtcaagacttggtacgctccaacttctgagtcgctcccgcagccgag

SEQ ID NO: 230414 - DNA, 127 bp, Homo sapiens
  chr4:57333253-57333380
  hyper
ttacctttcctcacgtttgcttctctgccagaatgtcttcccgcactttccccagaacccaagttctcctaatcatctttcaagatccctttccctcaaccacagatgagccgtgcctatttctcct

SEQ ID NO: 230415 - DNA, 188 bp, Homo sapiens
  chr4:57333686-57333874
  hyper
gacactcccaactcggcgacgcttagcaatcatcgacttcctcctcctcttggctgcctcggagatcctgttccggggcagaggtctccccgccccgcccctcgtctcctccaagatggcgagcggcggcagcgggggggtgtcagtacctgcgctgtggagtgaagtgaaccggtatggccagaacg

SEQ ID NO: 230416 - DNA, 385 bp, Homo sapiens
  chr4:57371657-57372042
  hyper
caccctgcctggcccgaggtaatcgcgctagggacgctttttctgcagcaatgatataccccgccgaactgtcccacgtcctggttgggacctcttggtttcgcttggctgggctcaatccatccgtacgcctccgcccttccctctttgcgaacccctgcgggttcagcgaatcggctgcaagaagccctgcatccgcgaggtaagcggcggttggcggcggtgccggggttggcagcgcccgcgggttgtctacgccgcggggcctacgtctctgtcgggcgtgcacctcgggagccacacctggggcccagagccaccgctcagcacgcgggcacgcggcgggagggaaggaaaccgcggcgctggggatggagagggggaa

SEQ ID NO: 230417 - DNA, 241 bp, Homo sapiens
  chr4:57397128-57397369
  hyper
actcctatgcaccttacgaactccatgggccccatgcagcccccaaactcctcaaggcccgtgaaccccgccagctccgccacacccgtgagccccgcaagtcccgcgaggccaaggaaaccgagttgcttcccagcgccgcagtaatgatctccccctctctgatcaccagagccccgccacggcctcagctgtctttcctgggtggtaggtgttccccttccctcgtcccctctcctgc

SEQ ID NO: 230418 - DNA, 279 bp, Homo sapiens
  chr4:57521356-57521635
  hyper
aaacctctaaaccttagagccggggaattttttaaaaaatcggaaccaaatctccgtggcttcgtgcagcgtgagttctgcagctcgggggacgctgcagtgtgatgtggtggagagagcatgcttcaccgctcctgccatcctgacagcgccctccctcccggcctcagcctcctggttcgccaaaccggaggactgaatttatggctagctggtctctggggcgccttccagctctgacattcccgcctagaatagatcttcccgaaggtttcgcag

SEQ ID NO: 230419 - DNA, 51 bp, Homo sapiens
  chr4:57521815-57521866
  hyper
ggagaccgggcgcccatgggagcggggaagcggggaggcggcggcgggagc

SEQ ID NO: 230420 - DNA, 49 bp, Homo sapiens
  chr4:57522766-57522815
  hyper
gacaagttacttctcaaagttggggagacggaggcggtgcttttaatgt

SEQ ID NO: 230421 - DNA, 250 bp, Homo sapiens
  chr4:57687856-57688106
  hyper
tgcggtctgttacctgcgccactcgcagggagcgctcgtgcgacggggcgcggggagggcgggggaaggggcggggcgagaatgggaggaaaagcagcggtaggtggcgagggaagaggggcggcgggaagaggagcggcgggaagaggagccgtgaagggtcgggggagaaccggaaagggctgggaaggagaaaggtagaaggacgggggagggggccatggggaaggaggggcgagggagatagagg

SEQ ID NO: 230422 - DNA, 145 bp, Homo sapiens
  chr4:57775639-57775784
  hyper
agcaattagaaaagtcgatgttgggccaaattacccaatagcttgggctgttcagccccgggacagccttcgccctctgttttctgtgatggcatttgcttccaacttttgttggtacgtagaactaaaccggtttgtgtttata

SEQ ID NO: 230423 - DNA, 205 bp, Homo sapiens; identical to SEQ ID NO: 199435
  chr4:57843820-57844025
  hyper

SEQ ID NO: 230424 - DNA, 66 bp, Homo sapiens
  chr4:57844898-57844964
  hyper
atcagcccggcagcggcggcccacaatttacgcgtgtgcaaccctaaccccggcccaagcttgacc

SEQ ID NO: 230425 - DNA, 535 bp, Homo sapiens
  chr4:57975870-57976405
  hyper
cgctcctggcattccgcggctgccaactctttccctcccatctggctcctgggatgcccgcgggggaatcgcagtgagcagcgcggggcgaggccgccgcggacgccccgtcggatgtgcccttcgctgggccgagcggcgcagggttggagagggaagcgctcgtgcccaccttgctcgcaggtgcccttgctgacctgggtgatggccttctccccgcggctctcggccctctggctggcggcgcgcagctggcagccgctcgggtaggtggtgccgtcgctgccgcacaccgggtagcggctcttgcacacgcacacgccgcttacacccggaccgccggctgctgccccggctttacccttccgcctcttgcggctcttcacgcactccatgcccggcgcgcagtaccccctgccggcgccgccacccccgcacggctcgccctcgccgcgggcgcacatagggcagcagccgcacgcgtcgcgggtctcgcccagcaggcagcccagcgggggcaggggcgggcaggagg

SEQ ID NO: 230426 - DNA, 52 bp, Homo sapiens
  chr4:57977005-57977057
  hyper
gctgttaaaaacccccacttgtggactgtgtccccgctggccacaggcctgc

SEQ ID NO: 230427 - DNA, 99 bp, Homo sapiens
  chr4:57977357-57977456
  hyper
cctaaagcgcccccagtcttcaccagcattccaggaggtttttgatataaacggtggactcttcctcagtctttctgcgaagtgctctgcaaactcaac

SEQ ID NO: 230428 - DNA, 773 bp, Homo sapiens
  chr4:58029751-58030524
  hyper
tcctgagctgctgcgtgagtcagtgattcccagtgttgctgtgcctgaaaacccaccactaatgtcagcgccttgtgctgttgagttgcacgcggcgcccctgcagtccagggctggggctagcccggcgagcgcgcggcaggcagagcattcccggacgagtccggtagatggtagcattgtgcagccgatgcgtcctctcccagcttgcgtctcatttttccctctccccctttcctgggctcagcggtgaggctcaggtaccggcgccgccctgatgcctactatgccgcgccatctccagatggtccgcacctggcgggtcacgacgagtctcaatccacagcatggggctgactcggactcaggagtttttgtggctccaggcgtaaccgttgctttggataaaattggtccagttcacttgaccaaggagaagtgcagaggaggataaacgtccccatcccagtggtgtcctctcccgactcctttcgtgtagtgagctttatttttagagactcccgcgcctgccagccgctcatgctcgggttccccaagcggaggggctccgcgtgcagtgtgatgcccactgtcgccggcagagggcaccgtcgtcacacactgcgcaggagccggcgcgggaaggcggcggggctgtccttcccggtcagcgtcctacgcgtgaccttgggacccgcaaatgtctgcgccggaggcattgcctcttcccgactatgggggatactgcacggggctcccgatggcctcttcca

SEQ ID NO: 230429 - DNA, 3221 bp, Homo sapiens
  chr4:62065789-62069010
  hyper
gggagagcgagcgccgaggcgggcctcgaagccactggagaggtaccctttgtctgacaaaccctgaaagggaagcctctagtagcagccctcccgttcccacctccaagcgtttgccgaactgctaggtggagcccgcgccgcggagcccacgagcactccatatccgggttttgccggccacccctttccctggcgcgagccccctccccggctctcggagctcttgccgctggcccgcccgaccgctgctcattctggcctccgctccggccccggctgcgcctaccccgcgcgcaggctgcacggtccccgcgcgcccgcgctctgacccgctgtctgcgcgtcgcccccctcgcctgctggcccggcaccgctcgctccagttcccaggagcggggatgcagatgctgcagctggtcggggtgggcgccgccgccgccgccgccgccgctgctgctggtttttctcggactgctcgttgcctccgctccggcagctgctgccgccgccaccgccgcctgtgactcgccccctcccctttctttcttctctttttgccttggtcctcttcctacgggtgtgcgcgcgcgcgggttgcacggtttgctttggcaggagctcgctcgtgtgtgcgcgtgtgtgagtgtgcgtgtctggagagcgccagtgcctcgctcgctcttggggagtcgaagaagagaaagaaccgaagagacagcggcggcggcgcagagcccggggccgcgcgatgaagctcccacatgcccgcagctgcccggcccggccggcgagctaatcatccaccccacgggctcggggttcgccggcccccgggacgcagccctcggcggccgggcgcccgctctgtctgcgcgccccctccgtgcaccggggaaggagtttgtgtggctctcgctccggctgtccgcggaggttgcgggcttgagaggggaccctcggctgggagagagcctcgggaggacgaagaggaggacggtttggcggagaagccacccctggccctcgcggctccccctacctattccatcgctcccgctccgaggcggaaaggggaggacgtggaagaagaaaaagaaagagaaggggggtggggtgggagaactggatataaagatcggctggggggatggtggaagatttttggtctcttcggcagcgtcttttcttaagcggcggcggcagcagcagcagcaagagaaggagaagcagccccagctatgactgccgcatgttaatagctgccgctgggtccctcggctgctgctggagacagagcctgactccgaagttgtgcaactgtggactgggagagacatttgaaccctcttttcttttcgctccccttttgcccccttggggtgtgtgaagcgaggaacgtaaaggaaggcgaacatttggctctctttttccttcccctttctccgtggctgtgtagcggaagaaagggaagagagactttttgttgttgtttccttgactggggtctccaccctcctgctgctttctctgcgcttcgattctcgttatttgccgcgtgtggttgggggtgtctgcacaggggccggccggtcttttgccccgggctcaatggctggattgtggaaactgcacccgccttcaggttgttgagcaactgatgggacgatctcagggaccggcgtttacgaaaggtaatttattcttcgcactcttcataataggggtcgccctggccgggcgcaggcggcggcatccaccgggcgggcaacaagagggggtgcggggtgcatgcacactcgcccttccactcacacactcgccctcacacacacacacactcatccggtcgtggtgcggggcgggaagggaacctcctggctggtgggcgctcgggtctggcgcgggttggagttttttccagccattgggcgatttgaccggccgaggggagtgagggggataagagactgggcgcattcgcagctgcacacgctggggaataggaacagttcccaccccgttaattttccctctcctctcaccccagtggcatcccctggtgggggcagaaagcggacaggagggcgacttttctccgtcaggctggaactggtgccgctggaggcgggagcgggctggaggacggacagggtctgggtgagaagctgggctctgggaagatggaaaatgcagggtgccgagcccggcgcgattctccctcaacgcttgcctggagcatccctggccccttttgcccaggtcgcgcccctgagtcttggagtcgcgctgcctccccgcgccctgcctgttgtgtctccttcacggcagtttggtttagacctgcgtgcccaggctttgttaggcggttttggctggagaaagctgccactttcgtgggtggcccgggctgcgctgtgctggtagtgggcactgggcggggggcggcggtgttgcacgaatccgggcggccgcggcgccggggcggggtgggcagagcattggtggtcgcggttggcgggttacaggtaggagagaaggcacctcggcgcttctctgaggagaagggaaggctccaggctgcagcgcagcgtctgagctgccgcgacccagcctccggtcccacgtcggagctcagaagcttagggtgccaggcccccagcactataggtgggtgtgtgtgtgtctgtgcgtgtgtgtgtggtgtgtaggggtgggggcgacctcctctaccagccttacttggcggcggagtcagcgtttgagtgtgtgcgcatttttgcgccccagggacggcagagagatatttgcggggatgccggagctgatgctgctggagctgagcttgcttattgaaatcgcctgggatcctcttaactggaaaatctggtttgaggaggccacgggggcccccgcagggtggcgaggaaaccttgccgtgtccccttcccctggagaggcgcagctcggcgacatgcgtgcggcgcgtgagagtcgctggtgcagcgctcgatgcaccccagaatggccctgatgagaacctcatagggtagtcatctctccagcaggttgaagtaatcgagtccagccagcgtaactcctggtccctggaattctctggccactttcctacctctgatagaaacatgcgctgcttttatttatggccagagatatcatagcagttgggagaactcgaggcttgcgagccacctccaggg

SEQ ID NO: 230430 - DNA, 128 bp, Homo sapiens
  chr4:66534212-66534340
  hyper
ctccgcgagtaatgcgcccttgggctgagacccgagctcagtccgggtgtgggagaggagcaagcgctgctggaggggacccaaaggcagaggtctcaggtccaagaggcaggcggacagaggggctg

SEQ ID NO: 230431 - DNA, 670 bp, Homo sapiens
  chr4:66534895-66535565
  hyper
cactccttcaagcccgaaatgtcacttccccacgcgccttaagtgaggcccagccgcacccatccccctggaacgggcctccattccccaaaggaggcctcgacctcctttcccccaaggttttccaccttcccagccccccaaccagcctctgtccacacgcatgttccttgcccagcactccgcagctaacgtcaaacaatgcaaccaaaaaccgcagaggggagcgaaaaggccagtggaaggggacgacaaataccaatttgagatgagactgcgatttagtctgcagcagcagcgtccagcgcgctgagacctgaactcccaggccccgcctagcccctccgccccaggtcgccacggtccccacccccatctccctaccttcgttgctggggctggccaggagggtccggagtgcggcgcacaggagaaggcacgtccagaggggagcccgtcgaggtgcagagtagcagccggccagggacgctggggtgatgggggtgtcgccgccgccgcttgggggccgccggcgtcccgcaccccggggccccgagccccgcatcttctccgagcctcctccggtgccgctgtcccgagcggctcagtccaccgcttcggcctcgcagagcggcgaagggagactcgggagtcctccttgtcccccctt

SEQ ID NO: 230432 - DNA, 89 bp, Homo sapiens
  chr4:66535967-66536056
  hyper
aaacaggagagcagcgagcaaaagcaaagatccagagttcaaagagactggcagaaggaaatagctgcgggctgagtgctgaagagggg

SEQ ID NO: 230433 - DNA, 77 bp, Homo sapiens
  chr4:66536236-66536313
  hyper
ccagctcagcgcctcccaccctccttccctcctcctcttcccagctcccccgccctctgctgctcgcagcctcgcca

SEQ ID NO: 230434 - DNA, 213 bp, Homo sapiens
  chr4:68411140-68411353
  hyper
gccgagcaagaaacgaatcgccggaataccaggccgcggccaagcaataaccttaagtctcaggcgactgccgcgagagctgcgatccggaaggcgcgcgctaacaacactcccccgccattggctccgccctcaacaaacaagaacgcttggcctgtgcctgggtttgaacccggagacacatgcgcaaaacgggccgcgccgtccaatagg

SEQ ID NO: 230435 - DNA, 80 bp, Homo sapiens
  chr4:68567004-68567084
  hyper
tgtggccgcatggcgtgctgtggtgcaggtggccgaagggggcgttactgttgcgactggcatccgcatccggcagatgt

SEQ ID NO: 230436 - DNA, 109 bp, Homo sapiens
  chr4:71479320-71479429
  hyper
cagctttccagctggagacccgcgcctaacaaccggtttgataattacttaaagataagctctagcgagcacagagaaggaaatgaccgtgggtttttcagagtgaatg

SEQ ID NO: 230437 - DNA, 107 bp, Homo sapiens
  chr4:71554111-71554218
  hyper
cggaatcgactggcgttaaagggcacagtgaaaaggaagttggtatcaacgtgatctcgactaagggaccgagcggaagtcctcaatcgtacgccacgcggagagca

SEQ ID NO: 230438 - DNA, 56 bp, Homo sapiens
  chr4:71705636-71705692
  hyper
tgcctggcacatgcgccgcgggcactgggtggggggcctccgagagtcggaaggag

SEQ ID NO: 230439 - DNA, 241 bp, Homo sapiens
  chr4:71767778-71768019
  hyper
tggagcccagctgagcggctccgagagctctgccatgactcctaaccgggtggacaggggggccgggcagccgcggcgcacacgctgggcgtcgtccctagcagcagaggagaccagaaggtgagagtccccatgccgcagccggagggccggggtgggcttgcaccgctatcgcgagagctcgtgaggtgggggcggcggggagctggggaggggctcgcggagagcctgccccgcctcc

SEQ ID NO: 230440 - DNA, 408 bp, Homo sapiens
  chr4:71768319-71768727
  hyper
ccgcccgccgcccgccgcccgtcgcccgccctcgtcccgaccctcctggcccagcgctcccggggcccggcgtcaccaccaagcggggccccgggactgcgcggagcgctcggactacctaaccgccgcctccccatagggcttcgagtactcgtgggctcctgcagccctgaggaggttcttcccccccggcacaccccggggccagcgcctggattccttcatcacccccgtctctgccttcgctcgcattcccgggcttgtttgtgcgcttctcgtgggtatctcccactcgcctgcacaatccgtatccaagcggtgctcggttgaatggctccgtcgcggctgcccattgctcttttctgggtcccaagcacagaagataagactgtcgtactttcccctgtc

SEQ ID NO: 230441 - DNA, 46 bp, Homo sapiens
  chr4:71859073-71859119
  hyper
ccaaagcctggcacggcccactgcaggtgacgccctctgccctcca

SEQ ID NO: 230442 - DNA, 84 bp, Homo sapiens
  chr4:72052855-72052939
  hyper
cgcgggtgactggcgccccgctcgctccgcgcccggcgcagacaacttcccgcggctcggccccgccgcgtcccgggctcgcgc

SEQ ID NO: 230443 - DNA, 652 bp, Homo sapiens
  chr4:73433657-73434309
  hyper
cttctgagagcatcgggcttcaccttgagcctccaaagggttgggggcagggccgaaaagaaacagagctgcactcaacttagctttaaaaagaggaggagttgtgcagagggggaggggagaaggcggccggcgcctgcagcctctgcccaggaaaacggagggcaggaaacgtctccagcccccctccccaactgtcaaatcctagcccggccgtggtactcccaggacacgtgtctactggatctctccctgtccggcccaaggacttcctgaaacccccgcctccggctgcccgaaaaaaccgtgagtcagttcggaggagagaaagctccaggaacccgactctggcggcagcagccagagcgctgggatcccggacccagcgtccagaacttcattcaagcgcccagaccgccctccagaaaggggaagcccagatggcccggcgaggatgggaactggctgcggtttgtcactaggaattgttacgaatgtcgcagactggtgaagccctaggtgtgacaagactgggctcccggagtgggagtcgtaacctcccgtgcaactcaaccctctacccccaaaagcccgcacgctgcgcccagccctcaaaacaccgtttctgaacgcaaaagataacagggaaggg

SEQ ID NO: 230444 - DNA, 651 bp, Homo sapiens
  chr4:73434679-73435330
  hyper
tccacttcaccttctcaccccgtcctcccaacacagagtgtgcaggagcgagaaggtgctgtaagcgggcacaggctaagcctgggagagggggaagggacgaggggctttccaactatctctgcccaaagcagctttttcgaggcttttcgagcaccattggtccctaaggttagcgcggagaatgcttgggttccccggagcacagcagggggaagtattagcgagagagacgagcgagcgggagcgggagaaagaggcagggagagggcgactccgccgcacacgcagaggtgggggcgggaggagcgaaggggaggaggagaaggcaggcggaggaggtgggaggagtgggccgctcgccggctcctgttgctcgcagcgcggcagtctgctggctgctggcgacccgcggggcgctaataaggcgtccggagctccccggactgcccctcccgccgtggcgcccacgtcatgcggggcccgaacccgcgccccccgcaccgtgtcaggattggagaccgctcgggggctggtgtggcccgggctcgacctcccaccctggagcctctccttctccgcctagggcgagaggaggggagggtccaggggcgccaccggtcccgactggcgggacgcgcgttgagttaa

SEQ ID NO: 230445 - DNA, 396 bp, Homo sapiens
  chr4:73935363-73935759
  hyper
catttctgcaccacggcggagcccagatcccgggcctcacaatccagcggacatacaccggccagccaaggctgatacgcgcacgcgccagcaacagcgggcataaagcgcatgcgcgcctgcctgcagccgcgattgaccttcccagtcaagccggtgacgtcttgcgtcgcagtggatgtgacgcaagagataggaaagtcccgcctttcccacgcggcactggacaggcctactgcgcacacgcgaaagtttcccgctgctagggtgtagttagtccgaggccggaccaaaactgcagagacatgggtggagcctgctgccctccgccaggctgggtgttctttagggagctctcgccttgtaaagttcatctacaccgtgtaacttaccatt

SEQ ID NO: 230446 - DNA, 197 bp, Homo sapiens
  chr4:74702406-74702603
  hyper
tatcctccagtctccgcgcctccacccagctcaggaacccgcgaaccctctcttgaccactatgagcctcccgtccagccgcgcggcccgtgtcccgggtccttcgggctccttgtgcgcgctgctcgcgctgctgctcctgctgacgccgccggggcccctcgccagcggtgagagctcctggcactggggtgcat

SEQ ID NO: 230447 - DNA, 511 bp, Homo sapiens
  chr4:74734859-74735370
  hyper
tctggggcagaaggcgaatatcccagagtctcagagtccacaggagttactctgaagggcgaggcgcgggctgcatcagtggacccccacaccccacccgcaccccaagcgctccaccctgggggcggggccgtcgccttccttccggactcgggatcgatctggaactccgggaatttccctggcccgggggctccgggctttccagccccaaccatgcataaaaggggttcgcggatctcggagagccacagagcccgggccgcaggcacctcctcgccagctcttccgctcctctcacagccgccagacccgcctgctgagccccatggcccgcgctgctctctccgccgcccccagcaatccccggctcctgcgagtggcactgctgctcctgctcctggtagccgctggccggcgcgcagcaggtgggtaccggcgccctggggtccccgggccggacgcggctggggtaggcacccagcgccgacagcctcgctcagtcagtgag

SEQ ID NO: 230448 - DNA, 406 bp, Homo sapiens
  chr4:74809923-74810329
  hyper
cggagaccccagggcgccgggacccatctgccgctcgccggccggaggctaccaggagcaggagcagcagcgccgcccgcagtagccggggagcgcgggggacagcggggggcgcggcgcagttcaccgggctcagaaggcaggtcgggcggcggtgcgaggagcgggagagctggcagggaggtgcctgcagcccaggctctgtggctccccaagatcggtgaaccctttttatgcatgattggggctgaaaagtctggaacccccgggccagggaaattctcggagctccaggtctatcccgagtactgaagaaaagggctggccccacccccggggtgggtgggtggtgggcggtggctggttacccactggtgcagcctccccggctcgccttccagagtaa

SEQ ID NO: 230449 - DNA, 1187 bp, Homo sapiens
  chr4:74903960-74905147
  hyper
gtcggggaccccagcggtggcagcggaagcgcggggcgggacttacatgacttcggtttgggcgcagtggggtccgggggaccttacattcacactttggatgttcttgaggtgaattccctgcagtgtctgcaagcactggcagcgcagttcagtgaccacggacgctcctagggaagaatagactcgctgattgagcggggctgtcggcgcggggcgcccaccccagccgcgtccggcccggggaccccagggcgccgggacccacctgctgcgcgccggctggcggccaccaggagcaggagcagcagcgccacccgcaggagccggggattgctgggggcggcggagagcgtggcgtgggccatggggctcagcagacgcgtcgggaagctgtgcgagaagcgggagagctggcggggaggtgcctgcgacccgggctgtgtggctccccaagatcggcgaaccctttttatgcatggttgagactggaaagcccggagcggccgggccagggaaattcccggagctccagatcgatccggagtcccgaaggaaggcgacggccccgcccccggggtggagtcggatacgggtagggggagcccactggtgacgcctacgcctcgccctccagagtaacccccgtgcactctgggactttgggatattcattttctgccccaaattcctggagaggcagtgagtccacctcgctgaagatacagcctgtgaggggggaccttaggtccccgatgaccccccgcgtacggggtagggttggaggaaagagctggggggacccgtgagaaccaggacaggaaaggcacgacttctttagaggaagagagctttgtctccttagttatcagatttgctggggacccggagacaggcgagttttccctcagctatcctctctctatatagtctatcctctatgttaacctcccggtctctgcctctctcattttcggtttagcgttatttcatgtacatctaacatcatgctctctgtgaaagtacagccatcgtctcggattccagagaagaatgttctacttgttccttgttttgcatattctctaatcacacttagaataccttgtttacgttttccatttggtggcaacagattatcagtgtcaaaatttgaattcagtgttagtgtccgtggaagccagggc

SEQ ID NO: 230450 - DNA, 711 bp, Homo sapiens
  chr4:74964529-74965240
  hyper
ggcgcagtggggtccgggggacttcaccttcacactttggatgttcttgaggtgaattccctgcagggtctgcaagcactggcagcgcagttcagtggccaggggcgctcctagggaagaagagactcgctgattgagcggggctgtcggcgcggggcgcccaccccagccgcgtccggcccggggaccccagggcgccgggacccacctgctgcgcgccggctggcggccaccaggagcaggagcagcagcgccacccgcaggagccggggattgctgggggcggcggagagcgtggcgcgggccatggggctcagcaggcggttcgagcggctgtgcgaggaggagagctggcaaggagctgcctgtggcccgggctctgtggctctccgagaacggcgaaccccttttatgcatggttggggctggaaagcccggagtcccgggccagggaaattcccggagctccagatcgatcccgagttcggaaggaaggcgatggccccgcctctggggtggaggggggtcggggcactcacgagtgacgtccgggtctgactgtcttgcgtaactcccgccaactgtgggatgttctctttctgccccgaatccctggagcgggagcgagagcccgccgctctcagagataccgagataaccgcctgcgaggaggcgcttcgtgaacccagtgcagtgcgtcgtgggtcagat

SEQ ID NO: 230451 - DNA, 340 bp, Homo sapiens
  chr4:75023526-75023866
  hyper
gccttctctgtgccgtcgctatgggaatgccagctatatgttggctgggtgcggggcccagtcgccaggccacactgcacgcttccacatcctcagagggcccgggacttgggtcctggccccgccccctgcggacccggcactctgtcagttccgtccccggtcctgggaaccgctctttaccccactctgcgtgtctgccggaacctggctgggaagcgctacttgctgccctgccagcccgggtgagggcggagccaggcctccagccgcgaggactggagtcgcgggaggtggagccccagtccggaagccggggatccgcggccatgacggtgcc

SEQ ID NO: 230452 - DNA, 397 bp, Homo sapiens
  chr4:75230457-75230854
  hyper
ggttagtaagtcacacgcacagctctccaaaggcatgtatggggaacgccagccttggctaaaagactgattcaagttatgtccgtcaccctgagcaaccaaaaccacccactacagggcaggtgaccccacaaagcaaaccaagccatctggtccacgctccccacctcccggagggagatggaaaagtttcgggagtagtccccggccaatcggaaagacattttttcattcctcaaccactactctcaggtgctccagggagggaggatgacttcctgacggtcctcctgccgctcctccctcgggccaattatgaaactctgggcactcttgacctcaccccgttagggcccgggaggggctccctagtataaagttcgcagcaccagacagt

SEQ ID NO: 230453 - DNA, 91 bp, Homo sapiens
  chr4:75719943-75720034
  hyper
ctaccccctagggcgtaaacaaggtagggagggagatgtaaagaatccgcgtggaggggtgtcgggggttccggtcgggcctgcaggctga

SEQ ID NO: 230454 - DNA, 1717 bp, Homo sapiens
  chr4:75858217-75859934
  hyper
ggcccagtcatcgccgcggggcccgggtgggaggggtttggcagcggcaggcgcggcggcggcggcggaggcggaggcggccccgggctcgggcggctgggatggagcagaagagcgcggagcaccggagggcacgcagctgacggagctgcgctgcgttcgcctcgtttgcctcgcgccctccactggagctgttcgcgcctcccggctcccaccgcagcccacccggcagaggagtcgctaccagcgcccagtgcgctctgtcagtccgcaaactccttgccgcccgccccgggctgggcaccaaataccaggctaccatggtctacaagactctcttcgctctttgcatcttaactgcaggtaattggcgccatcctcccggaagggcaggtcgcggggtgggccccagtagctagcgcgtggtcggggctgaagctaggagatccggcagtgagtcgccgcgcgcctccgggtgagtgcgcaggtgtgtgcgcacttagatttggggtgacgtgcacctttggcggtcccgaaccgtactgagggaggggacgatggggtccttcctgccgcagcccgcgcccgcacaaactccagctttgtagaacaggtggctgtcttagctgcgtgttcgaacccagagtgggcaacacggactgcgcctcaaggcttctctttcttcaccagggtttcggagcgcactctgccaaagtacgggaccagacttcttgttgccgttgggccctggaagggatgaaaaagccggggaagtgggggtgggaggttcgcatctgggaaggcttcagcagcggctgcgcgcctggcggggctggtttgctttctcgagtcttggcggtctctgatctccggcgtcccttcctagttatgcttaggatgatgtggcactaacagcagcggcccggccttggtcaggctcgcaatcgtcactgggggtagcaaggctaccttctgccccagaactccccaaaaacgtatcccatagaagaaactattaacttggctaaactagcatcctctcccctccccctgcaccacctctgaaaggcttcgtaggagccactctcgggtttcgggaccacagacggcgacgacctctggcagcggggatggggaagaggggagccagatgactgagctcggcttggcggggaccggggagagattcagaaagacgctttgaatctagagttcaggtacctattttttccagaaaacgtctcccgaaaagggacaactggctgtggatatggtgctgctgggaaaagtagcccgactgcgcggccactggcattttcagtttaaatgtgacccaaagtcacatagcgcaaaccgattctactcgtgctttagtctgtatatcctccctctgagttcgtcgggttcctacagttgtggacacgagtcgtcgcaatcccttgaaaagaagctagcggttttcaggcagctcacagtgggtaatgcagttataaggaaaagtttcccaacttgaaactatagcgtattttctctacttagtgaacgtccgtctgagaaaacctctttctcgctggtatctcggcacggtttggagacgcgtccgcggacagttcccgaatactcgcaggcggctttggctgcccagcctcgggctgagatgagagagcctaggtccggcaggtgcaataggcagcggagctcccggctggctgcgggt

SEQ ID NO: 230455 - DNA, 35 bp, Homo sapiens
  chr4:76439684-76439719
  hyper
acgcagtctccgtcgttgacgttagtcgcagtctt

SEQ ID NO: 230456 - DNA, 712 bp, Homo sapiens
  chr4:76555326-76556038
  hyper
tagcaaactagcaattccagcgctgttgtgatttcttctgcggacgcagtcacgagtccagggcgaagcaggcagggaggcaggtgggcctcggtccgccgcaagctcacacttaggaggaccacgggccgcatgctgtcgtcgtcaaggcaacgacctcactctgtccccaaccataggcacaaagtcttgggagacagatacggcccaggtcagaatgcgttcacggcaggcaccaacacctgtgaaggccaagggctagagagcaattagctgggtgagaggcaccacctcccagctcgtaaggcgcccagtacctggagcctgggaacctgcaccgctccaactacccctgggcgaaggcgttggccgcggagctgcaagggggggcggtttctcacccgccccgagagcgccaggcctcccttcttctgattggccgagccgagtcgtcacgagccatgattggctcagggccaaccaccccgccccttcacctagggctcggcccaggttctgctccctgacacgcagaggccctgcgtccccacacgccttggttctcgtcaggaggcgcctttctgccttccccagcgggaggaggcgattgtgatgcccacgcgaagggtaaaggtggcggttatgtaggactgcgaagactatgcaaaatgcgatacggtttccctcatagcatcgccgctggggcaggggc

SEQ ID NO: 230457 - DNA, 278 bp, Homo sapiens
  chr4:76598656-76598934
  hyper
cccccgagcacagcgtcagccaatcacgcatctcctccagagccggacccaaccttcccgtgtccctctgcggagcacgcgcagtacgctgccgcgctcgcacacgctcgcgcccggaaagccggggaaccggaaccggcctaaagccaagataagagtccgctgatttgacgtcacaagcaggctgcctttctccggtcccgaggctccagccttgccgcccttcttcctgatcgcgcaagcgagagctggttcgcagcaacgcagtgtcttttgta

SEQ ID NO: 230458 - DNA, 71 bp, Homo sapiens
  chr4:76649921-76649992
  hyper
ggcccaggccctgcggagggcgggggaagttgtcttcttttttttccggaggggccggtaaacctggtggc

SEQ ID NO: 230459 - DNA, 112 bp, Homo sapiens
  chr4:76650652-76650764
  hyper
agatccggcttttcgggctcacccaaatatatatcatttggcaaatgctaccttgaacgtagtagggatcttaagcgctcaaactgctttggggacacgtccaccgctttct

SEQ ID NO: 230460 - DNA, 128 bp, Homo sapiens
  chr4:77069657-77069785
  hyper
aaggcgccaagggcgtaggaggtgggtggttgtgagggaacgcccccagccagctcacttccggtgggcttcacatgctgtggggtgtcactgttaaggtaaaatgctgggacgctcgcgagggtgtg

SEQ ID NO: 230461 - DNA, 349 bp, Homo sapiens
  chr4:77135172-77135521
  hyper
ggcccggcctggccgctcccagcgccctgcaccgcaggcccagcgctcgccccaccgaaattgccgaacctggttcacacactcatttactcattccgcagataggtctgagggcctcccatgggccacgcgctggggattcaaggtggctgggacattcccctgctctagaggcgctcgcaagttagcggggacaccgttaccgcaattacaacacaatgtagcaagtgcttctaccaggtgcctgctgagatcatgccagcaagcatgttctgcctggatgacctagggccccacattgaactggggcctgggggatgcataagtttgtcacgtaaggggcatgtgc

SEQ ID NO: 230462 - DNA, 621 bp, Homo sapiens
  chr4:77172534-77173155
  hyper
ttgctatctctttatcgctcctcctgccttcttcctttctttccttcagtaaacgttttttgaaacgatgatgagcaaaaaacgcctgatccagtctatggcgcgtttcggtgggaagatgaacacgccttcccagcagagtaaaacgtgattacaccaaggaccggtaccctctcccttccctcggccaggtccacgtccccaggcgtcggagaaggggttggaccgcgcagcggggcgtcagagttgccaggcgcccggggcaaataccggcagcggtggttgtgcggtgtcctagcaacggggcggcagcagggcacacacaccgcccaagcccggacggtggccgcgaagctagggccaccatggcggaccgcaggcggcggctccggccggggacgttggccccggtgcgcgagggcgtgaactgcaggtccaggtaaacactcagcgcccgggccgagggcgcatcccacgcgggccgcgcgggggcgcctggagacccgcgcttgctggggcgggggcgaggggagaggtccagcctgccttccctcctcaatgcttcctgtacgtacaacataatacgctgagataaccaacgcttggcgctgctctttgcaa

SEQ ID NO: 230463 - DNA, 704 bp, Homo sapiens
  chr4:77227271-77227975
  hyper
agctggcggcggagcggagcttccactagggctcccagtttccccgcaccgcgcccgccgtcctccgggccacccatcccacccgaacgcgccaccgctctagcccgcgctccagcccgcgcgtcaccgacgcccgcggcctctcccacctctaagttccaggaagctctcggcctctagctgaccgcgttgctgctgagcttccctggggagaaggcgccgaggtgcccggtgcgggccgaggcagggctgggcctcgcgggcagcaggcggaagaaggaagggcggtggggcaggtcccggctgcgcggggcagttgtgcgcacttgggttcttcacgcgggacacacgtggaacgccgacccctgcgcccctggccgctggcaactggcaaggccgggaacagaaagtgtagggacagaagagcgctggagtcttccccgggagggagcccggggctgcagcccaggggcggggagcggggcggggctgggaaagttgagtactggtcgctcagggccgggctccgccggagtgcccggcgcagaaaccgtaaaaggctggagcgggcggggtaggtgtggctctgtgtgcgtgacctgagccccggtcccagtccctgtagtctcctgcggccgcggcctctcagccatgggcgccgtctggtccgccctgctggttggagggggtctggccggagcact

SEQ ID NO: 230464 - DNA, 59 bp, Homo sapiens
  chr4:77228155-77228214
  hyper
cgtgactccagggcacatctgccagagctttgaggttcatcgaggaagggagcaaagag

SEQ ID NO: 230465 - DNA, 469 bp, Homo sapiens
  chr4:77610246-77610715
  hyper
tctgcattttacaacggggggaggttaattaaggcacctttctgattgaatgggcagagggactgagggtgtgtgcttcggtccggtccccttaataccgtaaggacccaaggaccgcggaggggcgagtggagcgcgacgcttccaccccagaatccgttttcaaaccttagggagccttctttgccattgaaatgcaaatccggtcctgagctcccgggccaatccgggaggcttcctgtgggattacctggtggcgagcgagcgccgagccagcgccgagccagcgcggcccctcgggtgcggcgggcgcggggtggactgagcgggcccgggcgggacgagaggtgggcgagcgccccgcaccctcggcgcgccgcgcgggatcagcgtcctccagccgcgctgccccggcccaccgtgcagctgtagccgcggcgcggtggcgcggtggcgcagggcgctgctg

SEQ ID NO: 230466 - DNA, 1632 bp, Homo sapiens
  chr4:77818097-77819729
  hyper
tgctgctgcagggtcgaataatgcagggagctgggggtcagcagctccggccggtctccgcggggagcggggccgggcaggagagcaggcggggaagccctgcttgtcgcagcctcgacggtggcgggaggcgagtgagccactgcaggcacaggcgccggctcagctagcgcgccttcttcccgctccctggaagccccgcggtcatcctgggcaggcagagcccgtgccggcttctcctccgcggtggccgagtgcgggagtgcgccgagctctcccggcagtacagccaggttgttctggaggcattcccagcagcagcggccctgcgtcttcgccgccgcgcagctcgctctcgcctgggcccctgccgctgcagctgcgggcaccggcggcctctgtccgggactgcccttcgatccgccgcccttcccgggcgccctacgggagtcgctgcccgggagtccattgcaagctgcgtcggcggctctggctgctgcacctgctggctcctcctccggctccttctcgcgccgccgccgcctgggctgctgctggggcggctccccccggcgcgcgcctcgcggggagcagggcgcagctccccctgcactgggggcggccgcgggcggctcgcggggtcgctgcagcccctcctcccccaaaaggtccctgtatctcctcttgagcaccacgtacttggtgccgtcggggtcctggcgcactgcggcgaccgagttgacgaagcccttgaagagctcgcggcggtgctggtgctggctgggggacgcgtcggggtctcggagaaagctcttgaagtggctcagcaaggcagcgttggtcacgcggcccccagcctggcacagaaagtccagtagtgcctcctggctcagctctcgggccatcgctgccttgtcctccgccccagaggtgtctgagtctcgccctcccggggctctccccagccagaggaaaccctggccgggcgagtgtcacctgcgcccggggcggcactagccgcccccatcagccgcggaggccagcgctgcccgcagcccgtgagcgcgccaggagggccgtgggtcccctccgggtggccccaaggctgagtccccgcggcagtctgcgtgagagagggcggctccgaggccgcccctgcgcgactctagcctctcgcaacgagtcctcacagcgaaagttcccgggatagggccgagtcggtttcacctgcgccctggcggcacctcctccctgcctctgggggaagggtcaggcccgcctcctcgtgtccctccgccccctgaggtctcccccaccccctgccacccatcccagaagagtcaggccggagagccagccggtaggtgaggttggcggcgaaccgagccggcagcgaactgctctgcggccggggaagtggaaggcaggtaggcgaccggccgttcctctaagtctccgccacgcaggaaacaaaagcgatagaaggtccgttcctgtcctccggtgctttgatgagttcaggctgaagccgatgggggaggaggagaagctgcaagttaacaggcaatctgagttatctttctttattaacgctgtagaggagtacttcagatttctcgaggctgtattgag

SEQ ID NO: 230467 - DNA, 42 bp, Homo sapiens
  chr4:77997174-77997216
  hyper
gcttcctcggctccgccctcgcggaccgattcctagactcgc

SEQ ID NO: 230468 - DNA, 111 bp, Homo sapiens
  chr4:78079532-78079643
  hyper
gggctctggcggacgtgactggtcccttcacccgctccttgtcggggtgtgctggggcgacccttgctggaggtactggcctcagccctttctcccgcttccccacccctc

SEQ ID NO: 230469 - DNA, 43 bp, Homo sapiens
  chr4:78978694-78978737
  hyper
gacgcaacgccgacgtatggtgccaagcgaactttaaaaagct

SEQ ID NO: 230470 - DNA, 267 bp, Homo sapiens
  chr4:78979307-78979574
  hyper
gtgcagtttaaaaatctcagcaggttttatggtatttcggtgaggtggaagtttttctgggaagggtgaggtggaagtgaaactggaataggctttttctgataagattcctactcctgattgttttgtattcggattacacccccgaaacggcctccctctctgccctaagtgcttttgggtgggtgggtggccgatggaggtgacatctctgaaactgatcctttttctttccaccacctacctttccccgaagggaaagcaact

SEQ ID NO: 230471 - DNA, 578 bp, Homo sapiens
  chr4:78979792-78980370
  hyper
agtacggagaagcacgaaccagcctgcttcccagaacaaaagtggttaataagagtttaggttcattcttttacttcaccctccgcctcctggttttcctccgaggctccaagctacctgtaaaaccccggagccgcaggagagaaaaggaagccgtgagactagttgtcgccatgatatcaaatgcaatccgggctcagccaaataaatgagtcaataagtaaatcaagagtttggggtcatgggatgccgggcctggggacgcgaggcgctgtgagctccctcctgctccgaggagccagggaagtcgccccgccagtgcttagggagggggaagggagccggcgggctgggaggaagacggcttaatccacagcgcctggctctcggcttcccctcccggctccattcattattcatccagctgcgggaagaagagttcacctgcccagccgcaaaccagagccgcggctgggcggcggcggcgggcgcagggcgggccgccttctccgccctggtgcctaggaaggggcgcggggcggctcccgggagtcgagctctggcgcaggactgggggc

SEQ ID NO: 230472 - DNA, 506 bp, Homo sapiens
  chr4:79472691-79473197
  hyper
agtaaaggtgtagtggaaaccgagagcgaaatgagggcgtagggagaaaagggtggggaagcttagagaccggtgagggagcagagctggggcgcctgtgtacagggatagagcccggcggcagcagggcgcggcttccctttcccggggcctggggccgcaatcaggtggagtcgagaggccggaggaggggcaggaggaaggggtgcggtcgcgatccggacccggagccagcgcggagcacctgcgcccgcggctgacaccttcgctcgcagtttgttcgcagtttactcgcacaccagtttcccccaccgcgctttgggtaagttcagcctcccggcgcgtccccgcgagcctcgcccacagccgcctgctgacgggtggcttggggaggtcgcggcgcctcgcccagttcccccgcgagtgcagctcgaccctgggcagggctggcggctggcgcccgcgcccggccccaacccagctgcgtgggtggggagctggaggga

SEQ ID NO: 230473 - DNA, 533 bp, Homo sapiens
  chr4:79860213-79860746
  hyper
cggcaggtaggcccggtagccgtcggtgatgtacgggttgtccttgagggacccggggatctgctcgtaggtgtacaggcggatgccacggggcaccaggaccggccagtactggtagctgcccagctcgatgtaatgcgcgctcttcagcagcttctgatgcatcgttcccggccgccgccgctccccggctcgggagctcccccaggtcccgcctccccggggagggggcttcgccgctggcgcccccgccccggagcccgcggacgctgcgcgaggtcctaccgcgctgccgctgctgcccagggcccggctctgcgctcacaccggccactgccgccagcgccgcggcggacccggcagcgtcgcagcctcctctgacgtcagcgcgccgcggcggccccgcccctcagccctagctgggaggggcagggtgctggggcgcgcccgggtgtgctcgagcgtgcgctggcggcggcccgggctcccgggcgtctctcacgctgtgttttggcggcgcctggggtcttcgt

SEQ ID NO: 230474 - DNA, 787 bp, Homo sapiens
  chr4:80993248-80994035
  hyper
tgtggccgatggagcgtggcccgcaagaggccacactcccatttcccaagaggccaaaagactggcaaacagtgaataccccaactccccaaagagccaagtagcccggggctccaatcactacccccgacccggctgatctccgcccacacagatccgaacgcgcttgccctttgaaagaagacagcaacagggcacccctccgcgggtttccaacaccactccccggggtgcgcacacgcatctcagcctcagccccagctgatccagtgccgccctcaccaggagaccctggacctccctcgcacactcacttgtccaggacgaagtagagatcaaaggctcttctgcaggagggctgctcctgggcgcgcagcagccccccgggaccgctgagcaccaacagccacagcccggggaacagccagctcccggggctgcgggccggggaccgctccgccaccatcctgcggccgggggcctgagactccctcccgctcgcagtcccctaagctcaggagggtcgcaaaggtggcgggagtcacccggcacgcactctggggtggggggcggcgagcagctgagacgccggcgcctgcggcagcgggacccaccagctgacagggagggagagagggaggtcctgagaggacaaagggagtctccgccaccgccgcagctgccgccggaactcttgacgaatcccagtggaagcgcgatccagtcctccccctcccgattccggagagttcctgcagacaatgcgggcccacggcgacagctcgcg

SEQ ID NO: 230475 - DNA, 941 bp, Homo sapiens
  chr4:81105153-81106094
  hyper
ccgccgaggggcccgcagtagctgcgctcccggggaaggagccccacagtccccaggtaaggaagccgcggggcaggcgaagggcggggaaggaggagcctgagcgttccggtacccaaccctctctctttcttgaccttcctcccctctgccccttcatcctgggcgcggagggcggaacagtttctggaccagagcacccgcgagaagcagggagcggccgcacagcagccagaagagggcgccagcaccccggggccggggctacagggctggctctgccccggcgtcccgcccccgccccggggaacgctgcctctgccgcaaagatgcccccttccgctggaaagcggtaatgcccaccgcccaccgcgaccaccccttccccatttttctcagttctaactgtactcctctctcgtttcctttttgcttctctctctctctcccccctccctcgtcctctcttcctctctctttctctctgcgcttgttttcttacttccccctccctccccgcttgcaccccggtacttttccttttcttttctgatcactggcggggggagggtttgtcgcccgccggaaggtagtgtggaggggatggatgtgtttcacgctcaggttctggctctggctcctctccataggtgcctccctgggtgctcgcgaaagcagccctgagaatggcagctctcagaggttgaagtcattcttttcgggggacggggcacggcgactgtttgattggggggtgagttatgcacttggggcagcgcttccctggaatgcagagctggggatttcccttgctagacggatgcttaaagttcagtggctttgtactgagcccctttctcccctcgaaaagtcatgacagtcaaaagtatctctctttctctctcccccgccccccacttctctccaaaaccctaaagaca

SEQ ID NO: 230476 - DNA, 84 bp, Homo sapiens
  chr4:81106394-81106478
  hyper
tctgtcttttaatcccgaacgtaattctaaaaagcagcatcagacaagagctttattaatcccttacacgagcaaatgcgatct

SEQ ID NO: 230477 - DNA, 809 bp, Homo sapiens
  chr4:81122998-81123807
  hyper
aatcatgtggtgtgcgtgtgtgtgtgtgtgtgcgtgcgtgcgtgtgtgtggtgtttgctcactaagcagggtcgtccccttacacatgcctggaatgcagccaacgtttccagtttgagttcccctatgtggcgcatctgcgtttccgctgccccaagagacttcacagcgctgatataagtccccaagacgaacaaggcggcggcgtgggcaccaaggaccacgggggcggcggcggcggtggcaaagaccagcagcagcagcagcaggaggcacctttaggcccgggtcccaagttttgcaaagccggccccctccaccactacccatccccctccccggaaagcagcaacccatccgctgccgccggcggcagcagcgcgaagccatccacagacttccacaacctggccagggagctggaaaactcccggggaggcagcagctgctccccagcccagagcctcagcagcggtagcggcagcggcggcggcggcggccaccaggaggcggagctgagtcccgacggcatcgccacgggcggcggcaaaggaaagaggaaattcccggaggaggcggcggagggcggcggtggcgctggtctggtagggggccggggccgcttcgtagagcggcccctcccggcctccaaggaggatctggtgtgcacaccgcagcagtaccgagcctcgggcagctacttcggcctggaagagaacggccgcctcttcgcgccgccaagtcccgagacgggcgaggcgaagcgcagcgccttcgtggaggtgaagaaggctgcccgcgcggccagc

SEQ ID NO: 230478 - DNA, 136 bp, Homo sapiens
  chr4:81124767-81124903
  hyper
gcttccttgcaccccgaaaccctgcacaaagacacatacattcaccgcccccccgcccccccaacgcgcacacacacgtcctctcctcccaggaacctcattcaaatatttacccgggacacacacccccccccac

SEQ ID NO: 230479 - DNA, 1770 bp, Homo sapiens
  chr4:81186747-81188517
  hyper
tcaaggaaattttcccttctcgggtttcctgaggttgaaatccagcgcgcacgtcattaatcattcactgaggtcggtccctcagtcaatggcaggtctgggtaagctaaagcgagcagttagctaacccttcctgccacggggatcctggggcgaaagaggacaactgggcggtcagttacatgtgctggtgtccagccgctgcctctctttccccggtcggagcgcgggggtgcgtgtgccctcactctcacgaatacagacggagagcttcccagaaggaaaaacaaattcgtcataatgttcagcgcagccgagagtttccaacaagaaagcagctccagtcgtggcatgatgactcagggtggcgttttaaacgctgaataaacccattccttagctctttaataaatcgctaataacagcaaaaacagccttctccccgaaccgcgccacaccaaaggcttcccaagttgggctgcgaatccctgtttggttttccaacgccgaaagacgtagaagcagtgggatctcctggtgggacgcatttctccaagggctcccagagagaggacgagatagcagggtttacagggcaaagagaggagaacctggaaatcgtgtcctggggggcaagagtgcgttgcccagtcacaagtgtgctgtagaggtgggagaggacaaggacccatttccacatttcaaccctccgtttctatcgctgcccctggaggactcagctgctaacgccgagctcgtttccacgcggctctggtcctagtcggggaatccgggtggccgcgcgacgcgagagaactgctgggatgcgtggccctggtatgggcgcacccagcgtccggggcgcaggttctctcagcccagcttctcctcccactcactcgctcggatctcctccctccttcacatcccccgcccccgggaccgcgaggctccctccccgcaccggccagtgagtacacaaagccgcgggtgaggggaagcttcgcaggcgtgcacggagcagtgagatcactggcgttataaatatcccggtgccagcgcggagatccgctcgggtggcctctctcttcccctctccccttctcttccccgaggctatgtccacccggtgcggcgaggcgggcagagccagaggcacgcagccgcacaggggctacagagcccagaatcagccctacaagatgcacttaggacccccgcggctggaagaatgagcttgtccttcctcctcctcctcttcttcagccacctgatcctcagcgcctgggctcacggggagaagcgtctcgcccccaaagggcaacccggacccgctgccactgataggaaccctagaggctccagcagcagacagagcagcagtagcgctatgtcttcctcttctgcctcctcctcccccgcagcttctctgggcagccaaggaagtggcttggagcagagcagtttccagtggagcccctcggggcgccggaccggcagcctctactgcagagtgggcatcggtttccatctgcagatctacccggatggcaaagtcaatggatcccacgaagccaatatgttaagtaagttactcgctctcctacaaaacccgtcctaggcggccgcggaagattcgggagggacagcaggtattcgccgggacacaggctcaccttcctgagcccaggccactgggaccaagctgatactcagaaacagccgggcgggttgggtggagatgcatctatatggcgtgcgcacacgcac

SEQ ID NO: 230480 - DNA, 188 bp, Homo sapiens
  chr4:81189699-81189887
  hyper
gggggtcggaggcgcgcaagtgggtaaggcggtaggctggctagcctcctccggtgggttaagggggcctaatgcggaagacctgatggttcatgctgagagaaaagcaggtctatgcccgcccctctgcgcctgtctagtctatctgatcgcgctgattcagcagcctgcggcgcacgtggtgaggg

SEQ ID NO: 230481 - DNA, 512 bp, Homo sapiens
  chr4:81256778-81257290
  hyper
aactgcaacaaaccgccggggggtgggattaacgtccaaagctcacaccggcttcaactgattggcaggaacgaagtgggtggagcctcctgaccctgccctcctgcttccgttgctagggacgcttcggccgaggataccgcaatggatcaggaagaggggctgaaggccttggacaatattgtcactcaattcaacgcctatgaagatttcctggactcgcagatcactactgtggacttgtactacctggaggtaagggcggagcgcggcagagtagccgccgccgcgcgtccctcggtccctcctcgagttcccgcttcgtgggctggtcgccccctggcgctggacagctcagctgtcaggcgccgcggtttcgggaccgcgacactaaagccgctggcgaggtgaattgccgcgtccttaccgccccgcgctccccggtccggacagaacttgggcccctagagtcacccagcgcagaaacgcgcgggcacactcacactggggag

SEQ ID NO: 230482 - DNA, 86 bp, Homo sapiens
  chr4:81951401-81951487
  hyper
ggaagctatgatgacgggctgcaggtgcaggggcccgcagtgtccgtcagaagaggctcgggaaagtaagcgagaatggtgttcac

SEQ ID NO: 230483 - DNA, 42 bp, Homo sapiens
  chr4:81951827-81951869
  hyper
tctacagatcagctagagagcgaaagaactaagtctctctct

SEQ ID NO: 230484 - DNA, 1002 bp, Homo sapiens
  chr4:81951929-81952931
  hyper
cactaaaaaactcggaccagccgcgccgcagctgctccaatccctggaaaaggcaatcgagcgccctccggaccgctgcgcacagccccggctccgacctggcgcccaaaacagagctagtcctagtccctcgcgcggccagtttggccgggtgttcccaaaaataaagcgaggagggaaggtacagacagatcttgaaaacacccgggccacacacgccgcgacctacagctctttctcagcgttggagtggagacggcgcccgcagcgccctgcgcgggtgaggtccgcgcagctgctggggaagagcccacctgtcaggctgcgctgggtcagcgcagcaagtggggctggccgctatctcgctgcacccggccgcgtcccgggctccgtgcgccctcgccccagctggtttggagttcaaccctcggctccgccgccggctccttgcgccttcggagtgtcccgcagcgacgccgggagccgacgcgccgcgcgggtacctagccatggctggggcgagcaggctgctctttctgtggctgggctgcttctgcgtgagcctggcgcagggagagagaccgaagccacctttcccggagctccgcaaagctgtgccaggtgaccgcacggcaggtggtggcccggactccgagctgcagccgcaagacaaggtctctgaacacatgctgcggctctatgacaggtacagcacggtccaggcggcccggacaccgggctccctggagggaggctcgcagccctggcgccctcggctcctgcgcgaaggcaacacggttcgcagctttcgggcggcagcagcaggtgagtgcgcgaggtgagactcccttcccgcggtcccgccccagctttctcccgggaccccccacagcttccttgtctgccccttgcttggtggcgctgcctagggacctttctccgccctcctcagctgccctctggattcctccgtccagtcacaccccgcgtgtcgccagctgc

SEQ ID NO: 230485 - DNA, 216 bp, Homo sapiens
  chr4:82135681-82135897
  hyper
cctagcaactacccagagctcgacgaagcaaagccgggagcgcaagccctgacagcaccgccaagcccctagctcggagcaacagcctccaccgcttctcctcgctaaacctagagaaccctgaggactccccactggggctgagcccctcccgccctcaacagaacctctaaacacaagtagcctttccctgcctccaggagctcacgaaacgct

SEQ ID NO: 230486 - DNA, 607 bp, Homo sapiens
  chr4:82136377-82136984
  hyper
gaggagacacgcagggagggagggaagagaggagggaaggaggagggagggggtcagccggggctactgcctggatagttgggcgccggcttccctaaaggtggggtcacccgcgcccgcacgcacactagcccgaacctttactcccgacacagccgcagtctgcactttataccccataccctccatagtgaggcaacttaagtagggcgataacatcgtggttgtaagcatttttgttcatgttattatttctatttcaagtgtgtgggacgaggggagaggaaagttcagggaggtgttcattttttccttcccctccctttcctccatccttccagtctgttttcactgcaggctctctccacttcgccttccctcccagagctcaaacaggcgcacgtaccctggacatgccctcctctgtcacaccaatgcctttctacgaagacatgtgaccccgaagcagctcgtcgacgcgcccctcccggactctggggccataacttacatctagtttgccagttcacgtgatgctgggggcaggggttgaatcgagtttcgagggacagagattataccttccgaatctgcaggtctttgggaa

SEQ ID NO: 230487 - DNA, 670 bp, Homo sapiens
  chr4:82391837-82392507
  hyper
tacaccatatccaccgaattcatcagggaggatggacacatctacattccgaagagaaaatcgccgtctagacaatctccttgtgttatctgccacacttgtgccaccctcggcagtgtcagaggattaagctacgttgcttttgcctgaactgcgccgatttggttggggcaagacagcaagcagtattgaaatggtacgtccatacacacacacaaaggcgcgcgcaccccagcccccgtctcgcccttttccctggtgcagcacttaagttgttttcacagctcccttagaaagaacctcccttaagctgactgcccgcgaggctcctagatacctctagctcatctgagattccccaggcaggtgacccgaggcgactcaactgagctctggcaaaagcaaggcgactcagtgtctcccaagtttgccaggtgaacaccgaaggatgacagcacatcaccttgtcggtggcgagtatgtgacttctgttcccttgtcccttcctacgagtcagactttagattacatggcactgacaacaaaaataaacagctccccctacacacacacgcacacaaaactggtcaagaagtggaagaatcaacctaggtatgcacacgaaggaaagaagggatgaaaaaaatgatggacgcgattacaactcaag

SEQ ID NO: 230488 - DNA, 807 bp, Homo sapiens
  chr4:82965102-82965909
  hyper
aagacccccaggcccgccaggggtccctgaggggacacaccctccacctacctcaaacatgggagaggcgcccttgctcggcaacgtgcagcccaggagctcggcgagaaactttgccatatacaagcggtgaggcagggtccctcccgatgcgccgtttctgtcctttccccttgccagagcccgagcgccaggatcctgcccgcagcccgcccgccagccggggccgtggctcggggctgccccgcggctgcggcggaggggctgggccgggcggggagagctcggcggccgcccgccccgcggcgtccagcggtgcgagtgcgcgcagccccgtccgcagcccgagcctccgctctgcgggagccggggcgccgtcgccgcgctagccttttcctctgaatgtcactattaccatagtaaagggaagggccccgccgagggggtggcgggagggccaacggcgcctcaggatgggcgccaagcgtgagcaagggcagccggcgggcgcagcgccttggcgcagacaccggcccgacccacgcctgggcagggccactcttgcaacactgccgggcgggagcagacgccttaagctccgagggagagcgggcggccggggcgggggagggtctgtggatggaagccgccgggctgacccacttccccagttttcccctcggcagcactcacggaggtggaaaggcgggcgcctcgctctgctgactgacccgggagagtcgctgctgccagatgccagtggcccgcaggagctcctgcactggccggcgccgccccacccttcct

SEQ ID NO: 230489 - DNA, 364 bp, Homo sapiens
  chr4:83293752-83294116
  hyper
caatagctgagggcgcgaaaagggtgcgcggttagaataactcagtggggtgggggaagggtagatgctaggccggagataggaacagctccagtcaagtgcaggcccgatcgactaagaacttaaccagagcccgcggagcaaaaccaatgtaccaacaagaaactcggagcatttcaccagacccaatttggtctgcatgtcaaaatgtagggcctgtatgagtatgccattgtgcgatagcgtatggtggagaaaatgagtaaatccttaggcgaaacttattcaaaatcccaagaaaacagtcggcctaaggccgacaagggagaggcagaggtggacagcctacgcgttccccaaaaca

SEQ ID NO: 230490 - DNA, 879 bp, Homo sapiens
  chr4:83482618-83483497
  hyper
gtcaaacttggggtcgcttctcacccgagtccacccgataacgagatgatggggcggcgggtggggacacctgtcaaaggacggggccggggccggggccggggccgcagcgggcgggctggctggcggcactgcggcggcggggaccgaggcgcgccggctcgggcgttcgcaggtcgcggggcagagccggcaccgactcctggacttgccggggagcgtgcgcccgcggagggctcgggcgggcggccccgcgcccgggacgctatgggagggggccgcagccgagcagggccccgcagccgggcggacccagccgccccagccgcgctgcagcccccgccgtccccggtctccgcctgcgggctgcgcacggggccgggccggacgccccctggctgcgcgacgggcccaggcaggggagggggcgccgcgcctacctgctctggtgcggcggggccgctgtcgcctcgaggggctgtgacctgctgcggtggcggcggcggcagcagtagcggcgggtagggcgcttccttcaggaaggggtgggatctgctcacccgcccgcccggccccctcctgccgcgccggggcccgcccccgacttattctggggtccccgctgctaggccttcggggagagttgatcccctgggtctcgggcttctgccacccccccggggcccctaatagtcacccggggcaggagccgggtgtgggcgggcgagccgcttccttccgaagcctttgtggacgcgtttgcctggcgctcctcatccaacaaaaggaaggacagaatcttggatcctccgcctggtggttatttattcctgacctgttgtaaccttctgcctggctctctttcgtccgcacacctag

SEQ ID NO: 230491 - DNA, 671 bp, Homo sapiens
  chr4:83718793-83719464
  hyper
tctcgccatgggatcggtttgctcaccgagaaacttcaccgagaactgcaaatgggcatagaagattgcggagggggcagggacaggggccttggagaggcaagaggggaaccggtatcttccatctggtgcgcgtaaaccaagactctatcctgtgccgggtctctcctccccggtccaactcccttacttgtcctcatctctgtccccaaggtccgtgacccgcggaggtgatgggggggataggagagccccagggaccgcagaggtgacacaatcgcccgcccgtcctccctcgctgggagccgattcagcctgtgccgagcctctcccttcgcgcgcctctgcgcacagcggtggcaccgcaggactccgggtcccccccggctctccatcgggaagccggcaaatgcgcttcctcaggcagaccgcggcggggtgggggcggggggggggcggaagttgaaatactgggacagaaacacctgcccgtcccaagggacggaaaactggatgccaagggggccgcggcgcgcagcgggaggcgaggggagaccgggggtcgctgcgcaccgcccgcagccgaggggcgagcggcgacctcgcgcgccccagcgcggcctggccacggaggccggggcgcagggggcgccggcgggacttaccccaga

SEQ ID NO: 230492 - DNA, 374 bp, Homo sapiens
  chr4:83719881-83720255
  hyper
tcttggcggccggcgtctgttgctggcgtatcccccatatggctgcccgggctgaactcggccgcgagaaagaggaggcgcgcgcggggcgggaggggcgcgcggccggggaggaggagctgtgaaaatggaacggggccggcgacgctggagggagcgctccgaaggagcgcggaagaaagccctgcttagctacagccaatcaggagcgcccgtgcggcgcttatagacaaaggcgcccccctttcggcttttcggggccgaactggggagcccgctgggcgggagttggccgcctccgcccgggggcgggtggaaggtggctcccggggcagggagcctgcagggcggctcacagcgcttctgctcttgtg

SEQ ID NO: 230493 - DNA, 283 bp, Homo sapiens
  chr4:83812351-83812634
  hyper
ccaacgtggcagccgcagccgcagccacgccctgcgcccaacacttccgggagcgacatctttccccgcccacccgacgcacagcccgccacggcacttccgggaccggcggtagcctgggaggcggggtacggctccgctggttggtggcgctctgcggtcatcgcgccccggcgatcgtagaaacccttttctgaggggcggcgcgcagaatgtggatggggtagccaggactagtgggtaaaggactagtgcagagggtgtccccgtctggccgaataac

SEQ ID NO: 230494 - DNA, 234 bp, Homo sapiens
  chr4:83821698-83821932
  hyper
gcggagggaggagcggtcaaatgcacgtcttcaggctcaggcccttccgattggctgctgggacacaacgtggcctgtcattggctacggcaccggcgcagggccttcggagaggaagtgtggaagtcccgcgcctctaaagcccgcctttcgtgacaaataaaggtcgtagccgcagagtcaacgggcggagctaaagtggtcgtgattcatgctgtcgcgggaaccccgaag

SEQ ID NO: 230495 - DNA, 201 bp, Homo sapiens
  chr4:83956037-83956238
  hyper
aaacggaactttgcgaaaacgcagtcgttttatgtaccggctactcattggagttacaccagagactcactactggagttcatcagccaatccaaagtccaagcgtgagagccagagcctgtaggagagacctgggcaggcctcagacctgaggagtggagctccgcatcactcaaccctgggggcggagctagcccaggc

SEQ ID NO: 230496 - DNA, 305 bp, Homo sapiens
  chr4:84030840-84031145
  hyper
gggcttcaggaggcggggagtgggtgggtgggcttcttaccttctctgcccgctctgcactcgggaaggggctgtgagcggcagctgcgcgcggggctcttcgatcaaccctcaccccgccggattacgcctcccgccagcccagctctgggacccctgggtctcctctgctgggaccagacctgcctgccggtaaattcttaagagcagcccgcgcagaatctatcccaaggagaccgcccatttttgctggggcaatcagggaactgcgtctgcggatggctgccctcgggggaccattcgcc

SEQ ID NO: 230497 - DNA, 267 bp, Homo sapiens
  chr4:84205947-84206214
  hyper
tgacgtcattccccggcaggcatgcgcagtggcacccgcaggatgcaatcctagtctgccaggctgggcggcggtgtgggcagaacctttcctcatccttacttgtgaaattggggtcatcgtggtcgcttactctagggaggaatacttaatgaaaaagggatttctattggcaaaaggcaaaaaaattacaataaatttagttgtaattttttacaactcgatcttgattgactttgtggttccattatcgggcaacactcagaa

SEQ ID NO: 230498 - DNA, 571 bp, Homo sapiens
  chr4:84376736-84377307
  hyper
ccgggcacgagctcggccgcggtgggagcgccaaaaatacaccccaagcttggacggttccttttggggagagacacccgccggcggatgcgggaaccacattcatccatggcaaggacccagggccctattcagacgtcgttctcagtgacccagacgctaagcccatatggaagggagagtgggacgccggagcccgcttctacatccaccttgggaaaagaccccaagttagctctcagggctcgcggaccggaagcacgcataaacttctaccctgtccaatcataagcctcacgtgacctgccgcgtagggagggcacgaacagaaaggtgctgcgcatgcgtattgaaaaacctcacctactctcgcgggtcctcagcgttctcctgcggaacctttgaacggggtactcgagcccacaggggaagagcagcggaaggggcctttcggaacgatttggaacgaaaggaagtggaagaaacgcggaaccatggccgctgtggttgctgtttgcggtggtctagggaggaagaagttgacacacttggtaacggctgctgtcagcct

SEQ ID NO: 230499 - DNA, 61 bp, Homo sapiens
  chr4:84406474-84406535
  hyper
ctgcagagggctgcgaattgcttttggtggcctgcgcctgctgagcgacctgtcacaaaca

SEQ ID NO: 230500 - DNA, 210 bp, Homo sapiens
  chr4:84456995-84457205
  hyper
aaacaagacctcaagcgtcccagatacgtcagcagttcattctgcgggtgaagaaaatattgacatttttcagatgaaaactctcctcctgaaaggacctttgctgagtgctgggggaggcggggcgcggggaagaacggagaccgcccaggaggctgcggcactcctgggctaagtactgccagggagctcccccgttgggtgacggag

SEQ ID NO: 230501 - DNA, 227 bp, Homo sapiens
  chr4:84457807-84458034
  hyper
ttccacctggctgacgctggttctcggcttcatccttttaccttcggtcttcggagtgtctctgggcatctccgagatctacatgaagatcctagtgaaaactttagaggtgagtgccgggagggatgcagccagccccacaccgctgcgggctgagaacccgggggtccagttctcaaggtcagtggtcgcgagtcaggggtgtgtgtgcgcgcgtgtgcatgcgt

SEQ ID NO: 230502 - DNA, 36 bp, Homo sapiens
  chr4:85402418-85402454
  hyper
gccgccgttctccccggaaaccgccgggcgaagtgc

SEQ ID NO: 230503 - DNA, 688 bp, Homo sapiens
  chr4:85402785-85403473
  hyper
cgcttgcggggtttcggagccagaagtctcgagctccgcgcctccgcgcccccgcgccgcgcccttccacctgcacccgttaggcgcgctgcgggacaacagcgcagatgcaaacagctttctcgcaaggaaaaagggaattgaggagaaagtttcctctctgagccgagggaagcggaaaaagatcaaaggtcgggggcgggtagagtgggggtggggggaaccgcgggacgccctagctgtgtgcgtttcgggaggcctcgcagtgccattctgcaagagtacctgctatctcgaaaatcttttgccaccgccgaccgcagcgggagggggcaaggggctctctctgactcagctccggatttgtgcatccccgcagtgcggcacccgcagtcttgacttccccagtctctgactgaacagatgtttttgtccctcgcggagatttgtaaccgatgttgggaacagctagtggacggtgctagcaacctgtatctgttctagaacacacctagtgggagctgcggggtagagtggagaggtaggaatgcagcgggactggggcaggggacaaatcaaggtgtgtgggtaaatgtgaacatatgaacacacgtgtgtacgcacgtctctaaatgtgtcattcataacattttaaaaatggtcaagtccggccgggcgcggtggctca

SEQ ID NO: 230504 - DNA, 807 bp, Homo sapiens
  chr4:85403773-85404580
  hyper
tagctgtggttgccttttcggtttcaaagtaataaccaagcaaggaagagagaagaccgaaaactaccccgcggaaactagcacagtgtgcctggatgtctgtgtcccgggacctcggggaagagggcccgcaccggtctgcgaattgcaaggcccggccttccccagcgacgctctggtatccgctgtcccctccctgtacctccgcgacccaggggacgcccagtgcaccaggcccttccccggggtcagcggaggcgcagggcgttagccacatcagaggtgcaaatttaccccgggcccaggggaaaatggcgacagcgttcgcggctccacccggggcgcgtgtcagcgttggagagcctgcccggcctgcagagggcgtaacaggcaccgctggggagagccaagcacccctgcgtccaggatccgtagcgccgagctgcaggcccgacctgcagggggcgtgcccggcatgggaagctcaggctacgtctccgaagcttgcgctgaaaacaccagaggtagggaaaacggggagagcgtactgtgctgggctctaccctggacaccccagtttcattctctgcgaagccacgcgctggcagggctctcgggacggcgatacccagggatgatggtacccctggtctcggcgggacctcccgggaacttgtcctgggggagggagcccaactggccacgtactggtagcagcagtgggtggagcgcacaaactccgaggcccgcgtatgcccagcaccccaggctgaggctgcagggccccggacccgggtcccagggacg

SEQ ID NO: 230505 - DNA, 282 bp, Homo sapiens
  chr4:85404920-85405202
  hyper
acaactgaaggcagcggccacggctgccttttcctgccctgaagtggtggagcttctgggaagatccggggcctgtagcgccctttccactgcgagtaggcgcagccgctttacaggttgtgcgatggatacaggtatcgtgtggcagacgtggtgccgtctgggcttaaagccatcgataagcaaactacacaagccagccaatcccgagcgttctaattgccttagtcctgggatcacccacgcagcaagtccagccatgaagcccgcccccacagacac

SEQ ID NO: 230506 - DNA, 3866 bp, Homo sapiens
  chr4:85416760-85420626
  hyper
catgtgtgcacgcgcgcgcgacaggggcggtacctatccctccaggtatgcaaggtccactcaccttgacctgactctctgtcatccccaacgaataggccaaacgagccctctcgggccccgccaagtattttgtttgttcgaaagtcttctccagggcgaagatctgctgtccggaaaaagtgggtctcgtgtgttttctcttcccgtctttgtccaacaaaatggatccttgatctgtgagaaccaataaacaacgagagagggggaaaaacaatcggttacaagcggctgcactagggggaaaaaacgaactcgaaaaacaatgttttgtggggaaagaaagctcagtctgtggcggacaccagaagtgtagtggcgcttccagactaacggcacgtctccctttgcttttttacatccacctgttttttaaaagccgcgtgtttggcgcagcagtaaataccttctgctcaacaccgacgtcaaacagctagggagcctattgctaaagtttgccagagcctaatcgcaaggccccattaaattaacgactgccagaaaaaggccactctcgcctcctaatccagtcggtgctcgttcggccccggagcctttaagtgagaataactagatttttttttttttccttcaacgcttccctaacctgtgtccaggcaacaaaggggtccttgtttttgcacacaagagagctaaatcgcccccaagtctaacgtcgctgcagccgagggggagaggggaagggggagggggcacagcctttgttggcggcccctaatacggccatcaaaaccgatacaatagcgtctccctggcacccccaccaggcccggctgccacagtccccgggcttcccaagagaacctccacttggctttcgcaacttcccgcagttactgccgctcagccgcactaaggaggtccggagacttggaagaaacttcggagactcgctgaaaggcgaagaactgagcgagaaaaggaccccaggctgggccctgaagtccacctggaaggctgggagcctccgcggcgctgcggcctactaccccgaagactagcgtgatcttggggcaactcagtttgcctcaagcaaggtctttgcgggatggtacattttccccaggccgtgtcccttcatctcactcttctcctggctcgctcttgtgttagggtgttgagctccacgatgtccccaaatgtgcccggacgcagcgtgtgccagcccccagagtggaggcaggtgggaaagcgcgggcccagcgctggtgagcggctggaagcgctcgccctgccctggggacgctggactgtcttcaatgggctcacccaggccgagtgtactcgggcggcgagggcgaagaggtgaggtggggacaccccaggcggagacgtgcatgcaaatacactcacttcccgggcggtggagggctcaccgctgccgggcctcactgcttcgaagagaggcagcgggttaggctggcgaaggcggaatggggcgctggacgacagggaggagccgggaaagcagagatgcagtggcctctcctcccctctcctccccatctttctaatccaggccaggcctgcggtcctggccaggccgtttcaggaacagccagggcctcggacgagacacacgtccctcaccgcgttgtggtccacacgaacacacacacaccggctcagcccaggcgtactcaagacttagagagagggaggcgcttggatacagccacgcgagctcagaaaagcgagaatccctttctggaagccctggcccaacctaactggtgtgattccggcgctgtcaaactactggggcgggccacaggatggactgagcggcatgcacaccaggggccgcgacccgggagtgggcagaacaggcacggcaggcaggcatcggggcgcgggtggtagtactcacgaggggtacaggccaggcgtgcgtccctccagggcgggctctgcatcactccgggccagaagatgggcgtccggccaggcagctcagccagcggcttggggtaccggcccacggcggccacggccgcggcgctggggctgaagtagagcccgggcggcggcggcggcgggctcaggctgctaaagcgtggcagtccggccagcagccccgccggggatgaggcggcggctgcggccgcggcagcagccgcggcggcggcagaggcggaggaggcagaggcggacgaggaagaggaggaggaggaaccggagggcgaggcggagggcagggcggcccccgaggccacgggcatggagggccggctcaggatatcgttgatgccgtgtggggtggcggccgagagctgctgcggggggctgccgagggatgagagcccccccgtggccgggggcttcaggccgcctgggttgtgggtgcccagaggcggggagggcgacgaggaggacgacgacgaggacgaggaggagggggggccggcaggcagcgggggatacgcggcagggtacagcggggtcttcatctcggccatgctgtgcagggcggccaggggagggctgctgagcaggaatgcgctctgccgggtgccctccattgcccccaccgctaacatcccacggccacgccggagaccgtagccttgcagcgagggcgctggctggtgccccccgcggggctcagaggagccggaagcgccgagggcgcgagcggagaggcactcggcgcgcccggaggcgagctgccaactgaaccaaaaatgccgctgccgggagttgctcgcctagctgcgcagcagagatgtccaaaccctccacgcgggaggcggcagctcgccgagaaaagcaggcgtcccggcgggctaggcagtcctttcgttccgcgagtcctagattcgatccctggctattctctcttcctcacttttcctagctgttcaaagtgcgctacttctcatcttctgcccccgggaaataagcaaaacaaaacccaggctggctccggagagtttgtagcaaagttagttgccgaatctccactttgaagttggagggtgggggtggcttgctttctttggggaggttcaaaggacgccttgtgcagcccgtggcgctcctctgatcttactgggatgctctgctctttcggtcgcgcggctgattcgcattcgacgctcactgtgcccggggagaaagcgcatccagcccgcgggagatctagcctctgtgcgggcttcctccgcccacgctgccccgggctgctgcgccagaaagggcagtgccacggatccccgcggctcccaggtcctcacctccacccgccttgccctctggcccacggggcactggagttgcaatattgaaaagaaaaagggggaggaaaaacacagaaaaacaaaagactaagtgtgaaaagtctgacggctgggtttcggcgccgctcgtcagtccacttctgcaaacgggcccggcgacccccgccccacccccgctccctctctccctctcactctcagcctttgactctcctctctggcattttcttcgcggcttcccaggcttcggtcttctaagtcctgtcctctggccaaactgaccctctccgcggctcctccgctctttctctcctttcctctctccctccgggcctgacagttcagatgaagctctcaaaggtaataaaacatttgcatcactccctacccctctttagctgggggacgaaagggagggggaagtgggggaccaaaatgagaactttgagggacgtcactccgaggctgcgggggccggcgagccgggcgcaggccgggggcgtaaccaccgtgtccaatagctcgccgcctcgatccttgcgtcgc

SEQ ID NO: 230507 - DNA, 42 bp, Homo sapiens
  chr4:85421916-85421958
  hyper
tattggtgtcaaagcgctcatttgggtccaagcacgaaaagc

SEQ ID NO: 230508 - DNA, 135 bp, Homo sapiens
  chr4:85422302-85422437
  hyper
ggtctaaaccccagcgccctgccacctcggccaggaagctgcgggaggatggtggcaggcatagcccgtcctagccttgaaactggggggcctatgtctctggcttcgttacaaacgaaacgtttctcgccttcg

SEQ ID NO: 230509 - DNA, 521 bp, Homo sapiens
  chr4:85422866-85423387
  hyper
attatgacaataaaaaattccggatccgtgtaccttgatccctggtagtgagggggtgagccccgggtgctcgatcccgcgtagagcagcgtgtattgcagacgcacgctgggcagcacgggaaggcaggccggtgcctcctgccaggtgctagttgtagtggatctgctgcctgtctacagctgggagcggtgacaacgatggagcgtcctcggagagggtgggctgccccctgtcactcccgggggaagatcgccctgccctccgctctaactgcgtggttgaaaccagtttcgggacccgagtcctggtcccgctgacgcgggaggcttgtttctggtggggcagtcttaacgcattgccttcagatgcctttgagagtcaggacttgctctttcttggggatcctccgaaaccagcatgccttcctgcccacgacctaataaagtgggactttttcaagtaccccttgggagtggacgtgtaacacgtggtcgcaaggatcccggcgcatctctacg

SEQ ID NO: 230510 - DNA, 136 bp, Homo sapiens
  chr4:85424273-85424409
  hyper
acagcgtggaaaagcgccgtaggatcttgcgttcggcgctctcccagtggaggccaacaccaaacaagtggggaagcgaccagtgtaaacagccccatccattctaccacagaaaagatctcgaagtccaggacct

SEQ ID NO: 230511 - DNA, 351 bp, Homo sapiens
  chr4:85503526-85503877
  hyper
agtactgagtttctgggagacggcgctgcggttgtgatcggaattgttggccgacgcacctctggacgcccagtgaggcaaaagcatctcctgttttcaaggtgatgacactgggctggaatgccgcggggccaaccagtccgtcctgccagacaagtttctggtccagtgagcctccgacccgccgcgcgtgtcaagctgacaaggccggggaggcgtttgaagcagcagtgttgagcgctgttaacatttagcgggcgtctttgagtagctcctccagccctcgcagcggcccagggactagcctgcaagttctcaacgctcacttccagcccgcgctggccccgcctc

SEQ ID NO: 230512 - DNA, 1036 bp, Homo sapiens
  chr4:85504057-85505093
  hyper
cctggtgcgggaggcccgggcagggagaagtgtgcggggccgggacaagccggctccgagtccggctccggggggcggggcgggaggggcctgcgcggcggcgggagcccagagccgcgctaaagcgggtcaagcgtcctccttttctccccgccccttctcctcctcctacctgggcctctgcgtggagacgcgcacctggcaaccggaggccgcgtctccgccttctctgctcgcgcctggcgcccggagcctgcccgggacctccgccggagccgcgctcgctgcaggcggcctcgagcgctctctcgttgatgccgttttggaggtgaccggcgcggcggccgctctatggtggggccgcgttagtggctgcggctccgcgggactccagggcgcggctgcgaggtggcggggcgccccgcctgcagaaccctgcttgcagctcaggtttcggggtgcttgaggaggccgccacggcagcgcgggagcggaagatgttggagctgaggcaccggggaagctgccccggccccagggaagcggtgtcgccgccacaccgcgagggagaggcggccggcggcgaccacgaaaccgagagcaccagcgacaaagtaagtggagccgagagaggcggacgccgcgccctggctgggtcctggttggaagcgggacacttgagagcaagggtggggcccgtccagcgtcaggtgaggctgcacgctgccggtgcaccttcctccctgcctggcactgcttcctccttctccagagggggtcgggacccgggatcccagtggcggtgaggttcccaggatgaccgcggccgctgcccgggagaaatgggccactcaacccggcttacagtttagcttcatcctcttccggtcccttcttcaggatctggggccgacgctggaatcaggagggaacctgtcctcctaggggctgcagtgcagttagtagctgccacctcacctctcttttcagtagagggaacaaagttagtaaggactagagacgtgccaccgtcggc

SEQ ID NO: 230513 - DNA, 109 bp, Homo sapiens
  chr4:85887748-85887857
  hyper
ggaaagtgaggggttgttgccgtttcccgcagctgttggtggccatctttaatcctcctcctcctcctgctttctccacctcccgctggctgtctgactgactgactgg

SEQ ID NO: 230514 - DNA, 55 bp, Homo sapiens
  chr4:85888217-85888272
  hyper
ccgctttccttaaccctacaccctttagctggatgctgtcagaggcgatggagaa

SEQ ID NO: 230515 - DNA, 233 bp, Homo sapiens
  chr4:86851207-86851440
  hyper
ctgctgaatgtgaccggcgggcactggaagcagccgcagccacagccttggtgaggagcaaccgcagccctgccagctccctcccagttctcattgagaaaaggggagacggagcaggaggagggggaggagatgctccctgcaaagctgcctccccccacagatccaaagagcctcttggaatgggcactcgactgttctgacgttgtgattctctcgggagtttgaagaca

SEQ ID NO: 230516 - DNA, 454 bp, Homo sapiens
  chr4:87281209-87281663
  hyper
acctaccagaggagacggacagagggcttggggaatggggttgctatggcaaccgaaaggagcacacatgacgtcaaagcccagagaggtctagggagggggatgagggggaaacagaaagaggaagcgtctatgtgcagctacagctactgtgttttccggtgaaatgaggaccaggcaaatgtaaaggaataaggttcgtcggcagccaacatcagcaactacgacatcaaggcagccagcctgcacaacctgaagaaaagatccattcgatgcagttctggccctttgcacagcagcacggaggagcaaataccagcagagcaaaacaccactggaaatgcaacctctgcttttcaactatctcttgtagtatctctaaacgtcaaacaagtaagagatggtaataacctcagaggagaagcaggcatttgagtgtcgcctgaaccccgag

SEQ ID NO: 230517 - DNA, 1007 bp, Homo sapiens
  chr4:87515019-87516026
  hyper
aggctgagaggcagcgaagagtaagggaggagccagcacttacgcatttttcactctcctcctcactccctagggtcatagttttgattctgaagttagaagtgtgggggtcgtcggctgcattttcaacttggcctaaaagttggagttcaccacactgcaggcgctaggaactctgccgctcggtcaccaacctgagcctctggctagtccgaagaacgcgaaaagccaggcccaaggcactggttgtcatggcaaccggggcgctggtctccctggcgacctcgtccctagggaggaggtggagctggatgccaggcgggccaatgaggtcgaggggagctcggggtgggagatctgcggtcctcccagtgccggggaatggttgagtgacaggaccgggggggcggagccggcgcggctgcccgaggtggagccccagtggtgcgagtagctccagcggccacgctgaggcgagggtgacacaccatgctcacggcccctggagaccgtcgtgctggcgagccgtgctccgtagctccccggtccgcctcggcagcggtcagagtcgcctacaggagttgagccgcccgcgccagaaggttttggcgaagctcttggagaggcgtcgagcacagtagggcggcgggggtgcgttgagcgctcgggggtcaggcagtcggccgggatcgccgctggggagcgtttccgaggcgaggaggaggaggaggagatgctgctcctcttctccccctccccaggctccttctacagctccttcagcccacgcccgcagccgcttgtgggagaagtggtggtggctctcggcgcccgcggcggctgccggcggcccgccccgacgccgcgtccctgcagccctcgcccggcgctccagtagcaggacccggtctcgggaccagccggtaaggacgagagccgccctgggctctgcgctgcatgtgcagaagtgcaaaacaaagtacattgcgctcgttctcttcctcctc

SEQ ID NO: 230518 - DNA, 45 bp, Homo sapiens
  chr4:87516267-87516312
  hyper
tgacattgccccgtcgtgcttgcacagctccgctctgtgcgtgct

SEQ ID NO: 230519 - DNA, 821 bp, Homo sapiens
  chr4:87813018-87813839
  hyper
ctccaacaccgctgcgccaaaatgtgtctgatcgtggcagtgctgagcgaccaaaggctctgcctgcacaggaaccacccgccccggcccgggcactttgagcagagcaatccttcccaggttttccctcattcaaaacactcagcaccactcccgcgtccccgcccttgcacgccgattcggggcgagtcccctacccttccccggacggacgcgcagggcccgggaggaactggttcccgggacgggtgggggcctcggccgcccacagagcccgcggagaagggaacggcctcagcctcggctccttcccacacctgggccccaccctgcctccgactcgccaggaatgcgctgtgtgcgcggggcttccagggtggcgggtccccgcgagccggcgccggcggcctggttacccgggctccaggggctcggagggtcgcggccggggtactgaggtaagagcgcgctgcgctaagcgcacatggccgcgcacacgcctcggggccgcgccgcaggcacacgcctccttcccgctcgccgcgggcgccgagtctggggctcctcgcgtcacacgggagcctcaacaaagggctttgtggggccctccccacccgccagggaggggacgccgggcccgggagacgcgccccgcggggtccgctctctggtaaccgggccggggcaggccgcgctctcggaatccagccaaccagccagagagggctgtaagccagacctttcctgggaaggacgctttccaatgtagggggctgcatccaagcgatctggacttcgtttgcgggcgccatttaaagaaa

SEQ ID NO: 230520 - DNA, 74 bp, Homo sapiens
  chr4:87855923-87855997
  hyper
tcaccctcgcgaccggggcggtcattgccgtattccgtcctgagctgccgctcccccacgatcctcccaccaat

SEQ ID NO: 230521 - DNA, 1019 bp, Homo sapiens
  chr4:87856414-87857433
  hyper
cagggctgggggtcgatccgcccggcccccgacgccgccgccgcggacttctcggaagccgaggctctccccgcctctctgccggcttcccagcacgctgactcaagtcgctggcgttcccacttttccggtgggagccctcggggagaacgggctagggctcagagctctcaccgccctacttgcgatcccgcggcaggtagcgcgtagaaaaacaggggacggggacatgggaagagacccatgctcctccctcacgcgcagcccccaagtcagacgtttgcctgtgcaccccgcgttttgcggagagctgtcccgttgttgggacctgctacttgagttgcgtaatgagtcccagaagtttctcggggggagggggcggggaaaagtggggttcttctctcctgcaccccgggacccttccctgtgcctgtcgtggagagagatgagggcttcccgccgcgtctcgctgagagcaggagggaggcgtgtgtcggtggtccgtagcctccggggaggagttggagccaccttctgagacttaacttcagggacagagggagaggcgtctttagtatgggactggttaatttctcttgataatgcttttttccctcgggtgtcccatcctctgtggccgtcgcaaccccaccctccgacggtgcgagcgccggagccagcgaatgagaggggagagaaggtggagagtgtgaatcacacgttaccttagtgtaatggtagttgcattaatggagctgcgacgggcctgcgggcggttcgataccgtccggctagttttctcttcccggagcttctccaccaccagcacccgcaaattgttatgcagatcatcccgggaaggcacttggctttggaggtggagatgtgtccgaatctcccttgaaccagtctctgttagggggaaaggccttgcagccaagtgatttgttttaagggtggagccggagataattttaaacaccctcccccttggtgcacgttgcggggtgtgactcacc

SEQ ID NO: 230522 - DNA, 42 bp, Homo sapiens; identical to SEQ ID NO: 199487
  chr4:88887030-88887072
  hyper

SEQ ID NO: 230523 - DNA, 783 bp, Homo sapiens
  chr4:89079573-89080356
  hyper
ggatctcaggatgcgtgcgctcggaggcagcgctttaacaattaaggatgtaaatgttgggatgagtcacccggaccttccaaacaaactctaaagcagcagtttccacttaacaagaccaccaagcatgtgcacggtgcgttcctaaatcctacccagttcctccacaggctgcctccttgccgcgtctctcaatctcagtgggagtggcgggcactgcctcttccctcctgcgcgcccggaaccttttgagtgggcacagcacgcagcccgcgcgcggcacaaccccttcccccaaccacacccggcgcgcccgagcgctcccctcgcgcggcggccggcgtgggaggcgctgcggctggaggtcacgatgggagccggcgggtggccgcctggggagacccggacatccaggggacgagctcaggcagcgctgacacgaacttcctaagccgcgcttcgggctgtggaccgccagagctgaacgcagtggcccctccccagcgccccgggtttccccaggtcggggttcgcgggcgggggtgaggcgtggccccgactgccgggccgcgataagcgccctgcgacccggctgaaagcgcacacgtgtcctgccgcgctgagccgccagcaggactggtaccaccgccctccctcggggctagggtcaccctgccgtgacacgcagggacaagccaaacactcccgcctccgggatcgaacggaatgaaccagagtgattaactacgagaatcaccaggcgctcattgggctgatcagtac

SEQ ID NO: 230524 - DNA, 441 bp, Homo sapiens
  chr4:89299895-89300336
  hyper
ttgaagttcaggcagcgagagttgacatggggccagggctgcgcccctggggcgggttgaagacagggtgagtctcttgatattcaggaaatcatcgcgcacccagtcaccagcgttcgggagcctgtcgcagcgggaccgacggaatccggagcaggcgacagggcgcagaagcgggatgtacttctgttggggcgccgactccagggagctgcagcgccggaggacggcgggcagccccggggctgagctactgcaggcggccagcggggagcgccactctctgctgctgctgaccaaccacagggtcctctcgtgcggagacaacagcaggggtcagctgggccgcaggggcgcgcagcgcggggagctgccaggtgagcggggggccccaggtgcagggtgtgaggaccccagtacatgggcgcgggggcttgggta

SEQ ID NO: 230525 - DNA, 467 bp, Homo sapiens
  chr4:89377924-89378391
  hyper
caacgcttaacaaactttggcttccgttatccctccctctggaaatgcgtgtgtcagggtgcctcctagtggaactgcagcgtttcctcgaaagccattccgtccaggagttaaggtggccgctgcccgcccgggacactttctcagtccagcccatcggcctttaccccagccaacgacctgttgcctttggccgcctgccaagtcactctcattacagtttccttttccttttcgattccgccccctaaaaacaacaacaaacattatgtttcgttttccactggagctgcaggccccgcccccaaacagcacgtggggggcgtggcgtcccggcaggggctcagtagctgaggctgcggttccccgacgccacgcagctgcgcgcagctggttcccgctctgcagcgcaacgcctgaggcagtgggcgcgctcagtcccgggaccaggcgttctctcctctcgc

SEQ ID NO: 230526 - DNA, 177 bp, Homo sapiens
  chr4:89444420-89444597
  hyper
tcccgcaggctggcgttgcgttctgggagatgtgggacgcagctcccctggcctccggtctcccccgtcctgcccgctgtgcgcccggcgaggacagagtccagaatgtggcagcggagagtacctgaccgacctacaaggccccagtggctgcaagaggccgcggtccaccgctcc

SEQ ID NO: 230527 - DNA, 274 bp, Homo sapiens
  chr4:89444895-89445169
  hyper
gtggccgagctcccggcttcccgttcgtccaggccagccgggcaggccccgccccctggtcctccaggaaacgctgccgaggagtaggcggggcgggcgctttggttccgagggtgcttctgctccgactgcttttcccacgggcgtcatctatagtccggaggacagccccagggcagaggcctctggtgagtgccccgccgccttaccagactacaaactaaaccagtgtttaagtcaaggtgtctgggttttcaccggggcctgtccaagg

SEQ ID NO: 230528 - DNA, 151 bp, Homo sapiens; identical to SEQ ID NO: 199490
  chr4:89513528-89513679
  hyper

SEQ ID NO: 230529 - DNA, 657 bp, Homo sapiens
  chr4:90228653-90229310
  hyper
ccctgtgcaaaatgtgggaccgaatcccttccgcatccctacagagcacaccaccaggctccggtcccccgcgctggccgccaggcggaggtgcgcagggggcgtctcctacctgctctgcccggctccgcggcgcggcggggccactgcctgcgctgtggcgggggcttcccgtcgcatatcccaagcaccgtctctcggcgccacaccgatggctccggcgggcccgcgagctgaggtccttctcagcccggtcccggagcgagctccgtgcgttcaggaactgaaattactatgccaagagcagaggcggcgcgcagcagtcgggcgtagaccgagggggctgcccccaccgcggggctgcagacgccgccgccgcccccgccgggcgcagagccagtttggaggtgagagttcacttgcccgactgttcatccgtcaggcccggggtgtacccatctgtccagcgctgcccagcctgagcatccgagagaggggcgacagctttgcaggcggcggcggcggcagcagcagcggcggcagcaggaggccgagctccgccccctccaaaccccctcccccgccttcccggtcctgggggaaagtgttgcagcccaggctgctgagcgccgggccgggagctaggaggggtctggt

SEQ ID NO: 230530 - DNA, 1821 bp, Homo sapiens
  chr4:90757397-90759218
  hyper
cgtctccaaccccgcgccagccacccgagggggcgttctcagcctccaccctagcggaccccgcgccagcacttgttaacccgttaccacctgttgacttggcctccttgcacttccatttcattatttgccaaacgcagcttgcttactttacagagaaaaaccaagagagcgggcagacagattttatgtgagagaaaagttggatgctcacgctccatggagcatcctcgcgtttcccggggaaaagcggatcccggagaagcagcctaatctctcagcccttgtggagaagggaatatcagaagcaggacgaaagccaggtcaagtctctttccttaggctccccaaagggacaagtactcacctcccagagacctggcccagcgggtcctcatggcagcaccaccccctcccggtgcccacgaccattcgtctcccatccggcgttctccaggatttccaaagacgcccgtttagatccacaggtacttacctgagtccctctgcttctccacaactccgactcctccccgcctctctctttttttaaaaaaaaaatttaaacaattcccaaataatatttaataggaaagaagaaggaaaaggagcgcacaggaagggcggaggcggcacccgggggggactgtccccagaggaggccgctgtgagccggcgacgcgaggctgggggagtgggaggcaaacccgctaacctgtcgtcgaatggccactcccagttctccgctcacgagggtggaaaggcagaaggcttgaaggcaaggcgtgagggagcgcccaggacgctctcggaggggccgggccggggtctgcgctgcagcccgcacgcacctcacttccgcgtcgcggcgctcggtcgctcgccccctctcttgggccccttctggtcgtcgccgtcctcctcctcctagtcctcctccttctccttctcctcggctctccgcccccaccgctgatttgtcagcgcttctgcccgcccctctcccggcgctcgctgctttccctgcagcgtgctcctcgtccctatctcggatggggatggggcagggggcgcggggtgagccatcaactccagccgcctgcctggccgcgcaaggcgggaaagtgggggcgcttttgcgcctcacgttaagtttagggtcacgagcactcttgtggagatcgggagcggttgggctagggatgatgcctcttcctctttccccttcccctcccttcttgtccccgcctttcctctgggtcctcccggggaccaccccctacccctcgtcagagtcgccctgggagagccgagggcctgagggtcgaccaccaagggcagagcctatcccttggggagctgctggaggagacaggcagcgccgggaggtggctcacaccgcaccgccgagagcgctttgccctcgcatcgctgaaatttaatcacggtcacaggttacaacgttaggggtcgctttagttcaaatatcttcaaggttttcgtttgctcttaatctaggaagagccggaaagggtcctgagggtgaaagggagactactaaggaagagtcacaggttgaggaggcaggagaaggctcagcaaatcctctttccacgccactatcaccattttcctttccaccaatcagcgcctgccagacgctgattttcccatcagtggaacaaggaataaatattccccagccgtctaaaacaagcggtcctaaggcttttcgctctagaaatgggacttactttgcagacctccctttatctgggagacaaatccagcgtgatttagcctaccggaccatcatatcca

SEQ ID NO: 230531 - DNA, 326 bp, Homo sapiens
  chr4:91048333-91048659
  hyper
gggaaaaggccaggtcagcacggtgggatactgcttcccctaaaatgaaaactcagcagcgggccagcagtgggtgtgcgcgcgtcgatgccagaggatgcgtgcgtggaatccggcggacgcagtgggccgggcaccgccctccaagccgccccgcccagcccaccacactcctccttgtataaaggccgcgcttgggcccgccctcctcacagccccggagcgcggcctgccggggaggtggatctcgcgctccccacacagtcacactccgcgcactcacacacttggaagcgcctccccacgtccctcccctgccctcctct

SEQ ID NO: 230532 - DNA, 742 bp, Homo sapiens
  chr4:91048895-91049637
  hyper
gggaccaggaaggacacccccgtgccccgaagacataaatccctgagtgcccgggaggagccttaacaagcgcacggagccctcaaggtagtaacgcccctggtgcctcagcgctcagcgggtcgcgcgtcgcgtcgccgctttgcggggccggccgcaggcggacgcggggatgaccgctcggcaggtgaccgcgccgtgtcggggccgcctgcgagcagcgcgcgcccaggcccggcgtgctcggcgcagagacctggccttgcgggcggggtgggaaggaggcgggcgggctcgctcaccaccggcccgcgactcccagtgcgccgcgtggccatttcctccacgctgctgcgtggtttgctgcctgcggccgcggcggccgctccagggcgatgcggagcgctggccaaggcggcgagagttggcgcaggcttcgggtcgctccccttcctcgccactcgcgtcccgcaggtagaggcgaccggtcagcgctggcgccccgggctgcgggtgctgaggcggggacggcggcgaagagggggaaggggaggagggggcggggagccaggggctcccggaggaaccgcagtgcggggccgggaccacctcttgcctccgcctgcttgtcctctggcgccagtttcctggattggaagcaagaccctgcccagaggcagcagtaacggcagcgacttagattgaaccacttgctttgtggtggagcgtcaagggccccagg

SEQ ID NO: 230533 - DNA, 81 bp, Homo sapiens
  chr4:91049697-91049778
  hyper
tgggttggttcacctgagcagaaagtcagccgtaagctgaaaccgcatgtggccccctggccccttcgacttttggcttgt

SEQ ID NO: 230534 - DNA, 87 bp, Homo sapiens; identical to SEQ ID NO: 199496
  chr4:92905822-92905909
  hyper

SEQ ID NO: 230535 - DNA, 291 bp, Homo sapiens
  chr4:93224881-93225172
  hyper
ttccccctctctccgcctgacagcaccgctctctcgcaggctcgctccttctcctaggtgatccatttctaggcaacgtggggctggtgctgaagctgccaggctcgctccttgcttcctgcatcccgccaggcgaaacgctccaaaagcatcctgcagcctgcggcggcttccctcctctggcccggccccgctgctcgcgcccggcgcaacccccccgccaccgcgccccagcaaaccggctccccgggcccgcctcgccaagctgcgttccgcgcctcacgcagaaag

SEQ ID NO: 230536 - DNA, 535 bp, Homo sapiens
  chr4:93225440-93225975
  hyper
tgggaccggagacccgcggcccccgcgcagcgatgggtctgatctgagccccagcctctccccctgcccaagagcagtagaggctggatatatttttcaaaagccaaactgcaaacaactctggcgatgccaaaattcccctccaagtgacacggctttgcgaaggaggtttcctcaggctgggctctttctgtcattcccttctgcctttctcggcgacgataaaaggctttgctctggcaataggaatttagaaaaaaagaaaaagctgcgctaaactccaccgtgacctcaaactctttggactgtttgaaaaaaaaaaaattggaagaaaatccatcctccaagagaatcggcataggaggagatggaagttttcccctttctcttggttttgtccgtctggtggtctcgaacctgggactcggcgaatgcggattcgatcattcacatcggtaagaaagtgttggtgcagctcgtggttacttttaccgtttcagttctcaaatgtttccccttcgctttccccctctcc

SEQ ID NO: 230537 - DNA, 569 bp, Homo sapiens
  chr4:93226458-93227027
  hyper
tcttggctttatgatccttgcgtgtagtctttgagacggtggcaggaggggctggcggcagtgtcgccaaggactgattgtcgcgtgcctcgcctcctcggacacgctcccggggcctggcgcggcggcgaaactgaccccggggcgcttgggaaacgcggggaagcgaatgcgcgcaggctgctcccgaggtctgcttagcagatatccgccttgcctcgcctcgcctcgcctcgcagtcaactccgagtagccgcgcaaggcagacagcgaaggcgccgggactactgcgggccgcgactctgagaaggactgccgagcgggctccgagatgctggtggccccacctattggcaaccagacgggccgggactggccgcggcgagcaggggcgggcggggggctgcgcgtcattatcatgcacagcgctcgcagcttcaggctccaactctactcacttgctaatccgtgagagctgagcgggagacaggctcttgcagccttttctgcgttaatgcgacgatttctttttcggaaattcgcttaccgagccagcaaggtttctttgc

SEQ ID NO: 230538 - DNA, 322 bp, Homo sapiens
  chr4:94748536-94748858
  hyper
gcatcgcactcccgcgccccaggggcggtgcaggagagcgcccggagccagagccagggcgcgctgggcgcaagctggggcgcgcccagggccaatgagcttctgattggctctttgctgtgaatagactaggccgaggctaataggaccggagggggcgttcacctgggaattggcctcccccccttgccaaggacctccctgattgtatggggcggagtggggtgggggtgggggctggaaaggggaagcccaccctaactaaacggaggggcgggaggaggttaaactgaggaagccacgagcccgcagtaaagagagg

SEQ ID NO: 230539 - DNA, 2020 bp, Homo sapiens
  chr4:94749482-94751502
  hyper
agtggcttctgggcgcctggcgggtccagaatcgcccagagccgcccgcggtcgtgcacatctgacccgagtcagcttgggcaccagccgagagccggctccgcaccgctcccgcaccccagccgccggggtggtgacacacaccggagtcgaattacagccctgcaattaacatatgaatctgacgaatttaaaagaaggaaaaaaaaaaaaaaacctgagcaggcttgggagtcctctgcacacaagaacttttctcggggtgtaaaaactctttgattggctgctcgcacgcgcctgcccgcgccctccattggctgagaagacacgcgaccggcgcgaggagggggttgggagaggagcggggggagactgagtggcgcgtgccgctttttaaaggggcgcagcgccttcagcaaccggagaagcatagttgcacgcgacctggtgtgtgatctccgagtgggtgggggagggtcgaggagggaaaaaaaaataagacgttgcagaagagacccggaaagggccttttttttggttgagctggtgtcccagtgctgcctccgatcctgagcctccgagcctttgcagtgcaatgtcccgcctgctgcatgcagaagagtgggctgaagtgaaggagttgggagaccaccatcgccagccccagccgcatcatctcccgcaaccgccgccgccgccgcagccacctgcaactttgcaggcgagagagcatcccgtctacccgcctgagctgtccctcctggacagcaccgacccacgcgcctggctggctcccactttgcagggcatctgcacggcacgcgccgcccagtatttgctacattccccggagctgggtgcctcagaggccgctgcgccccgggacgaggtggacggccggggggagctggtaaggaggagcagcggcggtgccagcagcagcaagagccccgggccggtgaaagtgcgggaacagctgtgcaagctgaaaggcggggtggtggtagacgagctgggctgcagccgccaacgggccccttccagcaaacaggtgaatggggtgcagaagcagagacggctagcagccaacgccagggagcggcgcaggatgcatgggctgaaccacgccttcgaccagctgcgcaatgttatcccgtcgttcaacaacgacaagaagctgtccaaatatgagaccctgcagatggcccaaatctacatcaacgccttgtccgagctgctacaaacgcccagcggaggggaacagccaccgccgcctccagcctcctgcaaaagcgaccaccaccaccttcgcaccgcggcctcctatgaagggggcgcgggcaacgcgaccgcagctggggctcagcaggcttccggagggagccagcggccgaccccgcccgggagttgccggactcgcttctcagccccagcttctgcgggagggtactcggtgcagctggacgctctgcacttctcgactttcgaggacagcgccctgacagcgatgatggcgcaaaagaatttgtctccttctctccccgggagcatcttgcagccagtgcaggaggaaaacagcaaaacttcgcctcggtcccacagaagcgacggggaattttccccccattcccattacagtgactcggatgaggcaagttaggaaggtgacagaagcctgaaaactgagacagaaacaaaactgccctttcccagtgcgcgggaagccccgcggttaaagatccccgcaccctttaatttttgctctgcgatggtcgttgtttagcaacgacttggcttcagatggcagctacatttgatggtttgcaaatgccgccgctgttccaaacttcctacggtccatattgtttgatgaaaactttctgttaaaattgtgtcctttccgcccaccttctgctccccctttagatagatacggtataattgtaggtacccgtatatggcatcattattctagttccctgctgccaatacgctgctaaaacgtcgcatcttctctgtc

SEQ ID NO: 230540 - DNA, 389 bp, Homo sapiens
  chr4:94753212-94753601
  hyper
gcaccttgaaaagagaaaagcgccaaaaagaaaaggaaagcgccacaaactgggtttgcagaaagagtaatgcactagggagcgcaggttctggtctccttaagtaagaaactgcagaaccagctttttactgaccacctgggtatctgtggctttcagcggaagccgaccaagagatgcagagaacgtccgccagctctctgggagaagcgagcaggcggctggtgacactttccagggcagaaataatgcacctgtcccttagataaccttttgcacccatcgagtttgccgtgctcacgataaacatcaggaatcttcgggctgctgaataaatcaagcgattgcttctaacacatttccatttcgctctcaataagcagacccaa

SEQ ID NO: 230541 - DNA, 71 bp, Homo sapiens
  chr4:95372822-95372893
  hyper
ctttgccaggtagcgctcaaaatccgctaagactactcccaccgaaactcggtagcgcagttgtctttccg

SEQ ID NO: 230542 - DNA, 130 bp, Homo sapiens
  chr4:95373288-95373418
  hyper
ggtgctttctgggcgcggagcggcggaggtgggagagcagcttgggaaaaggagcgcccggaaaagggcagcgctggagtccgcatgaggccagagggcgagccctggggtccccgcagcccgggccgac

SEQ ID NO: 230543 - DNA, 996 bp, Homo sapiens
  chr4:95678827-95679823
  hyper
acccgggctgcctccggcccgcaccccgccgctccccaagtcggctccgcactccgcacacaggcggcggcgctggggccgctccaagtgcgttgagaagtgtaatccctccgctaagtacttggctctcagtctccaatcactagtgggagctggagagggcaagtgaaaaaaaaaaattccagaggcagccgaggagcgagagggaaaaaaaaaaaaaaaaaaaaaaaaagtcccgcggtggcggcggcggcggcggcggagcggccgcggcggccagaagttgacggcgcagccgggcgcggggcgcggagtcggcggggcctcgcgggacgccgggcagtgcggagaccgcggcgctgaggacgcgggagccgggagcgcagccgcgggtaaggcgcgcgcggcggggccccgtcccctgcgggtggccgagttcccgagcgcgcgggaggcggccgagccggcgagagccgggcagagcgaggggcggcgcgggacgggtagcggctgggtgcggagctgggcggcggtcgccctaggcaggacggagcgcgcgagggagagggcgagagcgagggcgggctgcgcggccgtggggcggtggcggcggcggggagggggtcaggcggtggccgcctcggctttgtgcgcgggcggctctgccgggaccccgaggcctcgtgcctgcgcaggcgaggagtcggggcagcggcggcggcgggcgggacacgtgcttcgggctgtagggacgccccaaggcagggagtcggacctgcgagcggagggatggggcgggagggcgagctgagggcagtcgcggaatccgggaaatgggagggagcccggcggggcgggggcccagggccagcccaggcgggacccgcaggcacccacctgccccggacgcctcccgagacccagccttgccgtgggggaaagtgcgcagcgggctggtcccggcgccttggactgggctccgtctctgcttcagtt

SEQ ID NO: 230544 - DNA, 2127 bp, Homo sapiens
  chr4:96469111-96471238
  hyper
agttataaactggtcgactaccccggggagtttcggatttggtttgaacaagcagccggttcccccagagctccgggattttcatttctacatcccctggtgggaagcaggcatgaagcggggtatgtatgagtgcagaggcatgcacatcccgggcctgcctccagccgggtacgcggattcgggtgagctgtgtatttccacagcacctgaagcagcaggcgagggggacgggtgcttttgagtccttgacagtaatggacacatttccttagctgagcgcccttcggggtctagtgtgctcagagactcagtgaagatcctgctaccccagtcttggcacagcgcggggagcctctgcgcatcatgcgcttcggggtgcatctacggtatgtcacacagccacccgcaccgagagtctttccaaacctccgtgtgtgcaatatgcaacaacgtgcgcgtgcggagctgaaagggcacaagacactccaggctcccacacgtatggagacggatcggctgcgtgtccacaccccgttcgtccctggtccattcgtgcccatctcagaagatagattaaacataataataataataattattattattataatcaaagcttcttgactagttgggaaagtggaatttagagtggtttccagttgaaagcaacgaggcaaattgaggaagtcaagagaactggggaggaggagaggaaggagggaaggaagaagctaagggaggtggccgcggagcttggcggacccccttaccttgggcggcggagccagtgccgctggcgctgagcagggccagggcaggtagcacgagcatttgcagcaagtatcccagtcccagtccgcagcgggccgctgtcgcccgcagacctttcctcatcgtagacagaggtgtgccggggggaggggagggggacagagagacgcgcaaacagctgaaagccccactgggcagaagctgaatccgtgcaccgcgaagcagtccgaagaaataacgacaaccaagcgccacactccactttctccaaaggcaggggccaaaagggggaggagaggagacgccgaggaggagtttgaaggtccctctttcccaatgccttctaactgacgtctcccgcgagcgactgctctgcccccacttgggaagtccagggaggcgcaaggcggccacctccgccgctccccccagcagcaggagcagccgcagctccgccgcacgccgaagtctggactgctctccgggtcccctcgcctgtgaggaacacacacagacaccgggggtgggggtgggggtgggggttgaagtggggggagttggaggaggagggaacggagggaggaagcttgggcaccgtcaggcgctctggtctccaatctcagtgttctcacgccggcggagagatgtcccggctgtcgctgctgggtggccaaggaggttcacatcctagagtagggcgcacgggtgcgcgaaggcgctcgccaaggaggcgtagagggcgcagcacaactcctctggggggtaaccgggggcgggagcacgcccgcccgccttatgtaagcaaggattgcagggagatcagcgcccaggagaccagctgtgggtttgcccgctgaagccgaggcgagacagaccaggggacgaagcggctgcggagagtggcagcgcgcctgcctcccgcggtgcgccagacctggacgccgggagtgcagcgggcgcgccccgggccactaggctgtgtccagtggagctcagcctgccgcctgccaccttcttcgccgcgccggcaaagcctcagccgaattccctaggactggactcggtctacgacttcgggtctcgcggttgacgaagccggtgcgggctcgaactgaagtccttcttggttggggaagaaggcatgaagcttttgcactgccccagccggctgctgtcctggggttgtcagcgccagtcagactgctttatgttctgagcgcgtatgacccctttgcagtggaacagaaactaaaagctcgacggaaactcattctgcaacagtgctttctttgcgtgcatgttggtggctgacaagggtggtgatgcgataccgagagaaactctcttagaaaa

SEQ ID NO: 230545 - DNA, 66 bp, Homo sapiens
  chr4:99850237-99850303
  hyper
atactcaccggttcgacagtcgccatcttagatcgatctgatcgcacaaccgctccagaagggggg

SEQ ID NO: 230546 - DNA, 76 bp, Homo sapiens; identical to SEQ ID NO: 199507
  chr4:99850526-99850602
  hyper

SEQ ID NO: 230547 - DNA, 164 bp, Homo sapiens
  chr4:99916362-99916526
  hyper
gttctccaaggagcggcgggggaatccaacgcagaggagcgcagcgccctctctagcctcctgcgggtgtcggggatgatcagggctcctgggtgttcgtcagtgaagacgactgtcttatctgactgtaggcacagagagtgcgccgcgagagggcggctcct

SEQ ID NO: 230548 - DNA, 235 bp, Homo sapiens
  chr4:100009991-100010226
  hyper
tcgagctgtggtgcgtgccgctaagttgtgcgttccagggtgcactcgccggcgaggctgcacggcgccggtttcattgctaaaatccgacggacttgttgcagaactcgttttttttgtcgggaaagggcttccccgtgtaactttacagcagttatcgtagataagacttgcaaattacagatgtggacggtgagggaacgggaatttcactgaaagcgcctgagaaccagta

SEQ ID NO: 230549 - DNA, 49 bp, Homo sapiens
  chr4:100484871-100484920
  hyper
gctgggtaggccgcggggggcgcctgtcatcgacgtcatttccttcagc

SEQ ID NO: 230550 - DNA, 55 bp, Homo sapiens
  chr4:100485194-100485249
  hyper
gtggaggctacggcggttgcgtcttacgtcatcgaactgcggccatttcgaaccc

SEQ ID NO: 230551 - DNA, 232 bp, Homo sapiens
  chr4:100729523-100729755
  hyper
catagagaggaaggaaaaagcgatggatctaatcttgacttcaggtaaaacagctcccccgcgcccaccaacgcggtattactgccacctagtgatagcatatcctcatcacagaggtcctgcctgtggaagtggaggggaagaggtgtagtaagcacagccagtagggcgaatccacaaattaaatacacccgggggttgggggtggcgaggggagcgctagagtaaggct

SEQ ID NO: 230552 - DNA, 68 bp, Homo sapiens
  chr4:100868134-100868202
  hyper
gccctgtgacctccaggcgaggccctcgcagctcaggccaggaggacagggtccgggaaggggacact

SEQ ID NO: 230553 - DNA, 31 bp, Homo sapiens
  chr4:100871520-100871551
  hyper
cccgccctcgggacgcgtccttgagacttca

SEQ ID NO: 230554 - DNA, 1061 bp, Homo sapiens
  chr4:101111126-101112187
  hyper
ccagttgcaaccatggtcaacggctctgtttccttcgcgaggcgcaacggcctttcctgagcgctggaaaaaatgaggcgagaagagacggatttgcaaaagcaggcgagtcgtgcagaggctcctaaaatgcccggcgtcccgggagcgaactagcggaggaactcctttgccaaaggggtggaaccggcctctgcaactcaatttgacaaagccctgggagcggagccgcaacctgaaactaactcaacagttcgcaaaacttggaagcgacctgccccgcggagcgccccccggccccgctgcccccaccaaggccgcagcttcgctcacctgccaggagttcgcgggggcctgcgcgctcgctgccgggtaaacacaggcaggtggcttcttaggagtcccctctcctggggactcggtgacctgcagaccccagcagccagcggcaccctgctcacccctcccgggccaccctgcgccggctcctcgcagtagcatagcctccggggcagcgagaactttataggtccagtccccaccctgctcaggcccgcccacctgcaccgcccctccccggccagcgccccgcccctcccctccagagtctggtcccctttcaacctctacacttccagggagcccgagcctagccacagggagttgaggataagcctgtggtagagcggacacctgttgcttccagggtagatctcgggccactgggaccgcaattccgggtgcacgactcgtcaaagcctgaacctgattgttcagtgcgacccctccccgagcgtccgcgctttcacactcaggctgctcccggcagcgggaagctttaagcgatctgtgcatttccttgtcctggggctttgctgtgtcatcctgaacacttggcttaaatctgttgcaacgtccactgagcatcatttatgcacttatttctggcctctaacccagtcaactctactctgcctcccagggtttctgtatcctcctctgctgcaagcggtcagatctagttttcctttcccgcatcgaaggctcgccagcattttaag

SEQ ID NO: 230555 - DNA, 80 bp, Homo sapiens; identical to SEQ ID NO: 199512
  chr4:102269360-102269440
  hyper

SEQ ID NO: 230556 - DNA, 251 bp, Homo sapiens
  chr4:102269669-102269920
  hyper
acgcagccactggccgggacagttgacacccatcttccttccctgctccttccagtcattctacacccgcttggtgctgccagtgcgggcagggccttggagcccaaagcggatccccacacttgtccctacggtcggaaggaaagtagaggagagaaagtcaggcgcggcagggctaagagcaatagtggcccaaatgttcctggcccgcctgctgcgccacagagtctgaaaagcgggtctccgtctac

SEQ ID NO: 230557 - DNA, 443 bp, Homo sapiens
  chr4:102711752-102712195
  hyper
agtgttataagaaaccaaagcggccttttgagaagggatgtaagagcaggcccctgagcagtttcacttcctctgggcgcccagcagagcggagccctggccttgcgggcatgagccccggggctgcgtttcctgagacctggccgcagcctccgcgggtggcaagcgggctggggagagccgagggccaaaggaagagaaaatcgcggggagtctctggccgggagagtccaggtagcgctcggcgggcagcagtgcgcaggcccctcggcttcaaccgccacaatgctgccagcagcgccaggcaaggggcttgggagcccggaccccgccccctgcggcccagcgcccccaggtgggtagtcgcgcattcggaggggcttgacgccgaggccgggctacggggctctgcggagaccacgggccatcgttagacaactgca

SEQ ID NO: 230558 - DNA, 407 bp, Homo sapiens
  chr4:103266029-103266436
  hyper
ggggagcgataggcggagtgggccccccggcctcctggagagcctgagataaagaggacaaagggggacagagataaaggccaccagggcaccagccggcaggctccagaaacgctgcgtggcagtagccctcaaacgcccggccgggcatggggccagacgccccggatccgggtttgcaaacgccccaggatttgcgtacatatgctcctcccggatataaagccccaaaccacgccacttcttaggaaaaactaaaaccacactaactgtagaactccacctcctcttcctgtctttctgctttattctctccgccgcaaacttagaagtgagacgtgcagtccccaaggagctgcagaaaagggctcttccggagtcctggggattgcgcgtttaaaggggac

SEQ ID NO: 230559 - DNA, 79 bp, Homo sapiens
  chr4:103422182-103422261
  hyper
ggggcttccctaccggctccagcccttgggattcgggagcgccctgctaggaagccagagccccgcaggggccgcggcg

SEQ ID NO: 230560 - DNA, 381 bp, Homo sapiens
  chr4:103681575-103681956
  hyper
cgcttcagtagagaacgactgcagtaagtaaactgctagtagcaacactgttcccctatctaaacttcccctttccagagttactgatgtcccaacatgggtcggtcgctcagtctccgtcaagcccgtaccccatagcttgggcatttccccccgcagatcacaagatgcaaaggggaagttactaccaaaccgacgagaatggcccagagctgggggctgccaggcggttcctgggcccctctcagcaccagaagaaggcgggcgcaggctcgccgcgggtcggccgcacgccatacctggatcaggccctgctggaacaaggcgctgtgcacgcagccagggaccgccccgggcagctccagcgagccgttcccattg

SEQ ID NO: 230561 - DNA, 109 bp, Homo sapiens
  chr4:103682320-103682429
  hyper
agccttccctcggcgcttcttcccgccgcctcagtacatacaactggaggcaagaatcttgcacggtaattgggacagaaagatccctgggcgcgcagtggcacaaagc

SEQ ID NO: 230562 - DNA, 406 bp, Homo sapiens
  chr4:103748279-103748685
  hyper
gtgtcacccctgacgccaccgtacactcactccgccttccagcgcgctcccgcgcgcgcccgcccagccacctccaccacgcgcccgcgctgtccctgaggctccggcttaggcgcgaggacgcgcccattccccctcctcctccagcaggagaggccgcggcttccccaaccttcccaccctaacccaccgcacccaataggctggccgctcaagccgcccaggtcccgcactgcccctcttacccggccggccactgggccggcctcccttccctgccctagccgtccacacccacgcgtacagaggggccggggcctccctcaagctgcggcctcggcctcctccccgcgcggcagctggtgcctccccggccctacggggctcacgcgcacgacacagccac

SEQ ID NO: 230563 - DNA, 138 bp, Homo sapiens
  chr4:103749252-103749390
  hyper
gctcgaactggggcgggccactgccaggaaagcaacgcccctgaatgcttatgccggtggttggtagaggaaatggaattccccagactggtaagagcgcgcgcagacacagccttgtctcacgcgcccaatcaggag

SEQ ID NO: 230564 - DNA, 103 bp, Homo sapiens; identical to SEQ ID NO: 199515
  chr4:104020935-104021038
  hyper

SEQ ID NO: 230565 - DNA, 203 bp, Homo sapiens
  chr4:105412285-105412488
  hyper
tctgcttcagcagcgccgcatttgagcttgttcatgcattcccccgccaaaggtctgcagtgttcaggggataaggtggagaggaaattagtatttgccatttgcaacgacggctctggcgggcagccagctttccccagcctctgggagtcgtttcggtggtgcatgctggtcctgctgccgccgccgccgccgccgccgcc

SEQ ID NO: 230566 - DNA, 61 bp, Homo sapiens
  chr4:105412786-105412847
  hyper
gggaaggcgcccccgttggtcttgtagaaggaggtggcaaaggagcggtagcgctccattt

SEQ ID NO: 230567 - DNA, 83 bp, Homo sapiens
  chr4:106067418-106067501
  hyper
aatcttagatgtcacgtctttgtccaggcacccgtgccatcccaacctcccacctcgcccccaaccttcgcgcttgctctgct

SEQ ID NO: 230568 - DNA, 172 bp, Homo sapiens
  chr4:106068693-106068865
  hyper
aatgtcacagggagtggaattggagtacactgagtgggttttttttttccttaagtccgcgcgttttgttagcggcgctgagtgaaagaggaaagaatagtttctctggttccccaaacaagaccagaactcacttttctcaaggtacataagtcagcgctgggctgagcct

SEQ ID NO: 230569 - DNA, 36 bp, Homo sapiens
  chr4:106395300-106395336
  hyper
ccgccccggcgctcgggctgcgatcctggtccctgc

SEQ ID NO: 230570 - DNA, 475 bp, Homo sapiens
  chr4:106629648-106630123
  hyper
tagggcacgcaaccgcccgtaaattatgattccccttgaggagcgaggaaactaataccccacgtagctactctcccacctcgctcctggcgcgggggtctcgagcctccaggaggccaggagcagagtcgctcagcataactcaccgttccgccccgccctgccgatccgtctgttcccggtggtcccttcggaaacggttcccgcactggccggctccgaaagcaggaaaacaaaggttcccacagtaggggcgggggaaacgtttggcagtgcgacagtaggaagtgacgttacttccctttttccggtccgccggattatgaatgacggccggcgcgagtattttccacataaggtggctgtcgtttttctcctggcgtctgtggaggcgagtggtctgcgggcagcagctcccagaggcagccttggaattccagctcggactgggcgggaaggcgcaggcggcccaggt

SEQ ID NO: 230571 - DNA, 1702 bp, Homo sapiens
  chr4:106816201-106817903
  hyper
gcttctccgccctccggtgaaagctactgctcgcccctgcagtcaccacctgttcgggcggaacctgcggagcgtgcacctacgcctcgggctcctttcctcctccactcccctttcctgctgggcaccctgctttccctctcccagagagggtttgcaacttttctcccaggctggggctcgccctgcttggctaacccccaagagccactgccgtcccgcagcgcccctgcccccgagttgcctgccccgctgggcccccgggaggagcggagcgcgctcacccttcgcccggggctgggagggcggcgagtcgggcgcacgcgcaccccctgcccgcccctggcgcccctccccgcgggcggtgcagctacccctgcagcgcctcccctagctagaagggagcgggagggggctccgggcgccgcgcagcagacctgctccggccgcgcgcctcgccgctgtcctccgggagcggcagcagtagcccgggcggcgagggctgggggttcctcgagactctcagaggggcgcctcccatcggcgcccaccaccccaacctgttcctcgcgcgccactgcgctgcgccccaggacccgctgcccaacatggattttctcctggcgctggtgctggtatcctcgctctacctgcaggcggccgccgagttcgacgggaggtgagctgggccccggggcgccctctcctccttcccgcgctaatttcacactcactgtcttgggtcacttttccccgcggggtttcgtggtcagagaggcgtctcctccatccagaagttgggccaccgcacagcgtggcgcgaggagagcggtccagcggctccgagtgcccgcccgaggcggagagggcgcgcccttgcgagtctgggaccccatccgcggccccccgagggcgactcgccccggctcgggaattaggactgagggagaggagccgctggagcctgggatctcggctctgagggcgcggtttagccacctacgccgaggtgacgcgcgaaacatcccttacccgggaaactcccgcgcctgaactagacggctcttcactggggaagcttccaggcccccggggggaggcccgggctctgctcagggctctcggggccgctcacacagagagtgggtgcgagtcagcgactgggctacgggggagatttgtgggcctctccatttggttttcttgagggaaggagactcaaaatgaggaccggagggtgggcgctccgtgaatgtgagcatgagtgtgtggatgtgtgtgtgagagcgcacacactgcgccgctcctcagactcgggcgagcctgacggcggcgtgctgtgacaggttccaacaacctcgggccgcgtctccgctgtcactcagccggtcctcccgcgctccggggccgctccggtgtgtgagagacactgggtctgtcgggagggtgtgctcggtccccctcacctctgtgcaattacagactaggctcgtcccgggtgcagatggctgctgcgaaaagaggttttactctggcgcacaccgtcgcccggtcgccttccttcagcgacctctgcccccacccctccgtgtaggtccctgcctagtcctaaagaaagatgccgcacctgttttacctttaatcttggaacgaatcaattccacaattgattcgctttcttgtacccggaggcgaacggagg

SEQ ID NO: 230572 - DNA, 334 bp, Homo sapiens
  chr4:107237672-107238006
  hyper
cactgctatagtacgcgggtggctggacctacatgcttcctgctgtggctgtctcggaacccgtggtcctccgcttcatgtgagtgacgtcgtggcgggtcactcactcggggatcgccgattgcgatcgtaggggtcttccttctctaacttgcctccaggagagaggacctggcctgcgctgctaatgggtagtccgttcgcagcaggaccagccctggcctaaggaaacaggaaagagtttgagacttccttctaaaggagccacgtttgagaaatgggatgcaggcctaagttaagaatgctacagaaaaatatcgatccctaagcgtat

SEQ ID NO: 230573 - DNA, 514 bp, Homo sapiens
  chr4:107955312-107955826
  hyper
atcccagaatggctcggccctctcaaccaaccttcagccggctggctgcgctgtggacaggggcggcggaggacaccgagagcgcgcaaaacagcagcatcagtcggttccaaggaaactcggatctctggggcgtgggccgctgccaggggttgacacttgtgttgtgcgaggtgcgtgtgccattggtaaaatggctttctcagttttggcttcccacaaaaggagcggaagggggagctgtcatgattcccagtgcccacagagccccctctcctggccacagcgcgccagccacaactggtaccgagtgtgcgcgctcgtctctgtgcgtgtctatttgtataacagtttgcaagtggctttcaatctatctgtctgtatgacagagacagaggcgcctgcggaaagttccctctctcaaaaacgccttcagtgtcctgctgtatcgctggcgcctacgacgctgtcattgtcatctcatcattttgcttccttccgggtgatttatgta

SEQ ID NO: 230574 - DNA, 1194 bp, Homo sapiens
  chr4:107956415-107957609
  hyper
tgtatctggggccacgctccgaatgttgcaagatgcaatggcaaaccgctagcccaagagagctggcccctgcctcttctgtctgaagaatgtgtttgggggttttcctacctgccccaggtttttgcccttcttactgccgccgaatgccagtccttggtacatgcccgcagatcgattggcggcctgaccaggcgtctccccgcccagagaggacttgatggagttgagtttggcccgcgaactgccgatctgtgagctctccaccatcagcaccgcggccagtaggagcaggcagcaggacgaatccttgctccgcatcaacgcggccatctcccggcgagggggtccccaggaagacgcaaagcccggaggggtgggaatgcaaagggagggaggaccccaacacggggcccctcacttgggtcgcgggggcttgcagattgtgttccctcaacccttcctggttcggggacccaggaccctatgaactcagtctcacgcctcaggacagaaattagcggaacccaagcgagacccgcttctccaccaggacaggaagttctgcaataactggaagcaatcaaatgcgaggcgctttctcgccaaggaggcgtgacccaaggtgcaagaaaacccagccctgtggatcgcaccgcttccgttccttcttgccccgcacctccttggtcccgccgggatctcggcggtttaactctcctcttaattgatcaggaggcccgcatcagctccttctccttcaactcagttgcttttctctcctctcttttcctatcctttatgtgtcaaactttgcaggacacagtgctccttttcaaagttagcaggcgctttagtaggggatcaggagacgtccccggaccgaatcctcgagatctgaagagaatcgaggtcccccacacgcgcactcacagttgccccgaagcgttgtcccctgactcacaagagacagcgaatcgctgccagcgcagcgatgcctagggagcggacttgcgctacgctcgccgcgggctcccgctttctctctctctgctctctccccagtcctctttgctttttatagcttcccacagtgaggactttttttttttttttacctccgcccccaattcaagagtgacaaagagtgaaaatttttctctcactccccaccgcttccgcccccctcctctc

SEQ ID NO: 230575 - DNA, 259 bp, Homo sapiens
  chr4:107958388-107958647
  hyper
aagccattcctgtcagcccccgggtctctccaggtccaattcccttcggccgaaggtcgaaggctgctccgggaacgactgggacgcgctggcgcttgggggcgccagtggcagccgttcagcgagccacggaattgctgcaggagacaagcgctgagttcggtgatgtctggtggccaagtgcgagactttccaagcaaagcaagggattgttcgaaagttattgcatttctgcttcgcagacactaatgtccaggag

SEQ ID NO: 230576 - DNA, 1138 bp, Homo sapiens
  chr4:108745572-108746710
  hyper
accctctgaatcaacgctggcgctcccaagcccactcacacgccgtcaggaagcagtttccgaaacaggccgggtgcgggggtgggggatcccgttccagccccacccctgaaagttgctgggagtggcacccaaagaactttcccagattgatctctgttgccgctcagggaggtcagctccaggccctcagcctttcggccgggagccaaactgccctgcctgccaagcccctccttctctgcaccttaaacagccgcgaggggagagtcggctgggattttcttcttaagaagtcgcgcaggtttttcgagctccactctgcgccaggagagccacggcagcaggaacgggcactgctgccaccgggccgacgggtgagtcactgtttggaaatggagtgggcgggcgagggtgtgagagaatgaatgatgtcaagagcgcgctgggcgcagggcgcagggagcgggccgcgcgcggcgggcggggagagcgggcgcggggccgcggtcaacactgagcgccgcgccgtgggccgagtggggcggggagacccagccctcggcgcgcacggagcctggccggtgctgcagcgccgccgagtgcggcctcgggggcggcggccgcgggagggacccggagagctgcttcccctagtcaggccgcggcgtgggagggcgagaccccgagcaaactttctagcggcttcggcccgagggtggtgacgcccggggctggtcgcggcggctgcggcagcgggctccatcccctggcaaatccccttcccgggagcaagtgccttcagctgggagtgtctggagccctggccaccagcgggtaaggagcgcgcggaggggccaggaggaggatgggctggggagcggagagtcctccgaagcgcgggaggggaaaggtggattgcgaagcggggacgtggctctaatccggcccccaccctccccgcccagggcatgcttcctcgattttgtggtctggaggagagatgtgtgccttagtctccttcctctgagcagtcatctcattcatttgcaacccatttcgggtaccccggtcctggcgttggaagggcacaggttaaaccccagattgtccagaaccactccggaggtcagggctg

SEQ ID NO: 230577 - DNA, 168 bp, Homo sapiens
  chr4:108852945-108853113
  hyper
ctggctgcggaggcgccgggcgcggggcatcccgcccgggcccacgccctggcctctggtgggcaacttcggtcacgtgctgctgcctcccttcctccggcggcggagctggctgagcagcaggaccagggccgcagggattgatccctcggtcataggcccgcaggt

SEQ ID NO: 230578 - DNA, 203 bp, Homo sapiens; identical to SEQ ID NO: 199540
  chr4:108911333-108911536
  hyper

SEQ ID NO: 230579 - DNA, 1904 bp, Homo sapiens
  chr4:109088015-109089919
  hyper
agggtgtacccttgcggtgggtcggctcggcgcacccacagctcccagctgctagcccaggcgctggggccgcagggactgaaccccgcaccgcccccgcagcccgggtgcgcgccccatcggccggcctgctccccgcggcccggctcaccggtggtagggacggccccgcctgccccagcccacgcccgcctccccttcctcccgcctgtggctctgctcgtctccacctaagcctttggtggtttaacgcacttttgcagagacatctaccaagagatagcgtgtgcactttgttttccgtcccacggaagaatttatcagtagcgttattcagccctactcgctttaaagcacggcacccctcagcccaacaaaaagaccgaaggcgaaacattgtgggttcctgcccgcgaaccaaccgttcagccaccgaaccccctaaactgatccatttggaataagttaccctgcccctctacctcccatcctacacacacacacacacacacacacacacacacacacacacacactgcggaccgggggcccagctacgcacacaccccaaaacaaacgagggatctactcgggaccctcagccgggcggccgggcgccttcgttcccttcctccctctctgagtttcccagggacccgccacgcctctcggaactggggcagcggcccgctcacctcgtgtccgttgctggccgggatgatttcagactcgttcaccaaggaagacttgatgtcagctaaatcgccttcctcttcgggatgactgatctcggcgaagatcttttccttctgaggatcgccctcgtccttgaaggggatcatctcgtccgtggcgcagagttccgggtcccccccgccgccgccacctcctccggagagttggggcatcccggcggctctgtaatctccgctccgctgtgggagcacccgcgcaacagcaggaaagacagaggggtaactcaagggtgggggaggaaaggagagttggaagggttcgtgcagcaggacagcgggcggaagcggggcgggcgagcgcggggccgccggccggcagccggagcagctgccgcggcgcccgaatcccggcggccgccgcgctttcccgcttcgcggagaccgacgcaggcgcccgcccccgaggccgaagggcactgggcggcgagggctgcggtagctggcgactccgggggcgtctgcgcggcgcgcgctagacgaggctgccccggcggccaccccgcgaccccgcgtcgccgggatttgcgcgcggagaacgccggttctggagggagcacgcctccccaaagtgcagaggagggtccggcggcgcgtctccgcggaaaccctctccactgtagttaccccggatgccgacttagtagtttgttttccgagaaaagagaggggatctgggcagaagggccccgtttgccccaaaagaaggtgcaaggatcagaagataacgaaacgtccacttcctgaagggtgggaaaaaaagaaaaagaaaaaggagccacccacgctggagatgtccgttttagatcttcttattttcttccctttcgcttcggtttttcttctcgaggctcatttaatctgctagagaaggaggaggagcagaagatgggggccgaggaggaggggaagagaaagagaagtttgccaagaataaagtttttgccggcaagcgcggggactccgcagtggagggcactgcggagtctcggggagtcacagcgggggcctcgggcccaaatgcctctgcccggagctcgagccgacacacacactcagtccgacccctctttgttcccggctcgagtttctcagcctggctcgccggctcgccgctctgcacgcctccgccggccagctctgtcaaagcaa

SEQ ID NO: 230580 - DNA, 835 bp, Homo sapiens
  chr4:109092586-109093421
  hyper
gggcgaagtaaccccgggaagacgttcttccccctcccttacggattcagtgtagttcctggcataagcaattctgtcaccgggcggtcttttctaattcgtgtgggggctgatattaacataagcagccgcctcttcgggtgcgagtgggatcccaggtccgggatgtggtgggtgcggtgcgggagaggcacccgccgcccccttcactcggatgttagaggcaagttgttcgtgtgaactcgagcgaacgactggaggttggctgttgtaggttcactccttcaggatgtgggtttcagggggcgttttgatgtgatttaattccgaccgtgaaaacaattgctaggggctggctggattgctgttggtttttcccctcctggtggctttgcttggtttgggtttagtttgggaacaaacttgttttatatcaacacttccttctacatcgggcgccgtcgcctcaactgcgcgtggggggcgaggcgcccaccccgcacaagaacagaggagcgggggagaagagacggcctcgctgctcactgggtaagcggagcccagccccgctcgggagcgggcaggagagacagggtagtgacccccactcacaccagaaaacccctccccccggcgattttgctgccaactcgagtcggctacagacagtccagtgagtccttaattacaaggacgagagaaaagcacggtgcccctcgagtcctctccgccccctcggtcctaacccccgcccaggctccaggtcttcccctttgtgtggcctggactctctcccagctacgactttggtgggatccaaaaggaaggaggtggc

SEQ ID NO: 230581 - DNA, 236 bp, Homo sapiens
  chr4:109541581-109541817
  hyper
ggttgccgtacaacgtggtggttccctgcatctctgcccacgtcggagaggtgcgtcggcttccgtacaacacggatactctctctctgacgcaacttcctgtcctgcgcaattctatttgacctttgaactggcaaaggcttttttcttcctcttccggggacgttgtctgcaggtatggatgttgttctcttttccctgtctttatttccttaccaatcggctgccatccgagg

SEQ ID NO: 230582 - DNA, 78 bp, Homo sapiens; identical to SEQ ID NO: 199544
  chr4:109571439-109571517
  hyper

SEQ ID NO: 230583 - DNA, 649 bp, Homo sapiens
  chr4:109683716-109684365
  hyper
caacccctctagccggccggcagcccccgctagtccgccggctgcagagcgagccggggactttcgagcgggcaggaagcccagcgttccgggttccaggagcgtttctgggagtccgcgcggcccctgcaggtggaggcgcgcggggcgcgtgcacaggcgcggcgggcacggagtgcggctgcagcgcatcgtttgttccctagccggctttctctctccaccttctgcactcgttattgccccctctctgcacttacttccgggccagggtgcccttacccgatgtgcttcttcctcagccccagagtgtcccgcttactgtacagctcgcacatggtggcggggtgcagggcgctgcgaaggtgcaaggtgcaaggtctgcgcgcctcctacgcgagcctgggactgccttggcggccccggccggccttcctcccgttatccctcctggcgttctcttgcccggggcgtcggaggtcaccggtggcgtcaactagctaggatcatctcccttttaagtctggctctggcgttgccctttgccaagcccctcctcctcccccgccggggccgcgggcaggtcgccgggctagcagctcattcgccaccaccctgtcctgccaggccggctcggccctacccgccc

SEQ ID NO: 230584 - DNA, 1310 bp, Homo sapiens
  chr4:110223124-110224434
  hyper
ggatctgggctcccggccccctcctttccctgcgtgcttcttcagcagcatcgtggcggggtcggccgtctcggcttcgcttcccaccctctacacctcaaataatcctaaaaggaaagaaaaaggtcgattcctccaaagttcagtccctgtggctgcacaactagttggtggagtcaagcccacgagcggatacggacccctgccttgctcagcgtccagacccgcaggcgtgcaccatccccgctttcttctctcctcccagctggaagtgaaaagcaccctccgtccggggactgggtggcggtggggtaaaaagcaagacgaaacccacccagacagctcttccgactcccagaggaccgacacctctttcgagggccccaacagtggccgctcagggtccgagggcaacggccgaggcgccacgcggggccgcggctcgccctggccacggaggaccggacctgttgcgcctctgtgagtttgccttatttctacctactcggtgtctttcggcacgccgacctgtttcccacctgcattcagttcaaggcaaaaaggctgtgagagcacgctacagcgcagcgcgaaaggggcgactaaggtggagaagagagaggaaaacgaaataaacccaaggaaccaatgctactcgcgaagccgaagtcgcggctgcccgaaggatctccgcagccccgcgtgcgcgatccttaaatacccttcgcgatgctcgcgtgagtgtgtgtgtgagtgtgtgagtgcgcgcgcgctccgagcacgacgtccctcccccgaccccctcccggcgcccggcgtccggcctgccgctcccgctgctgcgcgccccccttccgaaggcaaagcaggagcccgccttattatcataatgtattcaccttggcccagcccgcgggccggcccggggaacccccaagggaggcgggaagcttgggtgggagcggggcaggaggtctgttattagcataatgtatgcaaatagctggagcggccaccgtgattggagaggagcctggcgacccctccccctgcgcggagtaacttcagcatctccgagggccacctctctggcctgggccggggccgaagcggggtcggctgcgcaagaggcggcaactttggcttatactgactcagcccagcgccccctttttatcccacataaaaatggagaaatggcctccgggaggaagatgtgaagcggcacgctctatctctactgatcttcactcaaaagcagccgcaggagctgttgctatctcgctgtggtgcagcgcttttccctcctc

SEQ ID NO: 230585 - DNA, 142 bp, Homo sapiens; identical to SEQ ID NO: 199546
  chr4:110343714-110343856
  hyper

SEQ ID NO: 230586 - DNA, 529 bp, Homo sapiens; identical to SEQ ID NO: 199547
  chr4:110481809-110482338
  hyper

SEQ ID NO: 230587 - DNA, 381 bp, Homo sapiens
  chr4:110736301-110736682
  hyper
aaactcagataaacgcttccgtcggctgtgacaggttctgaggcgcccagatctactggacatagcgcggctcagaagcctcagagacctgtccgcacagttcctgaagttagcaacaaattagtgagtgctgttgcgggccattttgcagccagagaagcaaatgcgcaaatgcgcccagccagtcagcacggacttcaagaaccaacttcattccttgcaaggtgctttagttctggccgttagggcggcaaccaaacagaaacctgccccgcctctgggagagaaggcggatccctaacgccagctatctccaagagcaacattgccgcagcacttccgggacgtcgtgctgcaaaggacgccgctgttatacgtcac

SEQ ID NO: 230588 - DNA, 284 bp, Homo sapiens
  chr4:111117321-111117605
  hyper
aatggcgggcgtacagtgaatggggtcagccagcaaagcgagggaaagcggactccggaagagcaggttaaaccaggacgcagcaagtcagagattcggcacagaagcaaatgctgaccacactgaccacacaggctaatgcgggaggactgtgggcccgaacaggccggctggaggatatgacaaacatgtgcggagaagacccgggcccggggctagccagcagcgcggttccggcgcccgccggctccggccaccgccccctccccgcctccagcaccacc

SEQ ID NO: 230589 - DNA, 111 bp, Homo sapiens
  chr4:111119712-111119823
  hyper
ctcctcctcccggcgtccgcatccaccgtaggaggaaatgaatgccttgcggtcttagtgcccgcacgtttgtccatcaccctttttactcgtctacagggaaatctcctc

SEQ ID NO: 230590 - DNA, 67 bp, Homo sapiens
  chr4:111531891-111531958
  hyper
gcgaggtctcaggtccgagggccaggtcgggcgccggttgcaccgcccaccgcgcgcctccccttcg

SEQ ID NO: 230591 - DNA, 988 bp, Homo sapiens
  chr4:111532396-111533384
  hyper
tttttatacgtaacgttttaccccagtctattcccgcagctggttaatgttcaacccccgggcctcgagaggcagctccaaggaggcaggcaggcatgacccattcaaggtatatggctgctcgggagtgaaggcgcggaggcccgagaaagggtgagaagggatgtggcggggggctcctccggccctggactccctgggtggactagaaaagggcaaagaagtggtcacatctgtgggccagactggtgcgcgatctttggaggcgcagcagcaaggccgcgccagggctgagcccagaccgcccacgaggaggcccgccaggcccggagcagcggcgcgtgcgggggcgtgccgagcgcaggctctagggcccctgcttcgccccagctggaccccgcgggcggtcggtgcagctcgagcgtgtgggctgcgatgccctgcctgagacttcgggctagggatgcgggcgggaagtgggggtgcggcggcagctgcagattagattccttttttttttggccggagggacgtgcaaacttctagtgcccgggccaagagggcgaccccggaggtgcgtaggtggccctccgggttcccgcttctcctagtgcctctgaaaataccgtcagggtaaagggagacaggcagtaagtcttaccaccaccgccctttccccatgtcattggccaaaaactgaacattaagataaagcagctgtttcagtcaatggaaagcggtagggcgaggttgtacccaaaacccggtttagacggccaatgaagtcctaggaaaagccgccccgggggcacgttcaggtggagcggctgcacctcgggtcgttctaagggatgggctgcgtggtacccacggaattcatgggtccaaaaggtcctggtcacctgtccaaacatccatcccctggcgcatggcggttgacaagatggcccggccacccagaggaaggaggatccgggacggggaactt

SEQ ID NO: 230592 - DNA, 1403 bp, Homo sapiens
  chr4:111536188-111537591
  hyper
aagcccccagacggcggatcgtctgcgcggggttcctgccccaggcctggcgaacctctgagcgctcaaggagcacggcggcagtgcgctgaggccagtgaggcctgggcgcctccgggcccaacctcgagctcgccatttttgaacccaagcggggaaggttggtgctcatgctatagattatgttaaaggttcctttaagcactttaatacacaactagctcagaaatcattaagagacctagagaaggagaaaaaataccctcacactcaccggtaataagtgttgacatgcagcaaaaatcggttgagtggaaccgaggtggtggttgcagcgacggctagagggggacccgtgcaggggcgggaggggcgaggggactgactgcaccggctctgggagctaggtttctctcgctggatgggaaaaggaggtgcggaaaggggcaggcggcctgcgggctagcggggatgagagttgtggggagaacggaggagagagtaaaattattccttttggaagtccaagggaagggagctgaggtgagagaaatggcctctcttaggtcccaagtctccgcccccagcctgcaccactcaagtcggggaagtgacaactcttcctaaacctcgacttccattttttgtttcctgcagattgattgatgtcctcgcgttgttctagttcagcaaccaaactaggccgaggtacacctcttttacccagagctcccaaatcactcaccaacctgcaggagacctaaatcctccgggcaggtctcgttagcgcttccagcccccatccccaaatcccctcttctagctccttccttcccctccgccctttggccctccccgccccctaccaggctgagaggcggagaggccgggaccgctgggccctgcggctccagaagccaaagtccgcccgtggggaccgttttcctctccactgctctcaagtgaacaacatggtgggaggtgaccctcgtccaaagggcttttatctgccccccactgctgcgtgatccctccgcaagtcggaggcagagctttaaaaagaaagaaagtgtgcgttgagcactgatcttaaatcggggacattatctgcgatctctttaagtggcagcagcagtttcttgcagaacaaagactcagtgttcgagctccaaaagcttctaggtaaagtttcattcagatgaaagcaactaaggcgaaaaaacaatgatattgtcggctccagaaaatcggcggttactttttgctctaagttccccagcgtggtgtttgttctcgcccactttggttgtgcggggggttgacaagcataacaaaagatctcagcacatccctccccccacctccacaacgaccctcctagcgccatgaggatgaattctctg

SEQ ID NO: 230593 - DNA, 508 bp, Homo sapiens
  chr4:111539334-111539842
  hyper
ctgcacgctggcgtagccgaagctggagtgctgctttgctttcagtctcaggctggccaggctcgagttacacgtgtccctataaacatacggaggagtcggcggcgcgtaaggacaggcaggcgtcggcaccgcggaattcagcgacgggctactcaggttgttcaagttattcaggctgttgagactggagcccgggacgcctgtcactgctgagggcaccatgctggacgacatgctcatggacgagatagagttgggtggggaaaacatgctctgtgatgacagggggttgacgttcatagagttgaagaaggggaagctcttggtggatagggaggcggatgtaaggcccttggcggcccagttgttgtaggaatagcctgggtacatgtcgtcgtagggctgcatgagcccattgaactgcggcccgaagccattcttgcatagctcggcctgctggttgcgctccctctttctccatttggcccgacgattcttgaaccaa

SEQ ID NO: 230594 - DNA, 113 bp, Homo sapiens
  chr4:111540088-111540201
  hyper
gccacaaacctcagccgaacgcatggagacctgcggacggtttgatcactcagccaggcgtttctccaggtccaaaaacacttaatgtaaaacaaacgcggggcagcaggctt

SEQ ID NO: 230595 - DNA, 529 bp, Homo sapiens
  chr4:111540580-111541109
  hyper
aggcccagccgggtcgtttggctttgcaggcggccacccaggccggccggcttccacccgtgtccggtggcccagccgcaaccccgatcccaatccacatcgggcctccctgtcgccccagacggcggcttttgtgtattggagagaggcctggcctgagatatccgagctgacaccagtgatgtttcacattacacatctccgccgggcccagccgtgtaatccgctttttctctttttcctttcattcttgatttcctttttatcccccttcctctttgcacccgactgctataaaaagcacgcctcactcccacttggctcgacaagcagccgccctggaaggagaggcagctgcaaggagagcccagcgccgcggctacaaagcactagggtggagctgcggaatagcgggcggggtgggagggcgttttcgaaggatcccagaaaacccatagactctgtctttaattacttgccatttctaccctaggccatctaaactttgctcaggcgagaagagtacgtg

SEQ ID NO: 230596 - DNA, 1567 bp, Homo sapiens
  chr4:111542042-111543609
  hyper
attgcccatgcagcccagctcgtgagatcgcgggatggcggggcagtgagccggtgccgctctgggagcctgagccagggcggcagtcctgtcggcctcggagagggaactgtaatctcgcaaccaggccgccgcgaggccttctgcctttgcaaagctgcgccccaccggcgccctcccaggcggcgctgccttccacattctctcctggtctacttggcctgtacctccacaacatcctccccccatccctcccagactccgtgctggctcctacccggactcgggcttccgtaaggttggtccacacagcgatttcttcgcgtgtggacatgtccgggtagcggttcctctggaaagtggcctccagctcctggagctgctggctggtaaagtgagtccgctgccgcctttgccgcttcttcttagacgggtcctcggcgcccacgtcctcattcttcccctgctggcttttatctttctctgaaaacgaaacacacacactttcccgtcagcatgcccacctgcaacgcggacgccaactggaccggcggcagaagccgtggaagagctgggctgcctggcgccggaggagggtgcgcgcggcggctccgggccgcgaggagcgctgcgcctgtggggtgtgcaggcgcaagtgtgggtgtccgcgccccatttcctcccctcccccagcgccgcacgttttatttacatgtttatctcactgcagcggcacattcacttttatagcctgtgctttcaagtatatttatacacctctgcgcagacacaccaaatctcctgggacgcgcacacgcgcgtggtttacagacccccctccccctcgcagaaagctcagatttccatgcggtttgggaaggctaggaaaagatgtggggattcggttgggcaccgaagttcgccggccctttcccaaaaaaaaaaaaaaaatgcctcttcgcgaagggcatttctgagtggtttcaggcaatttcctaacgagtggagctcctcgggagctgaaagccgagaggaaaacagggacagaggtcggcggcctctgaaggtcctcgaatcaagatgctgggatttttgtgacccaggaaacagaagggaggccagggtacgaatagagagggcggcagaattgctcgcgcccttagcgccccaggagccgggccggtcgagggagaactaaagggatgcggggtagtcaaaattccggctcccggaagttctgcggggagccaggcgaacgaccactcccaccacgcctccccccggaggggctgacttccttggggcgagagggagcgggtggcgcagagcagctgagcgggaatgtctgcagggcggcgcggcgccttacctgcggcctccgggctggaggtgtcggagatggtgtgcacctccagcctgtgcttggaggagtccagcgaccggggctgaccgggagccagaaccgaagccatggctaacggctggggatggtgacaggaagatgaggagacggccgacagcttggtccccgctgctcggtgctccaagtgaagcgggcctttcatgc

SEQ ID NO: 230597 - DNA, 130 bp, Homo sapiens
  chr4:111543789-111543919
  hyper
gaaggctcaagcgaaaaagtccggagacggaaagtcagcgggcaaacgaagacatgggatgtgggcagaagggcaccactcagagcgtctttagggagcaggcttccaagctccaaagcgaaacaagagt

SEQ ID NO: 230598 - DNA, 191 bp, Homo sapiens
  chr4:111544399-111544590
  hyper
ggtggagggactgtcctgcctgcacctatcagcagtgcggggccgggctactgcctcgccgtgcgcactgggtctacacaggcaagctcccgggaattcagctcctgcccagcccaaggcgatccggcttttagtacgaacccaaaggtgaagagatgaggctaggagtcgaaggcttgggagaagagagt

SEQ ID NO: 230599 - DNA, 417 bp, Homo sapiens
  chr4:111549795-111550212
  hyper
ttcagtcaatattaggaagacgacaaagctttttacataggattaagaagacatcagattgttccattagtatattcctgctcacgaataagctttcgttatacatttccttttcccccgagccgctctaacaactgctgcatatattagcagcgggcggtgaggaataacagccgaaccagccttaagaaactttgtgtaccgagtcagcagcgaggaacgcgacctgtgaagaccacttttgcgggcagggatccgcagggactgactactttcggacaactggtacaatttcccctgggggtgaaaaaccacaacgcggcggggcacctttcaagtgagctgcagatttgattggcgcggggggtgggggaggggaggggagaatgggatggcggaggtcgggcggaggaaaga

SEQ ID NO: 230600 - DNA, 354 bp, Homo sapiens
  chr4:111550495-111550849
  hyper
acattaggagtccacgtagtatatgctccgcaaacattcgctgattgaatgagaggcgcgggggcggggcggcggagaggggtctgcggccgccaaggccgccagggttaacccaggtccttcgaagaaggttgggaccgagctgctgccgcgtgtgaaggtgtgtgtcgcggctgggggtgccacaacgggccatggagcccacctcccagagggaggaagtctgtgcacaccagcgacttgggtcgaacactttcagcccatccactgggccaaagctatttaacaattaatgcgttcctgggggaggccgggggaagtacccgccccttgtcgggacgcaaagccaggcgt

SEQ ID NO: 230601 - DNA, 880 bp, Homo sapiens
  chr4:111551628-111552508
  hyper
taatggcattaaacgtgtttaggcagcaatttttcttttcggtcaaaaagtagaaaaagacatattgagtgtaggggaagagcctttcacgtgcactaaaacaatgcgggcctgaaagtaatggttaagaaagcaatcattcattatttctagttctttatgtgctagttatcaaaagcgaacgaccaggggcgcctgcgcggcttgtgactggcgcaagcagaactcctctgctcttagccgtttcctgctcacctacgaggaccccatcctaccgtaggcttctccacctgtcctcagaatgcattccccatgtctaggaaacctggggtagggactgggggaaggagacattttgcgtctctctggctcccagcacaataagaaatgtcagcctcggcttggcgactgcgagcccgccccgcgcgaagcgagattggggagctcctctagtctggccggagccagggctgagcccgcgcaaagcattctccccagaagtcatcgctgctcttgatttttaaccatatcccaaacatactacggtctaataatttatttttactaccgattatcaaacagaagaagaatttaacacaatctaaatgacagaaatcacgcgacgttatctctgcattgcccccatttaaccccatggggttaatcccggacaagtgagcgtttaactggcccagcagggcgactggcggtgtagtgcagtgtccgggcgtgaagcactggatcgctttagacgcttcatttcaacaaatgatcattttctctcagattcacggggaaactccaatgcaagacctttgttttcttcttagtaatacggtttgtttttttgaccggggtcccaaatcgcccccctccatcc

SEQ ID NO: 230602 - DNA, 1410 bp, Homo sapiens
  chr4:111552989-111554399
  hyper
cagctcttcagggatgttgtcggccccccgcccctcccccaaccagccaaagcaaaccttcgccaactcaagtttcccttgcttgcctcccgcgatgaaccgcgcacccacaagtctgggtggggcgtggctgagagcctgagtgactgagtgggccctggtggtgctgcgcgcagcgggatataacgagcgacagaggtcgctgttggaccacttttccacgccagcctagacgccgaggtttgctggagcgtgcgcaggggatcagaccacagggagcgagcgagagggagagagaggtgttgggtctcaggagtgcagtataatttggggaaaggaattaacgtccctgggacggctgcttcccgtcccacccagaggcggagtgtctaagttcaagcagcaggcgcgtcaggtctggcggcctcgccttcttgcgcttcgcccgaggcccagagtcccggaggcgggtgcccagcgcgcggcctgcgcttccctcccggccttaccattggcgccaggatgctgccgcgggaagaacttgctgctggctgcctcttttcggctctcaggagagtccgtgaactcgacctttttgatttcggagtctttggagaagagacattcaacggccgccggctgcacgcctgggccacgcgcgcgcccgccccacgtgcggagagaggcgtcccggaccgcggccgaaaggagccggggacgggaggagggggaggggcgaggcaggccggaggagaaagagggacaaagagcaaagacccagttagaggaaagagctgacggcatccccgtcccccggaccctctggcaacccggggcaggatggcgtactctttctgcgcctccccggttgccggcggttccagccgggaggagtaggctggggggcttcggtacacagcgcgccgctgcttcctagtccaccgccccgccacagggagaggccactggcgatttggttctgatttccttcctgcccaggctggcccctcggggaagcgcccctcgctggggcctcgccgcagggccagtgccctcttgccgccctcacgtggcgcggcctcccgtccgatgacccgggcaggagaagggggttcttacctaattgcacacacgccgacaccagtttgcggcagttggtctccattccccgttatctgcaaaacagaagagaaggaaggctgtaagaagcggcggccgtcgagtgagcagggctcagatgagactacgttacactagctgttaggcgcctactgtgtgctaggcttcaggcgtgtttttccgacctgacagcctctggctgtgcagcagcatctccagcctagcctcgggcccaggacatttatttatcaagaggggatctccctccagagttgccgcaaaagtgcccag

SEQ ID NO: 230603 - DNA, 1024 bp, Homo sapiens
  chr4:111554632-111555656
  hyper
acagcagtttccctcggttttctgtaattctgaaacgaacgggctcttggcctagggtgtttcaggagcgagctgagttcgggcctctcatccatcaggagccacttttccatatttagccacactttctcctagagatactaacccggccatttatttacttactacaaataattaccctaaagtatgatttaagatcgcagaggagagacactgggtggactgagcgagactgaggagagcagggcaaacgttcttggagggtttactgcccgccaaggacggagaaatagctctggtataactgctacccagttctccccctttctctcccgggcgagccaaatctttttcacgttttcaaccacaacgcagcgagccaagcatttaacgcgctcccccttctctgccacaggcaagccgggagaggtgggtctcgaggggctccaccgggtgggtagaagagccgcggttgctttaaagacaagaaaagaaggtccagggctccctaggccccttcgatctcagcgcctgcctctctccacgctaaccagggtacgccgacgaccggagggcccacttcgcgcgggtgcggggatcggggtgggagcaagcgttgtcgggttggcggaggcacagaggcggggcagggagctgcgggcctgcctctggcctgagtaccgtttccctgcgtctcggcctctcctgaagggagctgggccctggggagcctctggccaaggtcgctgcctacaggaggggctgcccggcgctgtggcgtggggatccagggtggggacggccaggcggttcccccacccgctagcgagaacgcgggcggggactctgccgattcgatccttgtgggcccgtgggcccagaagtagcagtttggcggctccagatttagtgattctgcagtaaaatcacaggattagtccctgattgagatgtctgttcgtgagatattacaaaattcattatcacagctttctactaactcgatatgaagtaacacagatgg

SEQ ID NO: 230604 - DNA, 1496 bp, Homo sapiens
  chr4:111557623-111559119
  hyper
gagaatgctaatccttggcccgaggatttgttcctgcagtgttggcaccgagatttaagggaagatacctcgttttaaatgccagccacggtctggcttccctctcgacttcagcaccctgtagattgttagtgtctgtggcgggggacgaaaggaacagggctttgcaaggtctgtttgccgactgcgttaccttgggcgaaacttagccccaaaagccacaaatcacctacggtgaagattctccgaagtggaacaaatttccagactcgcattatctcacatccctgcgggatagatggcctccacttaccggctaccgggagagagctgctgtctccgcgtcccactgcttcccggggcgatttccagcgagccgagcctccggctgcacggcaagcgcccgaaagccgggcctgagaggactgcagggctcctgagggtgccaagttccgaaggagtccacgggtgcactggggcctccgaaatctagccgccactggcagtttctttctgctcctctccagctttctcgctcggtctcgcactctctctcctctccctccctctcatccctctctcttccctctgctcctactccgtgtggggagtgacgtgacgtcagcagagattccaccaaactccactgcacagtggcgcgcgggcggccggccgagcccggctgcgcggctggcgatccaggagcgagcacagcgcccgggcgagcgccggggggagcgagcaggggcgacgagaaacgaggcaggggagggaagcagatgccagcgggccgaagagtcgggagccggagccgggagagcgaaaggagaggggacctggcggggcacttaggagccaaccgaggagcaggagcacggactcccactgtggaaaggaggaccagaagggaggatgggatggaagagaagaaaaagcaatctgcgccaacccggcagccctaataaatcaaagggggagcgccagggcagcggggagacagaaacgtacttttggggagcaaatcaggacgggctgggaggaagcgacagggaaagtggcccaagagacggaacaaaggacaatgttcatggggttgtttgggacgaggcgtgtggagtgtgggtgtgagcgtgcgtgtgtgaccttctttcaggcctgcagagttgaggaaagaggtcacagcaaagagggactgcggagggaggaaagtgagagaccggtagagggcgggagtggaggtgggcgcggtggggatgggagaggatgagtgaagagaaatctagaagaatggagtgagctagtgggagagggtgggagggccacagccgggagcgaacgagctaggcttgtcagctggggaaggccgggacgctgggcccagcttagctgggacaccgcgcccgaggtcaaggcgggtggaccaggcatgctgagagtgtcggcgcacaggtgggcacggccacgcactgacccagtgttcacgaagggtttgcact

SEQ ID NO: 230605 - DNA, 561 bp, Homo sapiens
  chr4:111560181-111560742
  hyper
aatgagggggaaaatgcccacgtgctgtttaattgtatttcctctctgactctgagaatttctatttctggtttttgaaatctcgccgaggcaagaaaatcaaatttcttcaacaagtcccacaactgaactctagttacaggacaccggaaagtgcagtccgagaaagacatcttcacctctgcccatcgacgatttttgcagcctccccattcctctgagtaatgggctaataatcctccctttttttcttttcattttgtagagattaagaggcgctcgtagcagaacggccttgccttcagctggtggcgaggataggcaatctcatggaaaagttggaagagaatgagaaaaccaaagacagaaagattcagagatccgcggagagacacagggagagggaagggagttgcgctgaaaagacgcaaagatacgcgcgtgcaactccctcccctttcaggtttcagaggtttgcaaaccagggctgagaggaaggggctcgggaagctcacgttcctctcgccccccttctgtctggagtctcgcccgccagaggct

SEQ ID NO: 230606 - DNA, 759 bp, Homo sapiens
  chr4:111562152-111562911
  hyper
tgcgttgccgattccggtgttttataatcatttcgaaattagtacttaaccacttgagctaaaagaatatataaatgcctgtattgactcactaatgaattacccaattaaaacgtccgggcaatgctgggcgctggaaagattgttaaatcaagacatattacaggagggatatgaagattagaaaggtaacagaccaatatctcgcactcaaaacggagtttccggtgattcccagctttaattttggagcaggggtctttctcctctgctgttaaaaagattttgtgcttgtttgtgagtgagtgcattcaagtggaaggaacgctcccacggctacggtggctcaggccctttgctcggaccgggaccttacagttctaacccaggagcgttaaactctggaagactccgggccagccctggaggtgcgtggccccgcaagtcgccaggccaagcttgctttttctgtctgcccctccggcaggctgggcgcgctatggcagtgagctttccgcgcaaacggagagctggaaccaaagctgacatttaatagatatgctaactgagcacttaccttcgtcctgagaataggaataaaaggtagctcttcttaagagaggcggtgcaaaggcacgctataggagttcagaaaaggctggcggcgggaaatctgtagcctgggggctagtcaacatcccctttcatttcaagcacttattgatttgctgttgtcatctttggcgacgcagaaggaca

SEQ ID NO: 230607 - DNA, 156 bp, Homo sapiens
  chr4:113152695-113152851
  hyper
acaaacgtccgcacgcaggaattgaaccgtctcgcaggcagaggcggctgaaccaggagcgagcggaagtgacgcacaggccggtcgccagagaaggcggggcaccgaggtagcgcgcccaattggggcgcgggagaggccgggggtgtggcagcg

SEQ ID NO: 230608 - DNA, 174 bp, Homo sapiens
  chr4:113153417-113153591
  hyper
tggaggtggcggtcgagagccctgctacactcactgcttagcagacgtcagactggtggtcgtcttggaggcccagtctggggtccggtcttggggcctcctcggaaagaggtagaagagggggcggggtgtccctcctgccagggcgccctgtcacgcggggaaggagtcacg

SEQ ID NO: 230609 - DNA, 1007 bp, Homo sapiens
  chr4:113430517-113431524
  hyper
agttcggtgagatgcggggccgaggaggagaaggagtgggaccgtgggcgtgcaggtgtttcaaggatcctcctcctttcccccttccatctctgattccatctccaatttggatcccgggaggccgagcatctctcacgcggttgacacctctccaggctggagcgcgaagccggcgcctgcccgggtaatcagggaggcctggcctttcacgcggtgttctcagtcagtaatccaagttggcatttcccccttcgcgctctgagcagctggagaagcagagaatgctagcgaaagcagacagaaccacccctgtctcccctcccccgaccctggcaccgagagggggaaaaaagtcgtttgttgtaacgcacacaccatcaggattcttccccattccatcctcccgactcacgccaccttgcagggaaataataggtccggccacactggctttcgcgttctgctttccggatgactgaatttctttgctcgcctctcctgtcggggaccatctgaaactgcctccaagctgcgttcccagggaaccccccaacccccactcattccactcggggactaaagagcgactcacttcaacgtcctccataagatgaaccccatcccggctggaaaaatcaaactggggaaggaaaaacgcgttgggggcaaggagaaccgctcctgcagacctggcccctccttggccctaggggacccctgccgatgcccactcggtgccacgtggggcggccccaagggagatgcaccatcccccaaaccaagcgctttggaaaagaaactgcagagaataataagaagcatgggggggggggcggggggcggggtgtgtccgtggagtgatgagaaagctggtctttcatccctccttttttggacattccttaagtttaatcattaaagtggtccttaaaaaagaaggcagcagcttaacgctgctatttctgacaatctgccccacacactgtcagcgaagtgaaagatct

SEQ ID NO: 230610 - DNA, 865 bp, Homo sapiens
  chr4:113431805-113432670
  hyper
acacatttcttttgcagattcggaggccgggactttcacgctcccgggagcgcactgcattggcgcgattcaagagctgcccgctttatttaattaatacattcaaagctcgcttgggagcccgagggggctcggggaagaccgaggctggcggtgaggaggaggcgcttttaaccggttccaggtgtcggtgcccagaagtcacaaccagctcaagggtgtgcaatgcaggggggtgtacccagcgggtgggggcgccgcagctcccagcctcgccctcaagcccggccctttagcagcctgtgacccagactggcgggtgggcagctgaagccggccttgggtctaaacgcccttcctgggccatcggactaggctttgggaagtgccgaatgggtccttcctccctcctggccaaagccgcccagggccttcgcctcagctgggacaccaggagcgcccatccggctctggtccaggtgctgcgggcccgggaagcctcagcccctcctcctgcctccggctgagcctaggtccggctcccgtggcgggcccagcggttggcagtccgcctctctactttttttttcctccttcttggcactcagatggatgtatttaaaatctagtgaaggaaaaatgagccgtaacaaggcctgagcactttagaacaaataaatacagccagtcccggaacgccggccgcgctaaagcgacgctccaatgagaacaggacccaccttcgcgcctctccgcacttaggaaaacgcgccgcagcgcgctagctggcgttggaaagatctagcaacactgagagtctgtgtctgtcaccggaagaaaatctccacagcgttgtttgaagtgt

SEQ ID NO: 230611 - DNA, 382 bp, Homo sapiens
  chr4:113435424-113435806
  hyper
ctgtgagattcacacgaactgcaccaagtccttcggcgttaaagagaaaggggaggagcgtcagtccgctctgcaaactctttagatatgccaccatcatctcttcccagggtctttttcgtctcaagaagcgcccccaaaacgccacccttggctttgacaataagctccatcacaccttcagtaaatcagagcccgtctgaatgaaggatacccaaagccaagaaatgcaagaaacaaccgaggaatcagaaaggctacacctgccctgtgaagtgagatggtttccagggcgtggaaaggaggggcaggggaagggaggagggctcgactggggacaggaaagggaacccactaaggcctggcgtgggtagcagaaatg

SEQ ID NO: 230612 - DNA, 535 bp, Homo sapiens
  chr4:113436826-113437361
  hyper
cctgctgccagtcagccgggtcctgccctccgcgggcggtcctgcgttccctccccgagaagggactgcggcctccgcgacaaagattctgcgcggagcagagggcgtgcgggtgtggttggactgagtgcggggaaaccacctgcgtagttggaagcggtggctcgaatacttacttagttggctctaactgtgcctcagcgttgctgtgactttggcctgtgccgggaatctccgcgcagctgcgagcgcagcgccgggtccttcgcccggcgtgaaagctgcaagcccggcgctactgtggcgcagctccgcgggggacctctgcgaccggcgagtttgccaagagccccggcggcggcggcggcggcccgcccgggtctcgtgtgttgtggtggtggtgcgtgtctgtctgtcagtcagtccctggccgtgcggctcctggcacgcgactcccaggcactccagttaacgcgaagctgcttgtggttcagtggctgcgtgtctggcacacgactctccttaaaacccctta

SEQ ID NO: 230613 - DNA, 72 bp, Homo sapiens
  chr4:113438051-113438123
  hyper
gcagttagccctgtggtgctgccgggcgtctcttggcaaagcctcttaggggttgtatcaaatagtaaacga

SEQ ID NO: 230614 - DNA, 160 bp, Homo sapiens
  chr4:113438303-113438463
  hyper
gagcttttagaggatgtgagaatgaaatcactcacatgttagagctgaaaggatccccctcattttacatacaggaaactgaggctccgggcactgatgcaggttttgctggggttaacccagtttatagcctggagggacagcaaggaggcttcctgcg

SEQ ID NO: 230615 - DNA, 61 bp, Homo sapiens
  chr4:113438643-113438704
  hyper
gggaaacttgttctcaattgctcgttagccctccccactttccccacgttcatgcccaccc

SEQ ID NO: 230616 - DNA, 1163 bp, Homo sapiens
  chr4:113441561-113442724
  hyper
ggacaaatggtcgccgcgctagtcccttgctgttgcaggtgactgtcgggggcgcgaaagagggcgcccttccctgagaggacaaaagccaaggtttggctatccagcgagcctgtcccccaattcacagtaaaccaccgtcggccaaaggagatggcgtgtctactctctgctaaaataacaagatgaagtacctgacaagggggctttgtaacccaaatcctaatcctccgagtgagttctcagaaagatggaaagatggcgggaaaaagttggtaaatcctaaacatcttttacatcaacggtctctagttcttcgctgcaggctagaaacgcagcttccagagcaggagagcctggtatggaaacaattagctttctccgcagagcaccccttgcaacgctaggattcgttattgatagtggtgagcgctgggaatgagtgtgaattcggagtttctgacggtcccctatccgggagccaaggaagccaaggagaaaacaatgtaaattcgccccgatccccagttactgcatcccacatggtattctcggtctcccccacgttttccccttgaatcctgtccggggaggattcggcttgaacctagccctggagaggtcccggccaggtcactgaactgcgcttcactgcgccagcccctccccttcagtattttcatcgcgtccgaggaatcggcatccaccacagcagacagaaggcagggaagatcatcccccaggccccaagccccactctagagaccctggccccaagcccgcacgacgtgctctggtgcctccaagccaaacattccgggattcggcttgacacacaaggtcagtcagcttgctagcgcggaatcggccccgcaggtgctaggaggctcacttccttcttcgcagacgctataccctatccccacctgctctggggaaggcaaagctccgcagacttcttatccctgaggcaacccgctacccaaatgtccctcttctttcccacgaaggaaagaaattaccgtaggagattttgccaatccatgccagctttctgattgttttcttcaggtaaggggaaaagaacagccagcgcgtgaatggagagctgagggcccactagggagagaacctcttccccacccttcggtgcctgcaaaaag

SEQ ID NO: 230617 - DNA, 42 bp, Homo sapiens
  chr4:113443712-113443754
  hyper
ttagtggtcgggcacgcggtggctcatgcctgtaatcccagc

SEQ ID NO: 230618 - DNA, 461 bp, Homo sapiens
  chr4:113443994-113444455
  hyper
tgtctacagaaaaaaattgttttatatatcagaaaaggatacgtgtatgtaacaataaaactgtgtaatgcaatagtgttgggagacgggggtatggtttattttcagggatctaaagatatactttagaatctaaaacattgggggttgacacttattgctgatttatccattctttctttccccccgaagtatttctcgagcgcctaccgagtgccaggcgcctagcgaggcgcagcgttagcaccaggcgcgaaccagacagctgtggcctgcctggtagaaacgaccctgcgataacgcagttgctagtacagctctcggcggaggagccagggccgggtctccaggccgggagggggcggccgcggtgcgcccgggcagcgctccctgcgcaagtagttcttctatgtctttacacgcacttccaaaaaaacttcgcaagtcacagaaacaattca

SEQ ID NO: 230619 - DNA, 723 bp, Homo sapiens
  chr4:113444850-113445573
  hyper
taggggcctggaaccgaggtgtcagcagtaatttaaagaaggtattcagtccgccagcgtctcttttctccgtttcccccttccacccctcccacccctccctcatttacgccttcaagcagtatgggggcggagaagacttttaaaacaaaacacaaaacaagatcttttgcgagagcggtgtccgagggagccggagcgctgacaggtgtgcaggaggcgccccctacagcctgctgcccctctcggggttacactcccttcctgccgcacctgagcgttttcaggacgcgctctggtcctggagggccgggcccgcccgagggcagccgattcacggcgggcgcgctgcgaagtcggggcgccccctggtggggcacggaggtcgagggggtatcctgagagcaccgcggggcttcggggccgcgggggagctcccaagacagccggccaccgggggacagtggatttggggtctcctcgaggtcggtccggggacgccctctgggaagcttcacctgcggctcaggttacaaacgcacagtgcccagccacgtcctcacctgcagtttcaaaagccgaaagaaacaaacacaaaacacctcccctagggttctgatagttgccaagtttaagaacaaccggatttaagccccacgggtttcgttttcttttgttttgaggatttagcaaatcagctagaagtgacgccaagacccaata

SEQ ID NO: 230620 - DNA, 218 bp, Homo sapiens
  chr4:113558091-113558309
  hyper
ccaaaacttggcccgcccacctccgcctaagccaaaaaccgccgctttcaaatcgccaatcaaattcttccttggcttcgagtctctcagccggccgcgctctccgatgcccagccctcctggaaccacctcgcctgtgacgtaggtggagcgcgcactgcctccgggcccgtctttctcaattgggaccggaaaacgttgtcgctcatcctatgacg

SEQ ID NO: 230621 - DNA, 286 bp, Homo sapiens
  chr4:113558540-113558826
  hyper
ttatctatgcgcacgcgcaaaagtcttcggcagcacttgtagttcccgttttcagacagtaagggcgcataggggcccggcgtggggaggtttggggcgcgcccggcctatgacggcgtccttgcggaagtacgggtgccgagagaagcagtagtcaataaagagagtgccgtatttcgcagattggagctgagctgtggctgccagaagatagcgaacgtgaggatttatattctaaaattatcatcttcttttgcaggactctgccatcgtcctcaaagagtaa

SEQ ID NO: 230622 - DNA, 310 bp, Homo sapiens
  chr4:113626498-113626808
  hyper
aggggttgaggtcccggtggcatttcacaccacgttctctccgtaaatgaattcccccttatcaatagggagtagttggcagaacaaagaatgtgtgcgcgtggaggctagaggtgggtgggtgggtgggtgggtgccttagcacaactccagcggagagtgagtgcggataggaaatgtgtgtatggcatgaatggaaagagccgagagtgagtgtggagatgggcagggaagagctggacgcgccccaacagccaggggcctcccgagggaacgtccgccagtgatgcgggagcgcccgcggaggagc

SEQ ID NO: 230623 - DNA, 283 bp, Homo sapiens
  chr4:113627384-113627667
  hyper
aagtgcgggaggggcgccggcaccccattgtcctcgcgtcccccaagggcggggacctcaaccccaatgcggcggctcccctaggagcggggccgacacgagccaacttggctacatcgcccggcccaggaccattctctaaacctcttttctcagtctcacttcacacacagacacacatacagacacacacgcagatagccctagaaaaatacacgtcttccaaaaccagacgtgtaacttctgaacgcacgcacactcacacacacgcaccccgcaaact

SEQ ID NO: 230624 - DNA, 159 bp, Homo sapiens
  chr4:113739235-113739394
  hyper
gggactggcccgccgaaagcacatggattacagtctgaggctgtaatgggaaagtcggttcctgggctgctgtctcatagacatcagcttgcagggaagctgggggctctccgaattgccctgctccggggcccctcctgctgcgtgactcacaggcac

SEQ ID NO: 230625 - DNA, 920 bp, Homo sapiens
  chr4:114682535-114683455
  hyper
agtactcaagaagagggggccgggaaatggaaaaacagccaggcacgggacgagtggcaagcagttgcgaaacgatccgcactggagcaggaggagtagaagcagaggggagggagtccgagggggcggaggtggagtgcagcggggccgaggccgcggagcccagagcggacagcctgagcccagcggccgctgtcagcaggctcaggcgcggggcgcgccggggctccgacgagcgtgcgcgcccgaggccggcttccctccggcgggcggcagcggctccggcgaagcgaggcaccttggcggcctcgcgctgctcacgagcccgcgcggcttcaagacggcgcggcgagagaaagagcgctcggctcaggcgaagcctcttctgccgtccccaggcctccgtctcctcctccggcgcctcctcccgccgctccctccgcctgccagcaccccctccctggcgaagccccctcctcgctggtcccacacctccctctagcgactccaagcctgtcccttcgtggatctctcgcactccctcctttggttgcacacacgagcacaccagtctagggagaaaccaggtgggtggaggaggatgtgcgggggagaagactggaggtttgggtgaatgaggcgagaagtcacagttacccatttaaacccgcacagagaaggctgcctcaatctggggctgactgagcgggaagatgcagggcaactcgaggatggcccggggcagccgccctgggtcgcggaagcccacgcccctgttttgggcgccgggcagcagggacttctccaggccggttcccgggccacgacacccggtgggccgagcaagggagagcaaccacttcatctccacgccgctcagagttgacacagcaggggccggatgtgggctgttcactgct

SEQ ID NO: 230626 - DNA, 735 bp, Homo sapiens
  chr4:114900467-114901202
  hyper
ctgcgaagtggacgcgtcgcgtctggctctgatcagacagataaactgccgtagtggaccggcctcctgatcaccttctccactttcccagggctattttccccagtcctttcctaggcgtttgccaatctccccgacactcaccaggcggcgaagtgaggaagaagccgtttcctgatctccctccacctccgcagaaactccgggcagcaattccttttccccgctgctagggagcctgaaggccaaagccgggtccctagccccgcggccggtccgcgcggagcccgcttggtctttgcgtagttggcgcacccggcgcaggcgctgcaaactgcgtgcgttttctcagctaacttatttagctttggcactccgagttcttttgcctcctccctcttttctctccagtgaatcacagaacggtactttcttcctgagctcccccgggaagagggggtgggggaaaaggactgtttagaggctcgatctttcctttttcttttccgggaggtggatggccaaggcagaggaggctttgccagagagagagctgcgtgctgctccagcccagcgggattccgggggatccgcctgggctaccgcgtcccaagagtgtcgcctcctgcccatcaccccgctagagggaaaggacggcggcgcgaatggggaagggtaaagcgggcacttcttttcgtggggctgttggtgaagagccccgtctcccatccctaa

SEQ ID NO: 230627 - DNA, 186 bp, Homo sapiens
  chr4:115519422-115519608
  hyper
cgcgacatcaacacgcagagctcactgagccgccttgatgataaaaggcgggcacagggactacgtgggtggtggcagaaagggcgcgggacacgcctcgcaaagagggaagagtgggcggggccacgtgccgttgtcagagttcgcaactcgagcgcccagagggctcgcgaaaagtcccagcct

SEQ ID NO: 230628 - DNA, 116 bp, Homo sapiens
  chr4:115519971-115520087
  hyper
tccttagccaacacgctaactccgaagcctcccttacgcccccgaaccaccgaaggcggcgacacctgattcagcgcacaaacacaggtcccttctgtcccggatacaattacgcg

SEQ ID NO: 230629 - DNA, 163 bp, Homo sapiens
  chr4:115520454-115520617
  hyper
gagggagggtataacggggaggcgattcggccgaggaccttgtacttgacccctgaagggatgggcaccgcggagcccagaggccagagccagctgccagggcagggatggaggtgggggaccaggaggagcttcgggacctcttcaactcccctttactccg

SEQ ID NO: 230630 - DNA, 841 bp, Homo sapiens
  chr4:118954372-118955213
  hyper
tgaaaaaaactggcgaacagaggaaactcttgcagcctcgcagccgccctggtccagtgccaacggcaggagcaccacaggaagggaccgcgcgggtgcgccccacccttccagcgtcgcctcggggactcgcacccctttccctggccgcacaagacgtttcatccttggcggccgccgccaacccgccgggaggggcggtcggaactggcaggccggggcggaacccccggggtctccttgtcgaggcccgggcagccagatcctcagggccggtccgggcgggagcccggtcgatggaggcggctcccgtcctcagctcccgctccctccccttccccggggcgggcgcgcgcgggccgggagctgggaggcggcggctcccgcccgggaggcggtggcgagggcggcggaggcgcggccgggcgggtcccagggccgtggttctccagcgcaggagtccccggcgcacccgctgcgctcgccccgcagccgcagcctgagcggccgaagtcgccaccagctgtgtccgcgcagatcccgggcgcggaggggagaggtcgcccgcttgtcgcccccgccggaccccgggcaccgcgtagcacccaagcgccacccggacgaggggccctggggagcggctgaggccgaagacccgagggaaggaggagcccgcggacggctgcagccccaggtaatctccatggaggacggggccggtctcctcgcccagaaacccgatccgggcgccttggaatgcggactccagaggcggcatctcgaccagacaagtttctcgcggcttggaatgagggagtcctgaaaccgacactcgttttat

SEQ ID NO: 230631 - DNA, 46 bp, Homo sapiens
  chr4:118955470-118955516
  hyper
atctgtcttcccccgaagtggtaccaaagccggtcccttggcgacg

SEQ ID NO: 230632 - DNA, 304 bp, Homo sapiens; identical to SEQ ID NO: 199569
  chr4:119200550-119200854
  hyper

SEQ ID NO: 230633 - DNA, 1131 bp, Homo sapiens
  chr4:119273335-119274466
  hyper
ccgtccggagtttccgcggccgccccgaggccactaaccgtgtctgcagtcgcagtagccccagtccaccttgccacgggcgtctccgtagaaacaccagggtctgcccgcgccgtcggggctccgacaaaagttgtggcgctgtcctcgcagctgagcccagctcgctgggggcgaccgctccaggaagggtggcacctccgcccaccgcagacacggggcgccgaagtccgtcacgctgacccatggctcgccggcggggcagccccaggggtgcggccggggcgtgtgcccggcctggagggcgtgcgggcgctgggcagggagcgcccgcggggggcgcgggaagcgcgggagaggcggcggcggacgcgtcctcgggggccgctgctgggtgggaaggtaataggggtagtgcggacccgcagggggcgaatggcggtggctgtggtggagggaatcattgaggacagaatcaaagccgaccacttcggggagcgcccctaacatcagggctagcacgaagcgggcgagcgtcatggtgccagcgctgcggggtctggtccatgctccccagcttctcgggcttggagcggagaagaggagggggcgggggcggggctgccgcgtccctcgaatcccccagccccctcccgcccccgcacgcggaccgccctcgcctccccaaccttgcctcccgccgctggtgccctgccgcgcctcggctcctgtcccctggcggcggccgcgggtggggaaatctggagctcagccgagccccggccggcggagaggaccggaaaagagaaggcgcggacgcagcggggagcggttgggcctgagccccaggtagcggcgcaggcacgagcccgggaactctgccccctgggggcgggcgccggccgcgcaagctgctccggacctacgctcggcccctgccaggcccaccgcagtccgcccgcacggcactgccagctgctgggaccgagcccgagggtgcccgcgcggagcacggtcttggctgccccttgccagcatgcagcaccagcacagcccggcgttggcggctcccaaatctggcaccggcccctgccgtcatctctcctccaacctcgtcgccccgtatcttgc

SEQ ID NO: 230634 - DNA, 50 bp, Homo sapiens
  chr4:119757206-119757256
  hyper
cttccccggccggcgtccccttagcctggactcacgctcggagttgcagc

SEQ ID NO: 230635 - DNA, 275 bp, Homo sapiens
  chr4:119757495-119757770
  hyper
tcaaagcctttaacgtcgtggctaaatcagaaccgtattttctcggcgcagccccgcaggaaggaggggagcgcgttcattcattcttccatcaacaggttgcagtttcagctcttcattcattacgtattacttaaataactaatagttcaggtactgcactaccgttacatacgggaaagtacacgatctggacctaggggagattaccgtttaaaggcgaatctggcacgtgtacacgcacatttgatgacgtacccgtgcaatgcactaca

SEQ ID NO: 230636 - DNA, 155 bp, Homo sapiens
  chr4:119809910-119810065
  hyper
cctcgaaggtgggccgagcaaaggagagtgacgcaagagtgggctgtgtcctggatgctgcgagcgcctctgcctccttgagaatgagcccattagccgcacaaattcgcagcaggcggctggggcggcggctggggcagcggctgcagcagcgg

SEQ ID NO: 230637 - DNA, 250 bp, Homo sapiens
  chr4:120133569-120133819
  hyper
gatctcgcgcctccgaggaagccaactgtatcgcgcacgccatcaaatccccgcgggaatagaattccgcaggtccagaaagccgggaaatcgcgagcggaggcggagttacctcggtgagcgtgaaggcggagcccgctccgaggggcgggctcgaggcggggagaggggcggggctccagggacctgttgatcgcaggtgtcactggcctgactggtccctgggtattggggcgtatgcgcatgctcc

SEQ ID NO: 230638 - DNA, 36 bp, Homo sapiens; identical to SEQ ID NO: 199575
  chr4:120221341-120221377
  hyper

SEQ ID NO: 230639 - DNA, 50 bp, Homo sapiens; identical to SEQ ID NO: 199576
  chr4:120221611-120221661
  hyper

SEQ ID NO: 230640 - DNA, 68 bp, Homo sapiens
  chr4:120550243-120550311
  hyper
gagcgcgctaggtgactgggtgtgttctcagagtgccccagggagggaaggtcgcgatgtgggaagtt

SEQ ID NO: 230641 - DNA, 635 bp, Homo sapiens
  chr4:120988004-120988639
  hyper
tcctttgcgcaggcgcgacgagcctttaagcccagccccacgcagcggggacctgccctttctctcagccttcctgtgatgtcgcgggagcggccggttcgcgcaggcgcagttggtggacctggtcgcgctgtgccgggtgtgacactacggtaggtgtaggttaggatgtgtcttctggtcgtggtctactagttggggccgagggaagaagatgacgattccaatttcagtagccactctctaggcttatgaactgaaagaccaaggagcacaatttccgagtttcaaagatactttcaaactgaaaggaactgttcgccagctgctcgcgaagtggcccatgtgacccctagtgaacggtctaaacttccgctagatgctttgggaattcgtaaagcgactgcgtgcgcggcagccaagccacagctttacagggttcgccttctgtgtgggaacgcagcttttcccgagaaattgggttagggattaaagagaagaactgcatcctttttactgccctttttccacgtctgtcctgggcttagggccctcctcagaggccagaggggtaggcgagtccggggcggtagggggctgcgtccggaagtccaggctgcgttctgtccaccctg

SEQ ID NO: 230642 - DNA, 877 bp, Homo sapiens
  chr4:121843110-121843987
  hyper
ggagggaaggaaatcctgggcgtatgaatgagattctacggcctgcgtggagcggcgctctgggctgctcctcccatccccgcatggaaagttaggcgtttctagccacattaattcatcctaaaggaaaagaggcgacagcggagcagcgtgcgcgcgggggaaaacacccgcccacgcgtgccttcgccaacgcaaagacgcagctcacacccgtaaccgaggaagagggaggctcccgccgcgctcacttcctgcgggagagaggaaagacatcttgcggcagggaggccggtggcagttccgcccctggaccggccggcagcggagcgcaccccgccgccacctacgtggcgctgcctgctcgggtggcgcagcgagtaaaggccacccccgccgtgccccgcggtccccggccttcccacggacgcctggcccggcccgggcgaggggcgaccggggtgaagcccgccgcgccccgggccctgcggcagggcgactccgggaggcacagggcgcgcgaggtgcaggggcgcgcaggccgccgccgggtcacccacctttcgcactctgcgggccgtgtagagccccatgccgtcctgaacccgggaggacttcagggagaacctgtccggcacgtacatgcccagcattttcccgggcgcggcggccgccgcctctctcaacaccggcgcttagcgcccggcaggcggcacatcgaaatttggggtgccagggtagaggggagaaaccggcagggaaggaggaaatggagttttcctcccagaatccccacctccctgccgattccaggatcccccgcggctcagcccctcctcgtcccgggtcgggctcggcccggatccgttcctgccat

SEQ ID NO: 230643 - DNA, 90 bp, Homo sapiens
  chr4:121844287-121844377
  hyper
atggaccttcacacagctggggcatcctccaaaacaactttatcaagttcctgactctgaaagccagcttattgccgactactgagaacg

SEQ ID NO: 230644 - DNA, 2307 bp, Homo sapiens
  chr4:121992097-121994404
  hyper
atgcggggcgggtccggggaactgccgggagctctcacgcctgggcctgggatagggtgcgggcagaaaggtgaaccgagagcgcacaatgcaacgaaaccgcactccaaattcagcagtttgcaaagtgcctccaagaaaacagctgggacctgcaatcactcgttcggactcctaggttatcggggccgcggcgactccgctcagttagaaaggtagcgcgggtgagagcgaaccccaactcacgcacagacaggacgagggcacgaagccgagtctcctggctggggccgtagggggcgtcacctcggtggccgctctgctctccggaagaaagtatgagccggtcccaggccacctcgctcagcccaaggaagtttctataacgatgctcgcctaccacgcagaggacaaatgaggagccagagcggttgggggtcgggccaaccgaactcccggccccggctgcgcagctcccagacgcccaccaagaactcgtgcgctgcctggacctctagcttttcgccctacacgcagacgccctctgcaaaaccccagtcccgcagactttccctagcggcgggcggagggcatgaacctggaaagggaggcaacagccctcttggcaggcgggcaaagtaagtgtccaggctaagtccgggataaaggctccgcggctccccagaccccactgcaccccgagctcccgggtcccaggtcttccccgcccttgcgctgtctgtccacctcctcacatctctccgggccgcccagcttcgaaagcagctaaattaaaaacaaacaaacaaacaaacaacaacaacaataaaaaaaaaaaaacgagggaaacctgctcctgcccctcatgccctcagctcctacggatagggcgcccttgagaagcttcttgggccttgaagatttgggggcgcgtgcctcgagcccccatctcggatgacccttcgggcgtgaacgctccttgtgctaggtctcagggtggcgggctaaggcgtcgggtctctggggcattgctttcctctccccacttaccttaaaaagatctgtttttcgtagggaaaatagaaaaaaatccctccccgtggtgtggtgtgcgaaatagtccacgtccccggaccctgccaagatgctaagcaccaatatccaggaacgagaagcctggagggcggggacggaggcagataaaagagaaaaattcaatccgctgaagtgtcccaactttgcggtcggcacagcaaacttcaaaggcgggcgagggcgggcggcgcgcggtcgccgaagttgctgcgaagtggagtagggagccgcgcggggctggggaatcccggggcagcgccgagaagcggcgggaggtccttttaaactgcagggagcgtgcgggggctgggcggcgggaggatgccgcagcgacccgcggggctggcgcgggcttcgccggccgccgctagtcgcacaggcgcctggctggagcgccgcgcggggtgctgggagagccgggcgcacggggcggcagcggccgtggcgggtgcgctgctcagttagctccactctctcgcggctggaagtggggagtgtgtgttcgctcccgagtgtcactgctgaagcccggagtctcttcccctcccagccctaacccctcccgcctcaccgctgcccgcccgccccctccctcctctgcccgttgcctccccctccgtccctccttctctccctcccgctgcgcgccagcgcgcacgcacacacacacacacacacacacactcatacacatacacacactcacacacagacaccctctccctccttttctctctccctgtagccctccctccctctctttctctcacacacacaccaccctgctcagcgacccagcgctccccaaacaggaccctcgcgggcggcatcgcgagggacacgctgctgtcctaaccttagcgccactcggggagaatgaaggaggcccaccgagcccccgacaaagctgcaaaacccaggagacgcgcacgcgggaccatcacactgtcaagcagaccggggtgcacaatagagggaaactctggggttgatctgggggcagggagggggacgtgttaaatccagaaggttggtggttggaggcggaaagcagagtgtgcaaactgtgcattcatgtcccacttttcacccgaacgcctgcctatcacagccttcactcagggagcgcttccccctcggcgcagaccgagcctcctccgatttgaaactcagcagctgttttaacaattgaaaaagcggccctacaggacc

SEQ ID NO: 230645 - DNA, 935 bp, Homo sapiens
  chr4:122301417-122302352
  hyper
gagggttaagagagaaggagcgaaggagcggggcgcgactcttaccccccagccagttgtcggaaatgttctggagcatggtgacgggaatgcagaagaaggtgatgagcaggtcactgagcgccaaggagcagataaagatgttggtgacggtgcgcatggccttgctgcgggtcaccacgtagaacaccagagcattgccaaagagcgccagggcgaagatgagcacgccggtgagcacgagggccagcttggcgcgtcccggcagctctggggtgtagacgagcggtcgcagccggtacagagcgatgaactgctcccgcgtcaggttgtggtcccgcagcagccgagagaactgctccggggtaatgttaagcgcctgcattgctgtgcgctcccgggacgcggggccaccgcccgctactggctggccatccgcatctgcggggcagcgagggcttcgggggaccagccggaggccgcctcccttcctctactctggagtcagccgcgcgggagggctctaggctgcaccccgggaggttcgggaaaggagagcagctcagggatcaaacccacgataaagaggcgggaagccaaagcactgggagactcgatctcagtgaccaaaaaatgttcgcggttcaaataaagttcttcccttgctcttccctaaggcgaggcgccgccacggtctggggtgctggagcgccacgcgagggtcctggcgcctctggctccccgccttctggccatgcgatgcggacgccggacccgcttggggagcggtggagggtggggctgaactcggtgacgcctccctcacacccagcttcagtggcgccaacgccgcttccccgcaccctcagggcgagggaagacttccctggctcaccaacttgctgccgcccagcgcctttctcagggcatggccc

SEQ ID NO: 230646 - DNA, 87 bp, Homo sapiens
  chr4:122685768-122685855
  hyper
gcgaattctcttttcgccatctctcccagccctggaacagcttagggtccctctcgaagagcacagcgccagcccagaccccataca

SEQ ID NO: 230647 - DNA, 108 bp, Homo sapiens
  chr4:122686515-122686623
  hyper
ttgaggacgcgagcgacttccctaggagcgaacttccgcgggcacggacgccagaagaggtaacagctcagtcttccaggggaggtcgggactggtgttttgtaaatg

SEQ ID NO: 230648 - DNA, 52 bp, Homo sapiens
  chr4:122722576-122722628
  hyper
accatgaaggaaacgccactctcaaactgcgaacgccgcttcctactccgtg

SEQ ID NO: 230649 - DNA, 330 bp, Homo sapiens
  chr4:122744981-122745311
  hyper
aggcactgcccagcgtggcgagccaaagacgcccagagatgcagcgagcagcccgccggagcggcggctgttcttgcagttcaagtatcccgcgactattgaaatggaccaatgaaagcgctcgcggccttgacgtcattcaaggcgacagggtcgcaggcgagtgaagggtaaaccaaaggaaactgagcaggggcggggcaggagggagaaacaaactggctggggcgggagaaaacgcctgcgcggggcggggagaggtaggatttagggcccgacgcttccgattattttaagctgagccacctagtgagcgaggctgtccgaagg

SEQ ID NO: 230650 - DNA, 524 bp, Homo sapiens
  chr4:122791300-122791824
  hyper
tcggcacccagcccggctccttcgcctccgcaccagctcctggcgaccgagactttcgtcagtggaaggaaggaatcctctccgggtgctgggcttgcccagcgcggcgcccgccctatcccttgggtttacctgcagataatccattcggtttaaaatcagatccatgatgactacgcggaggggctaagcagcgccggacaagaacaggagggacagaggcttcgggcccgcaggcctccgacccagtcagaaggctgcccgcgcccctcaaaagccagccccagctaccgcgcctaggtcctgggctgcacaggcggggcgacagggcagtggcgtcctgcgtgacgtcagtacgctgctgcgaggggctcctggaagaagatgaaggcccgcccctttcccgaagcaccgcccactgacagcgtgttccaatcagaggcggagaggaacaaaagaggcgaggtccgggagacccatacagggcggtttccacagagaccccagacgcagtcttggctcca

SEQ ID NO: 230651 - DNA, 100 bp, Homo sapiens
  chr4:122871682-122871782
  hyper
gagcatctcaccctgtgaaaccgatcaccctctttttatcttctctgcgtctcgcactgattaaaagctgtctccaagattggaaattaagaaaagttgc

SEQ ID NO: 230652 - DNA, 249 bp, Homo sapiens
  chr4:122872082-122872331
  hyper
actccccacttctctgcccccgcccccgacgtcccagagcgtcggaggggacccaagtccacgctgggacgcccgggaggagttcagggttcaagtgcgcgcctgggtctgtgcacatcttccccttcctcggcctccctgggtaagctcgggaccccggggtccgtcttccaaggggtgcccagccctggcagcagtcgtgcgagctcctcggctctaatacagggagtggctgctcgccaggatgct

SEQ ID NO: 230653 - DNA, 505 bp, Homo sapiens
  chr4:122872691-122873196
  hyper
ctccagccccccgttgacgcccctccagccccggcggcggcgctgcggctccgcgccctcgtcctcgccctcgtcttcctcctcctccggcgccgggaaggtcacccttgcttgttctttgcacttcctgaccttggtggacatcgcgccggctgcggtccgagtgtgggggtgccggctgccggcctcctccgccttcgcggcagtgcagtcttcccgcggcgccccttcaccacctcccgcggcttccggggccccgggcggcccagggcgggaaggcaggagcggagagcgtcgcggcccgcgatccagcagttagaggctagcgccgaagccgagctgccgccgcccaccatcaaaccgtgggagcagctgccgcggccgtggctgcgacgaggaagcccggggccgagcggggctctggtgctgggagaggctctccagccccgcggcggcggcgatgcctcctcggcgcccgtctcctgtctccgacagcatcacttgc

SEQ ID NO: 230654 - DNA, 178 bp, Homo sapiens; identical to SEQ ID NO: 199585
  chr4:123653964-123654142
  hyper

SEQ ID NO: 230655 - DNA, 769 bp, Homo sapiens
  chr4:123747656-123748425
  hyper
gtggtttgggtggtgcgggggttgggcgggggtgacttttgggggataaggggcggtggagcccagggaatgccaaagccctgccgcggcctccgacgcgcgccccccgcccctcgcctctcccccgcccccgactgaggccgggctccccgccggactgatgtcgcgcgcttgcgtgttgtggccgaaccgccgaactcagaggccggccccagaaaacccgagcgagtagggggcggcgcgcaggagggaggagaactgggggcgcgggaggctggtgggtgtggggggtggagatgtagaagatgtgacgccgcggcccggcgggtgccagattagcggacgcggtgcccgcggttgcaacgggatcccgggcgctgcagcttgggaggcggctctccccaggcggcgtccgcggagacacccatccgtgaaccccaggtcccgggccgccggctcgccgcgcaccaggggccggcggacagaagagcggccgagcggctcgaggctgggggaccgcgggcgcggccgcgcgctgccgggcgggaggctggggggccggggccggggccgtgccccggagcgggtcggaggccggggccggggccgggggacggcggctccccgcgcggctccagcggctcggggatcccggccgggccccgcagggaccatggcagccgggagcatcaccacgctgcccgccttgcccgaggatggcggcagcggcgccttcccgcccggccacttcaaggaccccaagcggctg

SEQ ID NO: 230656 - DNA, 615 bp, Homo sapiens
  chr4:123748605-123749220
  hyper
gaccctagcgctccgtgtggtttctggccgcgcggccctcggcggtttcgggttcaccactcaccccctcctttccgggctgcggcgtaggcccgggtgtcccctgggctttggggtgtgccaatttgccctgtaaaccagtacccccggcccggagccgcggcgcgccggggcctcgcggactggctgtcttcccgcggacaacctgtcgcgtcggggatgcccgcggccccgccatgcagctctggccgcttctatctgctgcgtgctgtcccggggacaaagacaggaaggaccgcagcagaacgaaacggtctttactggaaaaacacctttctagagtcctgcccttaaattccgactcgggacgacccgaggcatatggcacactactctcacccactctgttttatatttttccgaattgacgaaagctgaaagagcaaaaacaaaaaccaaccagccaaccagcaaaaaatccagatgttgttaataaagtgccatagctttgtttcagtagtgaaaagaagtgcaaacactttaatcttccacctgcagtgactagctttgagaccttgagccgacgcttaaccccagagccggtttcctcatcgc

SEQ ID NO: 230657 - DNA, 657 bp, Homo sapiens
  chr4:123843158-123843815
  hyper
attccaggagttcttatcaccggggtctgtggaagaggaaatggtggtttacggcaatttccgaatgtcgcacagtagaaagtggaccagcaaccagggttgcagatcccaaagtccgggatcttcaccatttcacccaaccgccttagagacctcccagcaaaaggtctaagcacgaatgctccagaaaacaggtccaggtcacgcgtgccttctccctttccctctgggctcgacagtggtgcacagagcgactagggagtgggggccgcggttatttcattagaaaagctctggagccccgggagcccttcgtcccaggcgcacttgccctgcaagcccttctggaaggcggcagcgtccaggcggtccagcgcatcgagccgcgccaggcgcaccgagatgcccccgaatctgtccagctcgccctgcagatcgcacgctccaactggcggattccgcacgtaaccctgtgcgcccgaggcccagcggtaacccgccgaaggcccggggccgtaggttcgggcaagcatcgcgcgccagcggccccagctcagtggctgccgcatctccacgccgcttaattcgtccgttgcccaaatgacccctccgcgctccagagcggagatcgcggccgtacattttagaagagtgcca

SEQ ID NO: 230658 - DNA, 178 bp, Homo sapiens
  chr4:123844085-123844263
  hyper
ctttcacagatgccgttacagctgtttcaaagactgctggttttgaaaacgctcagtccctcccaccacgctgtgcactgctgcgctccactcaggggattacggcgcaggggcggaccctcgctgacttctgccccggaagtttttctctcagttgaagcgcgcacattgagtcggc

SEQ ID NO: 230659 - DNA, 779 bp, Homo sapiens
  chr4:124317731-124318510
  hyper
agaatttttagaggcactcccgaagttttaagaggatgtttattacacgagtctgtagggcaacatttccaagttggtacacataaacgaaagaggaaacgatagttaaggaaatcctgttccaggttttcgggcagcccgagtgattgacacatgatatcaccggaggcgtgtcctggagtggaggtggaggtggaggcaaggagctgaaattctgcgtagccggagtgagaccgctctgcaaaccactgcgtgctttgcagagtgattatcagcacagttccctgccctggataaggaacagctacagtcgctgttaaatgtgcctgaaaagcaatttgcaatctttgcattaggtaagtaccgtttccttccgtagacattttaggaaagataaggtgagaaatgttgacttttgcaaggaactgaacatttatttatttgaacttgctttccagctaaggttactggttgcatttcaaaacaccggtagcattcccactgctaaaactaatgctcttaaagtaaatgctaccgctaaaagaaaaagcagggtccctttcacctttccttaaccgaacagtagacgtttaaagtctgaaacgatcgaatttgtgaaacacagagccgttaatgcctttatgcgaagaggggctagcactcggtgtgtggaccaaatgcgtgtttgtttaggcattgttggcgaccgaatcccgagtgaagcattggtttaaaacctgaatttcccgtctctgtgtattgattcctaacgcgcagag

SEQ ID NO: 230660 - DNA, 492 bp, Homo sapiens
  chr4:124318810-124319302
  hyper
gctgcccgggagaggctgacctgccgggaccggagtgcccggggacgctgtgcccccacttgcccaacgtgcggaatcggctaagcgcgtcggcctgcgcggggcacaagggacgacgcccgcctttctctctccgagaaggatccccaaacctcactctcttcactcctccccgctaaaaaaaaaaaaaaaaagaaaagggtaaaaaaatccccctccccctcccggccgcggcagcctctgcctggcaggcgcgtgctccgaggtttcgccggggtactgcgcggctccgtgacccacccgccgacggcggttcgggccccgacccgggcgctgcggagtctcgaacgcccgtgacgtggatttttcgctcgtcaggaagccgccatcccttccttcgttccttgcgaggagcgactagaacccgagttctctgagcacaccgtgccgtcagctggcccgtcacgcactcgactccgccactcccctact

SEQ ID NO: 230661 - DNA, 338 bp, Homo sapiens
  chr4:124319560-124319898
  hyper
ccgcctcgccctccccgccgcggttgatgcggcacgtgcacgccgccgcccgcaccaggacctgggccgggtcgcacggcttggcccccggccaccgcttcggcctaggtgagtgtgtgcggcggccgccctcggcccgctgggctgtaggcgcgcgggcggggctcgctcggcgcggcaggtgcggactcggcggcgctgctgcccgagccaggactccgggagaggaggggaggggagggacgacctcgctcggcgcggcccctcccgccgctccctgccccctgggggccgcggcttctgggggctcaaggttgggtggcggggtgggcgacggt

SEQ ID NO: 230662 - DNA, 196 bp, Homo sapiens; identical to SEQ ID NO: 199588
  chr4:124778304-124778500
  hyper

SEQ ID NO: 230663 - DNA, 38 bp, Homo sapiens
  chr4:125634029-125634067
  hyper
tcccgcagcatcccgtgcctgggcgtgtgcggccgcct

SEQ ID NO: 230664 - DNA, 1973 bp, Homo sapiens
  chr4:126235780-126237753
  hyper
cccatctattctgcggcagccttttgctgttattgctctgacgccggccaagatttggccgaaaaggaaaaaaaaaaaaaaaaaagaaaagaaaaaaaatcacccccctttttagcgcctccgcctcgctgtgctcccacaccagaccgcctacagccctccgggaggctgaagtgattagcatcccgagaagccagtcggaggccgggcaaggcggagggcgctcgcggtaggagtgccggtcggggctgcttcagctccggcccaatggggctggggcgagggaggggcagaaggtgacaggactgggagctagggggagtccaggcgaactaaagtgcggggatcaatgagtgtcgagcaaagtttctgagtgctgctccagctcgcggtcttccctccccctctgtttgtgtttcggcgacgcgctgtgtgtgtgtgtgtgcgtgtgtatgtgtgtgtgtgtgcatgcctgtgcggcggggaaggggcggggagagtgtgagggaccaggcgggaggtggagaagggctcgcggagccctagctccaccgcagtccaaccttcggccccggccggcgagagggagagcgctgacaggcgccgtccggagctgcggagggcgtcactacagcccagcgccgacttcgccgcctccgctgccaactgtgaaggagagagaggcatcaaccaccccccgccccaaacaaaaagccttgtggattacaaagtgaaactgacacgggacaataaaagcagagatagcgagggcaggggcgaggcgcgctagagtgggcttctgactggggccgccggagaacgaccccccctggcatggtgaggggagggcgactcggggaccgcacgctgtttctgcccgacccctgcgaggccgagaagaaaggggaaactgcgttcgatttggatgtacaaataatgggtcggcaggcgccccggcagaggtgaaaaatgccgaggagccctggctgttgtttgtgccggaccacgggcttgaagccgcaacaggggcggcggcggcggcggctgcaggaggggaaggggcagagttgagcgctcccgggtacgggagccagagcgcgaacgctagcgcttggaacgcagttcccgaactgcctgcgcgcagacgccgccgcctgggcctcagcggccactgccggcgccctgttggaggggcgttgcagcctggtttttgaggagtggggactccaggaattccatcgcctccagcttttgggaaagaaattcgattctcccggttccccaccaccccttccccggtgcgcagttgtgcttggacgtttgttcctccctcttcacgttcttcgctgcgggtaagttctaaagtttctgaagaccgttctttgcaatgattcctcatataccttagatacaggcaacttctcccaactctcatccacccgggtgaaaacgctcagactatctggattcaaaaacaaagtaaaagggggcatatataagaggcttgagaaacttttctgggaactcagctcacaggagtgtcccgcggaatgccctgccgcttttcgccacagcatctctcttgcactccgcgttcaactggctacctagagtcttttgctgatgctacttgcttttgccggactggaggttctttgaaatagcagaggtctcagaccaagccgtcagctgaatctttgctggcgctccttaatccctgtaaatatcattgcgtttgcttcaccccttccttctctttatcacatcgttttagggagccaggaccatggacttagcaccagacagggctactggccgcccgtggctcccgttgcacactctatcagtatctcagctccttcgagtgttttggctactgtcattgcttccggggcaggcctgggtccacggggccgagccgcgccaggtgttccaagtgctggaagagcaacctccaggcactctggtaggca

SEQ ID NO: 230665 - DNA, 71 bp, Homo sapiens
  chr4:126238379-126238450
  hyper
gtggcggcggcggacgcggacgagggcaccaacgcggacatccgctatcgcctgcaggacgaggggacccc

SEQ ID NO: 230666 - DNA, 843 bp, Homo sapiens
  chr4:128544020-128544863
  hyper
tacactgggggcggcgcctggacgcgggtgtccctggccaaggcggcctcgctgtcctggaagggagggtgaagagctgcatcccgcactaggcggcgaaagagggcagcgccaagcggcggggtccggaggcgctcgacggctcgcgcccagcgccggagacgggctgtgtgttgggccagtggaagacaccggagaaacccagacgtggaagaccgggcagcctggacttcgcgagccctggtggggctggcggcccacagagcccccacctgccccgagctcccacagcgaggagtggccgcgccgcccgccagtgcgccgggctccgagaccggcaggggagcacgcgggcgaaggaggggccgccgtcgctgacaccaccgccttcagcccttggcttccgcgcgtcggaggctggcacctccaggttcaccgcggcggccggagctgtgcgggggccagacggttcggcgggagccggggctgggacctgggtgacctgtcgtccgcccctgtagcgagtctccagtgggcatgtttcaggtgggcaggtccagcatccccaaacctgccccccgcagcctggaggacctggactcagtgcagcgtgtcctgttacacaggtcagtgcagggccccgggacgcggggcgagaccgtcctcttgccccggaaatgttggcgagggaggggccgcttttctttctggggtctttctggaagcatctgacttgggattcgccttagtgcggcgctggccgcgaagggccgttgggacctgcaccccaccctttccagaatcgggtgccagcgatccaccctgtcccgctgccgagactgg

SEQ ID NO: 230667 - DNA, 45 bp, Homo sapiens; identical to SEQ ID NO: 199593
  chr4:128554021-128554066
  hyper

SEQ ID NO: 230668 - DNA, 245 bp, Homo sapiens
  chr4:128801996-128802241
  hyper
cgcatgcgcgccccggcgcagcctatccggagcgatccatctcgttacgtcaccaccagcctagctcggacggcaagcggcgggagattttcaaaatgggagcccagaggcaccgcccaggcctcggaaggtgtcagggagaactttccgtggtttcagcgtcgtcgcctggagcggcggtttagagagccgagcctgatgggcgccaaggccggctggctgcttggagcgctgcctcgaaggga

SEQ ID NO: 230669 - DNA, 390 bp, Homo sapiens
  chr4:128886035-128886425
  hyper
cggtgcggccagacgccctttctcctacgttgggagcgaatctcctcggctcacacaacccagccaccggctcccaccgcgctggaacccctctggcagcgagggtttgtcccagtgcgggtgacgcccggaaaggaaccagtcccaacagcgcaggagactgaggggtccctccaccaggatccgctcacctgcttccaggtgtgtcgcctaagagcggctcctgttcactttcgttccgcaggccggccatagttacactccctacaaggcgtcttgcgcccaactctcgcgacacctgctttctcccatcccgggtggcgtgaagctggcaaaacaagcctgtaagtgcgcgtgcgcacctgacggtcagacgtaggcggaacgccc

SEQ ID NO: 230670 - DNA, 130 bp, Homo sapiens; identical to SEQ ID NO: 199595
  chr4:128887030-128887160
  hyper

SEQ ID NO: 230671 - DNA, 159 bp, Homo sapiens
  chr4:129210004-129210163
  hyper
ctcaactcgtttgacgaactcgtttgacgtgttctctcttgccctttgttgtctgttgtcttgagtctcatagaataggtttgaacctttcactgtcggttttgtaggagtcactgaggatattgacgaggcaagtgacagggtcgacactcttgtaga

SEQ ID NO: 230672 - DNA, 316 bp, Homo sapiens
  chr4:130014786-130015102
  hyper
ttacgccatcgcgcgtcctagagtcctagcacgctattggctggctgtcaagcaatgggaggagtcgtgagaacctggatgacagcgggctgagccaccggcttggcgcggcggccaaactggtgggacagtgtctccaggtagtgaggcccaacctctttaaaacaaacaaacaaacaaacaaaaaaccaaaatgcaaacgtgagtagagaatgaaatacacagtttaaatgccctcactatctttgggttactaatatactaagcctttctggactaagtaaaagatgcaggttcctgcggctagggatagaag

SEQ ID NO: 230673 - DNA, 144 bp, Homo sapiens
  chr4:134067330-134067474
  hyper
tgaagaagggattacgtacaaaatatttccttctccttttccgctccagtaacggggggattgaggaacacagaatatacatgatgctctacacttcaaagaggtagtcagcctcattactgaggctgccgtatatacaaacct

SEQ ID NO: 230674 - DNA, 310 bp, Homo sapiens
  chr4:134067733-134068043
  hyper
ccttggctggagctatctagcgggaggcggaggaccaggctctgttctgttcggccgggaagaagaccctaccgtcactccgccggtccctggctggcgccacaaagactagaagtcggagaggcgagacctctagggggcctgggctcagcgacgctggtgcggacacagacccctatgacccaagaaatcttgtagagcccccaaaaggcgagctctccaaagcaaaattctctggcctgccctatgctgatttcgccgctaggagacgcctgtaacccacgtttgcggagagagttccattcaaaca

SEQ ID NO: 230675 - DNA, 654 bp, Homo sapiens
  chr4:134068267-134068921
  hyper
atgtctcccacatgcaaacacgcgcgcactcgcgcgcacacacacaagtgtttccatacgtacaaatgaacgcattagaaaattaccgtcattttttaaaaggctccaggattctgacgagtcagcttgaagagctcaaaacatttcatttcaattctgcagatctgaagaaaaagaaaggggggaggggtggaagtacagatgcaataccgtattaatattcagatacactataatctccttttcattgatccacaggtccctttatacactgccgctccattctcagccgcagacgtgatgctaaaatcattttaactgcagcggttttcgcttggctttggccagtcttcaatttactgcagctggaaaaggattagccatttttgctggaatcctttccttctaagcgctcaaaggcaggacccatcttcatgaaagagccaagtgcgggggccggggggacccggcgttgcggggagttggggcgcggaaatcagggcagtagacgtgcattcgcgggactctcagaagcacgtctcaggctactatcacgcccatggacactagccctccttaactccttgccaggaggaaatggcaacgtatctccaggtcggaaaacgactctacttttcccgcaggttgtggtgg

SEQ ID NO: 230676 - DNA, 1471 bp, Homo sapiens
  chr4:134069142-134070613
  hyper
aactagctatgtggatgtgccgcgttgcccctgcgcctccggaaggggcactcacagctggtcaagcgcgtccttcggaactcggggaggctccgttggggcttacacagagctaagccctgggccagggaggatggatgcaagtaccgtgcatgtgcaaacgtgttcgcagatacccgcagcggtgcacactcgggcccctcgtgtgcacgggccctgcccaccaccccgcccgcgttcgccgccgccccactgtcctcatcccgcgggctgaccccaggattggcagaaatcagtggtctaatctagcatggtgggtaaagggatcgatctccaattgccaaaaaaaaaatagaaaatagccggtgttcccagccgctgcgtggcacttggccgcacaaggcgcagggatatcagaggcgctttgcagcgcttggcggtgctgtgtgccggatgccccagagcccggcgttaggatggcgggcttgtaggaagcggctcaaatcaactcctcagtcactgatgaacgcgctcacggctcgaagctaggtcctcgagtgagttaatctacttggtaagtattttgtgaatatgtattttgggaggaaagaagcacgtcgaacgcgtctgcccgtctgtaagcgctgtcatccccacatcctttagcgtgaattcctccgctttttaggagtcacctccaccccctactccgtatgcttcgcgcctttcctcacggccccgtcagaccccctcacctttagattgacacatgccatataatactcacttttaaaatgccctgccagtctctgctagggtcccttaattaggtaacccttgccaattagtgggccctgcgctactttttcccttctcgatgatttatttccatgatgcgtattagggaaaataccttaaaggaaaaagaatgttagcatcattggaaatcccgctcctaggagaggatatcgcagctgttgctattatgttttcgcatttgctgatgcaaacaggggaacctctctattccctccccattacctgcggctggggactgggaactttccgcggcattgtccccagccagcgcctcgggacctgcggggctgttctcgctctcacactcacactcaccccggccgctcgggcgagagttctgtcccgccccgcccggctgccgcgtgacgtgtctgtttggcggccagtttggccaatcatcggcagctcggtgggtggtgctcctgggcgattggttggcagaatgagggcgctgcgcaaaaacggagaagccgagcgctcggagctcagaaactgccagcccagaccacaggctcagaggctgaagcaggaggaaggaaggactggaaggaaaaagagacaggttagagggaaagaggcttgggaagaaaacagcagaaaagaaactgctcattacacttacagagaggcaagtaacggtggagatgaggac

SEQ ID NO: 230677 - DNA, 2108 bp, Homo sapiens
  chr4:134071995-134074103
  hyper
ccctactcaccatccgagtgctggactccaatgacaatgtgcccgctttcgaccaacccgtctacactgtgtccctaccagagaactctcccccaggcactctcgtgatccagctcaacgccaccgacccggacgagggccagaacggtgaggtcgtgtactccttcagcagccacatttcgccccgggcgcgggagcttttcggactctcgccgcgcactggcagactggaggtaagcggcgagttggactatgaagagagcccagtgtaccaagtgtacgtgcaagccaaggacctgggccccaacgccgtgcctgcgcactgcaaggtgctagtgcgagtactggatgctaatgacaacgcgccagagatcagcttcagcaccgtgaaggaagcggtgagtgagggcgcggcgcccggcactgtggtggcccttttcagcgtgactgaccgcgactcagaggagaatgggcaggtgcagtgcgagctactgggagacgtgcctttccgcctcaagtcttcctttaagaattactacaccatcgttaccgaagcccccctggaccgagaggcgggggactcctacaccctgactgtagtggctcgggaccggggcgagcctgcgctctccaccagtaagtcgatccaggtacaagtgtcggatgtgaacgacaacgcgccgcgtttcagccagccggtctacgacgtgtatgtgactgaaaacaacgtgcctggcgcctacatctacgcggtgagcgccaccgaccgggatgagggcgccaacgcccagcttgcctactctatcctcgagtgccagatccagggcatgagcgtcttcacctacgtttctatcaactctgagaacggctacttgtacgccctgcgctccttcgactatgagcagctgaaggacttcagttttcaggtggaagcccgggacgctggcagcccccaggcgctggctggtaacgccactgtcaacatcctcatagtggatcaaaatgacaacgcccctgccatcgtggcgcctctaccagggcgcaacgggactccagcgcgtgaggtgctgccccgctcggcggagccgggttacctgctcacccgcgtggccgccgtggacgcggacgacggcgagaacgcccggctcacttacagcatcgtgcgtggcaacgaaatgaacctctttcgcatggactggcgcaccggggagctgcgcacagcacgccgagtcccggccaagcgcgacccccagcggccttatgagctggtgatcgaggtgcgcgaccatgggcagccgcccctttcctccaccgccaccctggtggttcagctggtggatggcgccgtggagccccagggcgggggcgggagcggaggcggagggtcaggagagcaccagcgccccagtcgctctggcggcggggaaacctcgctagacctcaccctcatcctcatcatcgcgttgggctcggtgtccttcatcttcctgctggccatgatcgtgctggccgtgcgttgccaaaaagagaagaagctcaacatctatacttgtctggccagcgattgctgcctctgctgctgctgctgcggtggcggaggttcgacctgctgtggccgccaagcccgggcgcgcaagaagaaactcagcaagtcagacatcatgctggtgcagagctccaatgtacccagtaacccggcccaggtgccgatagaggagtccgggggctttggctcccaccaccacaaccagaattactgctatcaggtatgcctgacccctgagtccgccaagaccgacctgatgtttcttaagccctgcagcccttcgcggagtacggacactgagcacaacccctgcggggccatcgtcaccggttacaccgaccagcagcctgatatcatctccaacggaagcattttgtccaacgaggtaaggctgaagcgaaaggaccaccatctctcatctcctccatcagaaagcctcctctagcccggcccttgtatctctggtgcactgtatctatttttaggatattagcttatgtgtatcgttgtgggagcagagatgggcggtcaccttctcccactccttcgtgtgtaacctaac

SEQ ID NO: 230678 - DNA, 130 bp, Homo sapiens
  chr4:134074354-134074484
  hyper
acgatgcttttagtcgcgtgtacaagtaagctatagattgtttaactttacacagttgtctaacctcgaattcatgttttagtgaacaagttaccagatccttctcctctgaactcgggttgcaaaaaaa

SEQ ID NO: 230679 - DNA, 95 bp, Homo sapiens
  chr4:139773302-139773397
  hyper
tataggattaaaaacgaggcacgttgcagcttaactattcaggcaggtagggcaggtgcctcctgccgagactcgactcccaccccagctttcag

SEQ ID NO: 230680 - DNA, 92 bp, Homo sapiens
  chr4:140005146-140005238
  hyper
cctttcccccagccgccccagtgactgtgaggtggacactgtacccccagcacagactgctacaggggagtcaccccgccttctgtgcaccc

SEQ ID NO: 230681 - DNA, 44 bp, Homo sapiens
  chr4:140005729-140005773
  hyper
tgaggctgggaaacggctccgggagccgcgcgaggacacagccc

SEQ ID NO: 230682 - DNA, 186 bp, Homo sapiens
  chr4:140187863-140188049
  hyper
ttcatcagaggtttcgttctttgttgtatctttatcattatcgatggtgacagcttcatccagggcagcatttgtaacctctggggttgtttcagggtttacttccgtggtttccctcgccgctgcatctgtgacctctggcccggtttcagcactgactgctgtggtctccggagcagcctccac

SEQ ID NO: 230683 - DNA, 939 bp, Homo sapiens
  chr4:140200530-140201469
  hyper
agaaccaaaggtgtcgatatttggactacagagccaagcagttgcaggacgacgtgcaacctcaaaggaaagtgtcccgaaggccgcttcctttttgggggttgtggatctcagagccaggcgctcgcggggttcaggctgctgagaccctgccaagggttaggtttatttaccccacgaacattcgcccagcgtccactgagcgggccctgcctcactgcctcccagcgcttgccgggcccgctcgctgatcggcgtccaccttcccaccgttcctctgcttcctcaggagattggagagcgaatggtgcctctaacaataaaagtggtaagctgcgactttgtcagccaggcacgtttttaagtgcttttaaccatacattaactcattaaaaaggaaaaccatcatcgccctcattttatagatgaggaaacaggttaagccatttgtccaagatcaggatgcgaacccagataatctggactctgaggcaccctggaaaagttccctacttccaaagtctgcaggagcttcgggacgtcttcccgggagtctcccccagtctcctcgacctccaatccaggcttctgctgctctgggtcgggtttggccaactgggtgccggccggttccctggcgcgggcgaaatctgcacccgaggcgcccgtcctcctctccgggctagacctccttactcaccgtcctttccgagcggcgcggggttggggggcgccctcagcggcagcgccagagtcttggagaccgccctgcggagatacatcgcgcccgctgtccgccgcgcagcagcctcggtacccaggcgcaggctgcccttccacagagaggctgagagcctggcagcgccccgcccggaggaggcacgtcgaccttcatccagccccgcctccgcggcccccgggaggtggggagacctttgt

SEQ ID NO: 230684 - DNA, 403 bp, Homo sapiens
  chr4:140222258-140222661
  hyper
aaattaggcatttcgtccataatcaactacagcgcttctcaaacacctacacctgtattttagcactttgggctcaaacgatgatcacacagtgtgcgagactctttccaaggaatgaaaggtcgatctagcaggaaggcgccagagaggctgtttttgatgaggaggcggtctgaaccgtacttgcctagcctcccgtagctccgcgggcgcttcgagggtaccacgcactgaaatgatgggcggggcctgccccgaccctcccggcctccacaggcaggccagcctccaggtttcccggcaagctccgaaacccagaggaggtggggaaaggaggtcaccgcgcctgcgtgttaggaagcgtgacccgggtgggaaaaccctccgcgtccgccattttggc

SEQ ID NO: 230685 - DNA, 267 bp, Homo sapiens
  chr4:140374762-140375029
  hyper
ctcctctctggggcgaccaaacgatacgtcgatgccggaaccgacccgacgccggagccgtcggctccgtccttaccgttgctctccaggtacacgcccccgtcaaaggcggctctgcggccctctcgcgagagagtgcccgtggtacctccttcctctcagttgtctgtctctccccgcccccggagtgattgcgcggcttcctccagagggcgggaaccttggacgtggcggggctgggtcagtcagggcgctgggcccagcctc

SEQ ID NO: 230686 - DNA, 1156 bp, Homo sapiens
  chr4:140655984-140657140
  hyper
tcacaaaagacggccggcggcgagcaggctggggtgacggggaccccgtggataacgggcttgaggacgcccagggcttcagccttttccaggcgtccctcgccggggcaacgcagagcagctgccgttcttcccgcgccccagcagatggtggtgtcagcccggcctcgtgcccggccgccgctgcgcccgcgccccctcccctcgcagatggcttaatcagggctcccgcccgcccctccgcggcccccgccccgcgcgtctgggcgagcgctgcgaacgtggagccaggcagtcaagtgttactgcgtacagcaggtagcctggcaactgagagcacaataccgagcagatggtgttcgcacggcgtgatggacatcacacacgacagcctgagacaatccaggaattccctggtgactcgaggccctctttgcacaaaatgagttctctctccattgccgtgtatctctggggttatctgcccccctcctccgactgacactgaactggtttctcattaccgacttttcttccagccggaggggaggaagaattcaagtgggggagggcgcgggaaggggacgtggagggaaacggaagggctgggagtggggtaggggggcagtggcgacctccggggggggagggtggcggacaccagaccccagggccgacagcccgggagggaccgggttccaggaccccagctgcacaaagccggcccggggagggggcgataaggagcgagcctcgggtcggcccggcaccgctgcttcggctcagagtccttgcaatcgcttggcctacgaacaacctaaatgaaatttagggttttattgaaaaagtcccctggggcctaatttagcctctcgactccagcctatatgcttacaagtcctcaggggactccggctaggaagtcaggagtggggcccgtgcgtccccggcaggacctagactgcctctcggcgcaggcggccctaacaaagaagcccacgaggcggtcccgggcgcgggcaggggcggtgcggcggcgctcgggagacccgcgaggggccctggaggtcctcggcccgcgcgcgccgctcgggagcccgcgaggctgcggtgtgctccagcgggcgcatttcccaggccccgccacatcgtgtgt

SEQ ID NO: 230687 - DNA, 36 bp, Homo sapiens
  chr4:140969978-140970014
  hyper
acttcctcacaagacgatatacggaatactttgcta

SEQ ID NO: 230688 - DNA, 406 bp, Homo sapiens
  chr4:140970239-140970645
  hyper
ggggcagaaagaagcgcatctgctgctctgtgattgcacaagagaagctaccactccttttcttcacaaagaaaaaaaaatggcatttatcgcaagtacagcaaggcatattaggattcacctcccccattctttcttccctcttcctcctaccatctccctcgccgcctccctttcctgttggaaaagaaaaggtgggagggagaggaggacccaccggtcacagacaacgctgtgggattctctttcttcagcttttaccagcctatgggggtcaggatgctattggttcagctttatgtgtgatatggtgcctctcacttagcaacagcgagcaggagaggcaggaagcaacgccacctggctcagcaagtgtgcggatggtttaaaacgagccactcactca

SEQ ID NO: 230689 - DNA, 457 bp, Homo sapiens
  chr4:141071488-141071945
  hyper
gcttgcttccacctgcgagtgtatcacaaaccaggcgcgcgcacccgagccctccctccaccagggcggaaaccagagaacacaacccaaacaccgaaagtttctggtcgcaaactctactcatcttgccgtgtccagagacccggcactgggaacggcactggcttttgttccagggtcccccagctggcgaggtaaacgccacagcagtccttgatccccaaaggttgtgagagattctgtggcacgggaattttggagcctcccgaaaggagcccatttctccgcaatccatgcgcgtggggtgtacaaatacacgaaaagaggacgcggggtgggcaggcatgaaaccttcagtgcctcttaaattctcagtctcaggttcacaaagtgaatctcctcctccgtggaagggcgctaggggggcgggggctgggagagaaataggttggagaaa

SEQ ID NO: 230690 - DNA, 315 bp, Homo sapiens
  chr4:141073728-141074043
  hyper
cctcactccgacgctcctctaggctccctccgcccctcgcagtcgtgactggcttctcccctctcgccccctcctccccaaatctgacaaccctgacagattaacaggtagcgacgacggcagctttttccctaagaaaagttgacgttaacccttaggcttcagcccacctcacccaccgtgcaaatcagacccttgtacccccatgtaagaagctccacgcgccccccaccaccaccaccacccccaacgcgcgccgcaagcccgctgcccgtgcgccctcaccatgatcagcgtgtggttcctctgctccgc

SEQ ID NO: 230691 - DNA, 61 bp, Homo sapiens
  chr4:141173821-141173882
  hyper
caggaactgacagcgttagccccgacacagagggcatgggccccgcggctccaccgggaag

SEQ ID NO: 230692 - DNA, 1397 bp, Homo sapiens
  chr4:141293944-141295341
  hyper
gatgtctaccttgtactcaacgaatattaaagcaggatgccgctttgtgtcaagtactagattacgatgaacggtgtcacgaagaacactccactcttgataccgtatatgtgaccttgagcaagaaatgtgttcacgctcaggcttcagttcctttctgtgggttgctgtgaggctccacaggggtaaggtaagcacaagtgctatgcctcagtaccactagggtattttctcaattctaaaatattaaatggccacgcactacagatttaataatagtttcggaggaggggcgtgaggagaggaacattccactagctcaactataagctttccgatttcggaaataagaaaaatatgaaaaagtctgcttttagaattaaggaacgacggtgtcgcgttgactttctctgcttggttcgcaaacgctcttttctcgaacttgaatgacttctctgtcgctcataccaacctctttcctgaatgacttctctgtcgctcataccagcctctttcctgattttccacactgggattctcactccaattctcaggtttcctgatagacctgatgagccgcttcaccagcgccgcttagcttcgcttctttactgtcattggctgtcgctgttccaggtcccgcccacagcgacctcaatcctgattggatgtcagtgtccttttgttatggcaaaggtggatcccggtgctttgagattggacgactggggtgaggcgggcagctaatgcgcaggcgtgtattctcgagtcaggattggcgggcgagcggctgggacgggatgggattcttctcacggcgcacgttctgtgggcggagtgggcggagctgccggggtcagttggtccaagtgtcccggcctgaggtgtcggccggatccctccttctcccggcgcctcaagcggaaggtgagggccgtcccgggcagcggagggcctggccccaggcgactagagctgcatcctcagtacctccgagggcctggagggcggggcgggctggacgcggccctgcgcaccgggggcccgggaggagcggtctcgggcctgggcatttggtgggcggcggaggcctggctcccggcagaacccttgcgcgacctctttttctcctgttttcgttgtcaggcccaggcgttctttgggagagggacctctcgcggtccctgacgcagacatcgtgtagctttctccccgcagctcctgggtcgggagccgctttgcagctctcggctctggaattggactgcgggaggggcgtttgggtggaatgggacctggcacgcctggaccttcccgtggctgctctgcgagagcctgagagatgggaggggaggctgaggtggggagggagcctagagagccgtaaaataaggatt

SEQ ID NO: 230693 - DNA, 577 bp, Homo sapiens
  chr4:141348487-141349064
  hyper
cgccagagcccagtcaagaccctagctcgctgcagccccatcgccagactcaacatccaccctcacttggccccgaccggttcagccctctggcggcaaagtaacggggtgcctgggggaagcagcaacgactccgcttcctcaccccaatctgcgcgcaaagggcagcgggacagcgggaacgcggcctgctgctcacgcacctctcttgcggcctgttttcggcagtgacagctcagatgtccaagtcgttgccacttggtccccgcgtctcttcagaccagtcccgccggcggccgcgcagcagcgactactaaccgcgcgtgcgcgtgcggtggcgggcgggaggcggtggcggcccgaggtgtgtgctacgcgctcctgctccgaggggctcaaccgcctccagggggagccgcacatggagcctgtgccgccgccggccggttgtggcctggaccccgctcccgggttagcccaggaggaattccccctgcaagtccgaagacttttcctcctctgagctcccgccctctctgcagaccgtgctacctcctgttgcgcaatgattgggtcc

SEQ ID NO: 230694 - DNA, 425 bp, Homo sapiens
  chr4:141419022-141419447
  hyper
gccagatgcgttagcgcgcgtgcaggccggacgcggccctggaggaggaggtcggggcgcgggttacagcccagccgccgctgaccggggtaggcgcggcctcgggaaggcaccgacgcgggcctcccagtgccagcgcgggcggccgccgccagcttcccgcatcgcctccgcacccgccgaccctgccccgcctgcattcctgcagccccgaagcccccgcggcgggaaaggaggcgggaggagggcccgccgcttactggtttgagttatcctgtagatggagaagcaagagaagctgaacaacgcgacggcgaccagggtgatcagcaagttcacctgcttggtcctcatggccctggccaggctgcgggaggccggcgggtggaggcggcggataatgccagggacggggttgagcgcgc

SEQ ID NO: 230695 - DNA, 121 bp, Homo sapiens
  chr4:141445663-141445784
  hyper
ctcggcagttctgcgcttttgtcctaatgagcgcggactagatggcttgattttcaagataatgatcaacccagctgtgctatgcgctctttctgcactgacctgcgggtacttcgaactt

SEQ ID NO: 230696 - DNA, 365 bp, Homo sapiens
  chr4:141488865-141489230
  hyper
ttacactttttggaacagagcggagcccaaggcttttctgcccctcccaggaacgctcacggcttactttctttccctgcggtgaggaactcctggaccgtgtcgtagaggccgatcctgagagaggcggagctgatttgccgctgaagccccgcaggcagcccgctgtagagtttcatccgcccttctgtttttaccacagcggtgattgttcccaggacacctttatacctaataacactggacgtcgggcattcaccttggacctggaaataagaaaggtgcagaacagaagggagcgaaattgagttcactcttaagccaagatttccccctgtgttcctattttccgtttcttttctcag

SEQ ID NO: 230697 - DNA, 584 bp, Homo sapiens
  chr4:141489785-141490369
  hyper
gggaaggtgatcacgtccgccaagcacgccgctattccagctgagaagagctggacccccagggtcgggtgtacgtccgaggctgtcaggccccccatcttcactcagagactggagatgcagaggaaaagggctccagccccgaaggtggaggaagttcctttcccttgctcttcacgcctgtccgccgggcagcaaacccgatttctgttttttgaaccgaccgccgggcagcggcggtgcagaggcggcggctgcagacggagcgcggtgttgggggccgagtccccgcgtcccctcctacccaccctcgcgccagcaggaccctctgcgttccggtcttccgctgggacttatatagctgggccgctcccgggctgggccgcgcgaggtctcagaagacccgggcgtgggacctgccgggggcgtgtccgggagcaccgggtccctcccattcccattctcgctcggtgcctcgggagccctgcttcgctccccgaaagccctgggccggccgctggttgtctgcgccccgcacaccgcacgtcggagggagggcgcaccgcggcggtcagcacccgcgc

SEQ ID NO: 230698 - DNA, 658 bp, Homo sapiens
  chr4:142053208-142053866
  hyper
cggaaaagttagcccgccacgttgaacccctgtccaagcggcgctatgccaagctctccggcagcctctcccctacccaatacagttaatcttctcctctttgtaaaccccccaagtgacgcggagcaaaacttaatcggtccagggaacccagacacgtcttccgcgccgcacggacttcccagaaggagcctggaggcaggcgctggatccctctaggcacctccgtccccgccggctcccctcccccgcgcccgctgggccactcacccgcgtggggcatggtgatggtctcgttggtgttggagcccacgttgaagatgaccacggctgaggcgttctgcaggaacgcgttccggatcttatccctgtacgtgcagttgcccttggggatgagggctatccagttcttgccgcgggtcggggcggcgaacttggtgttggggtcgcaggccaggcggtcgtgggccgagctggccatgaccacctccccgcgggcgtcctgcttgggcgagtgctctccgtagcgcccgcactccgtcttctccgtgtgcagctccgcgccgccgccgcccgccgccccggccccggggtccggcgcgggctcggcgtaggtgatgttcacgaaggcggtgtaccattcctccttctcggccac

SEQ ID NO: 230699 - DNA, 173 bp, Homo sapiens
  chr4:142054586-142054759
  hyper
agagcggagtaagcggtccgtgtgtgtgtgtctgtatgtttgtgtgtgtgtgtgtgtgtgtgtataatgtgtgcgtgcaaggaggagcttagtgtgatgtcaaagcccctgggattctcttgccatgttcccttggtctctctttatgggcagcagcgacccctgtcgggtct

SEQ ID NO: 230700 - DNA, 71 bp, Homo sapiens; identical to SEQ ID NO: 199614
  chr4:142141958-142142029
  hyper

SEQ ID NO: 230701 - DNA, 172 bp, Homo sapiens
  chr4:142557229-142557401
  hyper
acaaagctgccacccgggtgtcttcttccaacatttcccctagttggacttcaaagtttccttcttgcagcctgtgcggggaccaagaggccggtctagagtagccgcccagcatccagatccgacatccttttccctttcctcaggaagacttggatgcgcgccagcccag

SEQ ID NO: 230702 - DNA, 82 bp, Homo sapiens
  chr4:142557581-142557663
  hyper
cgccccaggccccggcagggacggaaacaggccgggaagcagtgacacctggggcagtcagtcatccaggagccgccgccac

SEQ ID NO: 230703 - DNA, 118 bp, Homo sapiens
  chr4:142557963-142558081
  hyper
tttccccgaaagcctacgcccagggcccctcccagctccagcgttaccctccggtctatcctactggccgagctgccccgccttctcatggggaaaacttagccgcaacttcaatttt

SEQ ID NO: 230704 - DNA, 1833 bp, Homo sapiens
  chr4:143766791-143768624
  hyper
aaaacaaaaaacaaggcaaccgggaccaccaacatcagtcaccctcactccccaccactgcctctattccttaaggacttcttcccaggccggcggcggcggcggcggcggcggcggcagcttgcgatcatcaggattggaagtgagagcgagtgcccgggccaacctcagcgtctctcagggacagcgcaggtgggcgcagccttggaaggtcagcgaggccagagctcagagttccacgggggcccggagagtgtgcgtgtgtgagtgagaatgcgaaaacgcgcgcgcgccgggcagaggggcgctcggcgagagggtaggcgcggtgacaggggtaccccagcagccgaggagagacagcccaccccaccctttaagctaaagagctggaggggtgatggaggctgcaagacggagaaacttgatgcaaaacagacaggctcccccctccaagacgtgccgccacgctctcagacacgctccctcgcctcccggattacccaccatcaaccaccccaccctgcaaaattcccccaccgagccctaggatcccaggcgggtaattacctctcccggaggcggagtggggggcggcagcagcagcagacacttttagcctgactttcctgcgttcgcttgcgagcgtgtgagcgtgtgcgcgcccaggaggagctgtaacctgctatttatagaccgaagcctcagtacccggggctgagaacccggaggaaactagcaggcggcggcgacggcgcagggcgccggccgcggcttcgcgaggctccagcagctcccccagcctctggcttcggccgcgctccctgctcgctcctcgcctaccagccccgcgcgcgccccagagaagttgtcaccagcgcggctggctctccggctgctcacacgccccctggcacaattgctactttcttccaccccaacccccaccctccccgctcctcttcctcctcctctgctctctccaagcggtctcctcccaatgtcaccagcgaccgagtagaggcggccgtggcagcgacagtcgcgcaactggcgctgctcgcttcccgctactgatagagcggagatggtggcccggctgcccaccccgaaattaccacgctggctccgtgtgctcacaccccgtaccccgacccctttctgcggcccctctgcccgctgggtcgcccacccagactgggctgtgggatcaccgctaccgcgacgaggggggacccgaggccgccacgctgctgcgggggcaggagaaaccacagagaaagaacccgcgggaggaagaaagcgccccagaccccggcctatggcagcgcagtccctagaccgagggtttttggaaggggcttgggatccctgctgtcactgcctgcgtctaggcatccattcacgcctgctggaccccagtctgcagccgcgctgggacccctgtctcttgcccctcctcccccttgccccgggcagaggtcgggctgaggagaccagcttagagcagccctcggccacccaccgccagttcccacgtcgcggcgggtgactgaggccgagatgctcccaactagcgtatgacatgcctttgatatcccgggtgcgtggggacaaatccgccctgaatgtgttggggtatcaggaaaacggggtatgtaagcaagcagtctggacggagactaaaactcccccacttcctagcccctaacaagcccacaggggaaagcacgcaccctggttattccgggctgtgtagggtgtggggcaaatgactctccccatctgcgctttacaggtgccacctggcggctctctcggaaaggttttgat

SEQ ID NO: 230705 - DNA, 67 bp, Homo sapiens
  chr4:144105725-144105792
  hyper
aacctgacgcaggcggaaccgacgaagactagccggcaagaatcctacagtcgcagccatctgcgca

SEQ ID NO: 230706 - DNA, 383 bp, Homo sapiens
  chr4:144256959-144257342
  hyper
cgcgcggcggggaccggcaggatggtggtctccccgcggttttgcctttcaggctctcaagtaaagaaaaccctcgaaactcctgatctcgagcacagcacaagctccgagctggcaccgggctgagtcaagatggcaagccccggactgaacattcgaatgtccctcagtcttccccgcgcccaagccccggtgcctctgccctagccgaggcctctgcggtcttcccgggcgaggagccgattgggggccgccggacggcggaggaccctgctcctgcttcccgaactacagatcccagggtgcctctcggactcgcgctccctccctcccttgctccctcccttcgtccgtctcctcccccggcccttgttgttttggct

SEQ ID NO: 230707 - DNA, 147 bp, Homo sapiens
  chr4:144258528-144258675
  hyper
tctctttccccttggcccctacccctggcgggctcgggacagggtgccttgcactccctcacgcccaggcatccacttggccggacaactttcttcctccaggttccagacagcctgctttgcgggcctgttcgccccataaaagga

SEQ ID NO: 230708 - DNA, 270 bp, Homo sapiens
  chr4:144434324-144434594
  hyper
tttgaatgggcagcgcaaaacccagacaagttttccggtagtgccgccaacccctgtcaggcacagaagacacagcgagaaccgtgagccgttacgaaagcctaaaacactgagctcgcgtcctgccaagcagcaggcgcacaaacctacacctccgagcgctccctggaggtcccgcccactcttctctcccgagccggctagagatctggaagagggcgggccaagggtgaggagggcagtatgcgcatgcgcgctcaggacccagtc

SEQ ID NO: 230709 - DNA, 182 bp, Homo sapiens
  chr4:144434957-144435139
  hyper
cgggtgggagtctcgctcctccaccagtttattgcgacgtagcatccaggcctaggcctccccgtccatccccgccggactcgggcctctggcagcagcgggtgacgcagacggaacatcatgtcgtccgcggccgagcctccgccacccccgcctcccgagagcgcgccttccaagcccgc

SEQ ID NO: 230710 - DNA, 543 bp, Homo sapiens
  chr4:144480192-144480735
  hyper
aggctcaccttgacgctctgattggcggctgcagaccccatccgcgagatggcagtgttaggaacaaaggtgagctgcccactgcaggtcaaacgctgccggctaccagctgcagctgggagtgaaagactagaatacagaaaggcgcaggcagtcacgtaggactaggccgggtttaacacccgaacagtggtgctagaaggtcagagtcttctacgtacatgttggaaacatccttgattgtctagcaccaagacttttaaacacagggggacaaatcatcactttgggtatttgtaattgttcgtcagttcaaatctcttggttttaaaaaaatactttccctctgcgcgactggcgcgtcacgtcgcgcgcgaccagtccgcagggctcctcccgcgctgctgataggcccgcagacggcggcccagcagaggagcggaaagcatggtccggggggcggcggacgcctggtaggcgctcgggccgttgttgtggggctgcgcgctggcgctgcagggcgggatgctgtacccaagagag

SEQ ID NO: 230711 - DNA, 1232 bp, Homo sapiens
  chr4:144621096-144622328
  hyper
agcctcacagtctacgcccttgcccctggggagaggggcccccaccgcgtccaccaagcgcccgtacttgggcagggggccgtcctcgtgaggaagtggggtaagccggcacctgcgggtggccgtggctccagacttcagggaggcgaagtccagcactctcctgtctatggcgcggctccagcttcgcagcttctccactaccaaaggcctgttacgcgtcaccagctccagctgggagaagaccaagtccaccgccagcgtgaagggcagcaccagagtgtgagtcggggcgtcgtagcgcagctgcagcagcacccgggcgcgtccggggctgtgggagccgaagtgagtgtactggacttggcggggcccgaaggtgcaggggaagcggcgcggggagagcgcgcccttgagccgcggcagggcgtccagtaccgtgacttcgcaccggtcccccggctgcactccaatcaccagatcccggagcgggtcgagccaaagggaacgacccaggggcacccggagtccagggttggcaatcagcacgctggggccgtcggggcgagtgccgtcaagcgcaccccgggcgggcaggtaaagcgccgggtcgggctcggtcccaagtgaggatgcccgtccctgcagcgcggggcgactcaagagcaggcaggcgagcgccacaaggagctgccggggcgtcccagtcgggtgccgagaagcccccgccatggccacggatggctcctggcgttgggattcccggggtggggtgccctgtgcaaagagggatctgctgagcggcaggtgcaggcagtggaagcagtagctgctgtccagtcggtagccgacttgcggatccagcaagagccagcggctgcgcttcggctgctgcaggtaacggcagcgggggaaggggctctgcccacttcctgctcagccccggtcgcaagtctctctctgctggcttctggggaccccagatacgcgcccagcgcggcgagacttagcgagggtgcagcgctgtcccctccgctcctgggcgcttcacccagcctaccttacacaccttctcgccgggagccgtggccgccgcactgctgcccgcgctgccagactccgaccagctgtctggatactctcttccccaggtgccacaaagggattgtccctcagggttgggagagagacggtgactgtactcgggtcagtcctgcgtctgtgagattgag

SEQ ID NO: 230712 - DNA, 1721 bp, Homo sapiens
  chr4:145566944-145568665
  hyper
cagccgggcagtcccggaatctccggactgcgtccctgccccaagcccgccgggaacccgggccgtggacgcccccacccgggggccgcggcgaggcgggcgcgcggggttcagcaccctcgaggctggttccgaaggctcgcggccctccccctccgtccgccgccgtcgcggctagccgcccctccccgccgcagcagggaggccgccggggcccgggggacgcgctcgcgcgggggccgccccctccccttccctccaccctgggcgggggcgcgcgagaagcggtgacgtcaaggggcgcgctgtggcagcacctccccgcgcgctagttaaaaagaagaagaaaagagggaacgaaacatgagaggctgtgtgagaagctgcagccgccggcagaggagacctcagcatcatctagagcccagcgctggccctgcctccgcctgccccgccgccgccgtcgccgtttctgttcctgctactgtcccacctaaacaactcccgttacacggacaagtgaacatctgtggctgtcctctccttttcttcctcctcttccaactccttctcctcctcccacttcccagccgcagcagaaagcccccaacccaactgacactggcacaactgcaaacggtgtcatccgcacaactttatctcgctcctcgggctcccctaaggcattggacccatcgccgcgtcttttattttttgcaaagttgcatcgctgtacatatttttgtccccgccacctccctctgtctctggagtgccctacagccccgcaaactcctcctggagctgcgccctagtgcccctgctgggcagtggcgttcccccccatcctcccgcgcccagcccctgctgctctgggcagacgatgctgaagatgctctcctttaagctgctgctgctggccgtggctctgggcttctttgaaggagatgctaagtttggggaaagaaacgaagggagcggagcaaggaggagaaggtgcctgaatgggaaccccccgaagcgcctgaaaaggagagacaggaggatgatgtcccagctggagctgctgagtgggggagagatgctgtgcggtggcttctaccctcggctgtcctgctgcctgcggagtgacagcccggggctagggcgcctggagaataaggtaggcactcaccggcttcacggatgcgtacttggcatattggctgggtggggttccctgtggctctggcaaagccggtggttgtaagaaggtcaaaacttctttgggggagttctttccataacttttctatagcgctaacgtgattccgttgtgtgttcctctggggtaagcaagtagcatttcctcccccagagtccgcggtcgggatgctgtgcaaacttgcctatctctgaaaacagacgtttctgcggtacccgcaccctgggctgggtaaatattttaaaagaatcgcgatgaacagtgtgttttggatcgaatggggcattggctgcggtgaaactgtaaattaaggtggctgtggtttccggcttatttttctagggtaaaaagatttgtgctgttttctccacgtgctcggttagggagaggattgaatcgtaaaggatgttgaagcatggttggtttatgatccccagccccgtcagaggggggtgtcttgcattacattagttaaaccaacagaaaggaactcctggtcctccggttagggacctga

SEQ ID NO: 230713 - DNA, 171 bp, Homo sapiens
  chr4:146018850-146019021
  hyper
gtgagatctagggcgagactattcaacctgcaaccatcattactaactgaatgtcctgttacctaaaaaaagatagaaataaagcccatctttagggcagaattcaactgccggacttgggactggacgccaccaagtggataaaatatggagctcggaaaagattggatt

SEQ ID NO: 230714 - DNA, 209 bp, Homo sapiens
  chr4:146098924-146099133
  hyper
tcgagtctcctccccgtctttaaaaactgccacttagattatttactttgattccttcttagaaatgatgagtatttgtgattttataggagaaattgttggcaaaaaatataaattattggtacacattttaaaagggaagcctgacgctggtattacttcctttttcccacacacacacactttgcctttggcgatgatggctataa

SEQ ID NO: 230715 - DNA, 127 bp, Homo sapiens
  chr4:146402704-146402831
  hyper
ttaggaaagcctgaacgccgccacactgttttttctccaggaagaaacggggcgtggggctgccggtagaagggggtggctccggccgctcccccgcgccgtcctccggccccggccgcgctgcgct

SEQ ID NO: 230716 - DNA, 495 bp, Homo sapiens
  chr4:146403011-146403506
  hyper
tccaggctccaggagaaagcaggcgggcgggcggagaaaggagaggccgagcggctcaacccgggccgaggctcggggagcggagagtggcgcagcgcccggccgtccggacccgggccgcgagaccccgctcgcccggccactcgtgctcccacacggacgggcgcgccgccaacccggtaaaacgaaacagacccgaaccgaactttcccttcatgccgcgtcccagccctcccctcggcgccccgggctttccagcgccgccgccgccgtctctgcacgcgtggggccgccgcggtcgtgctgggctgggggcgcgggcagcggcgggaagggggctctttctgcgcggggcgggccgcgaccccccccccccatgatggcgcctcccgtctgctcggaggagcgaacctgctaccacgtcttctcgcgcccagcccgccgggctcccctggtgtctttgttgggtcttctgctgtgggaagcccagttccc

SEQ ID NO: 230717 - DNA, 1008 bp, Homo sapiens
  chr4:146857461-146858469
  hyper
ccttctccttcctcgcacaaaatttccctacacacgcagccgcctgcgagtgattttatgtgcatatatattacatatgtgatattatcctcagaacctctagcgggcaggcgaagaaaggactgcacaggggcattttttttttttaaaggaaggggaaaaaagcacaacccaagccctttgcgtcgactcctgcgtaccgggaaggggaaagaaagaggaatgtttgcggagcggactgcttgcaagtgcccttgctcgccacttcggctgcggcccgggtgacacggaggcgcgggggcgcctggcccgagcagcccgcgcccccctcccggtcccctgggcaggcaccgccgcggttatttcgcgagggggagatcgatcgccctgcctgtctgcagcggaaaagcacaagctcacacacagcccgagcccgagacaccataaccttaacccttcccccaccctccgtgaacttcaggtgaccgaccacgtcggcctgacacccgggcgggcgggcgctccggctccactcccgcccccagcccgggttttgcaggatcgggctccgagcagcgccaaaccgccgggagaggggagtagtgtggggggagagaagagaaattgaccctccgtctcccccgacccctccctccggcgcctcccgcgtcccctcctccccgtcaccccgccccacgccttctcccctgccccctcttccctgcattcaaggagccgggcggccccgggggatatttttagttgcttctttctccttcacttttagctttagcagcatctcgaaacactcaaagcggagaaagactggggggttggggggagctggagagggagtgggggaaaagttaagagtcgcgcaaagaaaagccggagggagggcggagagggaccgggggcgcgggtggaggaggggaaggggaccgggccgtgccggcgggtgtgtgtctccagttggcgtgtgtggctgccgccggggagggctgtgat

SEQ ID NO: 230718 - DNA, 43 bp, Homo sapiens; identical to SEQ ID NO: 199626
  chr4:147443081-147443124
  hyper

SEQ ID NO: 230719 - DNA, 585 bp, Homo sapiens
  chr4:147558074-147558659
  hyper
ccatgtccaggtttcgctgagctcacacccggcaacactgctgctaggagttcccttcggctactatttattattttcctccacacaggggaagagaaagggaagcccgagaggatccagggaaagcagaagggggttaaggaccatggacagagcccgtcgcgcgctcgttgctgccgccttccccagcactctggcggctcctgaggacagcggtcccatcttgaaaccgctattccgcccggctgaggtcaggggtggacaggcggtcccctactctccaccgccgcttccgggagctgaccacccgagggttccccttttccactctccttcccactctgtttttgtcccagcgcgcgccagcgcctctcaggcctgccgcctgctctcgcacctgctcgccttccccaggcgcccagtgcctgcacctgctcccggtcaacccccgtccggattgggccacccgcgggttcctgcgtcggggtcccggggccttctcaccctcgcctgcaccctgctccttccgctctctagggaggtgacagcagcccccaacaccgcgggaagtatagagaaaatggg

SEQ ID NO: 230720 - DNA, 645 bp, Homo sapiens
  chr4:147559191-147559836
  hyper
ggagggggaggagtcgcatgcgcacagacgacccgagcctgctccgcggctgtccaatccgctgagagctgcgagaaatcgagtgagagaaagccctgcagcccctccgaccccatgtctctttggcaccaggcacccgccgggccgtggggggctcgtagccgaacgccgacctccgctcgtattgggctgggagttcagagccgcgcgcagaacccgggttggccgcaacgtctgtgttctcagcggtggccgggaacctgggatcagggtcacctgagctgacggggtgggggcgggccgagtggggttggaagcctggaacttagtggtaagcaggaggcgtaggaggtggcagccaggtaagaggcactcttacctacccaacgctggcttgggccgcaactttatttgggagtttctttttccggtgagacagagacccggcagaagaagcgggaggggctggaggctggtccttaggtaggcactgcccggcgactggagcgcggacctggccatttgggtggggttgagtgggggcgcgattgtgagtagcagccgcgggacgctgcgaaggggcggcggcaacagagcacgggcgggggcagaaaagaggcggcggagggcgcggtgggggagcgc

SEQ ID NO: 230721 - DNA, 139 bp, Homo sapiens
  chr4:147560016-147560155
  hyper
taactcgccggccgcgaggagcgggggcagtttcgggtgccgaggtctgcagctagcggcaagcggagtcaggcatccgttcagactgacagcagaggcggcgaaggagcgcgtagccgagatcaggcgtacagagtcc

SEQ ID NO: 230722 - DNA, 766 bp, Homo sapiens
  chr4:147560335-147561101
  hyper
cgcacggcggcagcctgcacgtggagcccaagtactcggcactgcacagcacctcgccgggctcctcggctcccatcgcgccctcggccagctcccccagcagctcgagcaacgctggtggtggcggcggcggcggcggcggcggcggcggcggcggaggccgaagcagcagctccagcagcagtggcagcagcggcggcgggggctcggaggctatgcggagagcctgtcttccaaccccaccggtgcgtatttctgcataatcaccgcttaaaggcacattttgacagccccctttatctgcttgatgtttttttcatgtctgcacagcaaatcaccccacacctccaaccaattttcccctctctctctcttaagtattcagcaggtcttgcctttcatattaatttttatgacctgggatgttgcctgtgcgcgtgttgtgttgtgtttcgttgtgtctacaggctcactttcctcctcctcctgcactctcggcttctttctgtggcttccctctttttctcttcacctctgttttcaggattattattattattattttaacgatctgggaatgttgtaggcgcggcgacggtgtcgagccctgggccggggcttccggagagagggcgtacaattccctgctgagcgtaatgtgtgccttctacttacaattgcagagcaatatattcggcgggctggatgagagtctgctggcccgcgccgaggctctggcagccgtggacatcgtctcccagagcaa

SEQ ID NO: 230723 - DNA, 755 bp, Homo sapiens
  chr4:147561362-147562117
  hyper
tgtggtgtccacgccggctcacgcgccgcacatggccaccatgaaccccatgcaccaagcagcgctcagcatggcccacgcgcacgggctgccgtcgcacatgggctgcatgagcgacgtggacgccgacccgcgggacctggaggcattcgccgagcgcttcaagcagcgacgcatcaagctgggggtgacccaggcagatgtgggctccgcgctggccaacctcaagatccccggcgtgggctcgcttagccagagcaccatctgcaggttcgagtccctcacactgtcccacaataatatgatcgcgctcaaacccatcctgcaggcatggctcgaggaggccgagaagtcccaccgcgagaagctcaccaagcctgaactcttcaatggcgcggagaagaagcgcaagcgcacgtccatcgctgcgccagagaagcgctcgctcgaagcctactttgccattcagcctcggccctcctctgaaaagatcgccgccatcgcggagaagctggacctgaagaaaaacgtggtgcgcgtctggttctgcaaccagaggcagaaacagaaaagaatgaaatattccgccggcatttagaagactcttggcctctccagagacgcccctttcctcgtccgctcttttctctcctctcttctgcctcttttcacttttggcgactagaaacaattccagtaaatgtgaatctcgacaaatcgaggactgaagagggagcgaacgagcgaacaactga

SEQ ID NO: 230724 - DNA, 687 bp, Homo sapiens
  chr4:147568701-147569388
  hyper
ggtcacttctttgcggagaggccttctcagagctttgggtaagtgaagaggcgccttaagttcgcggtcccagctgctcaggctccgcagcctggaggcgggaaagggaacagtgagactgagaagcaggacgcggggacagcgatctcccagaagctttcctcgcttttggtggctaatgctacgcgcctgcctgcggagctcaggcggcaccgaggaatcaagatcctcgtccccaccctccgactcaccacctaatgctttgcacaagctggccttgggttccctgctagtcccatctcccctctccacccctctggttcctggtgcgcactggtgacaggcggtttgggagagggtgaggggtagagtccaaagggctggggctgcgtggggtcagagcagaacctccctccctcgctggaggagctcgcccggtccccgaggggcccccagagctggggaagcaggcgtctcgccaggcgctcagcaaggaacccgcaagaaagagaggcccgggcgcctcgcccccttgcattttactaatcacgtctatttaaattctagcgcggtccgccgcgctctcaccgggaaagctctggagaactggacccatcaattattctgaaaaaatccctgactacgtgaggcttccagccagcgggagggaggcggcgggaggaggtg

SEQ ID NO: 230725 - DNA, 77 bp, Homo sapiens
  chr4:147576047-147576124
  hyper
cggtgacagatgagcggctgggtcaggaaggagcccagttggtggaaatgacactctttccccgctccgggtcccct

SEQ ID NO: 230726 - DNA, 793 bp, Homo sapiens
  chr4:148402121-148402914
  hyper
ttaggacgctcttgcggtcccagagtggagtggaaggtctggagctttgggaggagacggggaggacagactggaggcgtgttcctccggagttttctttttcgtgcgagccctcgcgcgcgcgtacagtcatcccgctggtctgacgattgtggagaggcggtggagaggcttcatccatcccacccggtcgtcgccggggattggggtcccagcgagacctccccgggagaagcagtgcccaggaggttttctgaagccggggaagctgtgcagccgaagccgccgccgcgccggagcccgggacaccggccaccctccgcgccacccaccctcgccggctccggcttcctctggcccaggcgccgcgcggacccggcagctgtctgcgcacgccgagctccacggtcggtgcaagtctttcttatcggggactgggactggggcgggtgcggggatggcggagacgctgcctgggcccctcggtcgggagaagacgagagctgggaacgttctggcccgaccgccctgcagcttgggcgacccgtcgcagcaggggctggcacccacttgccccagggcgcgcggggaggcgggcgccttccgtgaggggtgcgctgcggacacgtgtagagttcggggaacttcacctctccacgttagggtttaggattcggagttttaggaagaggaagcccaatagttttccctgggtgaccccttttccccaggcatgcaagaactttgaggaacgccaagctctgtggcttgctccagcgccttcttgtgaagt

SEQ ID NO: 230727 - DNA, 295 bp, Homo sapiens; identical to SEQ ID NO: 199630
  chr4:149362746-149363041
  hyper

SEQ ID NO: 230728 - DNA, 120 bp, Homo sapiens; identical to SEQ ID NO: 199631
  chr4:149363664-149363784
  hyper

SEQ ID NO: 230729 - DNA, 1230 bp, Homo sapiens
  chr4:149364740-149365970
  hyper
ttcctaactttgatttctaaggacttttaggcttctcatgtaaggccccgttttaggctccccgctggcccggagtcagcatcagtgacgtatacacctaaatctggtcccccggccctcggcgacccgcagcccggcggcggcagctgtgcggcctcccgcctcaccctcgcttcgcgcccgccaaagcccgaggcgggggaccgggggacaccctgtgcccaaaggcccctcctctccttaacagttagttaagctccgggattccggacccctaacccagggctgagacttgaactctcagccgctccagtcaggaactccctggagataggggcgacagcggcagcgccgcgagctggtcctgaccccagactctaatgcccctcggtccccagcttggagctgcccccggcgtccccgcagccaggagtccccgccgagcgtcccaactttcccgcggggcccaccgtcacgcgcactctcccggcccagcgaactgggcatcgatctcacgtcggcagagcgcgggcggcgggcgggagcaaggggagtcccggacctagagcctgggcacgcgaggcggcggcggctccgcaagcgttgccgaattattcattattaaaggaatggacgtgtctcttttactaagtttttatctcctttgaggagggccggtcttgccctggatctcagcttcttgcaaaatctaggttagaaccgtgcaggggcagccgccgcgatcactcgcccgccacccagcacccttgccccagggccgccagcgggcaactcgtctcctgcccgcatcccacctccgctcgccaacccgcgccctctgccctgggcgcgcaacctgccttgcccggggccgcccctgcgctctccggaccccctctcgccgctgtcagcgcaaagtgactgtcgctgcactcaccttttctaggacatggtggggaggctggggcgggggaaggggaacggctagactcccgccgccgctgctgccgccgccaccagcaagtccaatattggctgatcggcggtgaggatggagaggatgataatcccggcagtggcagtcgccctgctgacggtgggtagagcaatagtgctgttaccctacaagaggcggcgaggcagcggcgccaaatcgcgcagagggggacgcgggcacccgcccgcccccagcggcggcggccgggcctctggcgggcccctctcccgggg

SEQ ID NO: 230730 - DNA, 1490 bp, Homo sapiens
  chr4:150999236-151000726
  hyper
tagtttttggcctgcgcggttacgtttcccaggcggaggagcgcgcgtcgcggctgcgcccattaacgcgcggcgccgggcaggagccgtcaggcgggcggggctgcccgggacccgcaggagctgctcctcccgcgccggcgctcggccccctcctccgccccctcctccgccccctcctccccttctccgcggtttggcatccccggggccgggaagcctcctccagcgctgacagcctgtcggcggcggagggaggccagagcgcggatgcttgccagtgggccgggcctgaccgctgcgtgggaggcgggctgcattatttcccgctagggccgcgctccagggaaggaaggggccagacacggccctctcagccccgaacggcgcgcgctgcccggcgggcgggatccgggcgcggccgaggcggcggcgctgcaccccgggcctgggcccgcgcgactcccccgggggcctctcccacgctccgcgccccgccccacccttccttccttcctcccctcggcgctcccgggagcgctcggcagacgcccgagctttgtgggcgcccgcgggcccagcgcgagcctcgggcggcccaactttgcctctcccggtcggctcccgagcgggacttgtgaggcgtggccgggtggaggaggcgcttgcgggggcgtggggctccccggcaggcgggaggcacggagcaagtcgcactggacaatgacctgggcagctcggcgctgcggacacttttagctgagggcgcgggcgggtcggctcctccgcggctcctcggccccacctgcgcggagagggcgggatgccagagccaggtgtcccggcgcgttaagggccctcgcagtcagacgtccctgcaccggcgctcgcacccttagtcggcccggaacgtctttttgcggacgccctcggagcagccgcgatggccagcaccaggagtatcgagctggagcactttgaggaacgggacaaaaggccgcggccggggtcgcggagaggggcccccagctcctccgggggcagcagcagctcgggccccaaggggaacgggctcatccccagtccggcgcacagtgcccactgcagcttctaccgcacgcggaccctgcaggccctcagctcggagaagaaggccaagaaggcgcgcttctaccggaacggggaccgctacttcaagggcctggtgtttgccatctccagcgaccgcttccggtccttcgatgcgctcctcatagagctcacccgctccctgtcggacaacgtgaacctgccccagggtgtccgcactatctacaccatcgacggcagccggaaggtcaccagcctggacgagctgctggaaggtaggaggggagggcgccgcacggcaggtgcggcggagcgccggcaggtgcagtgggcgtgagccggcgcagcggggagcccgcggggtgctttccaagccgcacgggaattgatgcttctgtctg

SEQ ID NO: 230731 - DNA, 123 bp, Homo sapiens
  chr4:152020631-152020754
  hyper
acgatggcgatgtcgcaaccacagtagaaagagtggcgctctctactgtcccggaattcttgaggccggaagaataacagggcaaaggtcacgtagacggcgcgccccgcccccgtacgccta

SEQ ID NO: 230732 - DNA, 239 bp, Homo sapiens
  chr4:152021090-152021329
  hyper
cggcttgccggcgcgactcggctggaatgttagttttgtgggctcacgagctgcctcaattctgcgagtgtttgatggcactgcgacagcaggagttgaggaaagcacccttctatccattcaggacccgtcaatctcgcctttgcttggtcccgctggaatctgcgagctcctgctaagctttggggccatgcagtctcttagttaccagtacatgccattacgtgccagcaaagtta

SEQ ID NO: 230733 - DNA, 1002 bp, Homo sapiens
  chr4:152246023-152247025
  hyper
gcaggcaaacccctcggaaggtgtcgttgtccaccgagacggccattgacctctgactcatccagagataagtcatcaaccaggccacaagtcccaagccagcagctcctggatttagtgtgcacggaaaatttgagtttcagctgtacgaccactagcagttaaagacgggtctgaatttcctcgggctcggccggaaagtgaggatggcgatggaaatgccaccctccccgagtctggcctctgagagttaaagaagccggtcccatcccggcgcgtgaaggagctgccgctgtgtggggcaggacccgagcggccccagagcgcgcagctctgggtccccgccgccccgtcccccgcgcctctcacctgcggccgagtggcccgagagcgcacggccccgggcgcggcgctggccaccaagttcgcggcgctcgcgtagctcttcctcctcgtcctcccgccgccggccctcagccatgggcgaggcgcggggcgcagccgcgggatggccagcgagctgcggccccggcgccccagaacgcctgcacccggcgccccacgccaccgccctcgggccggggggaaggcggctcccggagaggaggcgtcggcggcggctgtggaaatggccacctccgcgaactccacctgcagccggccgggcagcggcagggcgcgggccgagccgattccccgcctccttgcggcgtcccggcggcctcttaatccctggcctttcccactcccactcccgctctcttcccccttcctctttgccttccccgccccgtagagctccaccgcggatcgggcgggttcggggctggcctcgcctcctcagggaggggttatcggcccctaaggccgccccacagccacacacgctggaaacaccagctcgacccaaacaaacgtgtgcaaaataaataaacgggataggaagaggggaaagaggaggtggcctggcctcttcctgccttttcacgatattccagtgtc

SEQ ID NO: 230734 - DNA, 220 bp, Homo sapiens
  chr4:152329809-152330029
  hyper
aaagcagagctgggccggggcgccggtggccgccgtcaaacctttgggaagcaagaaatccgaaacgcccgtgacgtgcggcgttgtccgactccttccactaggcagaacccgagagacgagcctttggcgggacggtgaacgattgtgctgtgtacggcggtgtgcgtgcgtgagtaaagagtgtgtagctccggccaaacgctagcccccaagggcg

SEQ ID NO: 230735 - DNA, 498 bp, Homo sapiens
  chr4:152330389-152330887
  hyper
cacgacctacattcttcccgggcactcctgagtttgagccgggcctggaggacctgggccaagactttcgagcggcggccgcccgaggtgcgaggagccagcccggctttcctcactgggtcccgcgcaggcgtccccgggaccgcagagcaaactttctggactatctgaggacacttgtccagcgagccccactgctcggggaggaggagccacggccggggacaggtaggtgctgtgctggccggagatttgcgcttgagggattcttttattttagagggttgaaggaggagggagagtcgaaatgtcccttctctgcatccgccaactgggcagggggtgcgggcattgggctgagggagcaggcattgggctgggggccggctggggatgttccaaacgaggtcgctgcgtcgggcgggggcgcaggggggaggaggtgacttctagggtttcgggctccgggacggggcgtaacgcggtgactgaccctgg

SEQ ID NO: 230736 - DNA, 515 bp, Homo sapiens
  chr4:153600921-153601436
  hyper
tttctgggtgtcaccctccccggcagagttctgtagcctcgggcaccctaccagcttttgcgatcctccttcccaggagtaggaagtggaggcggcttaccccggccgacgggaacgagcgcgatcaccagggcgaagactagggctgcgcggggagcctgcatgtccgctcgcctcggcagaggcgcgctcaggatgctgcgccgggctgcagcctctctgaaacgtgaacatttcctgtttcctgcttgtttgggtcggtgctgacttgaaggagaggtgtgtgcctgttttttaggaagtgatgtaattctgcaggagcctgtcagaccagcaaggattgcaaaagagaagttgctgttgaagcactggttctattatcacgcctctccagccctttggagtcccggcctccagcttttgaaaccgtccccggggcaacagagtcccttgctcagatgtcgttcggtatctgggactgggaggggtcctggaccacacgcattctcactctg

SEQ ID NO: 230737 - DNA, 196 bp, Homo sapiens
  chr4:153856945-153857141
  hyper
agggtggtctggcgcgtgcgtcggggggcgtgtgcgggtgtgtgtgtgtgtgtgcgcgcgtgtatataagagtgtgtgcgcgcccgtgtgcacaagagagggtgcctgggaggctgtcgcaaaggctcctttgtgaaaggcacttgcaggttcagaagccagcttggcgcctcctctcgcccgttccccgaggaca

SEQ ID NO: 230738 - DNA, 184 bp, Homo sapiens; identical to SEQ ID NO: 199646
  chr4:154073356-154073540
  hyper

SEQ ID NO: 230739 - DNA, 86 bp, Homo sapiens
  chr4:154073798-154073884
  hyper
cacgagtgttggtgcgcgcgactgaaacgggagcagagcagttgaatgagcttcttacgctttgcatggtgcgcagaatatcccac

SEQ ID NO: 230740 - DNA, 725 bp, Homo sapiens
  chr4:154143758-154144483
  hyper
ttgcctctgcctcgcggttgatggaaaacagatgtcttactgctctgggcctgagcacagaatggaaatgaccgaccagagagccatttggagccgaggacacccggtgaaagccattcagagtccagccaggaggccgactttcctcctctggtctgtttttactacttgagccgctcgctcagaaaacggccttagataaagcagtttcaccttcagatcgcctgaggctgcagaagggcggctgcgggggaggaaggaggaggcggagaggagcgggtgcgaagtcctgggtcgcctgcccgctgcctgatgtcgtgagctagggcacctcggccctggctgggcgcgcagcgaggcccaggcccgaggggtgaggcccaggccactccggagcgcgcgctgttcccgcgaagcgagtcgccgtctcgtagtaagtcgtggctcgggctgtgccctgggaaccctcccgcccgggcaaggtccggtggccggagcgtgcgggaagcctgcccagagtccatttccggacgggcgctgcggggctggcagccggcctggagcgggtgcagtgggtcggcgcggcgcagagctgtcagcaacagggccgctgagcagcagaacctggacgccgcgcggctcccaggccctgcccgcggagctctcccgggagtcgcggacctctgccgtcctcagtcacccgcgtcatgcaggatagctttcaa

SEQ ID NO: 230741 - DNA, 117 bp, Homo sapiens
  chr4:154387146-154387263
  hyper
ggcaaaagtgggccgctagtccccgcggacagctctaagcgaccccgtcccagccgaggaaagcgcccgggccccgcagagtgcgcgctgcggggcgggcccgcggccatgtgctcc

SEQ ID NO: 230742 - DNA, 83 bp, Homo sapiens
  chr4:154387970-154388053
  hyper
tgtgtggcgcgcgcgggtgccccgcagcggcccggcttcctgcagctttgttcccccgagcctggccgcccagggtccacact

SEQ ID NO: 230743 - DNA, 47 bp, Homo sapiens
  chr4:154605244-154605291
  hyper
ctgctgggaagcacggccgcgggggctcgctcggggccacctgcctg

SEQ ID NO: 230744 - DNA, 452 bp, Homo sapiens
  chr4:154680877-154681329
  hyper
ctgcccggcaccagcgtgagccccgggaccccggcctggcgtcccccacgcccgcgcccccgcgccagtacctgctcctgctgcgggggggcctccagcaccggcgctgccttccgcgccgccgtccccgcggccatgcctgagccactgtgccttctccagggcacagcgcctgccggggagggtcccgcagagtccgcagaaggaggcgccgcggggcctcgggagccgagggtgagagccggatctgcggcggcggcggagcggcggccctgcccgggttgtgcggggcgggagatgggagcctcccggcacgccccgcctccgccccctgcacgctggccagcgtcctccccagcagcggcctcgaggtcccggtcgccagcaccccggttccttcagaacctcaggcctcccattcagccagccattgtcgccgataaagcgtcttg

SEQ ID NO: 230745 - DNA, 348 bp, Homo sapiens
  chr4:154709169-154709517
  hyper
tatttttttttaaaccgccgttcagttcttcgtttttttagttttgttgtttttgtttgtttgttttatttttaaactgcccttaagtatagctggtacaactcgggaggagaatgcgcgagacttgggcggcgtgggaggggtgcctcaaatttgatacaggcttgttgtgatgacagaccaggtcaggcagaacttctgcccttcccgctactggcaccccaagcagggatgcactgggatgcgtggcaggggcgggatctcctgggagcgtctcagcccagcagggagtggggaagcaagagggaaggcttaccttcctcggtggctggcaggaggtggtcgctg

SEQ ID NO: 230746 - DNA, 57 bp, Homo sapiens
  chr4:154710237-154710294
  hyper
agccagagttttcttggccttttttatgcaaatctggagggtggggggagcaaggga

SEQ ID NO: 230747 - DNA, 60 bp, Homo sapiens
  chr4:154710654-154710714
  hyper
agggtgtgtgtgtgtgtgtgtgtgtgtgtgtgtgtgtgtgtgtgtgtgttggggggctgc

SEQ ID NO: 230748 - DNA, 351 bp, Homo sapiens
  chr4:154710834-154711185
  hyper
ccccaatgccgtaaaaaaatcagaattataaatatattcgtatgagcagaactttacatggaaaacgaaatactaataaaatgggcttgttattctgttggagtgagtgcctaggaagggtttcgtcgttgtagaaacgcccctacaagagtctcaccagtcacacaggactgcccaccatttccccgttttggagagatttttccttcttaaatgaatggcatgactcaatactcgaaggcatcacgggctctaacacacagccgcccttgcagctgtgcgctctggaaagctggagtatgggcccccagggcactgtttgtaaagactggtggccggcacaaaagacgg

SEQ ID NO: 230749 - DNA, 728 bp, Homo sapiens
  chr4:154711998-154712726
  hyper
aagaaagagctaataaagagcgtgagctctgagagatgctacgacttgggcctgggagtgggataagggccctctcgctttcacgcccccccaaccccccgccggccccggccaacccctaaatccccaacgccctccgctggggtcgcctcctccccgcagagccccttgttgggagttcaaggagcccgaagctggtctggctggtttgagccccgcgctgccgcacgcccggaagtggctggcggcccccgcgctccgcgcgccggctgcattgttttgggagccctcgctgcccggcttgccgccaggaggtgctgggagtcgcgcctgagtctccatccctgccgtgcgcagtgtccacctctggccagcttgtttgcccggcccgcggcgtcccctgcggcccatcgctgctcctcccggaacccacgccacttagtctggtcccgaccctgcactcgctgctgctgcctttcccacctcaagtcgctctccccactcccttctgcttttgggctaagaccggtccaattgatcactggggaacagggcaataacctcccgcggaggctgggacgcgggcacggagctctgcccatatgagcagcgcagggatgggacactgggtgcccatcccagcgcgcctccccagactggtccctgggatgctcacacgtggcgcggcaccgcggcggcgccttcacgaacccagactcttctctgct

SEQ ID NO: 230750 - DNA, 161 bp, Homo sapiens
  chr4:154713660-154713821
  hyper
gtattttttcatgggattcagccatctgggggcgccatttcccaaaacagagattgtccctttgaggttgcaagtcaggttcctttacgctgagatcccttacatttttacttttaggaaggttttttcgaggggtggggggatgacctcattccttcgcc

SEQ ID NO: 230751 - DNA, 76 bp, Homo sapiens
  chr4:154714001-154714077
  hyper
gagagcctttgcccctcatcttaggaagagtctagtctgagaacaaacagtttgccaactcctaccccgagctctt

SEQ ID NO: 230752 - DNA, 113 bp, Homo sapiens
  chr4:155254021-155254134
  hyper
gggccaagtgggtgcgcctgtgtttgcagcatttgtgtcatcggtgagagagactcactgacttccacttgatagaccaaatgttcgaaagtccaggatgggctgtgttcgcg

SEQ ID NO: 230753 - DNA, 998 bp, Homo sapiens
  chr4:155411403-155412401
  hyper
ccacactcgcaccacgccgctcagctcctccaccgcgaagtaggccgcgtcgcccagtgccccgccgccgctacccgccccaggcacttgccgggcgcggacgctgtagcgcacgaagccattgggccccaggtcgcggtcggtggcgcgcacgcgacagacctcggcgcccggctgggcgtcctcgcgcaccgcggcgcggtactcgtcctgctcaaagaccggcgggttgtcgttctcatccagcacgcgcagctccacgctcaggaggccggtgcgccggggtcggccgccgtcccatgcctcgatctgcagccggtgcgccgccgcctcctctcggtccaagcgccgcagcagcaccagatctagaggctccaggggtgacgaggagcctggcaaaagcggtgacggtagtggccccggagtccggtagcgcaactggaagaacgggcctgcggggtccttgggcaggtcggacggttgcaccagggtgtagccctgagtgctgaacagtccggcgtccggatcgtgggcaactggcaggcggaaggcggtccctggcgggctgagctcggagacgtcgagttgcagggagtcgaggggaaagcggggcgagtggtcattcacgtcgttgacgcgaatctccacctgcaccacagcgcccagcagcgtggcggcgacgaagctgtagtggtcccgccgctcgcggtccaggcgccgcgcagtgcggatgatgccggtgtccgggtgcacgtggaagtcgtccagcagcggggagtcatcggagtcctccgacagaaagaagccgctcccctcctgctgctgcgcggccggcagcccggcgcggatgtcacctaccagcgtgtccgggggaagcccctcatctacggaaagggtgaggttgaacaactgggcagaggagcccgaggccgcccacagccacacgtgcaccaagagccagagcagggagcgctgcgtcctggcgccgctgctgcctg

SEQ ID NO: 230754 - DNA, 348 bp, Homo sapiens
  chr4:155471470-155471818
  hyper
tgtatcccacctccggcagggaagaaactctaatcactaacgcagtacccgccgccacagctgtgcagcaccttccggaattgggcgcccaggcggcggatgtgatgcaagctctgcgcacgcgcgctagtctccctcggccatctaggatcaggaggcgggtctccctcctcgggaccgcctctagggcggagtctcgaggctgaaagccggagactcctggaagggcctgggtggagggtttcactcgtccctctgaagaaatcttagaattatgttttctgccttagttggggtcctggttgttcgtgctgtattccccggaagcttaacgctttttattcagag

SEQ ID NO: 230755 - DNA, 53 bp, Homo sapiens
  chr4:155662823-155662876
  hyper
aaagaaaaatgaaacgcaaatcagcttggcactgcttgcgtcttccaaaacgc

SEQ ID NO: 230756 - DNA, 1246 bp, Homo sapiens
  chr4:155663080-155664326
  hyper
cagggacggaaaccgttaattatcacgtttcctttcatctccaggggccctttggcccgtgacacaagaggcttcggtattggcgctttcccagaactggcccagaggagccagttcagagtgtgaggtcgggtctgcattgaacgtacacaccgaggtctatcagactcccccgattttagcgaagggtgctgactgctgtgctgctagaggctagcaagctccctgtgcgcagctgatgagtttcagcaactcgccacctgggcgcttttctttaaattttgggagtaaactgggaaaataaaaaaatctccacgtccactggctctctccccttctccaacttcctctttcgactcgtttgtgggagttttctcctctttgctgggactataatgtgatgcgcaatcgtttgtgaatgaacaaaagtcaccggcaagcagggagacggggacagatcgctgacggcagattgagggtggcagcaaaggcccggcctccaaggataatggggagccgttttccctcacgcctggtctctatggcccccttcgtcttccaggtaaaatgaatgttccttcatccatcatccgcagagtaccctcaggcgtgcgtagaatctgctgatgaaacctattagcgccgactgggcagctttgtggagccacccgaggctctccattgtggcctttgtctgcagaatttaagcatttacataatgcattagcacggaactcagcacccggtggggacatcgcgtgccaagcctggcgcggccaacgcttcagcggctccctcacccggcagctccctaggaccaccctcgaggaggcattggagtcgggctgcaggcgcacgggcaaagaacttagcatctcatccaagtacttcgccttccttggccgtctccgggaggttatgcttaaaaacataaaaataaaaataaaaataaaaataaagggaggcggacaaagtttcggtgggtgaactgaagctgggtccatgtgaccctgaagccggagaaataaacttaacatgaatcttgctttcctggcgggcgttgggaccccgccgtttttcatgccaaccgttggaagcttcgtactcaacggccacaggtgcctaggagcgcagagaggcctcgggttcaaatcaccggcgcgcagggactggactcgcgggtagcgacccccccaacccccccccccccgccctacacacacaccctcgcgccggctgaaagcat

SEQ ID NO: 230757 - DNA, 1182 bp, Homo sapiens
  chr4:155664664-155665846
  hyper
acgaaagattcggtcaggaaagaatctgcaggcattcgaggcgctcgcactttgcaaagtaaatgcaatctctttattaagccgaagtccctcatatctatccttttagaggaaggtggtccaactcagaaatctctcccaagaggactttccaccgaagactaccgcgaagtgccaggaactcgccccagtcccgacaggtgcaggacctttcgtgccgccacaccttgggactctacctccctaaataggccacttaaaagccagtagtgcaaccgggatcccgcggcgataaagaatcactgtgcagaaccctggagctgggagtcggcccgcccccctcccaaagaaaccgggatcccgcgtcctccccgccgctagcgcagcgcgccagcggcgcccaatcagtgagctttccgggtctgtgacggccttcggctccgccccctcgacggccataaaaagtcgcagcgaagcctgcacctccgagcaccgcgcgcggccctgcccccggcacggcccccaggtgcgctccttctccggctgcttgtagcactggtctcactgtccccgccgtcagccaccggttccttatccgtctcattccccattgtggcttggctgagccggtcgccaggcctcgctgtcctcctttgccttcctctctcctcagcggccgtactttgcgccgtacctcacctggcctgcaggtgagcagcagcgcagcacccctgcccggcgagcttaacttgcccagcccggcccctgccggagtggcaccggcacctctccaagacgccctcttccctgcaggatgaagaaccccatgctggaggtggtgtctttactactggagaagctgctcctcatctccaacttcacgctctttagttcgggcgccgcgggcgaagacaaagggaggaacagtttttatgaaaccagctctttccaccgaggcgacgtgctggaggtgccccggacccacctgacccactatggcatctacctaggagacaaccgtgttgcccacatgatgcccgacatcctgttggccctgacagacgacatggggcgcacgcagaaggtggtctccaacaagcgtctcatcctgggcgttattgtcaaagtggccagcatccgcgtggacacagtggaggacttcgcctacggagctaacatcct

SEQ ID NO: 230758 - DNA, 1027 bp, Homo sapiens
  chr4:156129155-156130182
  hyper
caggatctgaactcgctttaccttctcgtttggagcacagggaccgcccagctagaggagcaccagcgcactgcgccccagccctgggcgagggtgcggaggatttgttctcggtgcaatcctgctggcgcttttccggggttctgcgcggatccagctccccatctctgctcctacacacacaaaagaaaacaactctcgattggaagttgtggaattttctcagcccctacgaggcgcggggattctccagccccggccctcctcccgccagcctgaggtctccttcgctcgcctgccttgctagggaccgcagtccctcagccgcagctgggtctgtccgccccgcctttgccctcgccttttcccggggcggatttggtgaagtcggcctcaagtccaggaggtctgtcttcgccgggccagctctcgcggaactggggggtagagagcaaagggagagattcgtggaagggaagggaggtaggggtggcgcaaacgcccagagtatcaaacttgggggtggcacagtaggtgacagcagcagctgcaggtggtggctggggacccgcgagggggcgcccctctgggtagggtctggctgagcgggcttgcaagcccgggaggcggctgagagaccctggacactgttcctgctccctcgccaccaaaacttctcctccagtcccctcccctgcaggaccatcgcccgcagcctctgcacctgttttcttgtgtttaagggtggggtttgcccccctccccacgctcccatctctgatcctcccaccttcacccgcccaccccgcgagtgagtgcggtgcccaggcgcgcttggcctgagaggtcggcagcagacccggcagcgccaaccgcccagccgctctgactgctccggctgcccgcccgcgcggcgcgggctgtcctggaccctaggaggggacggaaccggacttgcctttgggcaccttccagggccctctccaggtcggctggctaatcatcggacagacggactgcacacatc

SEQ ID NO: 230759 - DNA, 1535 bp, Homo sapiens
  chr4:156587870-156589405
  hyper
atttctgttatggcgattgggcggctgcagagaccaggactcagttcccctgccctagtctgagcctagtgggtgggactcagctcagagtcagttttccagaagcaggtttcagtgcagagttttcctacacttttcctgcgctagagcagcgagcagcctggaacagacccaggcggaggacacctgtgggggagggagcgcctggaggagcttagagaccccagccgggcgtgatctcaccatggtgcgttttggctgctactttctttttcagtctttcggtgcggagaaggggaggaggcgggcagaggtctgaaaaaatcgaatgccttatggaaaggaactgcaagggttcctttggggtgatcaaagagggagacacagacacagagagacaaaggcaaggaggactgtctgggagccacgcgggcgatacagtttccgaggcacgccgcgtcccgcctagcctgttgaacaggtagacatgagcgacccaagcgtaagtgccgctgccgcgagtgcccagggtgcactcgcgcggggaccgacaggtgccactgcagggtcccctctcccgctcactgcctgccacccctgacgcctgctctctttctccattcgcagtgcggatttgcgaggcgcgccctggagctgctagagatccggaagcacagccccgaggtgtgcgaagccaccaagtaagtggtcgctgcatccccacgcgggtcggggttcttcagacaggcggtccctcttccgggacccccgcttgggctgggtctccttcctctcctgagaaaccttcggtacgctcccagttgcccagccctgggaagccagcatcgggttcccacgctggggaggagcgagaggaaaggagaggacgcccgaggggccggcccagggcccgggggacccgcggcgcccgagggaggagcacagacgggggtgggcgccgagcagcgccgcgccggctgctgagctcgcggggccgggccgtgagaacgcgcggggcgcgccggggccgctggtctcccacggccagggcgcctgggccccagagcccatcagccgcgtgcagcgctgcggcctccggcgcgccggcaggcaagcgagcgggcgcagctgggggatgcctggaccccggaggcagcagggctggaggcggtggcgggcttcagggcaacttcacccggccggctgcggcgtgggtaagaggcgcgtcctcctccacagcaaaagctgcgatcgctgggctgcccagagaaggcagccggctaactgcccagcggctccacgaggtgtgcgcgtgtgtgcgagagagacaaatgatttactgcttagcagtcccatttctgttttcgttaggactgcggctcttggagaaagcgtgagcagggggccaccgcggtctccgcgcctgtctgcaccctgtcgcctgagctgcctgacagtgacaatggtgtgaggggctgcgttgcaatgtggtcatgtgatttcaggctatggatttcgtgcgtctttctctgctc

SEQ ID NO: 230760 - DNA, 1149 bp, Homo sapiens
  chr4:156680201-156681350
  hyper
ggttgcgctgtagccgctgccgcctctgcctgggtcccttcggccgtacctctgcgtgggggctgcctccccggctcccggtgcagacaccatggtaagtgctctcagccgggtgcggcccgaacctcacccctcctcggccggcctggcagcgagggaactggccgcgcagccggagcttggctcgggggccctgggcgctcactgccggccacgggagcagcctcactccttgcccgcgcccagtcaggggaggtgggaacgccgcgagtcgtggcgggggcgatcggtgcctttgcttcccaggcgggtttgccgctccacaccgcagcttcctgagctcgggaaggggaggtgcggcggaggcgtggggtcttcccggctctggccggccccaccagtgtgggaggctgagcgccagcggaagggaaggctccgggttcgcgtccccgcgctgcccccgatgcccagcctctcccggagcggtgacaggtgaggagggtgggaagatagcgtgggggtggggcggatggtgacggggagaatccaccagggattggggggttgcgcccccacgatccgactcctttagtgcatagtacccctaagggagaggagtcaggggcggggtgaaaggttaagccagcgccatgggagcagaggcagcagcctcgcccccaagccgcttctcaggtacagcgggtccctgacgctcaagtctctccctgtccccgcagtacggatttgtgaatcacgccctggagttgctggtgatccgcaattacggccccgaggtgtgggaagacatcaagtaagtggccggctaccctggctgtggcccaggtcggcgcccagtgtgggaggccccccgcgcctcgcctggtcctcagcctgctggccgggtcgcgggcgcgcatccttggaggtgcctccgcgcctcgctcccggctcgctgcagctgcgctcccacgctccgggactggaaccaggaggggaggggcggctggggcggggctgcgagggcgagaaccgcggaaaggagcccctaggggtcaccacggcttcccgacccggcctgagcgtgggaacgcgctgccggcgctcccaggctcagcaggccgggcagctcccacgcgtgcagagccccga

SEQ ID NO: 230761 - DNA, 178 bp, Homo sapiens; identical to SEQ ID NO: 199659
  chr4:157891924-157892102
  hyper

SEQ ID NO: 230762 - DNA, 121 bp, Homo sapiens
  chr4:157892475-157892596
  hyper
ctggaagccaagtcggcggcgagcagtttctgatcaataacaaagctgccaatagatgcggctctccgggcgcccctctcccccgccccaccccccacccccgaagggggagggggaagaa

SEQ ID NO: 230763 - DNA, 606 bp, Homo sapiens
  chr4:157997159-157997765
  hyper
aaggggacgatgccgtgacgttgctctgtcgggacacctcttccctcccccgcccgcggtcgccaggttcccccgcggcccgcgctgtccccgctgcggccccgaccgcggcgcgccacggcgcaggctccgcggcccgagcaggcgcgtcagccgagctcggcggtggcgcgggcggctgggacgcagctgcccccgctcggcgcccgctgcacccttagcagccactgccacctgggcccggagcctccacgatctcgcccggcgattgtgggcaggggcgcctccgggtaagtgccaggagctccacttaggaggaggggacgcgggttggggcggcgacggtggtctgaggacgggaatagacgcctttgcggaaacagcgggtcaagcccggggcggcggagcgcgaggagcactgcggcgtgcccgggaggacgcgcgctgccctgcgcgggagaggggcgcggggcgcctggcagcggcagccgggtccccgctgcggtggcgcccgcggagacgctccgggtggagagatgcagagggccggggtaattaggaaacgcaaggttggccaggagggctccttgcgttgttttgtttatg

SEQ ID NO: 230764 - DNA, 387 bp, Homo sapiens
  chr4:158141398-158141785
  hyper
agaggacgcttcgccgccaacaattagcaattcggcttctacacagcagccggagatcagctttgctgcatttggtccaggttggagcatctccgcagcagctgcaacagccgcacgaaggtagctccgggcggggagcgaggcgctgtcctcggtgctgaaaggccgaggcgcgcggtgggcgcgacagccccggagacccgaggtctcgcggagggacagcggctacgggccccgagctgtgctttctcagcgccgcgcacgcgacgcgtccacggtggtgcggggtgccgggcgccgtgcgggggagggggcgcgcgctcccgcctcctgccgcgagtcgcgcacgcgcgcccgggactgcctgcccctctctgtgacttgcct

SEQ ID NO: 230765 - DNA, 86 bp, Homo sapiens
  chr4:158141845-158141931
  hyper
gaggagagagggagaagagagcgcgagagagggtgagtgtgtgtgagtgcatgggagggtgctgaatattccgagacactgggacc

SEQ ID NO: 230766 - DNA, 1428 bp, Homo sapiens
  chr4:158142700-158144128
  hyper
ttattcggcctattcgcgtgaataagagactcttggatttttgggcgctagcgcgcgcccctcctttccctcccggggcactgacactgttctcttgcttgctgtttgttctttgcaggggggctatttcctaggggcgccgatcaagaatacagtgcatttcgagtagggatggttcagttttccacttcggagttcagactgacaccccacatcgacaatttggaggtggcaaacagcttcgcagtcactaatgcttgtaagtaatgaatattcatgcctttcgggtgctgcacgcggaaggccagcgagtgtgagtgtgtgtgtgcgtttctggggtggtgtgtgtgcgtttctgtgtgtcagtgtgtgggtgtgagtgactgcacacacgcgtgcgtgtgaccgtgtagagagaaggtggctgtaatctcagggacccccgctggctggagagggctgaagagagagggaaaggacgtcaagagtgtgcgcattagggagccggggtgagggttggagccagggagggcggctttcttgggttcaaggggttttcgctcatcttgagtgcttcaggagaagccctcccacctcgctccccatcgagcgcctgttggcaccctgcccacagagaacacgttgttccccagggcgcgcagtcgggctgttggacaaatcccacgagggactgccggagcccagtggcctcctgccccagcagctgccgctctcgcccgctgcccccagtttagatccgcagcaccggctgggctcaccctgcggccctcgcgagctccatgttctcctctttgggacaagttgttgaaatggttccggagttgggatcggggctgttacataacgcccacccgaggggcgaggagcggggctgacgcaggctcaggccggccgggtggcgtgggggtggggcggggaggcggtggaaagggggagcgctgtcaatttctcctgctcagttgcgcttccgcttaagttggagggggcgaggccgccaggggcgccgcggtcagcttgccagcccggcgcgctttgttctcaggtagctgggctccagcagaggcagccggggaaaaggactgggaagccgtgggatctggccgagtttgaaaatctggagaagtcgctgatcagccattttagtctttgcaatgctccatattaaccctctcactccgcgcagtgctccgggactcgctgggaagctctgtgatgggttcagataaagtactagaaaccaaacaattagggatctaaaaggattggtgtggaggccagagggctccggtccccgcgctcgctcccccgcgcaggcgtgggcaggcagtcgcggccactgtgccttcctgccctcttcccagcagctgccatcatttcctgccgactgccctgcggtgattctttcct

SEQ ID NO: 230767 - DNA, 148 bp, Homo sapiens; identical to SEQ ID NO: 199666
  chr4:159093901-159094049
  hyper

SEQ ID NO: 230768 - DNA, 129 bp, Homo sapiens
  chr4:159593505-159593634
  hyper
cggcaggtgatggcgccccccgcggcctagaggtccagcgcccgccgcgagcagcggacagtcctcctgttgtgtccgaccgagagtcctggtgactttgaacatgctggtgccgctagccaagctgtc

SEQ ID NO: 230769 - DNA, 140 bp, Homo sapiens
  chr4:159690614-159690754
  hyper
gtggacgcgcctgatccgagtgtggctccggaccctccgtgacccttcctcccgctctttctccacaactcagggtccttccccatttcagagttctcttgtgttccttggggttcccgggcgtgcgctgtgcttggctg

SEQ ID NO: 230770 - DNA, 671 bp, Homo sapiens
  chr4:163085066-163085737
  hyper
aactggtccgctcgcgtctcaggttcagcaccgacagcacagtggacagtaccagctcctttcacctccagtttgtctcagtcactgaaccaggctgattctcgctcctcctccctaggcaggagctgctgccactcaacccgggggtgccccgcccccaccatctgacgtaactattttgcatatcaactcgccgagaggtgaggggccgcccccttgactgggcttctgctagagtcagctgcggcaatcggggcaacaaaattcaggcttaacgtcagcgtgggcatctttggacttcaggatgtattctcaaccagtccagtagaaactaaacgctttgacggtgctggagcctttgccttcgcggggactgccgtttctgcgcactctaagatcgctgcgggcacagctctggaaggaagacggggcggagagagggggcagtggagcacggagaggaccgagtgggaggcgggtggggaggagacggagaaatagaatgaatctattcaaccattcttgaaaacatctccaatccttttcatcttcctgcccaaactttgctgcctctccctgccatttggttatttgaacggatccgtatttggtgttcctactcccttccctcggttcacggagcctctggagggagtcgctgctgcagaaac

SEQ ID NO: 230771 - DNA, 150 bp, Homo sapiens
  chr4:164088008-164088158
  hyper
tcaggtaactacacgcggaggagccaaaagacacgcccccgccatttacgcagcaacgctttccgaagagcgtgtgacgtatgtggcgcgacggcgcgacggcgctcgcgggggcaggatacatgcgtcatatcttcgaaaatcaggatt

SEQ ID NO: 230772 - DNA, 1220 bp, Homo sapiens
  chr4:164252934-164254154
  hyper
gagttccctgattagaactccgatgattaaaagcttcgggtgtctatcggggcgcagcgccacactcgaagcgcccggtactgcggagcgcggctcgattgcagccgagaagcgcggaacccgcaagtgggggtgggcttgcgcgctggggtccgcgccgagggctactcccacctccgccagctcccagcccgacacctgccgcgggacccgtgcgacgctgggcgacgcgccaagcccacccttctccggctcatcccagccagttactccgcgaaaactccggtgcggccagagccagcgcctccagccagctcaagacacgtaaggaaaatgagcgggtgtgggataggcgaactcgggcgccttcccagtgcctcggccttttaaagagaaccggggtaaaggaaaacttggatccccatccagaaattccccgggagcaggtggtgggaaagcccgaactccgcgtagggtaccctctcctttcacccgcgtcgtccccatacccttcggcaggagcccgcgaacggtccggtgatttggagcaacctgcgacctgcctgcactggagaccccaccttggtcccccagagccagtttcggacactcgcatcgtttttcttcccctctcatccttcaccttgtcaatgagagatttcgcagaagtctctggaaaggcataaactcgcaacttaccctctttggaatttgtctttttcgctcctgcttattaaagaaggaagggtgggaatggaagggagcagagtggggaagatccgctggtatttctcctgctcagatcctaaagattgatgaagctaggaagagacgcctccttaaagccgaactccacctcatcccggatcacgtgacggcgtcccgcgagtagcgcctgaagctcccccaaccccacaaacacctcacaaaggtgcacacctcggggaagcattgcctaggaattttggaaagaaaagcaatccaacagaagccacacattattcgacacagacctcccgcgcaggggaaaggaagccctaatccccacagtcctcgactccggggaaggcagggcagtttcccgaggcttgaaaaagtcggtgccactgtgcttttctttgtttgcaggtcagtgccatcttgtggccgaagtcatacccggctggagagctcgagcgccagcccaaaccaggaatcaaagggctcgctgggaaacatga

SEQ ID NO: 230773 - DNA, 1075 bp, Homo sapiens
  chr4:164264781-164265856
  hyper
ggaccggcaaaactcgatttgcccatcaagttaacttggtcggcctgggacccgaggccagggtgaagggacgacatcccggggccctgtggcttctccctagagcgcccaaacagcggcgtaggtctgggacgcccccggcccccggctttggaagaggctggcgcggagcaggcgccttggagcagggtctcgggggtccccggaacagtcacgtgttctcgagacgccgttaaacccccgccccctcttccccaccgccgcctccaggtcctgctcccgctgctgccgccaccgccggggtgcaggagcgatcgcgctgggccgcgctcccgggagcccagggcctgcagcggccggggcgccccgaggtacgggctcccgcccctccctgccaacccctttcgcgccgggtaggcctgcaccgaggggccgtggcgggtccccgcgcgggctgcgagtctgcgcaggtccctgggagcccgcacccgtctctggtgccagggcgttgtcgggggtcccaagagagcggggtggggaaggtgaagggagcgcggctggaaaaatggggattagggtggcggaacaggcacttgtcaggagtgaagagacagcggagagggtactgggctgaattctttcgtgccgagcaggtccctccggttcccaactcacccgggtggagcaggcgcgggccgaacccgggaggagagtgtcggggatccgcgaaggagcctcctggggatggggcgggggatggacaaagcgctgcccccggctggacgcgctctggctgcagcccggctggcatccggagctgggaacagcagcccgcggggtgcccgggtcagggctcaaccctagcgggtctctggcgaggccgggggcgcagcccgcggggcgccactcaggccgtccagctgccgcgcggtccagcgctgacccgagcccgggaggcagctgcgctctaaggtttgcgctcctgtttgcgaggtgtcttcatataacaaatgcgagcaataacaaacatccatagaactcgaattccagaaacgggaattcttttttccaagtt

SEQ ID NO: 230774 - DNA, 64 bp, Homo sapiens
  chr4:164415572-164415636
  hyper
gatgggcaagctccgctcttggggccggaagcgtgtagcgtctccacccgggctccaatcccca

SEQ ID NO: 230775 - DNA, 48 bp, Homo sapiens
  chr4:164415908-164415956
  hyper
tgggtctagagtgcggagctgctccgtggccacgaggacgtcaccatg

SEQ ID NO: 230776 - DNA, 1086 bp, Homo sapiens
  chr4:165304244-165305330
  hyper
ggataaaacttgggcgtctctctgcctcgactggtcactccacttcctggagctccagaaactccctcagcacctggataactgcgacactcacccgtgagcgcaggaccctcctggcgtcttaagtcccagctctcagtcccgctggccgcaggaacacaatgacatctctcgcccaggagggcggttgcagggaaccgaaatcggacacaacagttgcagtgaacccgactcagggttgagcgcatcagcgctaaacccaagacaaaggctgccctgtgtcttccgtactcagcgctctcctttggtaatcggtccccgtccccttcaagcccacactaggagcgcgtgagcctgtgaagtggctgtcatcgactccgcgctttccgaggggtgcggctccgtgactagtaccacgccggtgtaaacagcgcgccgcgcactggggatccgccagaaacggcgcgcgcgcagagcgggcgctgggggccaatagtagcaactaccccaggctgcgggctggagccgcctcctctcaccagagaggcgcctactgggcgagcccgccgcccgcaggttgggtggcagcacccgccgcgaaccccagccacgctccccagtggacccaccaggcaaaggcacctgctgcctgccctccagggctgatgctgtgccaagccccgctcgggatcagggacaagccgcccaggactaccagccggagagaaggggctcccagtgaggctgattgaatgaatgatgtttgcagtcacttaccggcggagggtgaagtagctcaggcggccgccaggctgcgtgcggccggcatcccggggcgcgggcattctcccatcctttgtcagttgcgggtggagcgctcctccccagctagcggacgagcagccgggtggcaggcagcccggctctggctcggctccccagtcctctcccctcctctgctccccctccccttctccgtccccctctctgagccggcattcactgggctcccatgatgtcatccagtggaaatctgccatgctcaaagactggaataatccagcgctcacgcggggaacgcagagc

SEQ ID NO: 230777 - DNA, 79 bp, Homo sapiens
  chr4:166248060-166248139
  hyper
cccgggcactcatcgtccagcacaacaattgcaacaacacctgggcgttctctgcccatgtagcgaggtcaaggtcctg

SEQ ID NO: 230778 - DNA, 704 bp, Homo sapiens; identical to SEQ ID NO: 41076
  chr4:166299999-166300703
  hyper

SEQ ID NO: 230779 - DNA, 423 bp, Homo sapiens
  chr4:166414505-166414928
  hyper
tctaagcaaaacaaatagctcgtatctctacagcgtttctcagctttgatctggtgaagtttcctttgtgggctcaggtcaggcggagtgagtggagcccagggcggctgctgcgttagaaatccgggtgcagcagatggcgccctttcctcagctatctcgccccagagctgggaggtggtgccacaggctgccgattcttcgcggttcttcaggcaaaggaaaaggagctgctggagttaaaataccagtgactttctagtctctgttaagaagtgctaacgagctgcgaatggggagaccgaaggagggagcggaaagaggaggaaggaagaaaactgctgcgggttgtgtgtctaaaaattctcacacagtttttcatttaatccgtataataaatccgcagggattcaaggttaaaca

SEQ ID NO: 230780 - DNA, 1908 bp, Homo sapiens
  chr4:166793756-166795664
  hyper
agcttcccttcctgcgcccacgtgagccatagcgccagcccatcggcaaggtctcagcgtttcctgctgctgcaatctgtaactcgattttggattttttttttaattgcagttctgaggatcttagttcttagcaaaactttgttggttaggagaccaacagtagtctgtttattttcttaccaaaatcgtgaagactcgcacacttttcctccattcctgcgctgctctaaggttaaacagcagcaaaggaaagaaatacacactcgctgtttatttggggggaggggaaatatggatttgcagctaagttatcacgatccttcgctccacccccggtctggcactctcaactgacacgtacatcatctattaattgctgtttgcgtacacagatacataatatattcatttttatctttggtaaaatataaatggaattgtcagcgcgctcctgtctgtttgtttgtctaaggctatcaaaagaagtcaagagaggaggctgtggtccggatcctgaccctgattgtatgaataagtaagcaggatgcaagtgattgggttagatggtgcgaatatttttttttttcaagttaggaagagggtaaaaagacaggctggcggggggaaggcaaacagtgcatccccaaatcctcacacttttgctctcttgcagtcagttgctttgctggcttctgcaggcttttaaggtctcgcggcgtagaaatgcctggcccccacccccttcctcggtctcccctttcaattcagatgtgctgatgtgcagaccggattcatcttctcggagctgcggcggcggctttgggctcaggcggcggcggctcgcgctcggccgcggagtcctggcagcagcggggacgcggcgcgggagtccgagctctggtggcagctgagcccgcggggcgccgctcgccgagccgcggccgcgggaagttcggcagccagaaggacgacctggcaggctgcgagcgccagcgccgccagagccgagtttgcctgcgccctccccgcctccgagtgcagagttccttacctgccctccgcccacccgtgggcccctagccaacttctccctgcgactgggggtaacaggcagtgcttgccctctctactgtcccggcggcatccacatgtttccggacacctgagcaccccggtcccgccgaggagcctccgggtggggagaagagcaccggtgcccctagccccgcacatcagcgcggaccgcggctgcctaacctctgggtcccgtcccctccttttcctccgggggaggaggatggggttgggaacgctttccccgaggatgctcgtgtggctggtggcctcggggattgttttctacggggagctatgggtctgcgctggcctcgattatgattacacttttgatgggaacgaagaggataaaacagagactatagattacaaggacccgtgtaaagccggtaagtggctctccaggttgggacggtggcgcgccgggggccgctgcgctgggtttcccatgggtggcggtgggagctcacctgtttccttccctcccgcgtcagcccctccgccgcccctccttctctccccctccttttccttcccttccccacccgcaagtggcagccgctgcggccccagttgactagagttctgtgccagtgggatccactgccaagctcccatctcccagtttgggaataaggtcctagagtttctgatccctctcccctcccccagcaaaacgaaacaagtcgtaaatatagcttgctgctgtaggttttaaattccaacactcagcgggctttatgcatatggaagggacaccgtcttctttcccctctcccccagggcgcggtttcccagcgcttgttcgagagcgagttggcagggttc

SEQ ID NO: 230781 - DNA, 321 bp, Homo sapiens
  chr4:166795964-166796285
  hyper
ggtccttcccctcccttctacgcctctggcgccgctgccagcctctcgcgcgcgcggggcggcgcttccctctcgccgcctaaggtcggaggcgcacgtgcccggggccgctaccacgtgagcgcagcgcctgagggcgcccagcactggccgcggctcgtgtccgggcttcgggagctcctggttccttgctctattgggctgtggctgaggtgatccgcgctcagtgtggacgcacaagtaacttcgtaaaggttgcatggtggttggggctaacctagcagagcggtttgtaagcggaaggcacgttaggttccatcc

SEQ ID NO: 230782 - DNA, 1139 bp, Homo sapiens
  chr4:168154956-168156095
  hyper
aaccagctgggagggggcagcggaactgtgaacttctccagcagccctgcgccgccgcgtttccctaaacccctctcctcagaaaacggagcccactccccacccacatccggcggccgcggcccccgcctcggagcagcgcgcgcgtgtgcccggggatgtgggtgcgcggaacttacgtctcggaatttgttccactgtccgacttccttgtcatactgagagattgtggtgagccattgtttatcatccagaaaattaccgccgtccgaccgccccccggctgcagccaccgccgcggcagctgcgagagactgactgcaccaagcggctgcacacacacacagtacggctgacaccttgagcatctgggagaggagacacaacggggggtgggggggcatgtcagtgtcaaataaggggtacgaagccaggagcgaccctggaaaacatgcattagcaacgacgagggtagagggaggaggagacaagcagaggcaagcgtgtcccctccccgcaggctttacccccaaaagccgggcactcacacacacgcagacccagaggaggagaggtgggtataaggaagcaagccccagccgcagcagcccgagcgggcacaaaaccgcttcctggcacatcaccttgttgtgagccagcactgtgctcgcagctcctgctggaaatgcagccctgctctgccaactcgctgctttctggagctgctgcacgcgccgccgtctcgagccgtccactcagctccctgcgcccggcgcgctccccccatctccaccctcccttcgcgcgcggatctccagcttactcccctccgttccccctccctccccgacctccgtttttttcctcttccacctcctcctatcccaccttcctctcgctggatcccagctacagttggctccggataggacgcttggctggagccagaggacgaggtagctcctagcctaggaatccttatctgctttgtaacctctcccctccagaagaggttctcatgttcgcgagacagcctgctcattctctgctcctggatttaacacaaagtgtactatctctcgcagttgcctctgctccacaatttccagggttgtcaggcagacgtgagaaacaagatc

SEQ ID NO: 230783 - DNA, 467 bp, Homo sapiens
  chr4:169401169-169401636
  hyper
gaaaaaagggaagcggcttgctgcctgtcaatgtccaggttcgaatggctgtgctcagatgtggtgacccttactttctcctcagcaccccagatccccaggccccctcgggtgcagaggacccgttaaatgcctgagcactctcctctctcacggtggttgtccctcttccctacctctccgcgaagctgccgcccgagcccagtgggcgccccagcttccctcgcccggcgcgcacgaagccaccaggccacctccccgcccggtccatctggatgttgaaggaatcctagaacccccgcgggacagctccgctccagggtccctagcgacacccgacgtcacccgcaatcctcaccccggccgccgaacctgctaggtccaaagagcttcggagctgcacgccccgcggggaggaggtggagcagaggagaccgagcgcagagcctggcgtcggactgggcgct

SEQ ID NO: 230784 - DNA, 82 bp, Homo sapiens; identical to SEQ ID NO: 199673
  chr4:169552543-169552625
  hyper

SEQ ID NO: 230785 - DNA, 115 bp, Homo sapiens; identical to SEQ ID NO: 199674
  chr4:169552932-169553047
  hyper

SEQ ID NO: 230786 - DNA, 1595 bp, Homo sapiens
  chr4:169752831-169754426
  hyper
ctgccctggagtcgcgtttattggacactctttagtctgtaaaggaaaaaaacacaaacaccggaggagaatcatcctaacaagccgacaacatatctatgggcctaaaaaacttaaattctttcccgttattagcacttctcgatcgttccaggaaagcccgatttgtagcttggctgccccaggaaggggcctgcgaccagaaagatgcaaagggcgggacaaggttacgagtgggtgcggggaagcctccctaacctgggggccgcgtcccagagctgcgagccacgcctcctctctcccgcccgccgcgccgccggactcttattttgaagggcggcgggtgaaggctcggagcctcctgagtcacccggcgggcgaggtataaagcccgatacctgccccgcgcccggtccgcggagcccgctgcagctcccgctcgctccggacgcggaatcgggcagcagcgggaggcggcccggagagccgaggtaggcgcggggaatcggccctgaggctggtggaagaaatgtgtgaattaaagggagtgcagcgtgcagggtgggccgcgagtcgggagtgcagggctcgggacagggtgggggcggggaggacaagagactcgtcagcgcactttccacccggccggttccttcccgagccctctccctcccccggcccgcgggagcacagatccctgaaagcggagctccagataggaatgtctgcatcatcttggcagggcccagacgggagaagatgctctgctgccacggacgatccctcccgctctcctaactcttctctgaacacctcgcacccccacggccccccgcccctctcttaatcttggccacgctccctgaggggtcagacctggggtgggagagcagagaaagcggggctggcagagacaggggtgagggccgggagaggcgatgacatcattccctggcagctggcggggagagggtggggacggaggggtccccccgacctgagccgagccctcccttcccaagcccatcctcctttctttgggatggttcaccccacctgggcgccattcaaaggaagtttgcgcgtaactcggggcgtcctttccccggccgggtgctgtgcccggcccgcagtcggtgtttcttctgggcctgggggcggcgtggagccggcggctcagtcccctcagtcccaggccttggcagccgctttgttcacgccgggcgcgggccgaacccgaacctcagctgcagcactggcagcgcgcaccggccacgcgtgggttcccggccacggccgggccaacaagggagggtcccgtgagcagccaggctggccctccccgggcctgggtgagctcccaaagctggagcgcagggctctaggccggccccgccccggggctgggggcttcccgcccgtttgtctcattttaacttttgggggcagctctgtcccgaatggtgagtggtccagactctagaaaggggtttggtcgcttgagcccggattgaggcttgggacctttgctctcttgctggggacggaagggggcgcgctgggcaggagagggggcgtctcggtcgggtctccct

SEQ ID NO: 230787 - DNA, 178 bp, Homo sapiens
  chr4:169931434-169931612
  hyper
agctcgacgtcgccgcgtcgacgtcatcacgcacggactcttccgcgccacacctaacaaatacgccgacgagagctccccgccggcggaagaatggcctggagagggcctcgatgcttgctgggacctgtagtcttgacgcatgagagcaactggcgcaggcgcgctgctcggtggg

SEQ ID NO: 230788 - DNA, 40 bp, Homo sapiens; identical to SEQ ID NO: 199678
  chr4:170192665-170192705
  hyper

SEQ ID NO: 230789 - DNA, 241 bp, Homo sapiens
  chr4:170679068-170679309
  hyper
cgcttccgagcgccgccaaccgcttccgggttcaaaagcctccaagccgaatttcagcgccgcccgggctcgccaatttaggggaaaggctccgcccattccccgccccctgagacctggcaccggacgcgttgaggccccgcccactcccgtgctgggcgcgtgcaaggagcgtcttctgtcagcgtagtctgcatctaggctttctggagcatcttccagggtcgctccagagaccccc

SEQ ID NO: 230790 - DNA, 2016 bp, Homo sapiens
  chr4:170946845-170948861
  hyper
gagagcttcagtagcgaggcggcggctcgcagcacccacagccgcccgcactcctgcggcatcaggacacggcgccctcccgacgcggaacccgcattcacgttctccggagccctggccagcgcacgctcctccctgtccgggtaaactgaggcacagcgatgagagagatccagagcccagcgaaagcccccacggctgttcggcgtccccttcccccacgacacctaggaggctcgccggcagctggcagtggattccgcgctcctcgccctcggaaggttacggttcgagcccaggatgcggcagtccccaaacggccagcccccgccccgcacggatctcgaagcatcctgcgaccccctggagcccgctgcccggaccctgcggcgtctcgcagcgcagcctccgccgcagtctcagccagcccaaacacccgaaagttcggcggccccggcgccgactcggccgccgacccggtgcggggctggctcccacccgtgcccctccgccccggcccgccgggggcccccgctaacctgacaccgccgcgccactcaggtggccgccgtgcacccctcgccatggccagcccgacagcggccgctgcgccgcactctgcgccggacgcccggtagcgcctactgcgggcgagccgcctccgccggcgcctcacagcgttgcgagctgcgccgccggctgccgggagcgcggagcttcccacctacaggagcctgggccggccggggccgagcatgcccagtgcggctcgccgggcggcgcggaggcgcgggtgtagccgccgggttttcgcggcagccgcgggcgggggcagcggggcgggcggtgcggcgcgagccagtcggtgctgcggagcggccccgcggaggagccaccggaggctgtagttgccggggagtcccgcattcagtccgctcagcctctgggccgggcctcggcggcccccagagccccacacccgcaggcccagggcctccgcggcagcgcgggactctcactccgctctctctcccgcccggggcttccaccgcaacttctgtgggcgtcgcatcgcacgcgtgttcaaggacacccaggaaaaggcttcttagggtcccatcctggggcgctaaatgggaaccagtcaacccacccccaagcctaccctgtctccttgcaatcaaatgcaatcacgagcaaaccaccttgcttccgaaagcttctcaggccttcccgggcgactgcgctgtaagtcttaaacgtctcttaaagcaaagtccacagatggaagagtctggaaaaaaacccagcgggccgttccctggtgactttctgagtggtggggttccaggaatttttttttcattttctttaaaaatattatttgtaatttccacgttttttctaatgaaccataagttgattttttaattaaaaagtagagtactctaaaattattaagtacctacagaagtttcgctacacgatcctgcaatgttagtggcttcttctcctccttatctccctttttttttttttttttttaattttaaaagagaacagagactctcaatttctggggcgggaccaggctccttcccccggctttttagtgcccgccctcttggccacaccccactccggcctttttactcccgtaccgccctcttcccggtgggttgctgcgaaaacccggaaaggtggactttccacattgacgctcccggcggctccggcagccagactgggcatgttccgccgccgggtcaggcattgctgtgccaagagaggagctttagcaactctcagtctctctgctcctctctgttcctggcaaactggcaaagtagtgcctctgaccccacgccccgaggtcggacctgcagaagtgggtcaggacccgactgagcatgctccgggcagtgccaggctgccgcacgcggctgcatctggttgcccaaggttgatgtagccgcggtctctcgtcacgacatcgaagctcgggaaacggatgga

SEQ ID NO: 230791 - DNA, 1007 bp, Homo sapiens
  chr4:171010622-171011629
  hyper
atttcatttctgcacgcagagcctggctcaccgcgagcgtgcacaggggtacgcatggatgcaaccaagcggtggcttgctagggaaccctccttagaggctgtgcgaggaatgccccaccccaaaggagagatggtcaccccgtttctcactcatggtccggatgggagaagggtttctggctgcgctcgctgccgtgatgaaccgtgcgtaattcatgtcttctgacagccaagcatcaagcttcttcttcagtggttgaggactagaaaaaccaaagagcctcgtcaagtcctgcctgctaactcctcactctggcaacgccaccgcgagatgtgtccccccgctgcgtctggcttcccgcgcgcggtgcccggagaacgccgccgaaactccccggctggacgctgcgttcggtctcccggtcctaaacgggtctggggctgtgtggcgagcccggcaaagtccacgccgcacgcgctcctgcggccgccagggcccaggccggttttgccccgccgcgggcctcgccgcgccccctcccgccccgcgccgtggcctatggccgcccgcggcgcgcgcctccccgtcccggatcatcgccctcagagcgcagggcgcggggtagcccaggcgcgaggcgcttgcagccccaggccaatgactcttgacctcgccgctgggaatcaccgcaacccggcgtccgcgttggccggcctaggcgccggcccagaggctagcccaggggctgaccgaggggaccggaagtgcccgtgatcctaatcctcgggaaccatctggcggcgacttgggtccactgcagggggctcccgagctgcgcccagccgggagcggccccaccctcgttcccgcgcgctccgctggcctcctctcagtcactgggactgtgcattttgcccgctcagaccatggctatgctaaatacccatctttcgttagtgaaactctgggcactctcctgggaagcatcccggcgaccaagacga

SEQ ID NO: 230792 - DNA, 1452 bp, Homo sapiens
  chr4:172733676-172735128
  hyper
atctaagtccccattccttccggagttgtgagctccagatccaagagtgcccagtgcacggtgctgggcacgctgtcccttggcgaggctgccacaggttcctgagtgtgcggtcaggggcgttggtgcattgatacgttaggcggagggaggagtaccatctgccagagtcttatctcgagtcccacgttttctggccatcgcggaggagtgtgcgaggacaggtagccctcgcagtgacaaggcgcgcggagtgcggtcgtgcaaggcgggggaggagcggggtggccctgccgaatcttaaccggggccccgggtgtttgcagacccaaataaagccgccttgggtctccacggtgtcctccagaagctgctgcctgagaactctgagcctcagctctgtcttgcttcgggatcctcttcctcctccttccccaccccctacctggcctgaacggcggaacgcgcggctcgggggatcccctctccctgggaccggccctgtcccgggtcgcctccacctcccgcagccgccgcgccccggctcgccgcgctcccgccggcaccatggaggaattcctgggacaaccgcctgcagccggcgacttttccccaggaatctctggcctggcgccctttgggtgagatgacggggtgctggcatccctgtcggtcccagattacccggaaaagccctggcaggtaaagagaggacccgcgcaggctgggagctcccactcctcctccagcgtcacgctcgccctccgccgctgcctcgcgtccgggtctgtttatatagcgtctggaggccgggaggcattgcccacccccgccaggcggcccgccctcccctcctgggctccgggctgccgcacgtggcagacaccagcgacgtctccgcggaaggcaggcgccggggagtggggcgcgggcgaccgtgtgcagccgcggcgcatctccgccttccgctcctcctcgcagcgccctcgtccgcttccaagcccagcacagacttcggtttctccgcctccatcccctttacgagaagaggagatcaaaaaatattgccctttaggtgctcgtgatggtcctgtgggttcgttcagttgccagaaaagaatggtaacatgaacagcggagcgtgagagcgtcaccgggggaagggacgagattgatgggcagagcgctcacttctcagaggatcgcattccgaggaccgcgcgaggaagggacgtcgcggcgccaccacttcctggctggactccgctgacatctgtagcctcctttccaccaggttcccggggctcccagccgctgcctgcagaggagcgtgtagacagcgcgcgagggtccggcacttcgtggacctccatccgaaccggagttctgcccggatcccgagtccctggatcccggtggagcccgccggcaagctggctccggagggagttg

SEQ ID NO: 230793 - DNA, 85 bp, Homo sapiens
  chr4:174089734-174089819
  hyper
agtcggagctctgcggtggccgccagaggggagggggccacggggaggagcggagggaagagcccggggaaaggtgtagccgagg

SEQ ID NO: 230794 - DNA, 538 bp, Homo sapiens
  chr4:174090899-174091437
  hyper
agcccctgctgtggcagtgctcgggcgctatccgggggaagaggagcagttcctcttccttggctgcggcagggctgcttgggccggaaaactaacttgtgtcggcgcccggccgccccgcgccggctgccggctagctcaggccgacgccgaggggagcggcggcgcggagctcgcggcggctccgctgggacgcatttgtctgccgcccagggcgcgagtgttagcgctgacattccttggatttggagggtttagtcaggcgcctcggaacattagttacccggagccgcgccgcgcggggaagggaccgcgggcactgcggcttccctgacccggcagcgggcggcgcgcaccggcctcgcccccgaccctgacctgcttccccccggatgaaccgttgcaccacctgcttcctcctccccgctgggacagccaactgggccggctgccagtgggggtaggagagggtatgaggggctcacgaccgccgaggcggcggggctgcaggaggagtcgagtcgctctctctgttgta

SEQ ID NO: 230795 - DNA, 42 bp, Homo sapiens
  chr4:174254798-174254840
  hyper
atgttgacagatccgcgtccacctgacggggccgagggggga

SEQ ID NO: 230796 - DNA, 180 bp, Homo sapiens
  chr4:174291979-174292159
  hyper
tcccatggggccgcgcggcagaaagaaaggggcgggacgggagggggcgcgtcgcgcttgcgcaggtcccggggccggagggaggcggaggcgtagcggtccaactgctgaagtccccatgtgacagtgagcggggtccccgctccaggagacgctcgagtctgcgtcccggccctcagc

SEQ ID NO: 230797 - DNA, 514 bp, Homo sapiens
  chr4:174415375-174415889
  hyper
tcagattcaagatgcggtagattggcaccttaacctcttttggctcttcttcccccgaatcaaaacccactgtaaacaccgcgaagaaccaggaaacttcacggctttaatcatttcctttccccaagctccatgtggcacacaggacattccgttttcctttagggttgccgtcatcctgcgacaggtgcggaagaagaaaaaagcaaatctatgtttccaaagagcggaggaagcagagacaatgtgccaacacggggtgcgctcttcacctttacgctccactcggagcaagcaaggaaatcctccagctctagcaggggttgagggttagcgccacctggctttctaaagaagaacaagaggcaggaggtagatgaggctgaagaggagcccgcgccctcctttcctccttgggcaccaggagggcgagaagaaggacccgggagctcttcgtttcagagcccagggcagccaggctgctggccaccgcgcactgcgaagagacgcaatt

SEQ ID NO: 230798 - DNA, 201 bp, Homo sapiens
  chr4:174429791-174429992
  hyper
tagagaaggcctgccgcccgaatctccccaagtgcaggggagaattacatttccccacctcctacccaacctgccccggccgagttatggacatcgccgcctcattctagacttgaaggcactctgcggccaccaagagaccactccgcatcctaggtcgagcctgtgggagaagcactcggggcccgggaggccgaggtg

SEQ ID NO: 230799 - DNA, 732 bp, Homo sapiens
  chr4:174430341-174431073
  hyper
agggcctacttttgcgaggggcactggagaaagaagagagggttgcgcgcgcgcgtgcgggagcttcggaagctaaatctcactcgcggggaggatgggacgcgtggggactgaaggcggcatctgcctgaataaagccctcgcgcgctctgagcctcccactctgtcctggaggcctgaacctcgcgagtagagcctggcgcttttcctccccgggagcacgacggatagaatgcgcggggtcgagacggtgtcggtagcgggggccgcagcgctttgcaaagccggcctctgcccccggcctccttggagggcggtagcgggacctgcgctcgcagcctctccccagggctgtgcgcttcggcctggcggctgccgggcaaaaacctcatttatttccttccttcccgagtgagctcacttcctccccgcgccgctcccttccgtcggccggaacccgctcctgggccgcgcggctgcagccgggagcgcggactcggggtgtcgggcggtgtccgcgcccctccccaccccagggcccttctcgggggagatatccaggagctgaaagagattcctcaggaggaagtggaaacctctgaaaggagaggaaaccgactcttttgcaagaaaactgagcgccggctggaaggcaaggaagccgaggcggccggggagattcacccacatgcctgttgactcgggcccagtacctgcgtctccttccttctc

SEQ ID NO: 230800 - DNA, 705 bp, Homo sapiens
  chr4:174437902-174438607
  hyper
ggtaaattaccccgcgcgctgacgttacgcagaggcgcaccgggttccgactccaccgcggcgccgagggggccagaggctcccagttcttccccgcatagttcgacaaagccctactttgcttccctgggtctgggatctcaacgtgaagggggccgagagagcggtgataaggtgctagaaaggaaacggcaagaggaaactaaaaaagtggagagaaattttgtgcgccgtagtgcttagcaagctggggaaacgaggagaaaacgagcaaagtctacaggggagggagagagggaggaggcagggaaggagaggaccacgaggctcccggcgcccaggccgccacttgggaggtcccggccccaaagcaggccgggccaaccgtccccccgggaggctcggggctcgggcggggtcacaattacacctcggctccaggcgaggacttaaaaaccaagtggtggggactgcagtctggaagcaaggccctgcggtcatcggaggggggccaggcccgtgcacaggaaccttttacaaggcatgtgggtacaagaaaaaaaatcaaaataaaccactttcatccagcatgggcagtgaaaagaaaagctgccttccagagggggcgagcgggagttttgaaattcattgtgtgttttgcctttatataaggagttttgcgttttttaccgataaccaaagggg

SEQ ID NO: 230801 - DNA, 468 bp, Homo sapiens
  chr4:174438983-174439451
  hyper
gcccttagcctcgccggccccggccctcggaatgcaaaaggcgaaagctccctcctgggcagggccagagcgagagcgagtgaggagctcctcccggacctcgggcctagcttcggaggtatttttagctcctctctctgctccccagaggctcttttgtaagcttaacagaggctcagcaagctgccctcaccccgaagggctgtgggaggaggctgccctagtatcttgaagaaaaaagaaattgcctatccttaagtttaaaacaatattcgctctctctaggctccccttctgttctctcgtttttttcgcccgcaggaacactccaagttccacagttaaagaggaccgggagggcaggaatgggtggggcctggaaatcagctccgaaactgggtgcggcacaccttcctctgcctttctgcctctctcccggccactgctgctccacgggagccagtcttg

SEQ ID NO: 230802 - DNA, 954 bp, Homo sapiens
  chr4:174439741-174440695
  hyper
cttccctggacttccgcagtcccccttctccccattccagaacctgccgagcccctgctgcatctgggacccgccttcaccgtttcccaatcccagcggttagcccctgcgccccctttttggtctccactttgccgttcgaaaatgcctaggttggtggatcgaccctccgcggagcaaagacggatggctggcaggagcaggttcaggagctgggccaaggtattctctgcttccgcctttgtgtccgcccccccgccccctgctccccgcttcccgccagcatctctccttttctgctcaggagtgtttggcccggcggtccaccccggcttcccgagatacgctagagttgcccccacgtcctgtccgccgcgcccctacccaccgggttgccttcggggcccttcggtgctgtgtagtcggcgtggcgctgtgagctaggcgaacaggaacccccaggcccgccacgtctacgctattagcagccaggtagccctgcgggtcgaagatgctcagaggaggagtaaatgcagagaaaaaatagaggaaggaataaaaaaaaaaacaaaacaaaaacacgtaacatacacgcactcaaaaccaactttgggattggactttttcagtttcacacgaagagacttggagtatctggagaaggtttttgaagacgtttaggagggagggtgagttttctgctgagaaactcaatctgccatacagtagcggccccatctgggatctgtcactgctgacagcaccagagggcacagccgtgatcttctgcacagcctgcactccccgaaataccctccttaatcaaaggatgtctgcgcgcctgagctcagctgaccgcgccgggagcaccagggccgttggattccaccccagcccgccccctccccacgcacacagccacggcccctcgcgtcttcgcggcacgttaattaa

SEQ ID NO: 230803 - DNA, 625 bp, Homo sapiens
  chr4:174443429-174444054
  hyper
gattacacccaactcggctgggatggctccgagccgtctgccctgacgtcagcgaggctccggccccgccgcggcaagataggcgagcgcggccgggcgcgggtgcggcactaatcactcccagatgtccctaatagcggagataaagacggacagagcggccgggaataaatttgtaatcagggctctaccatctgatcatcaaagcggcccaaatgccgggagaatttgaagggaatgcgtgtgaggggggtcgcttgggggaagaggtgagggtgcacttcgcgatgggaactggcttcggtagggtagagcagggagaacagggcgagagatctgtaagttcggtgcacgtaagtcggatactcggtgctctttaacctccattagccctcagaccgaagccgtttagcggttccaggctgattggagctgcgcagttgctgtgcgggaagcacgcgttgcgcagcggctgggtggtaaggcggcgcgatgagaactgtccggcccccggaaacgtgggattggtttcctctcccggagttctcccctcccccttctttctaaacatttaaaaaacacgtagtccgtctcccccaacccccattcccggtagacttaatcc

SEQ ID NO: 230804 - DNA, 867 bp, Homo sapiens
  chr4:174448153-174449020
  hyper
gatcccttaccacacgggagtgtcctcttcgtattaaaatatggaatgcttttcttcaaatatccactttttttttggagggggagacggggagcagatgcctcaaagggggtcaaagagaggggaaggaaattgcacataaataaaccggatgattccaaatgcaaggagtcctcagagcggagcgcggacggcttttccggagtcctgggtctgcatctggcgccttggcccctgctcactcgcgctctcctcctcctccttctcctcctcctcactgcttgagctccagggcccagacgtgctgcggccagcccgtccggcctttggttttcttgtcgttgctgctcactgtgcttttcaagatttcgttctggacagaggaaaggcgagggcgagaaaagtggaaagagaaattcagagaggatacctggttccacaccaacccggagcttcctgcgccggaggagacagtgaaccagagaggaaaggatacgatgggggagtcccagcccctgcagagaagctaccaaggttagcgctaccctagccggcggggaggcctcggcgctgcagcgctcaacaaccggatccacaagtttataaacaaccgcccgttttcgagtcgtttatggaggagcggggggccttttctcttactccagatgtaggggcgggagctggagtcggcgctaagtctggtttctctgttttcattagcaatcctagatccacatctaggaaaaatagggcgaaggagcctctgtttcggcctgggcctctcggccagaggctctcggcctccagctcagcagtgcctctcctccaaggcttctgaaatctctggttattcgggaggtcactcga

SEQ ID NO: 230805 - DNA, 632 bp, Homo sapiens
  chr4:174449602-174450234
  hyper
gagttttcaaggtccgtcctaagtactaggggagcagcgataacccggaggtaagatcaccagcgcaaagcatccctaaccttctcctcctcctgctgacaccctcccctcaactctctgcttatgccggaagccatccttacacaacctggtgcaaacaaccttgaagcgggacgcagccaaagaacacgagatgccatttctcagcccaattggaaagaggccgggagcaccagttccctgaccccctcagccccaccgcctgccgccccctggtactgaccagctccttcttcctcttctcctctttcacgtcggtcttcttgatctctgccttgaaggcctccgcctcgccattctggtcgtccttggccagcaggtccatgaggtaggcgatgtagctggtggccaggcgcagggtcttgattttggagagtttggtgtcggcgggtacgttggggatgcactcgcgcagttcggcgaaggcgctgttgatgctctgagtcctgcgccgctccttgcggttggcggtgcctcggcgcttcaccgggcgcggcccccccaggcccgggggcccggcgcccggcggcacccccccgtaatgggagtggtccaggccggcggcgccgctg

SEQ ID NO: 230806 - DNA, 44 bp, Homo sapiens
  chr4:174450594-174450638
  hyper
ctgcagcccgggccccgtccccccgcctggccagccgggcccgc

SEQ ID NO: 230807 - DNA, 110 bp, Homo sapiens
  chr4:174451058-174451168
  hyper
ttgttttaatgaaatttttggttgttgttgttttggtccttaaatgtgattttagctgcgagtaacgtgtcctcgctcctctcgcgctctctcggagggttttcagagag

SEQ ID NO: 230808 - DNA, 135 bp, Homo sapiens
  chr4:174451348-174451483
  hyper
ggattttcccagcaagatctccatgtacagctacatctttagggccgctcgggttaatatatgtcgtcagaggctcctcacgccaatcccggggcggcaggggcggcgcctcgagctctcggcaataaaactttt

SEQ ID NO: 230809 - DNA, 319 bp, Homo sapiens
  chr4:174451765-174452084
  hyper
gctttgtaggtaatcgaggtaagaaaatatacgcaggcagcctcttacaattttatgcaggggcgccgggagcctcgtgacgggcggtgggggcccccacaaaggcgcggctgggagctggcgctctttgccccagcagggacgaggagcggctggagaagggtgtttctttgacccgtttacaggctcgaaacgccggtctcagtggctattgagttacccaccaagttaccccggttagagctgtttggggtggctcacgttattgcggcaaactttggagatgacggctgagtcctccgggcgaacatgtcaagcc

SEQ ID NO: 230810 - DNA, 1278 bp, Homo sapiens
  chr4:174458999-174460277
  hyper
ctctaggcaccccacgattagctgagtgatctagggcaaggacctaggcgtctctaagtcttagtttccccatctgaacaatgtggataatgacacgtacctggggtgggcaggctagagtaaatgggaaaatcaaagcgccagccagagcgggtcgcactgttagttcctgtattttctcctcctgcctctggtttcttccgttccgttctagctgcctgaagacccagcccgacagcgatgcctgtcagcccgcgtcgcccaccagggcagctgctctcccaactcgcatggggggcaccaccccgcctcggtgccctagagctgagcgcagccgcggctccacggggatcgccagggcctcagccctcgcggccggcggcgcgggagtgttgcggggcagggaccagagcgcgatcagagcggccacccccgatttaggtcgccagctttccagtcactgcgatggccactggggcgccccttccatcctggttaaattctcattgtgatccccagccctcttctcggttccccacacccaggaggccggttctccgccgctcaggctgggagaggtcaccgctccgggcagggtggacccccagctccgtctcggaggacctttcgccggaggcgagcaggaaggggttaaccatgagcctcccaccctcacctcccagaccctggtgccgggctaaggcctccgcttccctcctgaggtctcattaggaaaccctcaccgctattttcaacatttcctcaatcaagtgcctttaaatagagctgcacaaacagattggcggcaaaagcgtagatcttgtcacgattgagaccaatccagtatttcagccttgtttgctttgcaattacgggttggcttgtggctacggtgccaccggggcaaatctgcagccgctcgctttctcctctgcgctccgggcgggtggaggaagcgacccgcggagtcactgcagggaggagagggggacgcgcgcggggggaggcggcggagggcggaggagactcgcttgcaccccagggccgcgggcacgcagagctgtgttgaaggacatacttttcaggttcctgacagtcactgagctatacgcaataataaagtgcgtgattcgcgtgtggaaaccagtgtcgtgtccttaccagcttccttttctgtccaccttccctctctcttctacctccgtttcgcttttcttcagtgcatgttagcggtttgctggatttcccttctccctcgctgttcaactgctagcatga

SEQ ID NO: 230811 - DNA, 381 bp, Homo sapiens
  chr4:175132785-175133166
  hyper
cagggaagtgaccaccactacgctctcagctccgcaagtcgctggacagtcaatagcgctcacacggtgtctaccggatctggcacggtcaagacacaggaacagccgtactttcctgcgggtaagaggcttttcttttgtgcatcacgtgcagaagaagccactccgaagtgcaaacacctttctaaagttttcagtgcttcctaaaatgcagacatcgacgccttgctgagttatccgatcctttgatgatcaaataaaattaaggccagctccctgctgtttgatctgtggctcagtttctctaagggctgccgcgggttccgcaaagactcactccagaatccccagctccctcgcgtcagcgaatgtcccgctggt

SEQ ID NO: 230812 - DNA, 1045 bp, Homo sapiens
  chr4:175134967-175136012
  hyper
gggactccggtgttcggttcccgtggccctctccttggctcccggtcaccgtcctcacaccccctggccccagttactgacggaagccatgtgcagctgccataatgtgtataaaagaatctctccctggcgttggtttcttctcttcttggaatgcttttggcagatcctccgcgttttccgggtctcttgggagtctgaacatgcattttcctttatttcagacaggattccgagtgttaactagattgtgccctccccactacctatcctgcccatcttccttctcagccgtcgggtgcgggaggaacgcccttgccaacctcagcctttttgatcttccgcgggcagagactcatcagagccaggaggactgtaactacccccggggcgtgtaccgccgaagcctgaagaggctggttgggccaaaatagcagtcgctgcaggcaccagtttcagcccgtcacctgagtgccggttcctgtgggcgcgccagtctcgcaggcagcgcgcccaagctcgcggatcgccctctcacatttttagaagccaagaaaagcacttttgaaattcactccttcgaccgtgggcagaggagcaggtgggcgccgagccctagctgagggtggggggtcgcggaggagaggaactggaaaatgggaaataggtgtctgctgacctagagttcttcggctttgattttaagcggcagtgaggctgggtggtttcgcccccctcatcccctcggtcgctggcgcagattgatcctggagctagttacgggtgttaaactggtacgcgggtggggcaattcattaggcaagaaatggattagttgtttattatctataaacattccaaccacagcaaccaatcataaaaccgcggaagggcctgtaaagtaaagcagcagcgaagcctccatgtgggcagctcaggcttagcgattgttcccgggtgataaagggtcgattagggaagtagagctaggaaggtgggggcgggggagcgggcgataattaagcgagtcgtcaggaaattgctt

SEQ ID NO: 230813 - DNA, 90 bp, Homo sapiens
  chr4:175137697-175137787
  hyper
attgcctgaccactcgtctctctccagcgtttctctaagtccgagcccccatctctcccagtcctcccggctcagcgaggaattcctttt

SEQ ID NO: 230814 - DNA, 1058 bp, Homo sapiens
  chr4:175138122-175139180
  hyper
gctttgtgtgacctcgtgcaatgtcactttaacctggatagcgtcaggtttcctcacgcataaaataagatcagatgatgccctcttggattctttgactgcaggacaatcattaggccatagtgaacagatgcgcttggttgccagaccgcgccctttgcgggtctatcaaaagggcaagcgcatattctggagctgtctcggagacttggacagaaagattcgaggcaaatattctaggctgggaaatttcgcgccgagcccccccctcagttagcctgtctaaaggctggtgtggccagagcgaggcagagagctctgcacctactgtcggggctgacaatgatttatgcgcttgtgacccacgtagaccataaacctagtttgctagacgtacagggaactgcgccgcagttaatgcagaggacttatcctctgacctgcaatgtctccccacctggtgctctacagctccagagagcagggatttcagcttttcctccctcattggatccaatttcaatcccctcggttaactgaaagtgtgttgacttccacccagccggcaggaccctaagggcgcctggagcagtctggtgcgggtcctggctgcagcatgcccagcagagctccgggtgcaggaggctgcaaagccaccgccgcgtccaggccccttgagcggaggtgggaacgatccgccttagagttcaaggtgaattgctgtgacagtggcgggtggaggaggggagttcgagccgttcgcctcggggaagaattatccccgatcatttatttttagatctgaattcctccagaacccagcagaggctgtggccagagccccagggccaggcaagcggccaagctgcgctctcgataaaggagccagaatggttccatctggttacaaacatatctttttattaaaaagcaatcagatcctgaagcgcttcccttgcggtttaccgctctccgcaggctgcttctccgaagccagcggtggtagcgcccactcggttgagcccacgcctccgccaggcagcgcctccgccaggcag

SEQ ID NO: 230815 - DNA, 463 bp, Homo sapiens
  chr4:175139429-175139892
  hyper
tttacaattcacgacgttactaccaactttgccattgagtggttcctctccctgcccgaattcctggccatcttcgttccagagagcgatgcaatcatggccttgaaaccgaacggggcgtaacgtgccattcctctccagctcccgagccccactcccacccttgccgttgaaactgtgaaaaagccgccaaagtttgggcacccagcctggcagtcggaagacagtgagataaagaatgcgatagtaagtccttaagtgcttcctagagataaggtcccggaatcctggaaaaattcagtctggcctccctacttcagcaagtcgcctcctgcttctgtcagccccctccccacacacacctggagggagaggcggtggccacaggggtagctggggcagaccctccgctcctccactcccggtggccaggggtcctaaggccacgcggctggctttcttc

SEQ ID NO: 230816 - DNA, 205 bp, Homo sapiens
  chr4:175204404-175204609
  hyper
actcaagatgcttcgcactgtcattggtcgcaaactcttgctggtcggccagtttcggccaactggcaagcactggttgtctttattttcgagaaaagtgaaggtgaacagggaaaagagacaagagatctaaaatatctaggttgactcctgtacctgagcgacctgcgatctccaccgccgccgcgacgaattggcctctggg

SEQ ID NO: 230817 - DNA, 639 bp, Homo sapiens
  chr4:175204865-175205504
  hyper
tttctgttgtttacgattcgctatagattccttgtttctcacttcgtagcacgagccactctgaccatcaagatcagaaaaacttctcagctgcaagttagaagtggactggccattgaggaggctctcagcggagtcgctcttcacaggagtcttgaacgcggtgtggaatcggcagcgaggaatcctggagcacagagaagctcccagctttgaaggtcttgcggtggtgcgtggcgggcaggaacccacaattccaaatacaaacggtcggcgcgagaagcgcttctgggcgcaggcgcctggctgtagcgactggttgcgggaggctggactctggtgactgtgtatggttgcatatgctccgttttcctctccctgtcgtgctgggcctttgaaaccggcttctttgctggtggctgcttggtgagccccgaggagacggcaaggctgcgcctggtattgggcggaggtcgcctctctccgccgtccttacagagaccccgggcggagacgaatgaccagatccgccttttcattcttttaaatcaaatggcgggaggggagccttgcttatatacccaactagtatatgcttttagtcacaacgaagtgggaagtatcgtggtagctcatcct

SEQ ID NO: 230818 - DNA, 114 bp, Homo sapiens
  chr4:175444082-175444196
  hyper
tgagttcccatctcgtaatcagtggggttgagggtgacggggagcagaagtaactaatatcattgtgttttcttagttacattttggacaaatttttacggatactggagatga

SEQ ID NO: 230819 - DNA, 905 bp, Homo sapiens
  chr4:175749925-175750830
  hyper
ccgaaactaatgtccgaaagtgtctcacgtgggccatgatacggagagatattcacgatcctgaaaatagtcttatccaaggcatggggaaccagaaagacagaatgaaaatgtacaatctaaccccgcatggtgttggtgtagactgatgcttgggaagcttcagcaccttagacagctccccgcagtatgcggaccccttctcagcattgagcagaagtggagagtcacagtgttataaatgtgcaggtgatttttacagtgaaattacaaaaatgagtgagatgaaatgtctgaagtgcctaggtgctgggcaacagttctctaaagctccagcagcaaaggaagaatgttcgttcttccctgactgagacccaggattggaggaagaagagcagcaacagccggaaagaggacgcctctccacctgctccaagcgccgcccgccggaatccagctctccaccttgggttaaaacccgagacccggagcgcggcaaagggaagcgggggtggggccggacaacccggtcctgtcgaccaatcacgaccgcacagcgggacggagtgacaggccacttacgacggtaggcggggcttagcgcttcaccctttaacaaaacccaaacaaaccaaacggcgactggagcgaggtgggcggaaaaagccacctgggaaagtcagcggttttgtggattaggtagtgtaaccccgcaggagggaccctttagtattcccttccgggaaaaggcacactttaggtcttctcggatgtgacactgtctgttacactctacaccgaaatacaagagtcagcagtaaacccagaccctggcggagggctggggaagagaagacaatgtggtgcgtgaacgcccgtggaacggaagaaccagctgcttctag

SEQ ID NO: 230820 - DNA, 1118 bp, Homo sapiens
  chr4:176922578-176923696
  hyper
tctccctcgctcttcgaggtgactcgtgggaccctgcgtcctagtgctgggtgtgaatcggctatttcacacccagttcttcctcccctccgccacacgcagtcacattcctggagctattccaagctgcctccgctaagcaccgaataagcggaccctgcctggaaacttgagcgaagctgaactgcgccgaactccaccgtccagtgacccgagccagtgtggacgcccttttaatcacgctgtttacccaggtggaatttaggaagaatcagccttcagcctcaacctcaaaccttttgtgcaaatgggcacttcgtttggaaagggactagaaattgtccccagtctggccctgcaccagcaccttcctctgctcaaacctgtacaaagtggaagttttaggaagtttccatttctcgtgccccgtttcaacttgctccccaaagagaacatgaaaacgtgggaactcgggaggacagagatctccctgtaatcgcctcgctattcggatcctgggtctcttagtctttctttatttcccaaataccgcccccagcacggtagaccggacccccaggcttgggtcctggggccggcgcagaggatcagcgcccaagcgcagccccccaccctcccgacccactgtaaacagtcgggcaccctccctcgcctccaggtgccaccccatcgccatcgcctctctcccagaaaaaaaagtccggagacaagagggcggggggcgggggacgccaggcgcggggggaacagagctgggaaggacgcagtctgaggccgaggaacattcattttctttctataatgcccattcccgaggccgagcctttgggcgaggtgtacgcgcccgcccgcgcactcacccatggcccgaggtcctgcttctctgcagtccccagaggagagcgagtgaccagacgctgcgcggggccaagttctccaagccgcgctgaggctcctcgcgccctggcaagtgacagcctcgcccctcccagcggagacaactcgcagggcgcctggcgactctgcgggcgcacagacccctccctctttccacctgcctcctctgcgagaagcccgttttcctccccttcactgtg

SEQ ID NO: 230821 - DNA, 651 bp, Homo sapiens
  chr4:176986729-176987380
  hyper
tagaaagtgcagactcgctataaaatgtgttaggtggtgagaacgctgatggttcaccgttttcctccactttcagcctcagtgcaaaccctctgcccaaagcctcgctccagtacggaggagctgcgccttcaacacactttctctgttgccaggtaaccacttctccctcagcctagtctccaagggtcacgagccacttccgcctccccctctcgggcgctccaatcagcgacctgtgtagctgtcacgtgggcctctggggcagaccctggagatcgggctcgcggcgccttccatcgtggctccgcgctggggcttgcggagcacgcttcccgcccctcggagcccgcgggcccggccgccccgcccccgggcgccctgagcgagcaggcggggagggcggggagggtccgcgcgttggtggtgctcgcctcgcagctgcgcccgccggcttcagcaccttccgctgtccgccgctgcagccgcctcctcctccaggtaagaagccggtggggccgcagagataccaaggcaagctcaggattgatgtgggtgatgctggaactgtcgcggcgtcatgcgagaggggctctgacctccctgtgatcgcggaccagggtaatgtacgtcctgcagggctttgcacac

SEQ ID NO: 230822 - DNA, 517 bp, Homo sapiens
  chr4:177116426-177116943
  hyper
ggcctggcaggcggcggaaagcaggcggggcgcccaccgggggggcctaggactggcttactcaagcacctgttgatgttcctggggaagaagctgagatccagaccctgaagccaacgcagaacggaacgagacaagcgggagctcttcggcgcatgcggatagaccagacacttcttaggcctccctcggatgggagctgctagctgtggcgaaagtgacggtgacttgtctagggctgccgcagtctgtgtcaaataccctttttcctggccggcggcagccatgacgctttctgggttgctgcggcaacagcagaaggcggggctgggccttattgctggcggcgcggtctcgtggggcggggcggagtcttatggggcgagacctcagcgcctgcgcaagcgccgcagcagccgcccgtacttccgctttactcagattttggaccgcggggccgggtatcgagggaggcaaagctggggtcccagtggtgtggctgcggtctggggagcgc

SEQ ID NO: 230823 - DNA, 98 bp, Homo sapiens
  chr4:177241206-177241304
  hyper
gactcgtgggagacgatcgcgatgaacacggtgctgtcgcgggcgaactcactgttcgccttctcgctgagcgtgatggcggcgctcaccttcggctg

SEQ ID NO: 230824 - DNA, 1228 bp, Homo sapiens
  chr4:177713159-177714387
  hyper
aagatttttctccaaagcagcgtgcactgagctcagtaactttggatcccacgtacacaagcttaaagcacacacactttcccccgcgcaggttctcgggtccgccgcagaccctaacgcaaactctcgggttctccgcaaaccctaacgcagacctaccgtggcctcgcccgcgtcgggctccgcgtccgagaggtcgagtccggactcgaaggcggcggcggcggcgggcgcctcgcgaggacccgggagcagcgcagcggcgagcagagaacacgccacagagaagaagcccagcaagtgcatggtggaaggaccgggggtgggggaccggtccgctggcgggggcaggggtgggggcgcgggcgcccctgcgaggccgcgggcccctcctggtccctctcccccgggctcctcccggcgaccccccctgggcgagccggaggcggcgggagcgggtccggggctccgcgttcccaactttgcagggcgccctcccagccagtgccggggaaaggcggcgggtgtcaggtaaaagcctcacaggaaaccggacatccgagctccccgcattcggagcccgcgaggtgaagcgagggcgagggaggacgccgccgcggtccgcgtcggtgtagctttttggagaggcggggcgggggacaccagaacaccccgcgatgttcagcccctccaaacccgccagagccctcgtccccctcctccctccccttccccgaagtgagaggagccgggccgcgggcgctgcggcgggggcgctggcggcggtgccgggggcgggaggagggcggcggggcggctggcggcggcggggcccgggagcgccgcggcgcaggatcctccagagcgcgccgggctgagcggcggcggcggcggcggcgggcgcaggggcagggcatgactgacgcgccctctgcctgcgcttatgtgagagaaagcggccgagggagggagcgtgccgagcccgggctgccctcccctctcactctccctcggaagccgtctccctggagctccccgtttccctcgcctcctccccggcggccccacctcccccggcccccctctggatctctccctccccgcccctgtcccctgcggggagcgggcggccggaggggcaagttcagtcccggggctggcggttggcgggaccggctttagaggtgatgcgaccaccctggaccacgtgcagcggggagaaactggg

SEQ ID NO: 230825 - DNA, 168 bp, Homo sapiens; identical to SEQ ID NO: 199696
  chr4:178230844-178231012
  hyper

SEQ ID NO: 230826 - DNA, 236 bp, Homo sapiens
  chr4:178363508-178363744
  hyper
caagttcgacttccgcgccatccctgaccaccgaagagaccagcgcgagaaaagtcccggcagccagcgatcgccgaacaattaatccccagtgccccgcccgcctggcgcccacgcccgctctctcgggggttcgctcaggcgtccctcaactctcgcgagacgaggcgtccctgggcccgcgggagagttgtgtcacggggcactgagctgttccctgcgctaaggtgcttctt

SEQ ID NO: 230827 - DNA, 126 bp, Homo sapiens
  chr4:178363969-178364095
  hyper
ggggatcccaggcctcggaggtctgcaatagttatgagtgtaggtgaagcgtgtttgcttaggaccggattgattttagattttttttccattcatagcgtccgtcattttcgcaccacagctttt

SEQ ID NO: 230828 - DNA, 2054 bp, Homo sapiens
  chr4:180978997-180981051
  hyper
gccaaaacaggtttacctaacgggaagcctggaagggctggcgttggagaagccgctcggaagcggggcaggtagcagagagccgcccgccggtctccgggtctacgcccagggctctttccagcccggcctttgggtaactggtgtgggggagggcggccggctttcaggtcgcctctcccgcaggtttgggagcccggtaggccgtgactgaaagaccgtagcaacagcggtcaattgccgttttagagctcattttggggcgaatggtagcagcagagccactgccgccctggctcttgtaggtgggtctggagtgtcacgtaggcaccccaactcgcgccgggggccgtggtccgcagactcccacttcattgccccggaggcctgagcccgccccgcccggctgtggctgcacctttcccgagagtcggggcagcggcggctcgaaagtggaggcagcctaaccgcgtagcgctgaaaccaccattcacaaatgcaaacccctgtcttctgtggataaacggtggcggcgcgcgtccgagcgtccccgaggggctgtggggagcccccggggagagcaggaaaggaagcggggtggcggtggctaggaagcgactgagccttctcgcccggccggcggaagagggagccgggtcccggcgcgccgagccagccgcccctcgcgcagttcctcggccgcggcgcggggttcgccccgcttctccccggcagcagccggctgggtgcccccggcacagcacagtgcggcaggcggcagcgtcctcccctcgcctcccccacattccctcacctcagccaaggcggcagccccggcgtccccgcccgcccggccccgcgcccccgcccggagcgcccccacccgttgcgcccccgccgggtcccgccgcgcagccccgccacgctgcagctggagcgaccgccgcggccggccccgcagaccggggaggaggaggaggaggggaagccggagagggaggcgcggggaggagggatggagccgggaggaggaaataaataaataaaacaatcacctccgcgccaataagagcgagggagagagcaagacgcgaccagagagccaccggggcccgctcgcgcgcctctgagaggctgtccgcgcgcgcgcgtgtgtgcgtgagtgtggatttgccgggactggagctggaaagttcaaactaaacgtgttgctctcgccgagtgccgaggccgcggcggaggctgcccaacttccccgggccaagtgagtggcgttgcccagcgcctttggcgaggcggcggccgctcggccctgcgcccggccgcggcggcggcggctccgctcgccccgggagggagcccgcggccagggctggactctcgccccgccacctccaccgactctctcctcagcctccgcgcctggcaccgcagcaaggtacgtggcgcttcctggcgcggcttcttccctagcacaccccgcgcggatttttggctgcctagattcttccccttcccggagtggtcatcatttgtcaaactttacctccacctcgcacatgcgggcggccgctgcagccgccctccctggcggcatgggctccgctcgctgatgggaaccgagaggagggtgggggggaggatctgctggcagcggtggttctcatctggattaagatcgtatttcggaataactcgcaggtcttaccttccgggggtgtccttcattatgatgttccctgtgatgctggtaatggttttccttgctccttctgcacggaaggacgtacaagtttgcaggagaaggtacatgaaaagcaggtgaagtttgcagccacttgactccaagagaggagtaaccctttctttgcagtagccgctatggttttgaagcagcggcggcggcggcagcggtgacagcggtgacagcagcctggccggtggcggcagctgcacgttgtcccgtctgtgactggaagaaggaggaaaagtggggctgcctcgtcggagagcgcaactctggagctgcctgcaaagacgctgcgggggaaaat

SEQ ID NO: 230829 - DNA, 3169 bp, Homo sapiens
  chr4:183063455-183066624
  hyper
agccgggtcgggttcgcttactaccaagacttctctacttaacgcgctgcgctcgggcacttagcaacttcgggaacacgggctgtgggtctgggcacaccacctcgagtttagggattctcctcacttctagcccaaactttggataaactaacataaaggttcaggctttcctaggaggcgtcgtccttgttctcccagtgctcgatctgtttctggttctgcacggtagttaaaaatgcaagtggatttcctaacggccgagtacaggtacaggtggaggtcggcggaatcctctgctctgaagctgaaagtggagggtggcgcgaggcggctggcgcgacgaggctgagagcgcaccagtctccgccacgcttccaaggacaggttggcgacggccggggcaggcctggtcgcgggctcctagccctccacgggcagactgctggtcccaggagagggcggggagatgctcgggcgcgcaccagggagccgcactcactcggcagccccaagcacgcacgccccacctctgccgccgccccgtcccggacccgaaaggagcctgaaggatcccgccgaccacccagccagagagcggttcggctcaggtcgcccattcggagctacaaaactctggaacctccagcagtttcggaagctccgggggagggctttcctgcagacagggggcgggagctagggagccgggagccagcgctgcggtgggaacttcagtgagtagaaagtggccagtgtcttgggaggagcagcaaactttttttttccctcccacagcaaacaaaatcgaggcagggacagtgtccggccgctaatctgaggggagaatggagaggaaagaagagtagtaaaagtggggagtggagccttcggaggactcccgggtccgcccctggccaggtgatgcggggcggaggcctaggtgcttgaacctggggggcagacaattgttctgctgcagtgcccaccaggggctggtaaggaagtctgagtgtttactgcctcccttccctgtccaaaggtcatttgcgcttttcggtctcggacgaaagaacactgtggaaaggaaggcgcgggtcattttcagaggctctgcaaaggacgggccgcctaccgggggtggaaatccttaattacacccttctgcctcggaatccgtcttcccggcagtgtcttgcactgccacctcctcgggtgactcagctgacctgaaatgcccaccctacggaagatcaagaaaagtagttttctaagaaggttagaggtttgattacacagagaagtgtttccacttaagtccaaagcaattacccgccccctcccccagggccgcctccccgccacccgcagcagaaaaggacagacccccacgcacgtacccccattttgttggtgcgtgtgaatttcaaatggcgcagtaagttcattagtgttttcaatcggcggcgggcagacccctcatcagagccgaaagccggcaagagccattcatcagcgtgaagtgttattcacggatgacccctaaatcacggcgagagtagtaaaggcactgattggtcacagcatgggagcctcggtgctttcccgaacccgacgcggccgggaggagggaaggagggaggggcggcgaacgtggttcagtccggcaaatcccatttgacagaaaaaggcagtaaacggggaatctctttttttgaataaagaagaagaagaaataaagtacctgtcatcttgacaagtggcggagcggaggagtcaaggattataaatgatcacagccaggtccagctcgccccgtgattgggctctcccgcgatctgcaccgggggaagcgcatggtaggctcctctcctctcctcctctccctcgcacactcccgcacacacacacacacacacacacacggacacgtgtacgcgcccgggctcgggcacactcggcccggcgcgtcccccgccgcacaattacggtcctggatgccgctccctggccgggcgtcccgcgggcctcctcacctggcccttctcgccttcctcctccctcgcctccccggtcctcccgctcgcgggctgaaccccgaaaactccggcccggcctggtccgccgccttggaggaggctggaggggccggcgggcggggagagggggagcgcgggggagagaaagaaagtgaactcattggcgcgcgggcgccctcccctcccgcgtccccgggccgcgcggccgggggcgggcagggaaggaagttgtaacactcgcgccccctccccgcccccgccccgccggcgcccgctccccgctccctcggcggggcccccctcccccgcgcccggctcctttgaatttggcccggcgcggtgtgcgcgcggctcgggcggacgcggcggctgctgccggggagcgagccggcggcgcgggcgagccgagcgcggtaagtgcggcgccgccgccggcgcgccctccttcctttatggggtcctagtgccgggccgcggcgccgggagctggcgggcgcgagctgggacggcgcgtggccccgggaggcggcggacgcggggacatcttctcagcgcgcggattctctccacggtccggcctccccgtccccgccccgccctcgcgccagccacctccggccgccggctcaggtgggaacttcgccggcgcctctcgcccggggagccaggcgccgcgcccccgtactggggagccccggggtccctgaggaaggcagtccggaggctgggcgcccagtgggggcggggaggggagcccgccaggtcctcttcggcccccgatgtgtggcgaggccccgcgtcttctgcgggggcgtcttaacaggatcctggggggcttccagcgagcggaaagccccgggatgtcaccgctttccggggcaggcaggggacagaaggcttctgcagcgatcagggagccaagttgaaaaggagtgaaggagggagagtgcggggcgaggggtagcgtggggagtggtggatcacggctgaaacttgatcgggaaactctggatggggttggaaacacacacaaaatatcctgagctgggcgtttcaaaaattacgaatttatgagcctgcaactgagattctaagtccctctcgtgttttacaaccgattacaaagagct

SEQ ID NO: 230830 - DNA, 1498 bp, Homo sapiens
  chr4:183369220-183370718
  hyper
gtatatcatggagagtggctcgggccacttgcacacatgccttcagcccctggtaccgtcttctctccccgggtcgcgacactgactcgtcaacgttaatgggggtccgcgactgctgcggggacgagggcgcagagcagcccccgccacgggccggtccacgcaggggccgagaaagtggcggagaggcggtggccgaggcccaggggcgagcgcgggctgagctggtccctgctgcgttcacgagcgacacccaccccttcgctgcggacgccccgcgggcgccaggctgggggccctgcgaccgacccctcccgcccccgaggtaccgccgggcccgcctggcaggcagcgcgtcccgcgagctggagggccgagtttcgcggggccgtggggcgtgtgggtgaaggcgacacctcggatgcgggacgcatgaatggtggcagagcaggggtcgggatccgttcatgggttgggagagagatgcttttgtgagcacgggaaagtagcgctgccggagaacagctctgaggcgggatcaaaagccgccggcgaagccccgccgaggaacacggccgctgcccggggcggctcgcgagcgtgcgtgtgtggaggggaggatgccgccccgcggggtcttcggagggtgccgggagcgggttctcagtgcagttcccccgtcttcgctgggggcacggctgctcacaggccccggcccgcgtgtgtggagcggggcgagggggtgaggcgagggggtgaggcggcggccgagccggggcgctgggcgcggggctggcgggaggcggcggtggcggcccggcgcgaaggggttaagcggcgcaccgccccctcggcggccgggtgtaaacagaggagcctcagcctatcatgtctggccgccgcgcgcagcccgagcccggagccaggcgctgtaacacgatacgctccagacccaggcaacttggcagcgctgggctcggttcctcacggccacagcgagggcgcgccgcggcaaggtgggtgagcggcggcggcggcggcggcctggggcgggctggcggagcgcggctcccggtgaggctccccgcgcggcagggtcgctcgctcgctccggggaccgcggcggtggcggtggcggtggtggcggcggcggcggcggcggctccgctcttctcccttgtggtgtcggaatgggaggaggctcggcgcgggtttgaatcggtgcggaggcaacattcgcatctgagatgaggtggctttttaacccctgagggaccacatttaaggatttcgaagagatggaggctgaactttctcgatgactcttcgtcacccggagtggtgcaggtagccgcggggagaatggagtcttttgttcccggtatttttaattagatggattttttttttatgagtagtgtactgtcctaatccgtgaggcaaagctgcccttttgcctgcattcggtgacttttacgaattcgttgggagctagtct

SEQ ID NO: 230831 - DNA, 313 bp, Homo sapiens
  chr4:183727529-183727842
  hyper
cccctggggttcctgggactcggcttctgcggacatggaaaagccgtcccaacatccggcggccccgtgggcaggggtcctgggacgccccctcctgcatccccgggcgggccctgcaggggatggcggcgatttcaggaagggctccggcgccccctagtgacgcgcggctgtggtagggaaagtcctgcacgccaaaagggcagttcccgggccagaaaccgaggtgaaaccgaagagaaggcgccgccgctcgccgctcgccactctccaccccaaccgcggcggggccggctctctgaccctctcttcc

SEQ ID NO: 230832 - DNA, 285 bp, Homo sapiens
  chr4:183839056-183839341
  hyper
gtcgcagcgtccccgtggggacccttggccggtggctgggtcacagtttcacacactggatggggcagggaactgggtccggcgggggcgctgtgcctcgaggctcagtgcctcgaagctagatttgcatttggctgcgcctgacaggctttcagtttctgctcaaattgtgcggaagggcctgaggtgtttgctaaagcctgccgcgccctgctcgacccgtatcaccgcacaggcaccccacctgcatgttacctcctggtaatgctcgcccacttatatagt

SEQ ID NO: 230833 - DNA, 81 bp, Homo sapiens
  chr4:184019261-184019342
  hyper
tggcgtccaggccccgccagcgctgcacccggcattgtcccgcctggggcaggcgtccggtccctcggcagtgcgggccag

SEQ ID NO: 230834 - DNA, 355 bp, Homo sapiens
  chr4:184020962-184021317
  hyper
ttcccgacgcccctccggggacccggccccgaggcaaggctggagtcgctgccccgggccgacgccgcgcgccaggctaacggacccgaggggccacctgagccctgttaggaacttccctaggcttcgaggtgcccacgtggaggctgcaggacaccttcggcctctgggcggcgggggtgggctagggcctcactgccagttggggaacgagccctccgggccacctgtggcatccctcaggccgtccttggcgcgggagcctgggctgcgagctcttggcgggggcgcccagactggccggaggtcccgagctgggaaggggctcccgccccccgccgggccctgctagtgg

SEQ ID NO: 230835 - DNA, 118 bp, Homo sapiens
  chr4:184328493-184328611
  hyper
tttgtcttcagaaggcgcttgtcctgccaaagcaaagcaccgtgctttacagctactggaagagcagtcctgagaaacaaagccccgattttttatagccaccggggaaaccagagcc

SEQ ID NO: 230836 - DNA, 36 bp, Homo sapiens
  chr4:184365599-184365635
  hyper
gtggggcgggagacgcccgacgcccgcccacctcac

SEQ ID NO: 230837 - DNA, 50 bp, Homo sapiens
  chr4:184580352-184580402
  hyper
acgcttggaggagcggcgtaaagttccgggacagcgattggtgtagagcg

SEQ ID NO: 230838 - DNA, 1745 bp, Homo sapiens
  chr4:184718201-184719946
  hyper
attaaccagtcagcgaatccacttgttccagcgagaggtgggaggtgggggcaggggtggagcgtggggaggagcgacactcgccgctccggaatccgtgccttccaagtgtcgccgttgcgtcccccgcaacccccgctttctgatctccctcgaggcccaacacccaaaggctcacccctaggccatccgcgctccccgaccacctccctcataggactccttgggattcctcaggccgcgtccagccgagggggttcccgggcgcggtgcgcactgcccgccccctcactgcctcctcccgcgtctccgcccccgcggggccgctgggcgcccggggaggcgagggtgccgaggccggaaaatgagcgctgcccgaagggtggcccggagctgcaggtaacgcggtccagagctcaggccggagcgggccccgcacaccgtcccttccccgcagcgacccgcgggctgcgcccagggactgcgccgggcgcccgggctgcagggacgcgggcgcgggggaggcgcggccagccctgccctgggggacggtcgcgctccccgctggtcttgcagccacgtcccggcggctgttcctgggagcggcgggaggcggcctcggtgagccaggtcggcgcggcagatgcctgggaagatggagaagtttctgcagatcgcgcctcactccctggccatcgtcctgggcccggcagaggcgccggcgggggaaaggccaggggcagcccggcccgcgcccccggcccagccccgccagctcgcccggcaccacatcggctacgagatcttcgccgacttcaaagccgagaacatgcagcacttctggaacaagaaggtcacggccgcggtggccgagaccttcttcctgggctggatcgacgagcaggtcctgctgatccagggcaaggaggaacatctggaggcgctgcgcgaaggctggacgcgccgggccctgcggccgccctcgggcttccacatccgctgcctgggtgagtgcgaccgccgcgcgcccgtcccgtcccttcccaccggatcgcgtccgtgccgtgcggtcgcgggtgccccgccctgccccagcccgccgcgggcaccgccgaggctcccctgggtgcccgcgtccctgccgggggaggagccgggggccctctgcgagcgtgggattggggaacttcctggcaccgaaaggagggagccgtcccattcccggtgcgccgcccccgcctgcccgcgggagcctccccggtggcgggcggtgcctgaggccggccaggtgggcgccgcggctcggcgggcggctcggagggcgcggcgctcggggcgcgtgagtgtccccctcccggcactgctccgcggctggagtgcgcgggccgggcggaggtgggcggggaggattccggggctcgggtcgcgcggggctcccagctggagcggcggctcaggtgcgcccgggacgcccttccctgggcggcgactgcgggggacgcgccgggaagctagggttgaggctgagtgttgcgcgcacgcatttctcaacgaggcaaggctgcagagttcgtcttaaatgtctcacctgcagcacatctctcaagtcgttttgtgtgtctgagggaaggaagagacacaaagaggccggaggaaaaaaaatctgatcctcaacaaaagagagcaaaacgtaaagaggggcagagtcgcccagaggtgaaggtcgccgccgcgtttccagtgct

SEQ ID NO: 230839 - DNA, 1999 bp, Homo sapiens
  chr4:184826163-184828162
  hyper
caccaacatgtcaaatgcagcgctgaaaaaggaaatcgggcttatttttgtcgttgtttactgtaccaaagcatttttgaaaacccaaatcgaggagataaccgtttttgaatgaacggcagtgcaaagcgtggtcggggttagcagcaacgtggctgggcgcctttaactcggcgtgacctccgggtcccaggcccgcgtcccgggcccagcgcccaggcccgggcggcgcattggcccctcctcccctcgcgcgccgcgcgcattgttgtcctttagcgattggttgttggaccagaaacagctgtgcagagccgtgccatctaaagagctgtggacctgaatgcagcgtagcgggctggcggtgacttacaccgggactccagagggagagaggaagcgctgcaggccacttgcattgcgtcttccaggctgcgtggacccggcgccccggcgtgtgcggttgtgggggagctcgccgtggcctcccctccctctggctttagcttcctttggggttggcgcaggtgggccaggcagcgcaccgcagatctccccgttcccacgaaggctggctcgctgtctctctccgagcgggagggaccatcctaaaaatatgtaaatatccaagcgctggctccaggctggggcagctgccaaggtccccgcgccgccgccgggtgttttacatgaaaatgagaagcctgatgggaaccgcgttctaacttaaggcagcctggtgattagcatgagactgggcggctgtcctgcttcctgcccttcaatagccgttccgcgcgctcgcgccggagcagcgctgccgccgcgcgggggtcgatcgcaggctcggcgtccttggcagccatggctccggcgccgcctcggccagtaagtaggagcatgcatgtgtagggggcacatgcgtgtcggcgcacccacccagccatccacccgcgcgcacgcacagcgcccggagcctcggcaaggggaagattgacgaggcgctgcagtcgcggggacgacgcgggctcttcctggattccgcaggagcccgcccgccgcagctgctgtctgcagagcctgctcggatcctgtgcacacgcgccccccgctcgagcctctgtgatgaagactgtctcccggggactgcagcggaggcagagccagccagcgccggggactgcgggccgtgcggctgataggcccgcggggacacgactcggacactgtcatccccacgcctcgcgctgagctgcccggcgcggagggtctgccgccgcccctccggcctcccgcacgcccgatcccgggtcagccccggaggcctcggctgcctcatttgtttgggtcttttgtgccgtggctcccagttggccaagcactcctgcgctgaatcgggccattgtctgcgctcccattgccttcacgctgcaagtctcggcgcccccaccccgcccgccccctccccgcctcctcccggccggggagcctcctaacgtgcctttccccccaggaatctggaagctataagccgggcggattgcaaatgaagtgtaatgcattgtgggacgtgtgtaaaatcggagccttcgccgtgggggtgtgggggggcgtggggagggccggacccgccgctggcggtgtagacgccgacgaggaggggctgggaaaatgtgcgcagagtccgcccgggtcgtgcccgccgtagacggatgaaggagcgcgctgcgccccggcgctgaggccccgaggatcggggcggcaggtcgccctccccaccatgaagaagacccggagcacaaccttgcggcgagcctggcctagctcggatttctcggaccgggcctcggaccgcatgaggtcccgcagcgagaaggactaccgcctgcacaagcgtttccccgcggccttcgcgccccaggcttcgcggggctacatgacatcaggttggttggtgaccgcgtttctgcccccgggccggggccgcgggacgtgctcg

SEQ ID NO: 230840 - DNA, 224 bp, Homo sapiens
  chr4:185089643-185089867
  hyper
ctggaagctttgcacgggggtgaaagttacaggcagacactgcccgcggggctccggacagcaaggagcgagccctctgagcctggccacgctggcccgccactgccctctgctggcggctgcggtcttcaccaccgcccgcagccgtccccgtagtccgccgagaggcgccaggctgggccagccttgaattctgggtttgcttctcccggtttgaaggccac

SEQ ID NO: 230841 - DNA, 101 bp, Homo sapiens; identical to SEQ ID NO: 199708
  chr4:185396094-185396195
  hyper

SEQ ID NO: 230842 - DNA, 40 bp, Homo sapiens
  chr4:185747361-185747401
  hyper
cgagaggctgcggcgggcgaacgccgctggagtcgcccag

SEQ ID NO: 230843 - DNA, 668 bp, Homo sapiens
  chr4:185937209-185937877
  hyper
ccactctggggcagcgtgtgtgacccaggccttcggaccgagaagggagaaaggaaatacgtccttccctatcctgaagcggagggcgttccaggtttcgcaggtagtgctgcagccgcgcaaggaccgggcgaggctgcgcccctgagcccaagtctccactcaccggccttcccttgccccctcacctgcacgcgggtacttttagccctgggcaagccttgagccaagcgccgagaccaaacccgggaaattaaacagtgtgcatggaatgaaatgtggtccgtggaaggtgcctgcagctggcggttaacaccggcagtaagaggatcaacgcccgggccgctggcttaaaaatgggagtgggagtgcgaagtgtgcgcgctcctttttacccattcacgttagttaatttggatgataagggttcgcgtttaatctctttgtgtgcgagtgaatatcctgaaatcgacaacccctgagagggcactcgcggctggcagagcaacctgggagggtgcggatcgtgtccaatctggcgtgaagcagaaaggaaacatcgtgaggagactagaggcaggaccgagagggacaccctaggggtgcgaggtgcagaccgagccctcacatctcccaggccgcagcaggtgggccgatggcttccccga

SEQ ID NO: 230844 - DNA, 84 bp, Homo sapiens
  chr4:185938239-185938323
  hyper
tgtgagcgaggcccgtcctgggggaggtggcctctggccgcggggccaggttgccctcagaggcgcaggcggccaagagagttc

SEQ ID NO: 230845 - DNA, 191 bp, Homo sapiens
  chr4:185938975-185939166
  hyper
ccccttttcttctcggcccactcttctccgtgttgccccccaatcctcccacccgccccttcacacacaaacacacacacacgcccgccagtctctcctcccccaccctctggcattattaaaatttagcccaatgaaactattcatacttttcaatggacattttcgtataggataataggctacaaatt

SEQ ID NO: 230846 - DNA, 2127 bp, Homo sapiens
  chr4:185939826-185941953
  hyper
ggctgctaattttttttttttcttaacttctttaaaactgatcttgaatgcatacatcctccaaacgcagctcccctaatcctatggaataattcaactcgtgaatgcatctggagccctagatgaccgctttataaggcagccctcggagttgggaggctgcagtctacctgggacactcgaggaggcacacgaggcggaaaagtggacgggtgccccgcgccaccgcctctcccgagggcgcgtactgaccaggatgtcagacaagctcaaggaacgcaaagtgagtcggctgagcccaaatggcacttgcgccctggtggtggaggcatctgactcaccgacccgccacttgggtggaccgatggcagggaagtgcccgcacgggactttgagtgtggaggaatctcgagtggtttgggaagggggtggggtagagagaggagggtgctcaaccaggtagaagtcctgcctggaggctggcggccacctccccaaaggcctgggtagggtggctggaaggggagcgcgccagcgcgggcgtcagaaggcagagctcacctggcccgagcgtggcgggccaggagtcccttcctagagcgaatctgagcagtgtgcgcggctggagaggcggcttgcacccagctgctagagccgcgcctttgacgacttcccgggcaaagccatcctaaacatacaaccctctcttcgcagagaacccccgtttctcataaagtgatagaaaagcggaggagggacaggatcaaccgctgcttgaacgagctgggcaagacagtgcccatggccttggcgaagcaggtaacgttggcgacccggagccgggtgccaggcgttgggaggcctctgcggccactctgcggagacgcccgagcccgcggacacagaggacctcacttgcgggcccctcccaggcggggggcctgagcgcagggcgaacctcaggaggctctggcgcagatccgcagccgcgtccgctcgctggtcctctccagcgccacagtgcccgaccagcaggcgctgggccgctgcgaggggcccttcctccttttgcagagttccgggaagctggagaaggcggagatcctcgagatgaccgttcagtacctgagagcactgcactccgctgattttccccggggaagggaaaaaggtgggcacaggttagggaatgggacgcctgggccaggcgcctgcgccacccagagaccctggggctgggaggggagtgactgagtgttcccgagagctctactagagctccactctccaggagggcaggggtcctgcgaaggcgcctctccctgctcggcgacagcaaggcggcgagggagaactggttcccagggaggctggttccacctccttctcccgggtggggtgggtggggtcaggctctcagggaaagagggcgtttgcgcgtgcctcgccagtctctaagactgcgcagaggagagggcgggcctcaaatgggaactttggccagaaaatgtggtgggaggtgccctgcacccgctttgggctcgcgtggggaaggggcactcagggtgtgtccgtcctacgggctttctcgttcctccagcagaacttctagcggagtttgccaactacttccactatggctaccacgagtgcatgaagaacctggtgcattacctcaccacggtggagcggatggagaccaaggacacgaagtacgcgcgcatcctcgccttcttgcagtccaaggcccgcctgggcgcggagcccgcctttccgccgctgggttcgctcccggagccggatttctcctatcagctgcaccctgcggggcccgaattcgctggtcacagcccgggcgaggccgctgtgttcccgcagggctctggtgccgggcctttcccctggccgcctggcgcggcccgcagccccgcgctgccctacctgcccagcgcgccagtgccgctcgctagcccagcgcagcagcacagccccttcctgacaccggtgcagggcctggaccggcattacctcaacctgatcggccacgcgcaccccaacgcccttaacctgcacacgccccagcaccccccggtgctctgacgcccactcgcccgccagatttctcct

SEQ ID NO: 230847 - DNA, 295 bp, Homo sapiens
  chr4:185942466-185942761
  hyper
aagtgcccgacgcgcgcgcaccgcacgcccgcgggtctggaatgcggcgaaacccgggccagcggggcgcgtggctgagtttacagaattaaaaatcctctaaaaaataccggaaccaagtacagttctgagttgcggattagaaacaacatcgttgatgacaactgctcagcgccagaggcttccgagaagctggcgttgccttttgcgcacagagcaggccagcttcgggggcgctgggcgtctcggcgagaggtcggcacctgccgggttgggagacgccccttccccaccc

SEQ ID NO: 230848 - DNA, 69 bp, Homo sapiens
  chr4:185961214-185961283
  hyper
agggaaaaggaagtgcgagtgagcgcgtgcacacacacacaaacacacatgcacgcgccttctaatgag

SEQ ID NO: 230849 - DNA, 626 bp, Homo sapiens
  chr4:186049493-186050119
  hyper
ccaggcgtgagccccgcgccctccccttgcggagattcggcctggaaagctccgcggctctggccggcaccggtttccttcccgcctccccgcactcccacccccgctcctagttcagagcgctggtggcgttacccacagccgcggaatcccctttactgttcccggaggagctgcgaggtggaactggccgcgcggtgggggctttccccggccccgggacgagcactcagcgtcccctccccgcgacgctccctcggaatcccggggaagagcgcagcagaggcggggaggaggcgcgagcggaggggaccgacttccaccgcacctgggtgtcgccagccccgcctggccctcggcgccgggaccccgacgcaccccgcgcatagcgactggtggcctggtgggggactgcgcctgcgaggccttcttcgcgcagagatatcggggttctctgaaccccagaaatgggcctggcaggggaaggaagctgcaagaaaggagttaatctgcaggatgctcaattctttctatgacaaatcgcttcactccccgctcggcaggtcagagctaggggtgaccgagttacgccgcgggcgctgcctgagcaacgctttctaccgcgg

SEQ ID NO: 230850 - DNA, 54 bp, Homo sapiens
  chr4:186064211-186064265
  hyper
tgtgccctttaaacgtcccaagttgcagggacagcccccggcccagcctcgctc

SEQ ID NO: 230851 - DNA, 79 bp, Homo sapiens
  chr4:186317080-186317159
  hyper
ggagcagctctgacgtcagtagctgccatcggaagtcaggtcatgttctacaaaaagcagtgacgcacgcccgacagca

SEQ ID NO: 230852 - DNA, 344 bp, Homo sapiens
  chr4:186347192-186347536
  hyper
gcggacggcgaggcggggcgggtagccgaagacttatgtttggtaaattctattagttaagtcttttctgtcctacagaagctcacacatccttctgtgtgttcttcgatgcggattcgaatctcctcgtatcctcccacagcgtgcttggaatggattctcccgtacccggggcaacacatcacacaataaacgccagctgtggtggaacgtgcagaggcgctgcgcagcccaggcgtgtcgcgcgcttgggaaccctcgccgctcccgcagcgcagttaacgtggacaagctggggcaacctggacgagctggggcaacctgatctcggctgtcggagtggg

SEQ ID NO: 230853 - DNA, 108 bp, Homo sapiens; identical to SEQ ID NO: 199714
  chr4:186434979-186435087
  hyper

SEQ ID NO: 230854 - DNA, 78 bp, Homo sapiens
  chr4:186456215-186456293
  hyper
ttccctgagcccagtggctctcctcggaaagtcgctgcggacccagaggatgggacacctttagagcggactttgtca

SEQ ID NO: 230855 - DNA, 401 bp, Homo sapiens
  chr4:186456473-186456874
  hyper
aagcaagaatgccgacacctaccctggtgatgaccaaaggctggttgaagtctatgccccctgagagcctgaagccccagggcgcagggcccgggaggatcaccgtctggggcatgccgccttcctcccgcccaccgggctctaagtgtccccgcgcagggcagccactccgcgccgggcggcgtcctggccccgacccgggcgggggcgctttatccccgctgggggtgacgtcaccgccccgccgtcctccccgccccctcccaccccggagagctccaactttggaagcgagagccgcgccagccccgcgggagtgcgcagcccggccggctggggcagcctcccgggccgcggcgggcgcgggggcttcgggttacagcgtccgtcgctctcttgaa

SEQ ID NO: 230856 - DNA, 112 bp, Homo sapiens; identical to SEQ ID NO: 199715
  chr4:186706061-186706173
  hyper

SEQ ID NO: 230857 - DNA, 163 bp, Homo sapiens
  chr4:187026478-187026641
  hyper
cgccagccgcgccgcgggagcagtggggaccctgctctcttggcccagtagccctagagcgggtaaagccccgccccagccccccactccctccggcgggggctgctcccctgctcgcctggtggtcccagcgcggccgccctcgggccccggcggggtctgg

SEQ ID NO: 230858 - DNA, 880 bp, Homo sapiens
  chr4:187644343-187645223
  hyper
actccgcagtccaccggttgcatctgcacctccgggcagcgctcctgcagggcgcaaacacccagagacccagggacccggcagccccgcgcaggcctcccgcgtgcaccgctcagcgagcgggtctttcgcagacggcgggatgccccaggagaccgcgaggccggcgcagcccggcgagctcccggagggaaggcggcgtgtcagaaaggatcggaccccagcaatggccccggatcggtcccgcgcggtcgcctccttttcccgctccgccgccgggacccccctagccagtgctgaatttcccaactgggaaggaccgagtcactccaccctccgggaagtcgcgcgctcatccgttttcggcagcgccggagcccgagccggggaccgggcggacacccacagagtccgcaccgcagcgcgctgcacgctctcgcccccgcccgccggcccgcgccccagcgaactaaccgcaaagttggcccgaagtggcgacggcgctctcgtggagctcacccgccgtctcagcgcgcccccgagcagggaccgggcctgccggggccctcgccgggctcgcgcgtccgcatggtacctgccgcacgagccgctcccgcgccctctccccgcgcccggccgcccagctcggcgccggcgcctcacgctccccgagcgcaggagatccctccgccccggccccgcccgccggcgccggcgctcatttctcgggcgcggaaactcgagcccactttccccggctgccggctctgggaccgcgggctcggccacgcagtcccgcccggacccaaagagccccagtccctgcgaacaccaggtccgtgctgggagacgagaaggcgcccagcggggtctagcgcgg

SEQ ID NO: 230859 - DNA, 565 bp, Homo sapiens; identical to SEQ ID NO: 199716
  chr4:187645505-187646070
  hyper

SEQ ID NO: 230860 - DNA, 176 bp, Homo sapiens; identical to SEQ ID NO: 199717
  chr4:187646285-187646461
  hyper

SEQ ID NO: 230861 - DNA, 971 bp, Homo sapiens
  chr4:187646716-187647687
  hyper
tcgccacaggagccgccgagagccagggatggagatttcagacttaggactctgccacgattctactgatccttaagcgccaacagaacgaaatggacatgcctattagctaccacaaatcgaattattttatatgagagagagaaatgtggttcaagttccacatttgtcctttaaataatcgaccctccctaaccctgtccccaaaggctcgtggaaattagggagggggttggggagacggttccagaaacaaaacgctttcctccagcacggcctctacatccagtccacccaagctgatttttgtaactcatataaagaatgggcccgggtgggtggtcagtgaagactggggtgagcaagcgcccacgtcgccgagcgccggggaggtccaggttcgcctccgcacagaaccctgcaaggagcgcgcctcgccaggtgcccggactagagggcgctgcgcccctgcaaatctcgcggccccgatgcgccctccctaggcaccattgctataataagttacattcaaaataatgcacaaacagcatcgcctctcaagttctttttaacagtgctctatatgtattttatgaactcccaaagctatgcatacgaatctttcatcgccgatccgcacaaagccagagggatgcgcagctcctggagccgagaacccgtagggcgcacacgcttccccgcactcgcttagagccacacaccccacgtaatttcattaacgtttaaacttaaatgccaaaaggcatgcacgatttgaacaaagaactcaccagtctagccgagtcctcggccctgggctctaaagtcctcggcagctccgtgatcccctcgcggtgtagatatgtgttaagagccgggtttgaagtaccaactttgcctccccgggatcttcagcatgtccctaaccagagtgccaacgtccgtgccgccgggacccaggcggccgcatc

SEQ ID NO: 230862 - DNA, 86 bp, Homo sapiens; identical to SEQ ID NO: 199722
  chr4:190123535-190123621
  hyper

SEQ ID NO: 230863 - DNA, 1277 bp, Homo sapiens
  chr5:53214-54491
  hyper
ggggggtgttgctgcgagagcgggcaagggcggggacgccgcgctgacccggtcctggatcccacccgcgctgggctcagggccgcgggttcgggtcctgccgggcgtcccacgcaccggggacgggcacgaaaccgtccacctgcctcagacctcggctgacctctgggccgcgggagggcccgagggtcttttccgcctctgctcgctgttgtgtctccaaggtcagaatccctgcggccggggctgcgcaaaacgccccccacccccgcctcactgccgcccccgagtccccttctcaggcaggctgtgggggttggggttgggcttcgcgagcccaagcggacgccgcaaagagaatgagaacctcggagcgctcggggcgggcgggcccagcccaggctcttcctacccctgcgggggtccgagggccagcggcatcggcggcgggaggagggggcgggggcggggaattagggggaggcgggtgttaaagaggagaagggcgggggcggagggggaggaggagacggggcggggaggacccccaggtttccgagtctccgcccgggctttcgttcccggctgtgtggccccgcgcggttcccgagcagctccaggaactgaaacgtgaaggggacctcggtgcccggagctgctgcccaggtaaccgcgctgcgcccggcgagcagatggggggtagtcgccccagtcctggactccgcgagggggcgcggggagtccacgctgcggccgcgcagacgggcggggcggttcgttcctgcgagcgccggaaccggggaggaggctggggaagagaaaggggcagaggggcgggcccgggggccggggccgagggggcggagcgcgaagtttccagagggaggatttgagctgctgagaccgggggcggcgcctggggacgccggagatccgctgctccccgggacactcacctgctgcccggcgctgcgggaggagagcgcggaaccgggagccctggaaccctggcccgactgctgagcgccccgtgggtcctacgctcccgcgccttctagggaagcccctaaagttggtgagtcccctagaaagcagttcctctgtggctacgtccaggacgaacaaccaaaaaccgccccagccccccaaaccccaattgccttattctgtttccacttgctttagcccccacgctcctgtgtgcgagaggggcctggtcagactgcagaccccacccaggaggaggaagaggaaggggccgccgtggcccgggcacc

SEQ ID NO: 230864 - DNA, 228 bp, Homo sapiens
  chr5:92362-92590
  hyper
cagacggcgggggcggcccaggcgcccgggtaagagggggcacggggactgcggcgggtgggggcgcgagcggacgcgggagtaggggcgggtgggggcgcgggggtaggggcggggtgggggggggcgccggagtaggggcgggtgggggcgcgggggtaggggtggggtgggggcgcgagcggacgcgggagtaggggcgggtgggggcgccggggtaggggcggg

SEQ ID NO: 230865 - DNA, 1472 bp, Homo sapiens
  chr5:320795-322267
  hyper
gacagcctcggccgcgttgctgaaaaccgaccttgcgggatgaagagggcgcggttcccccggctgggatgaggaccgcggatgctgaggagcggactccagggaccaccgactccatggccggccccagcgagggcgagaacgggtggaagccggccagggtctgtggagacgtcagggtgcgaggccaggctgaggtgtccccagggatcccctgagggtacagggaattcagccagggcctgcgcgcccggacggaggactagagggggccaaggaccaccgggagggggaaggagaaggcgcagcccgaggtcggaggggccggcgggcgcgcagagggcgcggggtgagccctaaggacctgcaggcaggaccctgctctcggccgcgcggtcccgggtgccgaccggcggggtgggcggggcaggggcacccagggccgcacacctgccgcgtgggaccctgaaatgcccaggacgaagaacgtcgcacggacgaccctgccgtgcctggcgcgcgtccgcttcctgggaagctcaggatccaaaagcatcttaatattctctataattcgccaaaaaccatgactccttttacattttcgaaacgacctcatggggcaggcgagggggcacacgctctcctcactttacctgttcgggtctacaccgcccggctctagggccggcagctcagcacagccggccgcgagcgctggggaggggacgggggcgcagggagaaccgggggaccctgggcgcacacagaccccagggggaacgcagggcctggaggggctcagcgcgcgacccccgcctcggggcacggagactccgggggatcactgggacgcgaagggcgcagggcggaccccaggggaaccggatggcgtctccggttcgccagggcagctggggcagccggacccgagacagccggacccgcgggcgccctctgccgcctcccggccctggatgctgcggggcggggcgggcggctcgcgtgccggggtggggcagtccctggagccgccgcgggttcccgggatgcgagcgccggcacccgccgccacagctcctggccagggcgcgctgccccgcgggtgtgcctgagcctccgcgccccgcaggccctgggtaagtgtcctgggcgcccccgcaggcccccgccgcgtgccgcccgcggtggagacgggatgcgctcccgggtgtggggctgagggacgggcgccggcgtcgggaccctcctcacgccgcatcctcgcgtcgccaggcccggcggccccgggacggggcggacactctggggtgcggctggctggtctcacttaaaactcggacctcggagggaagccgcggcgcgtccacggttcgtggtcctcagcgtcccctcgagagtgttctgagccttcactccccgggcgttccgtgcgggccgcgctccctggggctgggcgggtgcgggcggcg

SEQ ID NO: 230866 - DNA, 95 bp, Homo sapiens
  chr5:473164-473259
  hyper
ggcggcgcgcgcgaggccgctggaacgagcgccggctgtgcacgcggcgcgccgccgccgaacgcgcgtgcgcactcggcagccctcggcgctcc

SEQ ID NO: 230867 - DNA, 828 bp, Homo sapiens
  chr5:473439-474267
  hyper
ggcggaccgtggcgcggggacgagcggccggttagcggcgtgtcggagccggtgtcacctgcgggagaggaaggcgtgagcggcgcgcggagcccgggcgctggggcgggaggggcgtccccgggggcctcagctgtccccgagcccggcggctctcgcctcccctcccgcggcgcaccccaggctcggcgtccgctggggcctcctcccaggacccgggttcgcggggcagaggcggaagcagcaacagcgaagccccagcccggccccgccacgtccccccgccgggggtcccgggacagcggcctcctcggcgcaggaaggtcccgccccaggccctgcagcgcgggaggtcaaggtccccaaggggacctgcttcctccatctcaaaccgccctggcgtcccccgggtgcctcccaggcccccagagggagctcagaaagcccagaccccacggcccgcccctctccctgctctgagctggaggcagagtccgggtctgcggggccggccctccctgtatccctgtgagagggtcggggacccggggcgtctgtctggcttcccccagccctgctctcagctccctgggagcgcaggatttggactcgcggactagctttcggagccacctaaaggaaatctcaggcggccctagtgccctcagctccgtgggagcagcagagacgccagagtatctctgtccgggctcctgagggaggtgcggccagcagggcgctagaggaggaagaggggctgctggagagagagagcgcgccaggttcaggtccagggaggagagagagcgagcgcgcgaggcggagacc

SEQ ID NO: 230868 - DNA, 110 bp, Homo sapiens
  chr5:523690-523800
  hyper
aagagaaatctgaccgaccgggattttctaaaaaaaaaaaaaaaaaaggaggcccgccaatgggaacgctgcgcctgtagggaggattctgctgggtttcatgcgggtag

SEQ ID NO: 230869 - DNA, 225 bp, Homo sapiens
  chr5:923604-923829
  hyper
cagacaggggcctgcggacagacaggtggaccccgacaggcccagataggaagcgcgttgtggcatttctgccgcaggacccctttcccttgcccgctagagggcggcgctgccccagagacgcacagccagcggcttagccaaggccccagcaccagcggccctgggccctgccctgaccctgtgctgactctgcagcagcctcagctccgagtcctagtgtct

SEQ ID NO: 230870 - DNA, 227 bp, Homo sapiens; identical to SEQ ID NO: 199733
  chr5:1004765-1004992
  hyper

SEQ ID NO: 230871 - DNA, 647 bp, Homo sapiens
  chr5:1009130-1009777
  hyper
cctgcacctgagcgcggggcccggcggggcgtggcggcggcgatggggaaactgcagtcgaagcacggtgagccgcgggccggtagggcgggagggcgggcgggcgggcgtggggccgcctctcactgtcgttttcctctccccgcgtcccgccgtgccgcagccgccgccgcccgcaagcggagagagagcccggaaggtgagcgggcgagccgacgggcggggcggggggcggcgacccggcccgggaccctcagagctaggagcccgcgcgcgtcctgccctggagccagcagtggggggacggggccgcgggtctccaggagcgcgcgggacccccacgcctgcccctgcgcggtctccaggcgatggggacacagcgaaggcgcagcgcccgcggggctcacggcgcgtctctttccctcctcggtgcgggtttcccgcgcgtccgcccccggaccgcaggggacagcttcgtggcgtccgcgtacgcgagcggccgcaaaggcgcggaggaagcggagcggcgcgcgcgggacaagcaggtaggcggcggggcggaggctggggtcgcgctgcgcacccgcccgggggcggggagcggtgtcagagctgttcctggtgcccgcccgcggacaggcgagacg

SEQ ID NO: 230872 - DNA, 311 bp, Homo sapiens
  chr5:1104736-1105047
  hyper
gcccactctcatcccggaccccaggaccactccccacagagccgaggcccaccggggggtgcgtgtggggtgcgtgtggggtgctgcccaagaaaaccccagaacgcaggaaacaaaccaccccaggtccacacgtgattcagaagcagcactctcctccccacaactgtttcctcaaaaagacaccgcccaaggggagagcggaaacaggcacgggctggcaggatgggggcccacgtcacagcccagggccgcaagcaccactcggaccccgagacccctgcaacggcagcacacgcccctccccgcag

SEQ ID NO: 230873 - DNA, 35 bp, Homo sapiens; identical to SEQ ID NO: 199738
  chr5:1140552-1140587
  hyper

SEQ ID NO: 230874 - DNA, 960 bp, Homo sapiens
  chr5:1155507-1156467
  hyper
gcgaggtcagagggcgccccgggagctgtcggcccatccccgcggcccctgccccggctcggtgtcacctgcaggccccggacagggcgggatccccgcagggaactgccccaggtccccggagcgcgcggcgggcggcaggggcggggctccgctgggctggggggaccccaggcagggaccgacccccgggctgaccgggagccccacccccgccggcccgccaggccgccgccgcccacctgcgcccctcgaggggaccggcacctgcgcgcacctaccgtagcggccgggctcgcggcagtagagcagaatgggaagcgggtcctcgtcaggcggctcgggcgcggctgcggggtccaggccggggtcgggggcccggcgggggctcggggtggggcgctggctgtcgccttccttggccccgggccccgcaccccccgccgcgggggtcaccacgaagcgctgggacatggtgtccgcgacggctgcggggagcggggacctgagcgcggggagggcggggccggcggggcgggcgcgggaggccgggaggaagggagggaggccgggggggagagagggaccgagcgcaccgccggggatggggccgcgcggcgcggggaggggccgggagggcgaggcggactccggctgacacctcggcagcggtccctgcccgcggggggaccacggcctcggcccccgaagaacgaagagcggcctcggctctcgctgcgtgaccttggagacgccccagccgggcgaccgggtcagcgcgcggtgcagaagcctgaggggaggaacagacctcgctctgcgccgcctggaaccgacgacgaccaaccctggcagcaacgctgcagcccgcggtctctggcgacgcccaccgagggccgggaccagggggccggtgagggtggaggtctcgctggcctttgggtccgtggggaggggcgc

SEQ ID NO: 230875 - DNA, 406 bp, Homo sapiens
  chr5:1294715-1295121
  hyper
gttcttcgcgccgcgctcgcacagcctctgcagcactcgggccaccagctccttcaggcaggacacctgcgggggaagcgccctgagtcgcctgcgctgctctccgcatgtcgctggttccccccggccgccctcaaccccagccggacgccgaccccggggaggcccacctggcggaaggagggggcggcggggggcggccgtgcgtcccagggcacgcacaccaggcactgggccaccagcgcgcggaaagccgccgggtccccgcgctgcaccagccgccagccctggggccccaggcgccgcacgaacgtggccagcggcagcacctcgcggtagtggctgcgcagcagggagcgcacggctcggcagcggggagcgcgcggcatcgcgggggtggccgggg

SEQ ID NO: 230876 - DNA, 218 bp, Homo sapiens
  chr5:1295481-1295699
  hyper
tgcagggacgccagcgagggccccagcggagagaggtcgaatcggcctaggctgtggggtaacccgagggaggggccatgatgtggaggccctgggaacaggtgcgtgcggcgaccctttggccgctggcctgatccggagacccagggctgcctccaggtccggacgcggggcgtcgggctccgggcaccacgaatgccggacgtgaaggggaggac

SEQ ID NO: 230877 - DNA, 45 bp, Homo sapiens; identical to SEQ ID NO: 199739
  chr5:1345798-1345843
  hyper

SEQ ID NO: 230878 - DNA, 644 bp, Homo sapiens
  chr5:1444712-1445356
  hyper
cggcacgacccctccggtgggtaaaacacccgacgaaggggttccgcggcgcgagcaggaggccgcgttgggagagggcgtcgggtgcggagctcgcgagtctccggcaagccgccgccgccctggggccacctgaccccgctcctgaacgcggggcctcagaggcgagttttgggtctacacagcaaaatgtggcccgttagaaagcgtccttcctcaccgcgcccagaacaagaagcggcgctgcctggcgagtcctcgcccggcctccccgccctgcccagagcaccagcgcgcagcccgcgcccgccaccacccccaacacagacaaagcccccgcgagatggagcggcggtgtacaaaacccactccgatcggatctgggatgcgccgcacccctagtagggttaagttccacgagaagaaaccaggacccccgagtcacagccatagacacccacgcgtcccctaagccggtgactgcaccaggtgcccacccggttctgagcctggagcggggccaggggcagccctgcaccctcctcgcgcctcggacggcctcagggtcccatgtggcgctatcggggggcgctcggcacccgcgactgttggcgactttggagacggcgcggtctgcgggacgc

SEQ ID NO: 230879 - DNA, 310 bp, Homo sapiens
  chr5:1645164-1645474
  hyper
gcccacagcgccaccgtgtggtctccgcgtccccagttcggagccgcagcttacgcgctgctggccctgagcctgttcccttcctgcagtccccaggagctgacgctattcggtttgtttttaaacactccagctgagcaagcgtcttctcaggacgtcctgcgtgctgcccacactctcttgtggatggtcccccgggtccggcggaatcccgcctgggaaggcttccccgaagccttcctccatcctgggcagtggcggggcttgcaggaggcctcagagctctgtcggggccggacggaccgctgtc

SEQ ID NO: 230880 - DNA, 472 bp, Homo sapiens
  chr5:1667629-1668101
  hyper
gctcccggaggtgcgggcggagataggagaccccccccgagcctggggggggcgcaggaagggggcgcgcggggcgggggcgcgcaggaagggggcgcgcggggcgggggcgcgcgttctccctccgggcagcctcgtgggcggtagatgcagccaacgcgtccgtcaaagcggttcaggggcgctgggaagaggcggcggtgaccccgggacggcagtgggcccgaccgagcctcagtgggggtcccgcgtgtacgctggcctcgccctcccgcctcgcttctgggcttttgctccaactctcagccgccgtggagatcgcagggggcgtagggccaagccagggattccgctgtgccccgggctcgggagaggtgtcccgggagtctatggcagaatttccccctcatcctgcgctgggagaggggtctcgccccggatggaactccgcgttcccacctccaggttctcc

SEQ ID NO: 230881 - DNA, 936 bp, Homo sapiens
  chr5:1800423-1801359
  hyper
cctagattctacccttagctcgcttatccctgccttttcaggtatctacccgtaactccattcgccttcctttttgtgtgtgtccgggtgagttgcagacgtggctgcgtccactccgcgctccctgcaggccccaacgcttcatcgcagcgcccactttttccacctgacccggcgaacaccgggcgggccgctggagtttatcagctccaggacaaatctgcctctgaccaccacgtttgctgggacatctttgggaccggaggttttcatgtgcattcttgtttctcatgcctttcctcctctttatcatcttccccgccactcatccatctctagtgttttgttcttggagtcacgtggtcctcaggctctgaccacagcaaaagaaaagctggatgctggagcttaagctgggatttatacccaagtcaactctaagcaaaacgggcctttttagaggctgtatttgcatgctgtaaaatcagtcggtgtactaggctttgttgcagaaatccccaatatacgtttcctctgcggctccccgtaaccacacacaggaacgcttgccttgaacgaggagaatgcacttccagtctcgtctgctaagcagttgactccttcacccaataattttgatatttaaatgtctcatgattatcggttaccataagaatataaacaatgtattttcagtttacatcctcccctgcctgtccgctaaataagaaccactgggtactcctaatcgctgaaggtttcgcacaccattgcctgcctcatcagggccctagctctagcctgcggctgcaactgcatgaggctgcacctgccggcgcaacggggccgcttaacttttaggccattgatgaaaagtcaaacaagcgcacagtactcggtgtaatcaggggcatttttagcgagatacctgggatg

SEQ ID NO: 230882 - DNA, 143 bp, Homo sapiens
  chr5:1851434-1851577
  hyper
cccaggcagccggtcgtcatcctcctccctgcagcctcctcctgcgccctctcacgaggcgctggggcctggtgcggaaggatttacagggaaggaatgtcgggctcctccggctgggagcgcacctgcgcagggagggtcct

SEQ ID NO: 230883 - DNA, 294 bp, Homo sapiens
  chr5:1851798-1852092
  hyper
tcttctctgagtgacgttggaggttttcacggtgaacacagaaaggggcactccgtccgagctgagcctcagggaccgtgaggcttgctcttggccctgctgctcatacagccctccgtgcctcgcttccctcccacagcaaggaaggatgacgggtgcggggtctgcacggtggcgcggggtggccgcgttgctcaggaggcacttgcaggtcaccactgctgcttacacagccttactctagcaaggccctgggcagccacactgtgacactcggaacgtcacacctggcgt

SEQ ID NO: 230884 - DNA, 1210 bp, Homo sapiens
  chr5:1874586-1875796
  hyper
agagtggagttggagggagacggtgagggactgggagaccgggatggggagagagagggaggccgggctgtctcgtcagcagcaggcgtgcccagggaaacgcaggtggcatacatcgcatgcataatctcaggagacggccactttaaatcttaattggttgccttttaaatatcatttaagggctggcttccctgcctctctctctagttaagaaggtgtcgtgtcaaactctattaccttgctggacgtctctcccttaagttaaaaaaaaaaaaaaaaaaagaaaagaaaaaagaaaaaaaaaatggaatcatcagccgcggtttgagaggtcgataaagcttttagatttggagacgttttccgggagcccatttcctgcggctaagagttgttaatggagcttaaggaattatcttaggccgggcggccgggagagccgtatatctcccgcgcctgttcccttgtcgagcctgaatatgctgctgtcagactcgcttaatgaaaagtaacgcaccgctgattacagttttatttgggctctatgtaaagagcgccgttaatttgcatcccctccttggtgtgtttgaattcgccacgcctgaataaccgagcgcgccggccctgccggcctcccggcgccttcccagcccttctctgacaatctccctgggagcccagtcgcccgccccgacccttccccgtcacgcccccgccccactgacatcgacctccctggcgcgtccactcagacacctaaaattcaccccctccgtgtcacctctttgcaaacgccccctccccaccccgctccgacttcggaattgtcctgcctgacacctccccaccccacaagatcagccagagggtgtttgggggcgcctaaggcaaaccggctggactgtgccccaagggaagggtgtgggggaagcgcccagcgaggggatgccatttcctgcgcgtccccttagaatgtggctgaatccgcctccccacccgacgtctttatttaacacaatctcgcagcttattcaaataagccagctttgtcagccagttccaccaagatccgggggctccagcgagatggaattcctatggccagggccacggggaggggctggggtcccgagggcagcaagcttggctggcggcaggagccctgggtcctccccaggagagggacccagagcccagaccaagtcca

SEQ ID NO: 230885 - DNA, 203 bp, Homo sapiens
  chr5:1875976-1876179
  hyper
agggctggggtgggggcgtctgggcagccaccctcggccacattaaaattcctggcgccccagcctcgggcctcaacgctgtcccccgagacgccactttcgctattactgtcaagtacccttgactctttatttttgcccttttatctattacaactaattcgagttcttttgcccttttcagtctaagacgtgggctttct

SEQ ID NO: 230886 - DNA, 62 bp, Homo sapiens
  chr5:1876539-1876601
  hyper
tggcccaggggtccccacgaggccgcagtccgggtccgcccagccccaggctcctagaggaa

SEQ ID NO: 230887 - DNA, 543 bp, Homo sapiens
  chr5:1876781-1877324
  hyper
gtggggggtggggggcgagaggagaggcctcaagtccgccaggcgcctgcgggggatgcggaaccgcctccgccgcggggatggggaggggagcccggatttctgagcgtagccacggcttggccgggccccccgagccccggatcgctccgcgggttccttccacacgcccttcccgccctgccccgaggcctttcctcccagtcccgcctccggtcggcggcctgtgaagctctgagcatttccccccgcggagccgcggctcgccggctttccgagcagagctgattgcggagcggcgggtccccggaaataggagagccgaggttaggaggtggctgagacggcagaggcgtcgaggccgccctaactcctgcctaggatgggcagaggccgctaacagagaaaagcaacgatgggctcccacgcccccccccgggacacggctctgggaatttagaaagtttaaaatctaatcaaagaaatccctattttttcaaacttctagagttgggtgatgggaagtacgagttctgggtctca

SEQ ID NO: 230888 - DNA, 1400 bp, Homo sapiens
  chr5:1877739-1879139
  hyper
gggacagcagaccacgcttcagaacggaaccgccttctccatgtaaacttttgacgtaaactttatgcttcagggtatctggcctcttctgctccgagagcctctccttccgcgtcccaaatttgggaatggcccggtcaggctcaggcccaggcggtggaggccccggcgtggcagcgccgggcttgtccatgttcccaggagtccaagttcagaagccccctctccggtgggttggcggcttcgcggtggccgcgctagtcttcctctggaaactcagtgaaaagagtcggcgccgtccgcctgagcgcgggttccctcctgggctcgggacccgcccgcctcaggcgcagaagggtttgccgccggccttgggcagggcgagcagctccctggcggcgcctgcagctggggcgtcctggggcacggcaggcggaaaggcgcgggccaggggtgcagtcagcacgttcgcgcccgcccccagcgagcgtcccagaggcccggggtccaggagggcgcccttggcggtggcccaggcctggttcaaagtgctgtgcctgaggatggggtcgtggaagaccccgtccacccagtttctgagactggttaccggggagtcctggtgcctgtccagggcgccagagtggggaagggccacagacggggacgtggcgggcgcggaggacacagccgcaggggccgcgggaccttggcgcttgagcatgcacgacggaaactcagtctggctcagggaggtggcggcggcggcggcggcggtggctgtgtgggccagggaccagatgcgcggcttagcctccaggcctgccgacgcccccgccggcacaaaccccagcttggcctcgcagacctgagggccgccctctgcgcccggcagtggctccggcccggccgccgcgctgcggagacagctccgggccctctccaggtcctcgtccagagcagctccgccacccgcggccagagacatccggagcgcgcctgaggcctccttgaccgggccgtcgggcgcggcggggacgcgctccagaccgccgtccagggagtggaagggcggcttcagctcgcacgccggcggctctgcttccagcgggtcgaagtcgtccaagtcactaagctccagctccttctcctctttgcccacgggctctgcgggagagaatgcgtggccagtggagggagagggttggtaggtgaatcagaccccctgtccccgtccaccattatgaggcctgttcccgacgctacgaaaagcactcggggcctctcttcgcgtctcccatttcctccagaggccaccaggtcacaaactggcaacacaggggcctccaatgggggaggggggtgtctaattttttttttttttgagacggagtctcgct

SEQ ID NO: 230889 - DNA, 365 bp, Homo sapiens
  chr5:1879483-1879848
  hyper
agaaccggtttgcacggtgaccgcctaggcatggggctcggcgtttgggacccccaagacgtcctagaaccgcagagaaggcactgtgcctgcactccagggcctcagcccccagtgacaacctcccaacccacctgcgttcttggagctcttgaggggctcctcccgcgcctcctcctcgcccccctcctcctcctcgccctccgcgtagggccgcttctcgtctgcgcacttgttccgcggcggccacgtcatcttgttctccttcttgaggcgccggcgcgcgttggcgaaccaggtggagacctgtgtgagggtcatcttggtgatgatggccagcatgatcttctcgcccttggtggggt

SEQ ID NO: 230890 - DNA, 229 bp, Homo sapiens
  chr5:1882047-1882276
  hyper
cagcagccggctctcgtagaccgggcagtagaccggcgcctgggccgaggcggcgggcccggagtccgccagcgtgcggcctccggactcgcagcacgtgctcagggagttggtggccatcaagaactgcagagagaggccgcgaggactggcgggaagccgggctggaggctggggccctgggccttgccaatcccgcgcgccgcccacgagggcgtgccccgagtac

SEQ ID NO: 230891 - DNA, 256 bp, Homo sapiens
  chr5:1882456-1882712
  hyper
aggactcccctggggcacagcctgagccttgtggttcaaacatcagggaacccgggcccggcccgtcggattttcttagcgcctcggcctttccccgggggtttggggagcaggggttgggcgtgaggggcgcgcgacccaggccttgctagctcggaagccgcaggcagtcgtaggtcggacactccccaccccccgtccccgccccatccgccctaccggcacctgcggtggcctgggcggggcggggctccgc

SEQ ID NO: 230892 - DNA, 341 bp, Homo sapiens
  chr5:1883852-1884193
  hyper
cccgactttcctccccgatcccctttccgccggccgtgctccgccggcttccccctgcccctcgcggctaagccggggactgccgggcggccctgcgcgctcggaagagcaggttcctcaacccaggccccggcccctcccgctaagctcgtccctcccggcgccccgcagggctggctgcgagggagggggcgttgggtgcctggcggaggcgccctcccctgtccattttgcccagctttctgtctggggcgcacggagcaatcggaagaggggaccgagcgcccaccccaggactccctcggccagtaccctccctgggaccttgcccaagttcaaag

SEQ ID NO: 230893 - DNA, 443 bp, Homo sapiens
  chr5:1884373-1884816
  hyper
gacttgctcagaaagattcctgggttcagacctgtgaatcgccccagggtcaccctctaattaatgatgacgtcctcgccctctccccagctgcaagcctgcctcccagaaacgaaatctgcctgctcttttgacagctcggttgaaggtgattgatgactatctggagaccacagtacacatcatataatatctgctgcgtaattgctttaatttacagatgaaaatacgagttctccgatcgcgttggaccggagcgggccacgtccgagctgcttgcagagggaaaccatcggaaataatgaatagccgctccatgcaaattattcagacagtttagcgtcggtagccgcgagaaatatataaagaacacgagtcaaatgacattaataattgtttctgaattctgtattgatttcgcggcaggccgcgtttctttcttt

SEQ ID NO: 230894 - DNA, 652 bp, Homo sapiens
  chr5:1885078-1885730
  hyper
ggtgtgagcccagccgggccaagggctgggatggggagtagagacccccagaggggaggcattcagctgtggcttgtcctttcctcacctatactcggggacctggcctcggcgactgtgagcactccgccggctgagggggagagccagggcccaggggcccagccacctatgccctgcacctctgggctctagtgcaacagctcagcccacccagacctgaggctggtgcatttccttccttccagacccggcggggcttaactggagccgaagccccagaacaggcggccattcatcttctgagcagagtctgggagaagcagcctccacttcccagggcagccagtacgtgggggccctttcgggggcttcctttgaccaccaccgccaccttctcctgttctcttttgcctttccagcctgtgtgcataaatcgacgctccagtccccaccagcgggcgaccctttctccgtgacccagaaacctggcctctgaatcggctttcccaggccgccgcacacacacgctccacttcctgcccgccagcaggccccagcgcctggggtccgggcccagtcacagtcaccctgcctcgggaagctcgcaactgcccaggaggcctcctgacccgcccggcctcacccaggc

SEQ ID NO: 230895 - DNA, 106 bp, Homo sapiens
  chr5:1885972-1886078
  hyper
gtatcagctgaacgcgtctgcatagactcggagtgctgagccttcctccctctagggacccccggtactaaatacacccgtgagcaggtgggccagaagtcagccg

SEQ ID NO: 230896 - DNA, 199 bp, Homo sapiens
  chr5:1886258-1886457
  hyper
cggaaccatggaaggcctccggggagacaggccgggccctgacccttcttcggccagcctagccctggtgcttcaggagttaccctgggggccaccagttccccgcaccaagagctcgtccggagggagctccttccagcccagagaagttaactccagccaaaggcgaagccgggagcccggggcaccaggcaagggc

SEQ ID NO: 230897 - DNA, 98 bp, Homo sapiens
  chr5:1887837-1887935
  hyper
caggtcctgcctttcttcccctgcccctctcccaagcccctccgtgctaagcggcccagttctgggttctctcctggtgcccacgctagtccctagcc

SEQ ID NO: 230898 - DNA, 232 bp, Homo sapiens
  chr5:2038419-2038651
  hyper
aacactgcactgttgaaaagcggcatttgcccaggcgtttcctctttacagacgagtcagtgtctttgccgtttggaaccttgtcttcactatgggatggcacttgatcgaggcggccccgcagcctgttccgcggtgctggcgtctccctctccctggcgaggctgccccgaacccctctgcaccctccctccaggtaccgcccctgggaggtccggtggggaccacggcc

SEQ ID NO: 230899 - DNA, 2366 bp, Homo sapiens
  chr5:2738855-2741221
  hyper
tgtgcctccgggaccgtctccccacctgcgggaggccaggtgtgtggctccagagaccctccacctgaactacccgctcccagagccccagtcagggccgccagaggtcgcggagggtgaagccaatgggcctggacgccgaggccggggagaggaaggagcgaggtaatggctgtggctggagaccctcttctgactccccaggctgccgggtaggcctactgtgggatgggactcaggcgaccagacgtgctctccgtcgcctccatcccggccgctgactccgctgtgtccccttggatccatcaccacctccaggcagccctccagcgggttctggtggcgccgagagcttcgaggggactcaacgcgctttgtagggcctgtgaaatccggcttgtcgcataagctccctgaagaagagaacaaacttcccagaccaggggcccgcggggagcggtgcagacaccgcggcaacccaccccgagcccgccggccctcgctccgtgcgcccaaggggcgtcccccgaggtgtcgcctgcaaggcagccgcgtacgtcgttctcagtgcgggtcctgggggcggcggtgccgggggtacggcctggggtcccgtcggtgtccactgcccgcctgggcgctggggccgcagatcggggctacacggctcgcgccgaccgaacgctgccgccagagcggtggaaaagcgctgggcaggccggcctggggctttcgagctctgccgccgagcgcagcagaaatacggtgtgcaggcaggacccgaaacaggagagaccggggggaccggggaggagaggaaggctggctgtggcaggaacccgggcgctcggcacctcccctggtcccgggggccctgaacccccgccgccgtcgccgccggaccccgcgatcgtcctgaacccgggccgggcgctttcggtttcccggcgctctgcggcgctgctttgttcaccctgcgcgcgcggttcccagagtccagagctgcgggcctgaggctgagggccagggagcgaggcgagcacccggggccagccacggaggagtcccgaccaccacgggagcagggggactgggaggcaagaggtcgggggaggccggggtcagggcgggaggaacccgatgggtcccgctgcggcttcaggcgcggggtatagggtaggaccaggaaggggactgaagcccgggaccagagctgggggtgccaggagcggggcctccagtgggagctcgggggtcctcgcgggttcttctgggtcggttggtggctacccatccccagaagcctggctgcattcccctataaggaggcttcggagggcccgactgggtttcccctccagggcaccgggtcgcaaaagcggcgtcgaaaactcatgaacaggcggccgggtctggggccgccggggcagtcgtggcgtgcgggggcgggggtcctgcccatcaggctgacttcagggtctcggtctgcggcctccctggccgtcgctgcctccttttccaggtgcgcctcggcccagggctcccagccaccaccttggggccgcagaaggcgagcggtcacaccggggctgaggtcaggagccggctcaccccctctcctgcgactgttccctgacctgcgactgttcggttctcccgactggccttggtcgttgccttttagggtctcggtgtgaccaactaagcagacactcagcggcagcgccgcgcttggggagactgcagggcagaaatgggcctagaggtgaaggagcccttcccaaatcggacagtcccggggctggagagccgggagcaacccagttccctgaagaaatgattgcagctgctcaggcaaaacacgtaggcctggaaccaaccctgggtgggcgtttaagggcttgagccagcttctgcccctcaagactccccagggagcacgcgcctgcggggaaggacgtgggccgggtggaaggtggcccggaaccccgggaagaacgcgggcagggcaccaggcaggcagccgggccagcgcctccagctcccgcaccttcggcccagggtctccagcactgggaaggcgacagcggcgacagtgcaccgtcccccttgcacgcactgaggagcctgtcttggagctgagacctcctcgccccctccgagcttactgagcacccggccggcagccccccgactccccaggatgctgccttgaccccacctaatctggtcactcacctcctaacctttcagggtccaagaggacccgcgtcctgccccaccttgctgggtgcagagccgggtgcacgcgggacccgcactcgctctgggcgaacacgcagcgcccttcccggcctcaggccgag

SEQ ID NO: 230900 - DNA, 324 bp, Homo sapiens
  chr5:2743446-2743770
  hyper
gaacaaatgttgacatttgacgggcgcgggaggcagcgcccgcgccggccgccgggcaagcgccccggtgctctcggcagcccccggcccccggggcccacctgagattaaagcgcgaattccgataaatcagctctaaggaaaccctgggccgcggagagcagaagggctgtcgcggatccaccacgcgggcgccgggccgcggagccgggagcgcgcccaggcctgcacccgcagcaaagccaaggccaccgccccaaagcccatctgctcctggtcgccccgttttgccgacgtctccccggcctcagtcaacaacagcaa

SEQ ID NO: 230901 - DNA, 343 bp, Homo sapiens
  chr5:2748162-2748505
  hyper
tgtaatttgaatttcgtggcaatctgggtttgccgaaactaagacagccacgatagtaatagtcaaaataacagtaaattaagtaaaaataaataataacagggcaagtctaaaaagagggccacaccttctttggcttccatctcgccctccgccctcactctgctaattctgggtcccaggagtggccccctggatcttcttcccggaccctccctcgggtctcccgggcgctccgcctccccggggctggctctccctcccctcccgggcgccgccggccgcgggccgcctacctttcttgggctcgtagccgccgcccggggaccggtagtgggactcg

SEQ ID NO: 230902 - DNA, 575 bp, Homo sapiens
  chr5:2748741-2749316
  hyper
cggcgcggcggccgcgggcagccccggtggcccgcagcccgggcccaggctcggctgcttgaggtccgacgtggcgatctcggccagcgaccacagcttgggcttgctggcggggggcggcgcgcccggagacgtccggctgccctggggcgtcttgcggccaccgcggggcgcggcctcgggcggggggctcagcagcggcgcctccaagccggtaagcggcgacgaggtcacgggcttgggcggcgccaggccccgctcgccctcctcgtcgtcgtcctcgtcgtcctccaggtcgtcatacttgtccttgcactccgagcccgattcgcacagggggtccccggcgcggcacggaagcttctccccgtccgactcggccgagcacgagtgatccgtgagcgagtccacgtgcaggctgatccctgtgggggcgcgggcacggtgggtggcacgaggggacagcgcaggcacctggagccccctccgccccctgtcctgcggcactgggccctccccacgggacccctcacctcgcccccacccggccacgtgacaggcggagcctgacctcc

SEQ ID NO: 230903 - DNA, 396 bp, Homo sapiens
  chr5:2749553-2749949
  hyper
gcttctggtagcgtcgccctcgtcctcgtcctcatcttcgcttttgtttctcggggcccaggtcatcttgttctccttcttgaggcgccggcgcgcgttggcgaaccaggtggagacctgggtgagggtcatcttggtgatgatggctagcatgatcttctcgcccttggtggggtaggggttcttgcggtgctcgttgagccaggccttgagagtggccgtggcgtcccgcgtggcgttcttgcggtacgcggggtcgttgagctggtacgggtaggccgcgctgccgtacgggtggtagctgatggcgccggtcatgccggtggtgtgcgcgtcgtagggtgcgccctggaaccaacaagagcctgtgagtggagtatgcggagaccccgcggg

SEQ ID NO: 230904 - DNA, 3999 bp, Homo sapiens
  chr5:2750510-2754509
  hyper
cgagggccggcagtcgcgacaaccccgtaatggcctcaatcgcccgtaacgtgcttcgccgcggcccgggcctggcccagctcagtaacctcgagactcgcgagccgcccccaggtcgccggagcaggagctgcgctcgggccacggaggactcaggcggcccttagcgggtcacgcgcccgcaagcacgatatttgaaagcatggtccgctggacagagtaaggccgaaacctgggcgcctcgggccggactccggagccgcagctgaatgctcggctcctgggcctaactcggtgacccccaccgccctgagccccgcgagtgaatgcgaaccgcccggccgtcggctcagaggccgcagtgacgcggaccctcgcgccccacgccaatgcaggcgagcacacagcccgctccgaacgcctccccaggctgcggtgcggaaaccagggacaaacggcgccagaccccggccccggcggagacgcacttcccaggctctcagagaaaatcagccggcgagccgaggggacgcgcggggggcgcgcgggtcccggccgggctcagggacgtccccgcctgccgcgctgccctccccacccggggcccggctcagcctgcggggcggccaaccgagccggcgactcctgagtcgccagccgcgccacattcccggcggcccccgcccgccgaacccgagccccgctccgcctgagccccgtctgggtcccggcgcccaggagtcccgcgtcccgcccgcgcccggttaccatgtaggacgggaagccggcggcggcggcggcggcgtcggccgagtactgcagcgggctcccgaagccggtggccgcctgcgccgtgaaggccgccgagcccgggtaggggctgaacgccgagcccgacgccgagcgcgccagctcctcgctgcgcggagccgccaaagccgacgcgccgtaggccgggcacgagtagagcgccagcgagccgggcgcctggtacaggtagccctgcgggtaggacatggtgggcgcggggcgcggggcccgcgtcacgccgagcagcgggcagggcgcgcggcgccctccatccacgcccggccggggcgcggcgcggcggcgggcacccggacggccggcggaggcaggccggcccgggtactagcctgggcggcccgcgggccggggcggcggcggggtggcggtggcggcggcagcagcgcggagccggtgggcgcagccgcgcgccaggccggcggtcggggtttgggggagtctggagtcgggagtgaggagttgaggaaggagcgctcgagtttccgagggacattggaacgcgcagctgtccatcacgcgctcatctgcatattcgggggcccgcccctcccctgctccgcccgctgcagcctccgggccgcggccgggggaggggcagagagacgggagggaggcgggggagggcggaggcgacggaggcgggcggcgggagggaccggcaggcttttgtggcgcagccgcctctctagcagctccggccccagcccgcggctcgcggacctgcagcccagcccggccgcgctgcgtgccccggcgcgcacccctcccactcccatccactcggagccacgtcccctgcccggctccggccggctcccaccgtccccggccaccgtcttcgcccctgcccggcccccgccccttccagccactaccccgcccccacccccttctccaccctcacggactaggcagaggccgcccgcggtcaggccaggccgggtccaattaggggactcacagcctgccccgctgtgcaccccgaggaggcccggcccctgtgtccaatccggaagtcgcagggaagtggggaggtcaggatggtggcgcccgcggctcgggtcttcctccgggcagtgcgcgcggctctcacttccacggtcccggacctgctctgcctcctggcccgaggctccccgcgtggcctcgcgtctggtcgcctacccctcgcggtccactccgcccagcatggacctggatccggggcgccttggttgcgaattgccaggagggccctgaggtgagctttctgcccccaaatccgcagcgcaacccccggggccctgaacgttacgactttccactgttgggaatgacgccagggcttcagctaagaagacgccgtcccctaaagagttttattttattttgtttttctaagttgactcctctttcagatttgtgttgtcaaaacactggggggatgattgttacctgacaaaccgcctctggcaggacctgaagcctcccagtcacgtcgagaacgggcaggagctcaggttggcgccgccggtgcagtgggcattacaggtagctcaggtgacgcgcggctggagtaggggggcggttgccttgcggggctcagaagcgaggcggttggcgagggttcctaggaccccagcttcctagaaccctctccccatcacgcttctccaacccttttccactcggggatggccgaagagggcgtctggctgcccactccgaagggtcacctatggggggcgctcagggggatggaagagtgtcaggtctgtgctggcctattgggagcacccacccagcaggtgcctctatcctcggaagccgtctcgggtgggtgcggtggagaagagagagcgcagtggcctggggcgggcctcagctcaggcctgcagccgactcctgcacccctgctggccctgcagcctgcggagcagccttagtgatctcaggacgcagggcatgttgcggcctccctgtggtgcggctgcagcggcgcggagggagcggagcccgggttgccagtctggtccagggcgcaagagaaacactcacggcatcaggctgtctttccccaggtgcaagggaaccagttgcaaactgcagtgctgtgcttgaggatggctcctcctgagccggcaggctcccggtaggcgcggtccaggcacgttacccctcccgccaggagctcccgagccgagccactcgccccctaccagttatcccacccaccccttcgcccacactgctcccccaccactcttcctacaaaccacacccccatcctgcacacatcctcttcaggccatctcaacacacgcacacgcacacacacccacgaccacctctccctccacccacagacaccccgttcccacaggctgggccccctgcaacgacccagcggggggtttcaaccttgttgcgactccacatgggacatcctaattcagtccaggacagatatttttaatcaattactatagagctgaaaaacagagagagagagaaagcagccgggttgggcaagccgtcgacagtctgcgacatttttgcgcttcctgggagggaattcctccaagaagaggggtaaatgagaggcccacacgctggatggcaaacacaaacactgtcagatcagatggcaacctttagggttcctttacgatcagatcagtttaaatgaaaaaaaaatcgggtgtaatttttatcaccagggagcactggcctggagtatttccatttctaaagagcggttcccgctgtggtttcattagcatttggggctcatcctccctccccctcccttgacccacccccctccccccgccggacctctgccaggggcagaagagaaaacagccagttattatacaaacatcctcagtttggagctggagtgtctgctctggatacagtcgattctgacatcaattaaatatataaccagacacgtgcagtggcggggagggtcccctcacccagggtgcatctccagaaacgccgcctgcccttccccctctttagctcagtgttgggagtttgaagatggcctcttcccgtcctgtgtgtattttccccttagcaattatactcctccactgaaatctatatgttccataccgctgctgcctgttactaataaaaaccgtctaccttgcactattaaacagtcgactcttactacat

SEQ ID NO: 230905 - DNA, 2757 bp, Homo sapiens
  chr5:2754741-2757498
  hyper
cgcggcggtcccggcgaggctgcctgagagggtggcgggctcagcccagactccgtctcggggccacgagggctgcaaggccgcggctcccgaagaggagggcctgggatgttttgctcaagggcgaggcggggtgctcaggcctgtggggtcgctggggagagcccggcacttggcttctgaggcttttcagttgccgtccgagcaggagggagggaatgagcaggcacgcagggaaaacccagtaactgctttgcaaacgcgacccctggtcacaataacccaggcgatgggggcagtttcaggttcctggtgggccctgccccctttcctaggtgtgccctaggaggtggggaaaaaattaacactgtttctatttttctttattgtccctgcaacagccaaagaatttagaacgagtctacgtggacacgcaagtttcagcgagcggggatttcctgcgaggccgagcgcgaggaacagccggccccggaggctcgggctcggggtctccccggggacgcggccgactgagaaggccggggcgctcgccgggcgcggcgccgtcctccgtgtcgcggggacggaaggaggcgacgcaggccaggagtcgtgcgcgcgggcggcgagggggcgctgtggcccgtgtctgccggcccgagtcccggcaacggtgggcgcgacccacctcctcccccggcggcttaattcggggaagaagaaaaaacggcatcgaggcatttcaataaaacctaagcgactcctgatcctttctcattgtggttccttatgagctttcggtgtctggcggggaaacagttaccgttcgggggtgtggcaaacttttttggcaattaagatgaaacagacgcttttatgtgggtttcctttaatgaagtaacattggaaatgtaagtagtttcagtgcatcaaatcacatcgctaccgtattcgcggtcaccggccctcccgttccagggctccccgcgtttgtcgagggagagagcgaggcaggaacagggggccggggacatgagaagtttggctaagaaatttttcttttctttgaaaacaaaagcgttgttataaatggaacaaaatttaagtcaacatggaacccacatctctttcaaacgtcgtttctaggtctagtactctgtgagtaggttggactggatttcacgctcaaccggcatttctaggctctcaaagacgcttccgaggcctaaatgttttcctggaaaacacgtgcagaggagcatccgtggaagactgaaaggtccccgcagctccagtcctggcaggatgtgcaaggcctctcgaggttttcaaatgggcccccgaggcctgggagatccccgagtagccacgcgggcgccacttcagggacgcggggcggcggctactgtgggccgggagggcccccgcacgggctgctctgagcgcctggacccgggaccctgcgcgcgctcttttctttttctttcgtttctttctttcttatttataatttacattctagggacctcgtattcagctaaccagctcttgcttacttaactgccctgttttcagctccggatttctgggaggtctccccatggctaacttgtccctcccggcatcctttagcgctctgcaaaatttgccttcctcccacagatgccccgcctccgacgtgcttcctgaagtttctctcccgctcagggtgcccacaatcctgaattctccagcatctcgccgactccgtctctaccctcctctccttcctaatctcgcgctggcttcgcccttttctctctcctcctccttcctacgcgccccgccccctccccccaggtcgcacctctccccgcccgggtcgggagcccctcgtggccaggcgtccgcgcggctcaagaccgaggtccgccacgctgggccgctcgtgggcggctctcacccggcataccgtggaaacggcgcgtcccgccagctgcggctccagcctgggagggagcgcagcgcggggagcctgcagcgtctggagagtgaggaaaagggacattccttggaaatggacagagccgagttccttaaagggatcgcagttgaaagagaccctcttcaaaatcagcaacgacctggcagccttagttcctcaacaggagatggttcgaagatgaaatgtttgaaactccgccgccgtttcacctttgcacacacgcgcacggcaggcccagatccgcacagagacgcagacacgcgcgcgctcgcgcttcccggagaggtcggcgcgtctcgctgaagctgttctggtcaagtggagttgtcagggctttgttttgtttttgttttgtcttttaaatgtgttttacaagacagtcttcagcagaacttagctccctcaaccctccgtccctccagcagctcctccgtggctctgcaatcttctgtttaaacaccagagcgcacctcggtgctggcctcggcgggggtgcggggtgcgggtcgcggggtgtgcggtcacccaggaggctgcgaagagtgcaggggtcagctccatcccgacgaaagcagataggactcctcgctcgcaagaaacactggagaaaagaaaataattcctcgagtgtttttacaattattttaatccaaccagcgaggctctaaagagcgtttgtcttgaggccgtgttgaataccctttgccaactgtaaattcggcgtgtgtgcccgaaactgctagccctgaccaggggctcggcagcacatggcc

SEQ ID NO: 230906 - DNA, 265 bp, Homo sapiens
  chr5:2757844-2758109
  hyper
ccacgcagaggagacgcctgagaatgcgcacattcactggttgtctatctctagacaacagcagatgcctcttcacaccaatcgatggcacccagaaaggcctaggatgtgccctgttcaaactctccctgcggtgcagcttaaatttctatagagaaattcgggagacatttggccgcatctgaaagcgcagaaggtgcgtgctccctggcacccagcacacaggtgttggggaagcggggacgaggcagccctggagcatggt

SEQ ID NO: 230907 - DNA, 332 bp, Homo sapiens
  chr5:3121976-3122308
  hyper
tgacaatgttcactttcagccgaggatggccaggaaacagttaatttgatttgcgaggcgaaaaggtcgcatgttttgttcagccctttctcagccccttcctccctcgctcggccccagatccatggcagcgcggtttctctctgccatagtctcggctgtgtcatggctgcatcccacgtgggcgacacacagtgccccagcgccaggcagcggggacaatggtccccagctcagggggttcctttgccggcgtcccttccccttggaatgcgctttcttgcacctcctgtttacaaacaaaataaaacggcaccaagctaaacagccaa

SEQ ID NO: 230908 - DNA, 221 bp, Homo sapiens
  chr5:3197806-3198027
  hyper
tggagaggctactgcgggatgtgaggggctggcaggagcggccctccctggccttggccattgtctttccggagaggcattctgcccccgctcccgtcacttgcgatgagtcccctttcccagagcggcgcactctccaggccagcagcacaaaagattgctttgctcaatcttgagcttgggtgcgcccggcacgagctccgtgacgaccattctcagct

SEQ ID NO: 230909 - DNA, 227 bp, Homo sapiens
  chr5:3590400-3590627
  hyper
gcagtttcagcttaaggctgcgggttaaggttagcgggacccgttgggaagccacagtgatcccagggctctgggtcactgcgggtgcgggtgcgggtgcgggtgcgcacagccagggatcctggcgggagccactgcggtttcagctgcatccgataggccccaagcgggaggcgattctgaggccagcgctggcccaaagaccagaggacctgagcaaaatgaaa

SEQ ID NO: 230910 - DNA, 234 bp, Homo sapiens
  chr5:3590987-3591221
  hyper
atggtgcctctgcccccgagcaaccgtctggtgacatcaaataagaagccctgagaactctcacaccgctgctgttgttcatattggaggcataatggaaatgatctggttaattaaggggaggtttataaaatatttacgtgtgtgcacacgcatgtaattcacttccttcgacactggggacggcgtcgtagcggcactccaggccaggccactgcggtccattcctctgcc

SEQ ID NO: 230911 - DNA, 463 bp, Homo sapiens
  chr5:3591581-3592044
  hyper
gggtcggagcctagggaaccatcgagtcgcagcggccggacccaccgggggtctcaacagctgaggactgtctgactattgcctcaatgtcgccgacttgggtggcctcccagctgctgctgagggacggtgcgaagtcctagtgcgtttttaagcagactcctaagtctgcgcgcgagtcggggcgcggcgccaggtcaggccgcctccgtcgccaccgagccgcggcccagcgcagagccccgccatctggagctgacagtggccattgtgaaggcaggaggccagggccgcgccacccgttgcatcccgcggcaggtctgtgtcgcctggttctcggcgccaaaggctggtcccacagacggcttccgggagtgatgcgtccccacgagcatcctcctcttccttagcgacccccggactgcagagcttcaagaccagcgaactgtttcccaagaaataa

SEQ ID NO: 230912 - DNA, 799 bp, Homo sapiens
  chr5:3592384-3593183
  hyper
ccccctgcgctccccgagacacgcgcgctctctgcccatgccgctgcagccggaggcctgcatctgtcccagccctggacgcgctgaaggtcctagcttcccagcaggggtgtcccagtcaccccccattgccgagcttcgcggggtcttgccagccttctgggccacgtgccttgggtccccggagcactggggcccaagggcttccggactggatccccggcgctaagcaggaggagctccgattccgctgcgcagcgacccctagacctggttttgtcaggctcctcgtctttgtctctggcacagtgaccagggggcagccaccgggtgcggccagctccgccaggagcaacttccggagcagcggcagggcctgcctcagccaccccctttggaggcaggaaaagtggctgaggggccaacaaagtggctctctcctgcctcagaggtccagcgcctcacagctggggcgtcggtttcgaaggccaagcagagggaaccacacaacctcccattccaatgtccatcgcctttgcctggcacccctagggccaccagagggatggtcctagatgccagtgatgctgagtccgggcagcggcaggggcagtctctttgagggaaagttttagaccttctcacgacatttttaaaaggacgttcaaatcaggcccacggattccagacgcacagcccttctgcctgctccagcatctgaggccatgaagccctgggccccactgaaacatttgctgctgaaaatgagtggcagaacgagtgggaggaaactctacca

SEQ ID NO: 230913 - DNA, 987 bp, Homo sapiens
  chr5:3594164-3595151
  hyper
ccccaccaaccctcggcgtccccacaaacccagcccggaatctatgtaaaagcaggaaaggaaccctggaggttgtaggcggatcctggagtgtggaggggcgaattgagcgcgggaagcagcatgactagcaagacaatctgactcagagcagggaaaaatcaagcccgatgtcggagctggttattagtaattactaccatcacgggcattattgttgctaattataggcgatgtctcagtgtctgtcctcaggcccggaaaaccggagcccctcctgatgctgctgaagtccctgggcctcgaggctccgtgaagagagggaagcgaggcagggggtgaagggaccgcctggccggtgtccaggatacgggtggctcaaaccaccagcagaacagcatgccgactctggcccgatggccgccttcatcccgtagccccaacccggcctaaagccgagaagacgccagagtgcgctgctgaaattcccgcggagtccggtgtgctggagagccgcagcggggtgaactcccggccccgtctctgcgtaggaggtggttcgcaaagtggccccgggagccgggactggtacccggttccccacggcaccgtccggagctctccagccacgaggcgcagaagtggcctgccagcgccttcccaggctcagggaggcgaggaggcccgtgcacttggcatcttctcccgggagccgcacggccagggccgcggcgaaacggagcccatctcaagtgcgccgcgcctggccgcgtcctgtagcccgacgaggctgaggatggagaggggagacgcagggagaagagggacgcgggacttggacccaagaggccgctccgttgccggtctggcggcggcgccgactcgggttcgcgcgttccacacaagtttcctgtctgcctctgcacacctggtggacaaaccgggcgtccaggccacaccgtcttcccccttcgcgggggcgcgggg

SEQ ID NO: 230914 - DNA, 74 bp, Homo sapiens
  chr5:3595811-3595885
  hyper
cggggcaccacgtgctcgcgggaggggcgggagcggccggcgagggcgggcgggaggcagggagggggcgggag

SEQ ID NO: 230915 - DNA, 710 bp, Homo sapiens
  chr5:3596245-3596955
  hyper
gcagtacctgagcgccgcggggccgggcgcctacggcggcgagcgcccgggggtgctggccgcggccgctgcggcggctgccgccgcctcgtcgggccgaccgggggccgcggagctgggcggcggggcaggcgcggctgcagtcacctcggtgctgggcatgtacgcggcggcggggccgtacgcgggcgcgcccaactacagcgccttcctgccctacgccgcggatctcagcctcttctcgcagatggtgagtgcgcccggcctcccccgcttctcctctgtctcacccgcgccagggcaagggtggcgggtcgcccgggagggagagactacgggtggacctggtccggaagaggaactagaaaggtccgggggcaggttcccggtggccgaggccgcggcccccggggacgcaagagggctgggaggccgggcgggtgacggctgggccatctcggcctgggaaagcggaaggcccgggccagggagcgggtagcgagtgaattcagagaggccgcagaagcaggcccgtggagcggtgcccgcgctggaggtcgggggcaaactcgcctggctcggccagggcgcccgggcaggcccacggggttcctgcaggtcggcccggcgtagcgtagcaggacttcccttcctggccgcgggttccactcgcgcggcctctttagttttcgaaccgagtctggaaaact

SEQ ID NO: 230916 - DNA, 437 bp, Homo sapiens
  chr5:3597337-3597774
  hyper
cacttaattctccgcgggggcattggcctgtctgccggtccaaatcatccattttccttggtctgactgcaaggtcggtgcttaaacttcggacggctggtgaattgtgcggcgggcgcggggccctgggaggcagccccctcctgggtcgctgcccgcgggataaagcaatttccaagcacccgcgatatctccccgctccccgcaggagaagcggggagtaaacgcccctcaagtgtgcacaagcaaagagcgggtttccctgtaacttttcttgtagttttgaaagaaagcggcccggctgcctttcaggtctcttactatcgaaaaagatcagcccccattttgttcaggcggcggggaggccgggacgcgatgagagatttacaaggtgtcctttcaaaaagaattcccagtggagacgaggctgaaacgtc

SEQ ID NO: 230917 - DNA, 732 bp, Homo sapiens
  chr5:3599385-3600117
  hyper
cttcgcagcccacacggcgccggcttattacccctacggccagttccaatacggggaccccgggcggcccaagaacgccacccgcgagagcaccagcacgctcaaggcctggctcaacgagcaccgcaagaatccctaccccaccaagggcgagaagatcatgctggccatcatcaccaagatgaccctcacgcaggtctccacctggttcgccaacgcgcgccggcgcctcaagaaggagaacaaggtgacatggggagcgcgcagcaaggaccaggaagatggagcgctcttcggcagcgacaccgagggcgacccggagaaggccgaggacgacgaggagatcgacctggaaagcatcgacattgacaagatcgacgagcacgatggcgaccagagcaacgaggatgacgaggacaaggccgaggctccgcacgcgcccgcagccccttctgctcttgcccgggaccaaggctcgccgctggcagcagccgacgttctcaagccccaggactcgcccttgggcctggcaaaggaggccccagagccgggcagcacgcgcctgctgagccccggcgctgcagcgggcggcctgcagggtgcgccgcacggcaagcccaagatctggtcgctggcggagacagccacgagccccgacggtgcgcccaaggcttcgccaccaccacccgcgggccaccccggcgcgcacgggccctccgccggggcgccgct

SEQ ID NO: 230918 - DNA, 82 bp, Homo sapiens
  chr5:3600374-3600456
  hyper
gtacagctccaggccgcgtccacctgtcccctagctgggaatgcagaggcctggctaggtgtggtagcgtggggtgcagcat

SEQ ID NO: 230919 - DNA, 658 bp, Homo sapiens
  chr5:3600735-3601393
  hyper
ccccaggccagattcgccggcacagcagttaaagtcgcccttccagccggtacgcgacaagtgagtgctgtttgcttttgctatgggagaaggcggtggggaggggggaggaggagtggtcgggacccgggcggagctggctgggtggcggtgggggtcgcgcagtcctagttgaaggagcgctccccgccagccctgggcgccgggcgagccgaggagactggagtttctccccagccgggagccgcgctggctgtcgaccccgcccccagggctccgctactggaaccggcgtcgcccggcgctgcgtcccccactcacagtgcccctgtcttcttgtctcgctgtgtttcccatgcagctctctggccccgcaggagggaacgccgcggatcctagcagccctcccgtccgcctgattaagggtcttcttttacttttgcgggggggaggggggaggagttggggagggagggaatgtgggaggaattaagacaaatatttcagactggtgtaaaggacaaatatgacaacgacgtcaaggactcgcatccgtcgctttctgcagaaaggggcttcttcggtcccgagctcgcgtccaggtggccaggcctctgccggcggctccagtggctgcgattatcgggttcggtaaatg

SEQ ID NO: 230920 - DNA, 257 bp, Homo sapiens
  chr5:3601905-3602162
  hyper
cgattttataacgtcggtaaaaacagaggaaaaagaatttttattgcgaccccagaggagaacttcggattagaaaccagtttacaactagttgtctcaacggcgcatcgtggcgcctggtcgttttctgagttgagtgtgaaaataatggagtatcgctttgcatgtatttttagtgattcggttaaatcaaacacgggaagaaattggaaggctctttaaaactccacagatgggccagccgggatgcggtgcgg

SEQ ID NO: 230921 - DNA, 883 bp, Homo sapiens
  chr5:3602380-3603263
  hyper
ggaaacactcgcagcggggctggcctcgggcgcgcgcgagtggggaaaggcctaggagcctggacatcgctgcggatccgggacatcagcatcagtgggttcggagcgggacgcgcgccacgcgccgcagcaggcaccttcaggaggctttgcggacccggcgcggggccttcagggcgcaggcgactcagcgttgaatgcgtgaaaactgagccagcaaacatttccaaaactgccagcgaggatgtgggctgccgggaaaaacggtctagtggggacagggccgagtcccgaagtcagagccgagtcccgaggtcagagcggccgtcctccgctcgcacccccagcctgtgacccgcccttcccggcttgctcgagacccactggcgccagtgctgcgcgtggggactccgtgcatggccgaagcgagggggaaagtcggggcgctggtgtcttttcagaggttccaggaaagagggaggctcgcgttaggactaggaggtgccagtccacggctcctacccgctcccgacgcccgcatccttctacagccctccaccccgttcctggtccctgtagaggggaaggtcctctccctgccccgaggcgggaggaaaagcggcgaagaggaggctcgaagggcgccgcgtagggcaagtgggccgaggacaccgggggcgcgtcggggagcggggagtgggcggggtgggatgaggcagggaggagccgggccggagcggagtggagtggaccgcgggcggacggactcgggccgggccccggggagcagctccgcagtcggaatggacgtgctccaggcgccctctatggtccgaaagcggaatgcggccttgagcagcgcccatctcgctcctggggtgtg

SEQ ID NO: 230922 - DNA, 626 bp, Homo sapiens
  chr5:3606396-3607022
  hyper
ggcggccttgaacccgggagggagcaagggatggagctgcgccctgggtggcaagacatggcaagccaggcagctgggacctagagaaggctcggccgcgccgcaggatcccaggctgtgggcctgaatggtgaccacgcggagtcggagtcagctcgcgtccgcgccgtcccagctccccgcctgaacccggcgcccctccgcgaggaaaggccggccctggccctttctgggcagtgaggggggtcaggccgacccggggaagaggccgagcagtcagcgcccctccttcccctcgggcggggcataagtggccgccctctccgcggctgctgttgggcttctgaagacgcagcgggtgtctctgatcccctaatccatttatccagagtcccgagcgcaatggctggtgcggggacacaacggcaggaggtggcgggggtggagggagaccgggcactcagctagcgccaccctcctcccgccccacccgagacgctgagccacgacccaccctccacgggtcccacgccctcaggcagaacgcaatggtgggaatgacgccaaggtcggtgaaatcttccaaattgaagggcttttattttaaattccgattcccctttgaa

SEQ ID NO: 230923 - DNA, 360 bp, Homo sapiens
  chr5:5139858-5140218
  hyper
tctcccacgtcctggcgcccggttttccgcacccagtgtccccacagctgtgcccgggcacagaggcgcggccagaccgcactccgcgggctgcaggtgtcccggcctctggcggcgccggtgcggcccggaggtgggagcccgcggagccactgcagtagctggagtcccgccgagtccccagccccaaggcagggcaggagcgcgcaccggccggaggtccatgctgagcatcgcccgcgccggtgcccggcagcctctccaactgtgtggtccccgcgcgggcagagaggcacggactgcaggccgtgggcagctccatcttcccgcgtcctcctcctctggcgctgcccgctgtct

SEQ ID NO: 230924 - DNA, 340 bp, Homo sapiens
  chr5:5887042-5887382
  hyper
aggctgtctctgaagcatcacgagccggtcccaacacgaacgtggaggagcacgcagcagcatttcctgcaacaccagcctcgctttgctggcgcacagacccaggcatccggccgggtccccgcagcccgtgtgcccgctcccgcctccgccagcagagggagcgcgcggccccgcccaggcacctggcggtgacacctgccagcttcagctcctgcccatcagcgctgtgccaggggtgggaaggggtggtggtggtggcgggggcggtggggaaggggagtcgctccctttacccctgccgtcccgggacctccccgtttgagaaccaatcactgag

SEQ ID NO: 230925 - DNA, 78 bp, Homo sapiens
  chr5:6378229-6378307
  hyper
ctggccatgacgacgtctccaaaggggcctcaaagaggttggctcttggcaacaggctggagcgcgggccccgccctc

SEQ ID NO: 230926 - DNA, 105 bp, Homo sapiens
  chr5:6449544-6449649
  hyper
cttcctgcccctgctttccgtcccgtctctcccgtccccgtctggtctcagtctctgcccgtctctctggtatcggtctctgccgtctctctggtctctctagct

SEQ ID NO: 230927 - DNA, 638 bp, Homo sapiens
  chr5:6583141-6583779
  hyper
ccccgcttctcgggcgtcggggctcgccgcagtcacgctgcacaccctcccggcctagggcggcgccggcccgggactcgcgtgtctccccgcggcgccgcgcaggacccgggcctcggagcccggcagcatcccctgctggccgctgggctgaggagccgcgggaggcggggaacgcggggccgcgggggctgggcgggccggagtgcgcggtagagggggcggcgcggccggggtgcgcggtagagggggcggagcggccggggtgcgcggtaaagatggggcggcgcggccggggctcgccagcaccagccctggaaccccatgggggacctcgacaacagcgcctttgcggcgtgggcccctttctgcagctcctccacccgcgcgctgtcggctccgggacactggggctttgaagggcgccagttcccagccgcacctgcacgcctaggagggcgcaggccgcgtgtccctgtgggaggaaggccccggcaacctgcaaagacctcacgtcacagaaacttgcggcgtttgcccccgatgcgcgcgtcaggtgctccgtcccttccaggtggcagaggagagggaagggtcgcgcctggtgggggcctgagagccaccgggctgcggtgcgc

SEQ ID NO: 230928 - DNA, 406 bp, Homo sapiens
  chr5:6687057-6687463
  hyper
aaaactttctgaggtttgagcgaggtgttttaacaccatggacagcgcccctggttcttcgacccggatgcgcttcctaataaaacggcattccaggttctagaaagcatttcggtaaaacaggctcagaaacaccagattcaagagaataaccattatatgtgaatacatttaaaaatagatcacacactctaacaactgaaatgtacagaaaagatgaaagtgcatccgttaacgtttaaatgcccatttctactgatggcattcatctgcacgctcgcacagcggagcagctaacctttaggacagcgcccggggcagagccagctcggagccagcgctgcacagctgtgaggggccggctttaggctcacaccgcctgtatctgaaacgctgggacgggtat

SEQ ID NO: 230929 - DNA, 129 bp, Homo sapiens
  chr5:6714973-6715102
  hyper
cagactcatttatcgtggagtgacttgcccagatcctacaagtaacagtccaagaaaaggggctgctgggtaggacctgcaggtatttgtcttttttactcttgagattggaacgggaaatcgactctc

SEQ ID NO: 230930 - DNA, 1913 bp, Homo sapiens
  chr5:7395016-7396929
  hyper
gctcccacgcgtgtcgggaggggacactgtccctggtgacatccgcccccacaacgctcctgccgggtctctagcgcctcctgcgtccaggcccccaaggtgacagggagggagctactcccagggccgacccgcccgctcccgcgcccagccgctctccccggcgcccctttgccgccatccccgctcagcagaggggctcggcgaggaccacgaccagccacggggcagctctgtaaacctgtgatatgacaggcttatacggcacctccaaagtgtgactgaagctgagcgtgcagggcgcaacggacgctgcccccgcgaggccgtggcgggggctcccagtgcagtcactgccgcttcacttccacatggtgccggtctccagttaggtcccctggcgtttccgcgccctgccgccctcgcagggagccccggccctctcaagagggtggagaggatgggggagccctcaaccctgctacgctgaggggaagaagggctggacggcaaaccggtgcccaccgcggggaggcgggaagggtgggaaatcctctccagctccccaaaagagtgaaaaggagggagaccccgctgtcctctgacccgcgtactaaaggagggaccccccgggtcctctgaccccggctgcgctctgtgactgtgggggagggtgggagcaggccccgcagcccactaaggggtggaggaaacaggagggtggcagcgtccctgcccgctgaccttgaggtagtggagaggagctgaggagccccgcagtgctccgagccaggtggggcggggggagtggtgggggtaggactccctccctccaccccttaggctgtgttctcacttcgtagcggggagggccgtccctcccaccccacccacgctgcactcgggatagggcagaggaggtggacgacctggtggctgagtgtgggaggccggcgggcgaggacgaccccgggccggggcgcagcgggagcccctcagttcgccactccccccaccgtacagcccccgccgtccccagcctgcagccgggccgtcgggtgggggccgacaccgcccctgcacggaggccggctgcgcgcggggcggggagcggcgggcggagggccccgtggaacccgccccctcccgcgcggtggcggtggcggcggcggcgccgggagctgcccccgaggccgccgcccggcccccgcccgcgcgtcagcgcgcccagcccggggcgccgagctccgcccgcgccggaggcccctgcgcgcagctccgggtgccggcagccgggccggccgaggcggcgcgggggtgggacgcgggcggccgcggcgagcggcgctgcccgggccgggcgcgcacggcgggcgccctgtgagcggccccgatgtggcaggaggcgatgcggcgccgccgctacctgcgggaccgctccgaggaggcggcgggcggcggagacgggctgccgcggtcccgggactggctctacgagtcctactactgcatgagccagcagcacccgctcatcgtcttcctgctgctcatcgtcatgggctcctgcctcgccctgctcgccgtcttcttcgcgctcgggctggtgagtggcctccccgcgggtccagcgccgcgccttccccggccctgagaggagcccggccagccgagccgcgtcccgctccgggctgcccctcggcccgcggcagcccctcggcccgcggcagcccctcggcccgcggctccctgcttctcctgctggcccgcggcccggtggactctggcaagggctgcgggcgggagaaaagtttcctgggaaggctcttcccaaaataaagttcccgaggtgttcaccaggtggacgggcagggcgtgtgctttttgcatctttgcgcacccgctggcaaactctg

SEQ ID NO: 230931 - DNA, 441 bp, Homo sapiens
  chr5:7850976-7851417
  hyper
gcggtcctcacccgcgccgggcggtagtagtagctgtgctctttggggtccaggcgccgcggcgggatgtagctgaaggcggactgcgccgagacgggcggcggcctgggcttgccccgcagcgtggacgcggtggtctcctcctcgtcgtcctccatgccgccaccgtccagcgcccccgccttggccgcggtccgtcccgcccgcccaggggcccagtcggagtctgcaggcctcaggttgctcagcgccagcgtctagcccgcgtctgtgttcggtcgttgcctggaaaccgccgcctggcgacccggagctgccctgcagcattcccgctccagggtggagcgaccctcccctcctccctcccggcccctcgactacacctggggtctctccttccttcctcctcgggaggagcccgactgggagacgccgcgggga

SEQ ID NO: 230932 - DNA, 2162 bp, Homo sapiens
  chr5:9544614-9546776
  hyper
agctcccccaacccccggcccccaaaatgaaattattgcaagatctgcctggttctgctgtttgttgcctgggactcccgcccactcgcccaggacccagcaactgcctgtggcgcctcgtcctccgagcgctcgctcgcagcgccccctgccgggaatcccgaggacgccgcaggcgcaggaaagttaaatcccaactccggccgcggcatcctggtacaaagcaagcaaagggcgaggaggtgaacgcgcttcccgccaaagccaggggaacagggatgtgaccgctccaagccaggcaccggccgccgcggggagcgagccgggggaatcactcctccacgaccgttcccacgcacatcttgggagaaaccattccctctggagcccgatctgcccgaaaccctggggtctgaaaccctgagccgcggtgtgcaaaatccgtggagcagcggagggatgcctggtgaaaggggctcgcctagctgcagcgcacctggctggtggttccccaggcctctgcatcccccgccttagtgtctttcattaaccaaggcgcttggcggagttgagcccaagtcccattgcctcccggttcccctgtaaggaaagcaggaaaacctgcccaagccggtggggctgcgaggtggccgctcccgaaccgccaagtcccgacctccgtgtcccctgcccccggctcgcggcagtgcgagcctggaggcgcgccgggggcgggcacagaccagtgtgcgcacctttccgggtgttgggcaggggtcccgtctcgcccaccgcgacactccggctccttacctctccatgctcagacctcggcacaggcgggtacacaaacttccagcccgtgcactagctcaactgtgggcgcccccggactgacggtcgtcctaatcctgtacgcgcaacccccgcccaggtgcctgctgatggatcccacccgagatcggcaccacccaccagccgaccgctgcagtccccgggtcccggccagcggcgcggcgcggcgcggcgcggtcaggggctcctgccaaggccacgcaggaatcgggcgggggtcgctcaccaggtgcgaggagcgctggtgccagtcatccagcgcctgggggccagagcggctccgaggatcctcttcagcacctggctagggaagtggaggcagcagctgcagccgccccctgccacttccccagagccgccccctactcgctgagttccagaatgggggcaccggcttgggggccacgagcacggtccccgagcgcgcggccaaccggtgggtgggcaggttcgcgcccagcagagacgaccctcgaggtggcaaagttgggtgtccaagccagctccgcggggcagtcctgggtgggagaagggagcgtcccgggatgagcgacactggccgggccgcccctgcacggggaaggtggagggccggggctgcagcgggccaagggccgcggctggcctgaggctgcgaagcccacccgcggcgggaaagcagcgctcgggagcgggctcagggagagcagccgccaccggcgccgccttcccggcaagtagatcggcgcggggcgagcgggcgcggagagcgcggggcggagagcgctgggcggggagcgggggacagcctgggcccacccccgccccgccccgcccctgccccgcccccgccgccgcgccgcctcctcctcctcctcctccccgccggggtgaaactcgagcgccccacccgcgcctgacctccccgagcccctccccgggccccgccccttcccggtacaggacccccaccttcgctcctgggagccccgctgcaccccaggagttccattccagcctccccagtgcgagtgcggccgagcgctgacttttgggggctccctcccccgtctcactgggtccctctgcggctcccccgcccgctgtcccggttcagacgtggctgcaccccggaggggggcgccggccgagacctgagacgtggcgctccctctctgccggcctcggcttcaggtacgtgcggttccctcggctaaatctggcccgggggatggggggcaggggccgtctggtcctccggaactcgaactttgtgattttgttctttctgtgtgacatcctcatccgttctgagggagaaactcctt

SEQ ID NO: 230933 - DNA, 55 bp, Homo sapiens
  chr5:10250264-10250319
  hyper
agttcccgaaggccgccgattccagaagatactgtctggcgtgaaattagtctca

SEQ ID NO: 230934 - DNA, 326 bp, Homo sapiens
  chr5:10307607-10307933
  hyper
actatgggaagttccttacccgtgcacgcggcaaagaccttctttgccatagtcagaacacacgcgggagttcagaggagcggggcccgggcttgtgtgggcttgtgtgccccggggacgcgcacgtaccttgtcccgcggcctgagactgcgctgcaccgcgcggaggccgaacccagaggaggcggcgtggcgccgggcggggacgcgagagggacgtggacgcggcgaccgaggacgcggggatcctgcgggaccagtggctccagtcgtagcctcctgggagagccaagcccggagggggcggagaggtggaggagggaggc

SEQ ID NO: 230935 - DNA, 707 bp, Homo sapiens
  chr5:10333392-10334099
  hyper
gctctttcaagcttcctgcacgctcttagcgccagagcaccccagccgtcctgggagcccccgaagccaagcatattcgaactccgaatccgctcgatcgccggggacctgccatctgggttcggttccccaaggtcgctgccgaccttagaccgcgggggtgtggggcgccggggaaggagacagaaggacaggcgccgcccagggccgcggggacacttggggctgcgtcctgggtgggcgcgatgctcccccagaacgactggagatggagagtgtcggggagggaaacgggacccacgaattcagggcgctgagtcggcggaatgcgccctgactccccctggccgagagccggctcagaatgaaagagcgcggagtgggaggtctgggaaatggcagtatttgtattagggagagaaggaaacaggagtgggagccgcacggcttggggaacgcgggagatcgcggattgcggggatagcgcagcgcggctgcccggggctgctgggaggggccggacgaggccagggcgagcggggtaactgcggccggccggacggcggcggtaaccggctgcaccgaggtggttccaccaccgcgctgggcgcttgcggttcgtctgctccaacgaaagccgcgtcccacgctccctgccgccgcgtggttttgcctcctcagaggggcagcggcgacccaggggctgg

SEQ ID NO: 230936 - DNA, 502 bp, Homo sapiens; identical to SEQ ID NO: 199756
  chr5:10354850-10355352
  hyper

SEQ ID NO: 230937 - DNA, 673 bp, Homo sapiens
  chr5:10441676-10442349
  hyper
cgcccaggcgatcagccccttcacttaacccgcttccctcctagcaggcccgagtcccctagcctcagcctcacgcagccagagcaaggggaagagggagtccttcgtgagttcgccgctcacattcggcggtgggaaaccgatccgaagatgcttttgtaggcgaaacgctcagctcgcgcggctctgaaccaccggggagcagcggctgctgctagtcggactacgccagcacctccttgtccagcccgggagcagccccgcctcgctcagggccgcgtgcgcgtgcgcggctccaggggcggggcctgctcgcgtcccgggtgcctggataccgagcgcgtccgtagtggcggctggcgctagggaactgcagggtctagggtgttgtcggagtggcagttggtccgaatttctcccgaagcccgcggaggagcgggtaagagccccgcgaatccggccccaacctcgggaacgggatgggaggcggccctggccgcaagccccgcgctgctagcgggtccaccgcgtcgtagccgacagccgcccttcttcctcgcagcgcgccgcgattcaccagcctggtcccttctgcggagagcgatgccgcttcccgacaccatgttctgcgctcagcagatccacattcccccggagctgccggacatcctga

SEQ ID NO: 230938 - DNA, 220 bp, Homo sapiens
  chr5:10563416-10563636
  hyper
cccgcccatccccggcgccaggactgacggggagagggcaaggccgggccagaggggctgtgggcctggactgcggctgtcgcccgcggccctgctcttttgggcagccagacgtggggtcagcgcccagtcgcagcctccgggggtgagtccgcagatccccgcacgtgacacaggccaggcatggggacggggagttcctcgtcgtccgttcccactc

SEQ ID NO: 230939 - DNA, 116 bp, Homo sapiens
  chr5:10564288-10564404
  hyper
ggccaggaaggggcgcgaggggaaggccccgggggaaggcgtgtccccgcgccccgccccgccccgcctcggaaagcccccgcggtcccgcccaccccaggggctcgctcagcctc

SEQ ID NO: 230940 - DNA, 387 bp, Homo sapiens
  chr5:10565364-10565751
  hyper
acagcccctcctgcccagcgccccatttggcccctgggcccctcgcgccgcccttgtcctaacacgctggggcgcagatcggctcctccagccgcaatgatttggaagcaacagtttcttccctcgccgggacagcttggtcccctaccccacctccgctgagctttgtggcccgcgccgcgaccagccaacgtgatctctgactggtctgtccgcaggtcaccttcgcgagccaatgccagccggggctccccagagtcagggcatagggagagccccagagccgcgggcatccacccgggtagggcaggaggcgtggaggcaggcacaggctatcctttcgttatgaccagattcagagaaaacgagatgtttagaaaagaaaag

SEQ ID NO: 230941 - DNA, 96 bp, Homo sapiens
  chr5:10627880-10627976
  hyper
aacttggtgagtctcggtttcccagcgttgccttatcttttcctgtgagcttttctgagctcttctgattggccatggcagcgccacacccctgcc

SEQ ID NO: 230942 - DNA, 170 bp, Homo sapiens; identical to SEQ ID NO: 199758
  chr5:10988184-10988354
  hyper

SEQ ID NO: 230943 - DNA, 843 bp, Homo sapiens
  chr5:11384907-11385750
  hyper
agctggtggatgggcgaggaggagatggtggactgcacggtggggggcgaggtcacgcggatcggggacaggccggccgaggacacgacgatgttgatgggcgagctggtgctgtaggacttggccaggcggctgggcgactgcttgggcgaggagccgcgcggcgcggcgtaggtggcgccctcgggggccgagccgccgcgctgcagcttggtgggcgaaccgccctggggcgcggccagcggggagcccccgcgcggcggcgcgggcagcgtggagctggagtagtagagcgcggcggcggcggcggcgggcggcgcgtcgggcaggtggaaggcgctgcccaggctgggcgcgaacggctcccgcggcggcggcggcggcggcggcgcgggctcgggccccgccaggtggccggcgcggctggtcgtgccctgtgcccgggagaggagagaacacgcgcacttagcgagggagaagcacacggcccacccggcccagcccggccccgagagcagaggcacaccggggatgccgcgggcgcccggcggctctgcgatcccagctgcgctcggggcagtacgcgaacctgcgccccgaactctcctggggcggatttcttgtcctgacactggcacaggccagctgactactggagggaagtcacgtttgacaaatgagacctgtgtttgcttacatgtagatgttatttcggaaatagcagaagcatcgcattagtcacataaagatttttaaagccccaccccgacagggcaatcatgatctccctggtcgcaatcacaatctgtttgttttaatgagaaattcgggcagtaaatcttt

SEQ ID NO: 230944 - DNA, 1551 bp, Homo sapiens
  chr5:11903281-11904832
  hyper
acctggctttcaggcggcgctttctggagcctggctgtctattgtcagcacgcagaagcccccgaaacctgtgaagccggctgcaaaggcttgctgggaagccgctaaatatagaccaagggggctcagggtctggcaagccgcgggagcctgaagacacggccatggacgcatatgactaagtctttccattttgttctagccaaacatcgtaatgacattgaacataagggcaaaagactggagggaagtcctccccacccccaccccgtctcctcccgtatattagggacgtcatgaatgcaccgagtatgttctcagggtggcggggagcagcattgtcggtgttgccctaaatacgcttcctcccggggagatgggtggcagggagggggagcacgcagggcagccacttggtaaccgctccaagaaaggcactaaccccggacccccttccaggcacagcggcttccgagggggacctggcgcgatcgcggtcctccccgaggcaggcagaaaccccgcagcagccgccgccgccgcctgccggccgggagcccaggaccacccccaccagcggcaagaggaggaggacggcgccgggaggaggctgcgcccggccccggccgcccagccccgcaactcacccaaaggcgcggcgcccggcggcttcctcgcaaacatgcaccctccgccggcgacagctcctcagtccgggaagaggcgtgcgcggcgccgcccggcttcagggcaaggtcctgaccttgcccaactgcagcatcttccgcttttgttgtctgagcgcggccgcgggacaagggatgctggcgggcggcaggggcgagcgccgcgggcgagaggcggctcccgacgcgagtgcgcagcgcccggcccggcggcccctccgagctcggcgagcgcagcgccccctgcccggctccgcgggctccacgggctcctgcgggctcctcggggctccgggcgccgccgccagccggccgggctgagagagcagccgccgcgcccgcagctccgctcagccggctgtcgccgcgggcgcgagcctggggccgccgcggcgcccggcgccgagcgctcccgagctgcgccccgcgcgcggcccgcgccacctgtgccgccgccgcctcagccgccgagggcgaggctcctcccgcggcgcgcggcagcctcagcctccacctaaacctcggcggccggcccgggcgcccggctagtgagggagcgtccgccccgccgccgaaaccggccccgggtgcggagcatgcccagtgccgccgcgagagcggcgcttcgccgcgcgcgttccacttctcctggttttcgcggcagcagcggcagccgcgggagagaggggaggaggccgcgggttgggagagggccgagcatccttgggaacgcacgccctggacctgagatgggtggatgctccggagctaggcgaaagctggaagggacccgggaagggatggaaccccaggttactccgcttccctaattcacgtgcaaggcgctgacagttgactctggtgg

SEQ ID NO: 230945 - DNA, 338 bp, Homo sapiens
  chr5:14108555-14108893
  hyper
tcagttaaattcttctttgctaacttccatccttttatctgttatattattccagtctggtagaaaacacacacgcacacgcgcacacacccctatctttattttccccaactcctgaacgagagttacagtttcaagatttcttttaccagggctccccaccgccgcccccaccaccatccgccaccttggtcagcagggaccataaaataagcagttgcagatcgtgcccagtagggggaggagtgcccataagtcttccactaaatccgaggcctttctgaagcccaggagattttaaagaagccacgtgtttacgaaaacgtcttctaggttaa

SEQ ID NO: 230946 - DNA, 266 bp, Homo sapiens
  chr5:14142660-14142926
  hyper
agccggggcataggcgttttgaactagaatattcgtccagcgctggtttgacacggatcttccgcaaaggaacatttcttttggcctccccagaccccgtcatcttccccattcattctggcggagtaaggactgagaaaccgtgaacccgaggttcagcagccgaaagtcccctgggagatggggatacaccgagaggaatcccattttacaggagagctttgtacccttaggagtaccgtggcctccgggactggagcagataa

SEQ ID NO: 230947 - DNA, 45 bp, Homo sapiens; identical to SEQ ID NO: 199766
  chr5:14145000-14145045
  hyper

SEQ ID NO: 230948 - DNA, 153 bp, Homo sapiens
  chr5:14205132-14205285
  hyper
ctctctgtttccaccgtggctgcagtagagacagaggccaacatttgtggtgcaaagggaagtgcccacggattcaggagggcacaggattttattgtcttaaatcattaactattgcccgaaaaatccacagaacatcgttgtgtaactgca

SEQ ID NO: 230949 - DNA, 180 bp, Homo sapiens; identical to SEQ ID NO: 199767
  chr5:14581606-14581786
  hyper

SEQ ID NO: 230950 - DNA, 94 bp, Homo sapiens
  chr5:14810079-14810173
  hyper
tcaagccacagacacggactctgtttgtgttccctggtggcactagtgcctgttttcctgactctgacttcctgggtctcggcaccacagatag

SEQ ID NO: 230951 - DNA, 51 bp, Homo sapiens
  chr5:15500616-15500667
  hyper
ccctcccactggagtgcggggacctctccaggccggaggtcggccccggag

SEQ ID NO: 230952 - DNA, 96 bp, Homo sapiens
  chr5:15500847-15500943
  hyper
tcccggatcgcgtccctcctcccctttccctcgccctcccgactgggaagggaggttctcgcccgcggccgtgacgcaccccatttggcaccctgt

SEQ ID NO: 230953 - DNA, 1265 bp, Homo sapiens
  chr5:16179526-16180791
  hyper
ggcagcggcggcaggtagcgcggggccgcggggaccggggccggctctcccggcggcggcgtcggcggcggcggcgggggaggttgcgggggaggctcggcgtccccgctctccgccccgcgacaccgactgccgccgtggccgccctcaaagctcatggttgtgccgccgccgccctcctgccggcccggctggcgggccgggctctggctgcagggaaagagagcgcggagggggcgggagggagaggggaaaaggagggagggggcccggacgcctggggctagggggcgggacggggaggggatgcggaaggttctgcagctgcggcggcggcaggcgcggccgttcggtggagccgccggctcggctctgatggaggcggcgccgaattcggctgcgcgtgagagccgcgccgcggaagggggggccggagaagcgagggggcgggagggaggagcggcgcggcgggggtgacggggcgcgggcgcggggtgggctgggggcgcggatcagtgggacggagttcggggttcggctccgagcgggcgggctggaagtgggggatccctcagccgcctccacgggccggccccgcgctcacgtcggttccggggcggatgacccctctccaaacggcgcagcgctgcggctctcgtgagctgggaagtagggggcaggggagaggccgcgggtccagaaaccgttactggatgggccggtgggatgtggcgcgggccgggtggggcgcgacagtctgagccgagacccgcgtgggcttaagggtgcgcgaggcgggtgccctgggcgcgcccgaactggctgagcagtggagcgggaaagggcgcgggacccgggactgtaaccgccacttccaggccctcgctccccgcgcttggagccctcaagggcactctcagggatcctcgagagccttaaaacagaagtctctggaacctgtgtcctctccctgtctgtcccgccctcgaatccctgtgtcctcctcacccgctccctcctgcagtgagcatcccgggttgttggtaaagatcttggtgcctgggaggtcggagcttcgtctcctgaaatggtttatactagtgaaccctggcgccacgttctgtggcttataatcactttcgtcgttgccgcatgaggaagcaaatgacaccgccccttaccctggaaaagtggctgcagccttccccggatcttagttttactcaccccgaagtcaatttctcggtaactccaccctgcaaaac

SEQ ID NO: 230954 - DNA, 78 bp, Homo sapiens
  chr5:16616791-16616869
  hyper
gcaggctccgcagcggcctcttccagctcagcagctcgtcggcgcggcagcccagccacagcaccggctccccgagca

SEQ ID NO: 230955 - DNA, 345 bp, Homo sapiens
  chr5:16934294-16934639
  hyper
tcaggacgctgtagcgcgttatcctgatgttccccccacttgcactagggggcagagttctccccaagggggagccacggacccctgtggtgctcagacaggctacaggaggagtgagatccgtgcaaactgaatacaaatttctatattttcatcagattttctaagggacccagaacacaaaaacaacaaagttaagaatcattgccctaggggcagggcctccgttttcttacagatgcaagcaattaaacaccggaactcactgtagcccgagggtcctttaccactggacaacgtgcaactcttgcagaaagttctggtgcctttcgacaagcatgaaaa

SEQ ID NO: 230956 - DNA, 463 bp, Homo sapiens
  chr5:16936619-16937082
  hyper
gtgtttccccaggtcttcccacgtaggcgtggggaggggatttaactcttccctctgcagagagagactaaacaatcacttagaggggaggagaagggactgggggcttctgtgcctttcatgtttagcagacccgggaaccggctcaacacggatctcattaatgcagcccggtagactagcaatctcgggaaggaagcgcggtcagcggagctgccggggctgcggggccagatcaaagcggaagacggaggctaatcagaatttctggaagctgcattcccgtgttgactttctgtcctgcagtcgggtttgcttaagacgtttgcgtaacagcggggaaatgtagttttgaaactggaaggggacgtggccaatatcacctttaaaaatgtaacccttttctagacctcaaggaagcagagatggcagatggcactgagatggacgaatgatcaaaccc

SEQ ID NO: 230957 - DNA, 819 bp, Homo sapiens
  chr5:17216354-17217173
  hyper
gctgggacgcaggcgagcatgaaagcgatccaaacacagccagagggcgccaaaatgccgcaaataaaagttccaaaggcgtcaactggcttttgcgggaaggtaaaattggcttttgtgtaatcaaagagctaccgttgtcaacgatgtcacgttacgttatttttgtatgtccctcttgccaacaggtaagcaaagtgaacgcatcttcctaccccggtggctattctgtgtcccggtgctaaaccaagtgtccgcccccttagggcacccggacaagccgcggttggccctagctttgactcgagcgctcgcaagcagcagcgtgcgggctgcctcggccaaccccgtcttctcaatattggtggcctccattaaagcacagacatcaaaaacatcgacggcccctttcccctcttctcttccctccttcctctcccaagttccgagagcatcctccgaggggcgacgtctctcgccccaccagctggacctcggcgaccgcgcctcccccgaagctgcagccttcggggctgagccccgcgggtgcgggtgcaggtgcggagccgcccaaggtgcgcaactcgtttgcagcggcgcagcccagacgcgcctgcagctggggctcaccccaacctcgctgccagccgaggtagcggaatcgtagtcgacgtcgggagcgggctggactggggtctgagaagggtagctggtgccagggggtgtcattcatcacctcgaggcagctccctaagtctgagcgagagcccgagcacttcttatccaacggttccaaataaatgagggggagagagagag

SEQ ID NO: 230958 - DNA, 38 bp, Homo sapiens
  chr5:17217233-17217271
  hyper
gtccacggacagcccaggcggcgcggcgggggaagggg

SEQ ID NO: 230959 - DNA, 724 bp, Homo sapiens
  chr5:17218440-17219164
  hyper
tcagaaggaagtgggtggctttttgctttggcaaacgggttttctcgacccatgggactcctggatcttggttctggggccaaggaatacgaggttcacacggcgacgtgcactcagaagcacctcccgagcagatcggagccccagcctcgtcagtggcggaattgccttcctacgaacccgtgggctgcctcggagcagtttgttttttcgagcctttggttccaagaatgcgccaggcgcctccgccctgggtcccggccccggcccgggcccggggggtgtgggcttgaacctgacagcgcgcggccctaactgggctcagccccgctgggagcgtagggttggggttgagcagcttttgcccaaagcgctaaagctgaaacccggcgcccggttcctgctccccccgcccccgtcccccctccatttccagaaaaataaaaattgcggaatcctggatccgatcgcacgcacaatgcgcggctgcaaaccgcattcttttcatgaatattcatcgaacgcttggccaggctccttatctgcgtccccagagacatttccgccttgaaacgaactcggtggacagcccttgcccatgtaattctcactctgctgaaattagcacagcacacatgggtgcattttttaggaccttgtacaggttgacaacacctctgtctcccccgcggccactcgcactgtggggcgggctaaaacccaa

SEQ ID NO: 230960 - DNA, 84 bp, Homo sapiens
  chr5:21459584-21459668
  hyper
ctccagcatttgccgcgagttattggcaagttcccctgcagtttgggctgtctctgtggctggttctgcggcgtgcggccagcc

SEQ ID NO: 230961 - DNA, 691 bp, Homo sapiens
  chr5:22852992-22853683
  hyper
ccaaagcaaaaccacgcacaagctcctaattcagctgccagatctgtgtgcagcttcgttcagcttctcactacgctaggcatcactttattaatcatgtatgaatttctgtgcatgcaccctgaagcgatcacacacacgcggtgcaatcccaatcaaaaacggaagccttacctgatggcagaaaaggcagctgcaggagcagcagcaccgacggccgcagcagggtgccaacagctcagccttgcgcggaaggtgagacccttctcttctgtttcccctttccaaatcactgtgccaacacactgctttgcattttgtccgttttcattcaaagaaggttctccaggccgggcagccagtagacaccactttcttcctggaagaggctgcctctcttctcagaaaagcctggacccctctctgtggctccctccacatttacccttcagatcaataatgctctcggagcggctggagctcaactgcagcggcgagcggcgagccaatgggggcccaggattccctcctgtcatctccccgccctcaaaacaaaacacagcgtgcctttgacacatcattgagtagtgaaaagtaattgaatcctatatttgaaatgtattttgtttgttctttttcccccctagcgttcattgtagaatgctttgaatgaatccgaggactccttagc

SEQ ID NO: 230962 - DNA, 188 bp, Homo sapiens; identical to SEQ ID NO: 199780
  chr5:24644974-24645162
  hyper

SEQ ID NO: 230963 - DNA, 970 bp, Homo sapiens
  chr5:31193844-31194814
  hyper
gagcccgtaaccttcgcatcccaagagctgcagtttcagccgcgacagcaagaacggcagagccggcgaccgcggcggcggcggcggcggaggcaggagcagcctgggcgggtcgcagggtctccgcgggcgcaggaaggcgagcagaggtgggttcgggctccgttggctatgcatacatctccctttttttttttttaattctgtagcgttgatagaagccaatcagagagagagccctctccgcccggtgggtgccgcgccggagttgggagggatgctctcagcctgcgagcccgggtcggggcgggcgcgcgggtccggctgcgcgggcggcgctgctgccgctgctcaggaccgacgccgcttcccggggagcctgggcaccgctcctccgcctcctggtaagaccgatccgccgtggggctgggtgggggcaccgggaagcgggccgccgcagaagaacccgctgcctttctctacgccggcagaggctgccaggggagctctggcatttgcaaagttggctggtcaattaccaaagggcgctggtgcgtgcaggtcccgccgagccgtttggggcttgatttatctccacctgcccgcatcataagggtctgcgtggtgactgcttgggctgagttacatttcttagcttttggggtaaagcagaaaatcaggtagtctgaaaactctggaatgctcccagtaaggaaaacttaaactaaagagacgatttggctggtagaaggagctaaagaaaactgttagcttgcacgttccgggcaacgcctgccggctcatctaggacagaaatgcttaggttgcaaggaaagtccaacactggactccgaaaatggagcacactgtccagggaaaagtcatatggaaggcgcagttcgctcgtgctcctccacggctggccaggctcaaatctgggggataaagccttccccggactgattggaga

SEQ ID NO: 230964 - DNA, 158 bp, Homo sapiens
  chr5:31532167-31532325
  hyper
gtggcaccgcccgcgcctccggaacaggaaaccgagggaattaaaaagcaaacctgagaaagctgggccaagggagggaaaactcttcagcccaccgcagggccttgtgcgcggtgattggcgcgtcaacgaaagcgatggacgtctagaccaatcgt

SEQ ID NO: 230965 - DNA, 607 bp, Homo sapiens
  chr5:31639075-31639682
  hyper
tcacccagagagacgccttgcccgcggcggggctcgctcggggaaatccccgcccaccttgttattcctgcaggggaatccccgccccccgtccctgtcactcggggaagggagttcccgcccctcgaatcaaccagggggagggaatccccgcccatcctggaggctcggcggatcccctgcgcagcgaggcgaggagcggaccccagcgccggtgcgtgccggccccgggcagcgggacgcggcggggcggcggctgcaggcagccgaggagccgcaggccgaacccaaggcaccgggattgcgcctcccgcggctgccggcgaaccgcggctctgcagctcggggcaggcgcggcggcggcaccggtggtggccgcggtggcggcagctgcgcggggacccgccgggcggcgcctgggtctggacgcgcgaggaagccgcgggagcctcggccaagccgcgagcaggtgaagcgaccgtcccgctgcagccgggacgcgcggctccgggtgggcaggggatgggggaggcccggcacccccgagaccgtgtgtgcccaggaaagtttagctacaaatccgggtgcgggaatcccagccctggca

SEQ ID NO: 230966 - DNA, 336 bp, Homo sapiens
  chr5:31854442-31854778
  hyper
aggtgggaggggtaggggagcgggagaaggtataaaggaaatgcttcagtcgtgcagtcaccggcgattgtaattcagcggtgttaactttggttactccagccgaaaggctctgaccggggatttctggaaagttccctgacatcctgccccatacgatggttgtgattttagctgggggctccacccctgtaagaactcaggctgccgcggattatgaaacggagtggtcatgaagtgaattgatgtgggaaggtggagcttcttgcaatggctcggagggagaacttttggtgcaaacgagggtctagggtagggcgctttttcctctaacct

SEQ ID NO: 230967 - DNA, 76 bp, Homo sapiens
  chr5:31855498-31855574
  hyper
gtaagtgacttggagctggtttgtcaatggctggacggaaggaggcgccccggctgtgtgtgacgggcagggaagg

SEQ ID NO: 230968 - DNA, 447 bp, Homo sapiens
  chr5:32313003-32313450
  hyper
ggggcagcagcggcggccaccagcactagcggctggggctccgcccatccccaaggccgcgaccgccgcgatgccgcccgcatccggctccgccgctgacaccgctcgccccgcccaggcccgtgggccccgcccatcccgtgcgcgggcccagagagccgggagaccgcaactggaggccacgcccccccatcacgtcaggagagtttgacccgccgagattcaccaccttcctgcggcagagcccgccctcatgctttctctgattggcccgaggcgctgccggccgaaccccgctcccaacccattcttgagtgcacttggagagatgtttcctccaaccaatccagagagcgttctctccggactttccaacgattggatggcgaggataaaaccgtcgtccaatgatcctgcagtcaccaagttgtcgttagcaggggttca

SEQ ID NO: 230969 - DNA, 719 bp, Homo sapiens
  chr5:32710258-32710977
  hyper
ccagagccgcttccctccggtctccaccgctgctgtggctatggccagtgggaggactgggtctccgaggcaggacctttcttggagtcgcggaaccccagcacagtgcctcgagcgctccagagaaggagcggttggatctttgagcactcaggttggaggggagcgtgtgtcgtacccgggggacctaccgggaacgttttgggaaagacagtccctttatttaggtacctggtttagcaaacaaagccccgaggacgctttggggatgctttccaagctttgtgacacctccagaagttgaaccattccctcgcctttgggagcaacaagtttcactttcctgctctcagtgcgctgacagagggtccgtgagctgggacactgtgacctcggcaccgctgcgattccagcgcaaacctgcgtggcccagggggagggggctggcgcggggctgaggaaggcggggtgtaggtgacgcccgggccagccgggcacaccaggtccgcgatggagccatctgcactgggaccttggtccttgttccctgaccttgcgccgagggaccaggaaggtcaggtgctcgccccgcgtcggtgcttcaggagggaatgtggccagaacgagaaaggtgagagcaagcggcacctaaggatttttgcaccgaaaccacaatttctagaaccatccctttcccccagtcctggtttttttttttt

SEQ ID NO: 230970 - DNA, 703 bp, Homo sapiens
  chr5:32711037-32711740
  hyper
gcgcgcatttctctactttaaagcacgtttccttttttgaagccaggagctggagagcgtggaaagggagaggcggtgatcgcacaggcacgcggcgtggtgggggctcttgccggtgcagacgtgggcgatttcagctttaaggaaaaggcagagggcctgcggggagtggtggttagggacaggggcgcgatgggtagtgaaggggtgcagggaggagccctgatgtaagaatgttaatgagagactcccccagcccagcccccacatctccccacccccacccaccccacccgctggaaacacaagcccggcctcggcgcgccatgtgtggtaacacgctcagccgctgccacgctatttaaacgcgggctatggatccaggaaccggcgcgaatcaatgagatcaaatgcgagggagatgcaccgtcaattacaaacacttggacaagtctaactttttttttcttctacaaaaacgctttcaaaagcaaccttagcaacgcccaaataagaagccacctctaagcaaaatagtatatgtataaacggagggcgaatatatacaagtatatatatatgtatattacagacgcacaggtttacacccggtgaactttttctttttctttttcttttttttttaagaaaaactagtgacattgcagagaaggacgcttcctctctatcttttggcgcatta

SEQ ID NO: 230971 - DNA, 130 bp, Homo sapiens
  chr5:32712520-32712650
  hyper
ctacttcaccctcgagggggtccacgaggtcttccaggaggagggtttgcacacgtccatctacagtttcgacgagaccaaagacttggatctggaagacatcgtgcgcaatatccaggccagtgagaga

SEQ ID NO: 230972 - DNA, 107 bp, Homo sapiens
  chr5:32712890-32712997
  hyper
ctgcgtgcccaggtccaacaggtgctgtcaaacacttcgatgttttttcttcccagtttccactttgccagcgccgggctggtgattagggggcgcactcccagtgc

SEQ ID NO: 230973 - DNA, 431 bp, Homo sapiens
  chr5:33892013-33892444
  hyper
agaaataaagcgctcgcctgtggcccagcaggaagatgcaggggtgcatggtcaggcgcgagaaggcagcgactgcaaagctgcccgcgatctccctgtgcttttttaagcagaaaggagctagacacctttttcccctccctcctcctaaaaggggagtgattcagctgacagtgtccgctttcggcggggtgtggaatgggccagagcgggagggcgcagcccaccccggtccccacccctccgcctcccgcatgccccgcggcctcgcagcccgcccgctcggtgcatcttcctcccggactcccacccccgcgctcctccggccccgccccgaacgccaggcccagctggccgagccggccaaataggggagacccgggagagccgccctgggaggcactggaggaagctgcgagtgagaggccccc

SEQ ID NO: 230974 - DNA, 399 bp, Homo sapiens
  chr5:33936312-33936711
  hyper
tgacaaccgcggagagacgcagacacccactgacctccaggaagctgagcgtggtggatggaactctacgatctctttctctccaaggacggaaacctcatccaagcagtcccagaggaaacggataaaggtatttgaaagggagcgagcggccccaaatcgcacaattgagcggctgggggagttatgcgccagtgccccagtgaccgcgggacacggagaggggaagtctgcgttgtacataaggacctagggactccgagcttggcctgagaacccttggacgccgagtgcttgccttacgggctgcactcctcaactctgctccaaagcagccgctgagctcaactcctgcgtccagggcgttcgctgcgcgccaggacgcgcttagtacccagt

SEQ ID NO: 230975 - DNA, 193 bp, Homo sapiens
  chr5:34007307-34007500
  hyper
cctgtgtatgccagcgtctgccgctctgaaagggggaagtctacaaaaaggtgaaaatgatgggaatgggtaactgggcttcagggagcagatgctgagacttagaacgccagcatttcaggcagggaggagcgttagcctgggcccgtggatggcttgagggtacagcactccaaaacggtagccgaatgac

SEQ ID NO: 230976 - DNA, 52 bp, Homo sapiens; identical to SEQ ID NO: 199787
  chr5:34008090-34008142
  hyper

SEQ ID NO: 230977 - DNA, 79 bp, Homo sapiens; identical to SEQ ID NO: 199788
  chr5:34486431-34486510
  hyper

SEQ ID NO: 230978 - DNA, 1689 bp, Homo sapiens
  chr5:34655746-34657435
  hyper
cccatgcgcaatctcgcctgtcagttcaggctgtaggtttctcctttctaactcctgagcagaacaacactgaacggtggtagtcttgccttgccacccaatgagtgctagaaaacagtcacttcaaccaattggttcagtccggagaacgtgagcacattctactttactttctgttcaatgattttggaaaacaaccttttagattctggtcagaaggggcttggatccgtgactttgaaacactcgccactaccacaaacgactttggaagttaatcagaaataaacagtatctgggatctcatccgtcctaaacccaggggtcagagcgtggggggcttccactaacttcaggttaagaggatgaaacagatccgcggagaagggtcccacgatccctggagactaaaagcaagccacgaacagccgggacgcgcgggccggggagatgcgccgggggctggagggcggagagcaccccccgcaggtcccggccagagcccggggccgggtcacctgactcgcggaatttggggccgcgaggggtggaatgggaggggaatggttagcgcctcccttcccgctcccactggatccaggtcggcgggggccggcgcccggcggccacgtggtggtgctgccgctgcccccgccccgccggcctagcccgggagctcggcgcccactgacccccgcagcgggggaggaggagggactgcggcgcaggaagccgagcaggaagcgagcccggcggccgcgttttcctggggaagcggcgggcggggtggagcagccagctgggtccggggagcgccgccgccgcctcgatggggtgagtgcgcggcacggagttgggaggctcccggcgcggggtcccgggctcgtgtccccgcctttgtgtctggagctcgggcgcgggaggcgctggggacggcgcccgggcggagcggctgagcgggctgcagccggggtcccgccacctctccctggtccaccgccggcagcccactgtctgcggagagcagatctggggacaagaggaaggagaggaaggtggagatgagggtagagcgggaagacccggccaagttaggagaagggttcttcccgggtcctccgcgactcgcaggccggctggggcggggcgcggggcaggggccgcggcggagggagcgcgggtgggaatgaatgagcagacccggagatgcaccctggagtctgcgccgggtcccacctgtttcgccccgcgcggcgcctcgctgcccccgcgtcggtgctgctgagcccaatccgcctcccggctgaacttggaggaggtggggagggaggtgcgagcgggagactccgggtggctcccaggacgcggggtccgctattgttcctcctctgactccagggagcccctcggccggcccaagggcgggggcgagacccctctgggcctgcccctgccccctaccttgttttccccgccgcagctcggggagaacggatgctggagttggggcagactcggggccgccgggacttcgggagtaaggaggacgtggagccaccagaaaggcgcccgccatctcccgcgacccctgcctggtggggggtggggggtggggtgtcgtcctcaaccaccttcgctgccttcttgggcaggttggtgtcggtttagtttctgcggtttgcagggttg

SEQ ID NO: 230979 - DNA, 253 bp, Homo sapiens
  chr5:34915398-34915651
  hyper
ggcggggcgggcccggagtgtccagataatcctccaagagtcccagacaaccccattcaccagcccgcccgcgggacagcatcgcttactagtctcggggtccccgagtgcggaaaccctacctttgcggtggggtctggacgcccgagagcccttctcagcaaagtccctgaagaggagcgaggcggctccgaggaaccgcggaggaagtgaagccagtcccgccactcttcagaccggccctccacctcgg

SEQ ID NO: 230980 - DNA, 188 bp, Homo sapiens
  chr5:34915876-34916064
  hyper
tttgcagttcaggcgaagaagccaaaaagaaacgaaatagatgcggagccgccagctaagcggcacgccacagcagaggaggtggaggaagaagagagggaccggatcccaggccccgtttgcaaggtaggaggggatgtccccgggctacacctgcggcggcggctctgtgcgccttttcttgggtt

SEQ ID NO: 230981 - DNA, 88 bp, Homo sapiens
  chr5:34929946-34930034
  hyper
tgggggtgcggcgcgacgccagcgaggaggagctcaagaaggcctatcggaagctggccctgaaatggcacccgggtaagtacctgtc

SEQ ID NO: 230982 - DNA, 730 bp, Homo sapiens
  chr5:35229746-35230476
  hyper
tccggcttctggcccggaggctgctcatctgcccctacccccgctgacttttgggaggagcaacacctttcaggtcagcattgctaaccctaaactttccccgccggatgcccgcgaggctgctgcggcggcggctgctgctgatgggagagtctcgagtccggctttcatcacatcacctgtctgcgccccttccccctccccgctctttttttcttttctttttattttgacgcaaataatttgcattctgagaatcccacaatcaacgccgaaactcatgctcaaggatacaggtgaagatgcctttgacaaaggcgaatgcgagccgagtgcagtttgtaaaagctggggttgggggcagtggtggaggcaaagcaccttaagagtattttttagcccctctgagaagggacatccgggcgggaggcgggcggatcccgggcttccccgccggctgccgactctggctcctggctggcgttctctccaggagcccgcgccggtggccccgctctccccttcagcacgcgggcctcgaacccgcatcccggagagcggccgcccgcgcagcccctgccgcgcgccgtcggaggcggcctcagctcgccatgggtactcacttttgccagggagcaaagtctgccacatcagtcgatgagtacttcctgcacgaggacatgaagctccattgtgtggaaagctgtttcgcgaacggtcggtaaaatcc

SEQ ID NO: 230983 - DNA, 213 bp, Homo sapiens
  chr5:36066734-36066947
  hyper
gagccctggcagtgcgagtatccgggacgcgcctgtctgggaattctccggccaagcactcacctactgtagatattgtcaggattttggcagcctctgagagcaggaccccagggagaaggaagcccactagaagaagcactcgctgcccagccatgctcacttctacggaagccgcggatctcagcctgggctgcgcgccctgcgcccggc

SEQ ID NO: 230984 - DNA, 53 bp, Homo sapiens
  chr5:36151263-36151316
  hyper
ttttaggcggcgacgcaaacacacgtagccagctgagcgacagcaagcaacca

SEQ ID NO: 230985 - DNA, 87 bp, Homo sapiens
  chr5:36152364-36152451
  hyper
atgcacaggtaaacggattgcaaaaaggggaagagcatgaaatggaccctcttaataattcttttaggccgcgaatatcgctactgg

SEQ ID NO: 230986 - DNA, 228 bp, Homo sapiens
  chr5:36242122-36242350
  hyper
ggagaaaggtgggcggggaagaaatggaggccccagctagtgggttttgtttgtttgtttattcgtttcactcacgcctgcataatggctgcttcgccgcccgggggcgacctccccgcaccacacgcttccccgaggtcgctcttctcccgcccccaggctaactctatcggccaatcagagcccgcggcggctccggatccgaggggccgcgccattggctgcggc

SEQ ID NO: 230987 - DNA, 103 bp, Homo sapiens
  chr5:36606432-36606535
  hyper
actttcagctttccgattgtgtgcgctttatttttcaattcttcctagtcccggttttgcatttctaatgacagtgaactgacaaagcgtgaaagtggtctaa

SEQ ID NO: 230988 - DNA, 68 bp, Homo sapiens
  chr5:36606742-36606810
  hyper
cttacgcgcgctgcggattgttgctccgttgtacctgctggggaattcacctcgttactgcttgatat

SEQ ID NO: 230989 - DNA, 69 bp, Homo sapiens; identical to SEQ ID NO: 199794
  chr5:36607363-36607432
  hyper

SEQ ID NO: 230990 - DNA, 491 bp, Homo sapiens
  chr5:36690187-36690678
  hyper
tgtgagttctgttagctgaacgggcctggaggaagcgtggcgggaaggctggatccccgccgcaggggctgcggggctgtggctgcctgcgggctgggcagggccgggcgcacgccctccttccgggtggccgcgggccccgaccccaggctgccgtcagtcgagcggcctccgcagcggccgcgcttccccttctcccacccgggtggtcccagaactggagcaacaatggccggctctgtgtggccgcgtcctggggccaaagcagtcgggacgtgtcacgccgagggagggctccgaatgaatacgctgacaataagaaggaagggagagcgagggaggtgatgggcagcgtcctagagggaaagcgggagatgagaaatctacgagatccgcgaggcggcgtccggggagcgagcctcatagtggccaccagggggaatgcggagctcaccttgggccgcttccgcggggagctctaaagggagctg

SEQ ID NO: 230991 - DNA, 448 bp, Homo sapiens
  chr5:36693072-36693520
  hyper
ctctgcgcccggggcggcccagcaacccctgctcgcctccgcagaggccttttgtcccgcgggctctcccagcggccccgcgctgcgtggccgttttgtgaagggcacaatccgatgttctgaggagaccacccagcttcctctcccagagtctaccagagaacaaaaccgccccttcgtgtgccagcgacctccccttctgccagaccccctcccactggcctcctccctgccctgccaagcggggacggagagccagccggccctggcccggtgggaacccagttgatggtgcgcttattagctgtcctgagcgcggggacaaactttctgtacctgggccgctgctgccaccctgcggccaagacctttctctaggccccgatgacccagagcagcccggaccagacaacgtgcaaagaggagcgcttacagcaaactcctccct

SEQ ID NO: 230992 - DNA, 758 bp, Homo sapiens
  chr5:36744875-36745633
  hyper
caaggctttatttcgtcccggcagctggcccctgggcacggcccccagcccggcgtcccagttccagccgcgctgcaggggcgcgagggtgcccggctcgcaggtgtccgcgcgcaccgcagggctgcccgagtgcggctggcggaatccctccccagctggggaggaaggcagttgttttcttcctggtggaacgttccacttgaaactgttccacaagggctgttctcgcctccgactccgggaggaactgtaattaacacagcaacaaacgcccacgacgctaactggcaaagggagtgtaacacgagccgctgctacaaccgaactgggccaattgctttcccttcttgcctcccatttggtctgttttggttccgcagtcatccaactgtagcgtttcttaaaacatgtcagtggctggtgtttgtgttttgggttgaacagtttcacacacgtcgctggagcccgtgctcgaccagctgctgtgctggggatttgctttctgcggctttgggagtgtcaggtagcaaaacgaagagagtagtcgactagaacggtggcggggaggaggaggagggattgtctgcagtggagtcgggagcctcctccggaccaggacaggtaaaaccggtctgccaggtctcagggggagcgggtggagacgtcccacctcacctggctgcgctccgactcaggctcagccggcaggttctggggcaatgggggaagggagaggggccgggcccttgtgggtc

SEQ ID NO: 230993 - DNA, 790 bp, Homo sapiens
  chr5:37248995-37249785
  hyper
acgttctattcctccggatcctgctcgagaagctgggggactcgggtccggtgccgaggtgtggcccgagcctggcaccacccacgccggccgggtgaccccggccccttggggctcccgcgctccgtcagcaggcgacgctgggaggctggggtaggcccagagcgaggacgggcccggactgggtagtggggatgtaccagggccgggtgcggcgggagacggcccgggaggcggaaggtcgcggacctgcccgacagaagagtagatgaggggagaccgaggacgcccgggtccggggagcttacgaggaggccaggatcgcggggtaaggaatccgcgggcagttacctccgccaggggcagggtccggccagtcaggcgcgagaaggctaggcgaggccgactgcgcggggtgaagacgccaggccgacagctgcgggccctaccgccagccctgacgcgagcctgcgtcctggcgacggcggagggcgggcagggggcgcgggcgctgccacggcgcctgctcagaaccggccgggaacgccgcgggcgggtctccccggtcctccgcccctccagccctgctctcaggcctccgcccgggccctctaagctgccagccgcgcccgcctccgggctcctcgcccctcctcccgcgcgctcccctcctcagcggccgccggaccccctcagttcacttctcccagttaacgcgttcctcggacgctgctagtttgagcgcacaggcattgggcggggctcacgggggagccgcttaataaccgac

SEQ ID NO: 230994 - DNA, 316 bp, Homo sapiens
  chr5:37370926-37371242
  hyper
ggcagacaccataagcagctcggaaaggtccgggtacatgcggtcctcttgcaactgacggtcgatgagccgtccagcattttccagagcttcctgcagggctgcggcagatgtagaggccggcatcgccgcgcccaacaaagaagacggcatctcggaaatcgtagacaccagggtccagaaaaagtcaaaaaccaaggagaaacaagaaaagatccaagaagttagcttagatccgccgcctagggcgcgcgcgccaaacgagcgccttggcgcctcgacatgacgcacttccgcttcatccggtggggaactg

SEQ ID NO: 230995 - DNA, 219 bp, Homo sapiens
  chr5:37371526-37371745
  hyper
ggttggtcaggttccgttggtttaagcgcgtgctcgacctgagtcttggaacttcccgcgtcggtatccgctaactgcagctatatgagttcgcgcatgagcgcgcagtttggttctccaagtaactgcttttgtgagagtagttaagaattggtaggtcgctgtcacagagagggatataaaccagtatctcactatattcttcgcgggcttcagtgt

SEQ ID NO: 230996 - DNA, 153 bp, Homo sapiens
  chr5:37379258-37379411
  hyper
ctgagttgcgcggcgctttcccgcctgtccggtagggcggtgccgcgcagaaagccgcggtccctctgcggaaggcgccgctcttggcttcggcggcgccgctgtagcttgaaggcggtacttcctccagcatttgccgcaagttattggcaa

SEQ ID NO: 230997 - DNA, 1272 bp, Homo sapiens
  chr5:37836727-37837999
  hyper
ggcagctaggacctggggaacgcgagcttcccccctcaagccccccgccggtgccagctcccgggtgcgtgcgaaatggctggcggtccgaccggaggagcatggaggcgcggggttaatgcgccattccaaatcgcggtgcccgccagcaggaagccacagaggcactagatttcccttccgtcttaagagggttttcccttttttcctgcttggccgacggagggctttttaaattggacgtggagatcctcaattagaagtgtggcgaagctggcaaaagactacacagtggaaaactccccgcgtcgccagaggaggctcccggctgcggttcccgccctcggccgagcgccgccagcgcccggatcgagctcccctcttcccccgggacagggagggcgcattcttccctctgagcgccgccgggaccggctccagtccgaggggctctttcgttctcggtatttgctgggcgggggaaaaggggggaggttgggggactcggcacacacagcgtctactaggacgtttttcttagagtccgtgtgggctccacccctcggcttctcagtttgtctctctatcgctttcccaaaacacatctacatctgcccgacgcgcttctcctcaaccatgggcctttgcccgcggtgcaaactgctttacgcgccgccacgtgcgagaaccaagctctgctcctcaagtgacgggggctctgctctgccaggtgaccgcgcaccatttctcgtgcctggcaagctggtccccttctgggtccgggaccaccacgtcccggcagggcaaaagcagcaggccgtgggcgccggcacctgtgggtccccaggcctggggaggcaaggacgcccaggaaagccacagaagtgctcgcagaagcagccgctcgccgcgaggcacttctgagttcccggcagcagggggcaccagaaaccgtctgagccgtgtcgcgcccacgcggcccggaggctgtgttatcattttagttataaaaccggagaaccaccactccctctacgagcctcccgaaatcccattagcccgggaacctgtggaggtccttactggcatctctgcttttcaggctcccacccctccattctcgctggttttcctctccccacttcacctgagcgggtttcttggcaacctgctttcagaccatccctcaccccttccacgcgtcaccgtgacagattcgcaggaggcagcgctcccgccgtcagtgcccccgcaccttcttgtgcctggcag

SEQ ID NO: 230998 - DNA, 1761 bp, Homo sapiens
  chr5:37838250-37840011
  hyper
aaagaatttgggacacttctcgcaggcaaactgggaaagcggtctgtttaaagggccaggttccaggcccgagagcacccgaattgctagcgggaaagggctagggacacggcggacttcccagagatcggacacttgttacttgttgaaaaggcgccaccttccctgacaaagcgaaggcgcagcgaaacagtacgagtttggtcgaggccggctttgacggctttgcgggactgggtgcgtgaatgaggttggaagaaacatctcttccttgaaatacctaagcatatattccaaacactgagcaagagtcgagcgcgttctaacatctccgcagcaggggccggaagagttgcctttgtccccgcctatgagcagaagggtcgcgagctctgggatgggtaagccccccgggggcgcgcacatgggtcctggcggcggattctaccaaagccgaaactagctgggccccaggaagctggcgggaacccgcgaaagtccgtttccagcccgaagagggttcgtttttcttcgttggggcaggaaacaaaccaccagtgcggaattagcctcgaggtggtgtaaagtagtggcagtggtggtggggtgtttttggaaggcggcacagagtacaggagaaaaaggggtcattaaaataataacctcaatggcctagtggagtctcaagaatacgttcgagacagagatttgaatccaggactggcaagaaagcccctctcctaacctcgacggggatggttagttggggtggagggcgttaggaacgtgcaggcaaccgggtgaggaatgtagctttgccagacctcgcccggaggaggtgagccctccatttttaggttctcagcacctttgcagcagcccctcccccggcctgcgcttttccttggcacagatcaaaacaagctcaatagtaagttgcactcttggcaatgatagtatctctgcacgtccagagaggacacatttcgacggcggtgggttcgaagatgacccaagccctgaatcgttctgtgacttgacggaagagcacctggccgagtcggggaaggaaactgcccctcttgggcattccgggtccaggcgcatctggggctccacagatctttgcccacgtggaaaaggcaacatgcccctccgaaaggccggcctctctccggttctacttttctctctcctcgcatagcttaggttccctctagtctttccactttctactctcaccgtttgctctggggtccagacgcacccctctgactagggcgcccttcagccggccgcacccacccgcgacgcaggcaccacccgctccctgctccccggcccgctccctcacttacctcggatcgggtctccgcagaccctaggttggacattaactccaggtgccccaagtcccagccaggagacccatccgggctgatggctggagcgcggagccccgcccaacaggtcaggggcaagagttcgcaatcctggggtcgcgcggggcagcaagggcgcgctggaggcggcggccaagactcccgccgccgccgccgccaacagggcgagggctgccggcaactctcccgccgggcccccgcacccccagaagccgaggtccgagcagccgccgctgctttgggtggggggctgacagggctgcgcgcgtcgcgctcttggctggggctgcgcgggcccggggcgctgcgggcggctcagcggcagctgccgcgctctgcgcctcctctgggcgcactg

SEQ ID NO: 230999 - DNA, 62 bp, Homo sapiens
  chr5:37840191-37840253
  hyper
ggaggcgcggggccccgggagggaggggtcgggaggcgtcggctgggcctggcggtggggga

SEQ ID NO: 231000 - DNA, 1857 bp, Homo sapiens
  chr5:38257401-38259258
  hyper
cagtcaacattgtttcctcccgcgctcccaaacataggctaactgtgaagagccaggacgcccaccgagtcctggcagcgttgcaaggtggggagggggcgggcgcggtcctgtcgctagtgactgcagatttcctctgcggggcacttcctacggcctttgatctttccccaggaactgccgagggccgcgtttgcctctaagtttattccctcttggtttatttattgtatctgctttctcttctcgctggtttggaggtcagaacgccagtatgcaacgggacttgtgtcccaggcagggtctcccctctccaggcactaccgcgaaatctggcaaaaggtacattttactgagtcctagggcagcaaattcagcggcggagaaagagtctttctccattcaggagacaacccaggaagcccgatcccgggatcagaggccaggaccccgccccggccccctgccccaggcccagctgggcgccgcccaggggcttttctcggtccgcctgggggctcgagctcgcgtccctccctaagacgccaggcttaacttggagtttcatctcctccccaggagggtctcaagttgccttcctctgccgggaagggcccccactcccccgctccaggccctaatctccacccggcgtcccagtctgagcggcctggcctcagctctccatctgcgagccttaaatcccatttatcttcttagcgcctcagacccggacggtcccgcctctcttcctctcacccccaccccacttgcaaatcacagacccccgtctacccctcgcatcccccaagtgcgctggaccaactacagcaacctttgaggtgttagaaaaagtcgcctagaggggcgcggcaggaggagggcccaggtggggtggagggggggcgccccaagatttcagggtgaggaccgcggagggtcctggacccgcagtcgcctaactcctgccctgcgtctccagtgcttgaagtcggtccctcccaggtccccaatctaggtcaccagcggggaagggctgcgctgggggtcgctagagagggtgaggggcgggctgtctgcttccgaggtgggcgaggagtgaaggtttcagggcctgtccctctcacttccactcgattgtaatttcatccccgggccggtcgagcctccctccctcccgcggccagcccttccctcccagtcggcctccttcgtcgcccccgcccccgcgaaaagccctgcagcttgcagccggcttcactcgcgcacgccgacctcccggctgcagtcctacctcttggaactacccgtgtttccgggcccagccctcgcagccccccacctcctcgccccggcccggggatccgttggggccgcgtcccccacgcgcccccggagacgccctttccgtgtgcgcccgggacttggtgaaactttgcaggcgccggctgcgaaatggatttaatccgaggcgtcttgctccggctcctgctcctggcttccagcctcggacccggcgcggtgtcgctccgagcggccatccgaaaaccaggtaatgcgctcctccgcccagagccaccacgccccgagcgcccctgctgggctccggggcgaggacacagagcgggcagcgcaccgcctccctctccccgaccaacgtctgcttaactcgcttcagctctgccaggagctgagaaaagacgcaaacctcgccctcccccgagcccgggcggcgctagggatatttatttattaaaagaatgatcaattttccagacatagtagatagaggtggtggtccccgtgtttgaccgcagagagctgacagttgggacagcgatcgtgctgtctcaatta

SEQ ID NO: 231001 - DNA, 1466 bp, Homo sapiens
  chr5:38556094-38557560
  hyper
aagcagaggggcacgaaatcacctggcaggtcacctctccgaaggaaaaacatttcaagctccctcccatcccccaggtaacctctggcctcagaactcactgccctgcgtggggcagaagttctgggcgctggagtccgcgtcccccaggacacgagggtgacccaagggcgcgcggagagcggcgggacccggagcggcgctctccggggtcactcccctaggacgctccgcagagctgggagcgctgccccaccccgcccgggccgcccctggggaccccgctcggggctccgcggctcccctgctccgcgccgcgcccacccgcccccaggactcacggtacgctcccgcgccgctatcttgccatcccctgccgccggctctgtagcctcggccgccgccccggggctgcccagatcccacagccgcccgggggcaggagccgccaaggagggggccgggcacaatgcgccgccgcctccgcagccgccgtctcgcctcccctgtgtcggcgcgaggctgcttgaggcggccacgggcgaagggcggcccgctgcgctccgcgaaccccgcgggccgccgccgccgccagagcctcccagaggcaacggtaacggccaccgccacggccgagtcgctccagccgggactgcggcgcgcgggggcggcgcctgcacgccgctcggctgggggcgcagcgggcccggccccgcccctgacccgcccctgcccccggccccggccccgccccaacccgcgcgcccccgccgatccccggccgcgcgcccgcgcgcgcgggtgctccaaggagtcggaggaacgcggccgcgcgacgggccccggacgccgagggtggtgcttcctccgagcctccggtggtgaggccgctctcagaaggtcatggaagcgcaggggagagcgaggcggccgagcccaggcaaatcctcgagaaaggccgagtgcgcgacggctctgcggggaggaccgcgcctccccgaatgcggccgctgctgccgctgcaaacagtgccttgaggagaggaaagcggggaaccgtgttttcgccgcctctgtaaccactgcacacaagaaaaccagcttctgggagagggggatgattgttgggactttgcgaattacctaaacagcccagggccgaggcgccgccgctcgcgtcctggtcctcctgccgggtgtggggctcccctgcccgagatggccagcgggcgcgccgagagtatcctggagccatctagtcttgcctcggaggcggggtgggcttatttgtgcggagaagaaacggatctcttaatggggtgagatttttcctccgtacattgttcccatttccgcagtttcacttggcctcggttttctagcagagtaatcaccaaatgaaattagctggagagcgtttgatggcgcagaatcacggtctgaagatgtttacgctgtatgccggac

SEQ ID NO: 231002 - DNA, 835 bp, Homo sapiens
  chr5:38845661-38846496
  hyper
tgcctgaagattttcggacggggatctcacgggtttggcctctgggttgggatgacaagtgcccctgtgggatacacagccccaggcctcatcggtcactcggcttacctctggttccgccggctggcccgtgcgtccttggccggggcaggagcagcgctgcgcgcggggcacggagcctcggccgccgagttttcggtttccaagtttccttcccaggcctctcccacttcctcttctcaccagtgcccgcccgcccgcaaagtccgggttgtgaggctgcgcctcccccaggatcgcggccgcctccccccgggactgaagggagggaattcctgtgggtcccaggagtgccaagagtgcgcagcaagacgggaaattgcaaaagacctcacccctctgccctcccccgcggttttccagtaactcccgcccctccgcgcttgccccgcagctgattcatagccccggcccgggccgcctctgcacgtccgccccggagcccgcacccgcgccccacgcgccgccgaggactcggcccggctcgtggagcccttcgcccgcggcgtgagtacccccgacccgcccgtccccgctctgctcgcgccctgccgctgcgccgccctcggtggcttttccgacgggcgagccccgtgctgtgcgggaaagaatccgacaacttcgcagcccatcccggctggacgcgaccgggagtgcagcagcccgttcccctcctcggtgccgcctctgcccagcgtttgcttggctgggctaccacctgcgctcggacggcgctcggagggtcctcgcccccggcctgcctacctggtgggtg

SEQ ID NO: 231003 - DNA, 158 bp, Homo sapiens
  chr5:39075114-39075272
  hyper
gccaggcgtaggacgcgagaagggggtgcagcggccggggaccagggcggcggtccccgcggtgggatcgcgccagcgccgggaggccggggagagggtgttctctgccgggagccgaggcgaggctgctgggtactgtgtccggcttttatggctct

SEQ ID NO: 231004 - DNA, 42 bp, Homo sapiens; identical to SEQ ID NO: 199804
  chr5:39424510-39424552
  hyper

SEQ ID NO: 231005 - DNA, 41 bp, Homo sapiens; identical to SEQ ID NO: 199805
  chr5:39424612-39424653
  hyper

SEQ ID NO: 231006 - DNA, 673 bp, Homo sapiens
  chr5:39424891-39425564
  hyper
tcgaagctactcaccggctagctattgcctccgtgaagcgagcatgacttccccgcgcccggagcctccaggctacagcgcagcggatgcggcgggcctcgcttaaatagccgccggccgggagcttcggagccgcgcggccactcccggcgagagatatggttctaatcagatgctggcagctgaggactccccaggaatgtgccaggatgtttttgctgcctgggcttggtaactccccctcaacgtgtctgcagagtcttccaaacttaactgtttattaactcgcgctgcagcggcgcagaggaccccgctcccctgagctccgcgagccccaccagctgggggcgatcgcagggacccagcgacgggaggggaaatgtgttcggggagaagtcaaaagccccagaccgacgcgggcggggggcgggtgcaaataaggacaggaaagggaagctctggaggaaaggggtgggatccaccgagcttcgtttcacagatccgttccctggattgccactgcgagtgatgtggcacacggagtcatcctaaccaacccgttggggccctttgaacaaaggactgcctttactcctgacttttctgacaagggacaacggttcctgcgcagatctgcagtttctaaagttgatcgcgcgattggatttgctcc

SEQ ID NO: 231007 - DNA, 1523 bp, Homo sapiens
  chr5:40680493-40682016
  hyper
aggtgaaagcaggttggaggcgggtccaggacatctgagggctgaccctgggggctcgtgaggctgccaccgctgctgccgctacaggtgagatggcgttgggctgacgttggggtcaacgggtagagaacgcagggatgcggccctcgccgaagagagccaagaagggaagagcgcgctctccaaattgcttttgtaacttgttttcagtgagcattttattgattcagaatctatcgagaatagcactagcgagctacttttcccttgagatgggtcttattcatcttggcaatggagtgagttggattgtggggaggaagaggaatgggaaaatcagtttataaatattaatgtcagcaagagtgtgctgttggcaggacgtatcgcgagcctggagattttggtggccgcagttggtaagtggctacaatccagaaagtaggatcgagttgctccccttgtcttatcagtgtatcgtttctcgggcgcgggtctaacaccttacaagtggtaatttccgctcacggcagctttgtctctcttctaccatccccagacccagccttgcactccaaggctgcgcaccgccagccactatcatgtccactcccggggtcaattcgtccgcctccttgagccccgaccggctgaacagcccagtgaccatcccggcggtgatgttcatcttcggggtggtgggcaacctggtggccatcgtggtgctgtgcaagtcgcgcaaggagcagaaggagacgaccttctacacgctggtatgtgggctggctgtcaccgacctgttgggcactttgttggtgagcccggtgaccatcgccacgtacatgaagggccaatggcccgggggccagccgctgtgcgagtacagcaccttcattctgctcttcttcagcctgtccggcctcagcatcatctgcgccatgagtgtcgagcgctacctggccatcaaccatgcctatttctacagccactacgtggacaagcgattggcgggcctcacgctctttgcagtctatgcgtccaacgtgctcttttgcgcgctgcccaacatgggtctcggtagctcgcggctgcagtacccagacacctggtgcttcatcgactggaccaccaacgtgacggcgcacgccgcctactcctacatgtacgcgggcttcagctccttcctcattctcgccaccgtcctctgcaacgtgcttgtgtgcggcgcgctgctccgcatgcaccgccagttcatgcgccgcacctcgctgggcaccgagcagcaccacgcggccgcggccgcctcggttgcctcccggggccaccccgctgcctccccagccttgccgcgcctcagcgactttcggcgccgccggagcttccgccgcatcgcgggcgccgagatccagatggtcatcttactcattgccacctccctggtggtgctcatctgctccatcccgctcgtggtgagtgaccggggctggggccctactcggcctttttctcgcatccacctcccg

SEQ ID NO: 231008 - DNA, 189 bp, Homo sapiens; identical to SEQ ID NO: 199808
  chr5:40798280-40798469
  hyper

SEQ ID NO: 231009 - DNA, 104 bp, Homo sapiens
  chr5:40835228-40835332
  hyper
gaggcacaaaggacgaggatggaacgcgattcacaaacaccacagtcacaactcaccatctcgcttctgcggccgagaccagaaagaccggaagagaaggcact

SEQ ID NO: 231010 - DNA, 505 bp, Homo sapiens
  chr5:41510364-41510869
  hyper
aaggctacccggcacgcgctcgcctggcctgagacccaccctggaagacgagtttccctcccgcgggcatcgtggcaagttaccacttagtggcagataaagcagggcggggcaggtggagcgggcgccgagcgcctagcccgcagcccctgcgcgcctacctggaatggctaaattggtgagggggatgctgtgcatgctctccggcagagttgccatccagtcggctaatttcagctcgtttttcccctgagacgaggccatcgtgccagtcggcgtgcagcgcgctggtcccagcactcctcgggcaggctggcaggctgctgccgctaatccaatgtttgctctagccccgctagagtttacactcctctctgcgccacacccacaggatggcgcagacacatgctaattttaataattattcaaaacaccccgtgctcccttagtgcctccgccagactccgctggagcttttgttcctgacgtccgtgctcagctctct

SEQ ID NO: 231011 - DNA, 97 bp, Homo sapiens
  chr5:41870777-41870874
  hyper
cctttagcttcgatggggcgctggtggccgcctccccctaggttgtggatgagtcttggcctagggttcagggccctccggccgcgggaggatctcc

SEQ ID NO: 231012 - DNA, 343 bp, Homo sapiens
  chr5:41904222-41904565
  hyper
aggcgtgtctcaacgtcacacccgcccctagtctccttgctgctcaggattatgggagggaagggaagtccaggagggaaaaatgacccggaaagacctttgccggcctgggccagccctcttccggagctgatgtctcctcccaccaaccaggagaggtccgccctaggccccgcccgtgccgggggatcaggtgattgcgggccaacacggtcacgtgaccggggcgcacccgccgattgtggccatggcggccgcagtctctagtgtggtgagacgagtggaagagctcggggatctggctcaggcccacatacagcaacttagcgaagctgccggtgaa

SEQ ID NO: 231013 - DNA, 316 bp, Homo sapiens
  chr5:41925471-41925787
  hyper
ggccgcctggaggcggccatcctcagcggctggaagaccttctggcagtcagtgagcaaggagagggtggcgcgtacgacctcacgggaggaggtggatgaggcggccagcaccctgacgcggctgccggtgagcgtcggccgcaggccgcggaggacagtggggccggcccgggccggagggacctcccctggagccccccggggcctggggaactctcgcgccccggcctgggtctggctccgtccatgcagccattcctggcagtgtagtcaccgagaagctacagttgatcagaagcgtcttggcgtggacc

SEQ ID NO: 231014 - DNA, 634 bp, Homo sapiens
  chr5:42423456-42424090
  hyper
gctttcatttggaacgggcaggcggagaggaaggaagtgtattgcaactaccaatattttcctctaggaggagccgcgcagctcagttgagagtgacacgcaccaactccagctcctcgccgggaagacttcatcccagcaactcggaatgcttggcccgggcggcactcggcctctccgcagcagttctcgaactggcctccttgaacgtccgcttcgccttcgcttctgcaacctggatctgggggactgcgggccaggcgcggcgtgacccctggtgaacggtggccgccttttcccacccctgccctcccatcctcccttcccgtttcaccccgccccctctctcctccccaagcctgacagcccgcgagctgccaagcagggcgcagccatgggaagaggaggagggctagggagcggcggcggcggcggcagcggcagcagcagctgctacagtggcggtggcggcggcggctgctgctgagcccgggcggcggcggggaccccgggctggggccacgcgggccggaggccccggcaccattggccccagcgcagacgcgaacccgcgctctctgatcagaggcgaagctcggaggtactggagtggggctccgggagtctggcttta

SEQ ID NO: 231015 - DNA, 122 bp, Homo sapiens
  chr5:42424709-42424831
  hyper
aattgtggcgagccgacctcccccagcttttgacacactagtggttgtaaaatcaaccaggcttaaagttttgacagaactgccagaggctgcgggtcaatggggtggccgcgtgtctaggg

SEQ ID NO: 231016 - DNA, 97 bp, Homo sapiens
  chr5:42425011-42425108
  hyper
cgcgcgcgagtgtgcgcctggggaggcgtgtcggcgcctgagccagtagggtgtgcagggtggaagaggccacagaggtgccgcctgtctgtttgtg

SEQ ID NO: 231017 - DNA, 816 bp, Homo sapiens
  chr5:42949351-42950167
  hyper
gaaccaaaacaaaccgtaattccgacggaaaaacagcgagaaaagaaaacgaaatgaaactgacactaagcagaccgtatagagaagtagccctacagaacgcagggattaaagagagcttcagaggccaagaaccacctgtgtccgggaaatgagcattgctgccaccaggaaactgtccgctagggctcggcactactaaggacctcgctaacaataatctggctgcgctgggactcagcaagagcagacacccagcggattgccctggtgttgccaaacaaatgtccatttaggtgccataaatggtgctgctagaaagaaactgcgggctcttagataggagtcctgtctggagaaatgaactgactgtgtttaaatgtgttgtgacagaaaaatgtgttgtggcatcttattgtgttttaagtcgtttaatgtgttttaacccgttgtaatgtgctgtgagagaaaaagccgcagctaacggtgctatggaattactagagagcacagaggctgggtgcagtcaccggtctgcaccgtaaaaaggggttcaggaagttcctacgagatattagcgtttctaggacccagaaagagacagcacagagaatttacgggccccgaaaacatgaaacgtcctgttgggcgctaagaattgtgcaccaattgagaaaacgcccagtgggcgctactggcaaaagtgctgacgcaaaaccgacagctccgcataagaagcggagtcgccagacagaacccgggacctggcagcagcaagtctgagaccgagatcggctccccgcgtcctgagcatgc

SEQ ID NO: 231018 - DNA, 1705 bp, Homo sapiens
  chr5:42950733-42952438
  hyper
aaaaaaaaaaaaaccgcattcgctggtacccagatttctacaggagttaaacgtctcctgagcagctaaagcagagcttactagtaagaaacttgcaatgactaaggaacttgaggcagggctaacccggggttgttaggattagaattccgaggctacaggaaacccggaattgctgagatgtgagtcacagggtgactcagcctcgttacgatgaaacagtaacttcctactacctagaaatcgcagccagggccagaccggtgtttgtcctaagtcggaacttgattgggctgagaaatcacattgtgactattccacgacttgaacaaggggtagaaatcgcaggcaccgcgaaatagaaacttcctaggaccaagaagccaacgacgcccgaaaccgtggggtcctgtcacagaaaccccagcagcgcagccaccggactgggttctggaggccgagccgcagtccgtgcggcggcgctgggaagagaaggcgccccggcagctcccctgccaccggccccgaggagcggctggctcccccagcccagcgccgccgccgcccggtaactccaggcgcaactgggcgcaactggggcagctgcgacaccgaatccctcacatctgcaacctgggtgctgcggccactgagaaaatggaggcgcagaccaacgagcggtgccgcgaccgagagacctcggctggcgaaatggtggtgccgggagcctgcgagtgacgccagccggcggggttgtcaaggacaacattcgttttgacgcagccaatggcgccgtcaccaagaaaccatcgactctgagaaaaaagagaggttcggccaccgagaaactccgtacgacaagtgctgtggcagaaaaaccgcctactccgcgccacaggcaaaacagccaatggaaaccccaggtgctgcgaccgtgacaccggcactagagggtctcggatggagaaagcggcgcacggagaccaggaaactatgtgtagcacaactagcagaaaaccgtctggtcggccatccgggagaaagcgcggatcagaaacaagcgacttcgatgcagggaaccgcgcagccactgaagaaagtgacccacgtggcagtggtgccagcgaaacactgcagtttggacggcagctgtggggatgccacagagaaacatgcactgccactgaagtacatccagctccgcggagctagtgttcatatgatcaagaaaccgccagttgggctctgctagaaacttttagtcctcccttaacggctatcctacccacaacagacaatgcctttacccagcacctagcggtgctgagacccgcctgggccagcacagagcgcagagcagtacgggtacggagaaacgccggactcagtgaaaccagccttgcctccagcggattccccggcttcgccggacgccacaggcagagtgccgcggggaaacctctggctccctaaaccgattagattgtgggagtgggggggacactcacaagttgtgtggaagggaaccagcggcaatgggacccggcgagcacttgcccgcagcaaatgcctgcgctgctgcaaaaaaaacaacttttggcgcaaagaatgttgcggccagagagcatccgctgtcgctgacaaaggagtagcaatggcaatgagaaaccgccggcgccacggccgaccgcggcggctcacgcct

SEQ ID NO: 231019 - DNA, 1161 bp, Homo sapiens
  chr5:42991872-42993033
  hyper
gtaattagggatcacggatcagccaagaaaaatacaggttttcttaagcctgaagccactgacttgaggagggagcgtgggagtaatgtcagtagcagttttttatttcgttttcgtttttattttctagtcactaggccaccaaagaaagttccacccaacggccagtcgatccgtcgcagcgactctcttttccctgaacggagggtttatggctgacacctccacttgtttctcagagccggggctgactgccggctgcatctttgaatggcgaccaaaaaagacatgcatttgtctggcaaagtcgctggcgttcgcctggtgcccgcgcttgccgggtcctagagcagccagattttcacaccagcgagtccagcgcccagcgccactccgccttcggatcaccggtttctcacatccgcagcagcactggcctgacagttttccggttgcgacagcgctagttgagccaaacaaaacgttttcctgcttgctctgggcgtcccattctccatccgaggccttctagtcccggtgtcactgtcgcagcacctggcgttcgttagctctttcaccagcggcgcggagcgggcggttttgctgtcacggcacatgtggcacggagtttctcggtggccgaaaccctcttttttctcagagtccagtttcttggtgacagcgctgttggttgcgccataaggaatgttgtccttgacaacccgccggccgcagtcattcgcaagctccaggcaccgacatttcgcagaactgaggtctctcggtctcagcacagctcgttgctcgatgcctccattttctcggggcgacagcactcaggtcgccgatctgagggattcggagcttccccagctggggtgagcctggcgttcccgggcggcggcggcggcgctgggctaggggagcccgccgctcctccaagccggtgacaggggagctgcccgggcgccgtctcttcccagcgccgccgcagaacccgcagaacagctcgacctccagaaccctgtgctgtggcggcggggctggcgtgtctgtcgcaggaccccgcagattcgtctgtcgttggcttgttggtcctaacaagtttcgatttcagggtgcctgcgtttctttttcttttctcttcttttccttttgttt

SEQ ID NO: 231020 - DNA, 240 bp, Homo sapiens
  chr5:42993333-42993573
  hyper
ctatcccctggttcaagtcggggaatagccaaaatgtgatttctcaacccaagcaagtacccacttaggacaaacaccagcctagccctggcggcgatttctaggtcgtaggaagtcgatgtttcgccacagaaaggctgagtgaccctgtgactcatttcccagcaactccgggtttcctgtagcctaatcataacaaacgcagagttagccctgcctcaagtttcttttttctttttc

SEQ ID NO: 231021 - DNA, 380 bp, Homo sapiens
  chr5:42993813-42994193
  hyper
tcccgacctcagatgatccacccgccttggcctcccaaagcctcaagtttctaagtcgtggcaagttccggcttcctactagtacggcttgctttagctgcgcaggagatgttcaactcctgtagaaatctgtgtaccagcgaatgcgattcatttaggtttagcgatgaccagtttagcagtgcctgggagctcttacaccaaggctagctgcgcaacatcaagtcccgccttagctatgttggtgttttttaaactcccatggaagtcaggaaatgccggcaaaagcgatttctggtttacgaagctcggtttgacgatagcaatttccgccgaacgcgactttttcctcttgtggaccaagtcgggatatatcagct

SEQ ID NO: 231022 - DNA, 1000 bp, Homo sapiens
  chr5:42994611-42995611
  hyper
ctggggagccaagctcggtctccgcttcggtggtttcaggtcccgggttctgtctggcggctctgcttctaatgcggagctggcggttttgcagcaacgcttttgccagtagcgcccactgagcggtttttcagttgctgcaccgttcttagcgcccaacggaacgtttcccgtacgcggagtccataagttgtctgtgtcgtcactttctcggttctggcaccgctagtatctcctaggaacttcctaaacccgttttacggtgcagaacggtaattgcaccgagcctctgtgccaactagtacttccgtaataccgttagccggctcttttcctgtcacaacacattaaaacgtgttaaaacacattaaacggattaaacacattaaacggattaaaacacattaaaacgtcacaacacatttaaacagagtcggtccattcctccagacagtatgtttcgggatggaagcacccctcctaagaatccgcagtttctttctagcagcaccgttatggcgcctaaacggatatttgtttggcaataccagcgctatccgctaggtgccggcgcttgctgagtctcagcgccgccagattcttgctagcgaggtccagagcagtgcagagacctagcggacagttttccggtggcagcaatgctcatttcccggacacagatggtttttggcccctgaagaactctttaatccctgcgttttgtagcgctcgttctctgtaaggtttgcttagtatccgtttcatttcgacttcttttctcgctgtttttctgtcggaattacgatttgttttgtttctatgtgctctctagaattttaccggttttcatttgtctactaattttcgtgcattcgttactattgagtttcataatatctgggtgccctctgcccacgagctccggagagcataaatacccaggctgatggtagtgctaaaggttctgcttcatctcgtcaatcagcgcaaacgcttatgt

SEQ ID NO: 231023 - DNA, 1000 bp, Homo sapiens
  chr5:43007484-43008484
  hyper
acctaggcaggcagcgtggggtggagttggcaaacgtcctgcaacccatgaagagccgctatggtaccactagcggttctaggacccaaaaactaacgaaactgctcaggagaagctgcaggcttgacccaccagaggtgctgccaccgagatcaattctgctcggacgaatgagcggtgctatgactcagaaagtgccagtccgaggaaccagggatactgggacatagtgaaaggagttagccagctttagggagactgtaagggaagggtccccagagaacctccgactggtgttttgtgcagataagggaacttgcacaagggacttgcctaagcatgcctgctgcggattaagagcgcgcatgcgcactgggggaatgggatggagccacccgggattctcgccttatacaaacagggaacccagcctccttagctttcatataaaagcctttgtattcagccgttaaggagcaaccggcaacctgctttcaggacccttgttttttatgagagctttcgtttacgcttaataaattctactccactcactcttcgatatccgcgtgcccacttcctcctgatcgtgagacaaggacccggatatagctgagcttagaagcaaaaatcctgcatcaatagcaaatgcggacactgaacgactagcggagtacccagcggcaaactttagtttttggtgcagttaaggtattgccactaagaaatcgtcgtctctgagaaatatcgaggcttggaaggttgtacagtgcttccaccgagaaagcacctacccaatgaaacgcctgtggcagaaaaaccgagcccaagcccttccagcgaaagtgctgaaagagcgcctcctcggccaatcactgggctgagaccgtgagacagccagcccggggaaagtggcggcgctaggagaggggaagcgttaccacaaagcacttctgagtcttgtgaacaagaaacgttctgggttgttttgtttttgaga

SEQ ID NO: 231024 - DNA, 219 bp, Homo sapiens
  chr5:43008724-43008943
  hyper
taggattacaggcgtgagccacagcgccccgccgaaacgttctgttgtgttcagcgcttccagcggtgcagcagccgagaaaacactgagtctccgctattggcgaaagtgctgatgcgaaactgctggctcgacataggcacagagccgcggaagagaaccctagagaccaggcaccagctctgctccccgactcacgggagaaagctagttagtagg

SEQ ID NO: 231025 - DNA, 1419 bp, Homo sapiens
  chr5:43017279-43018698
  hyper
tagagaggaggtgtatgtctcgctgtcaattctacatccaacgctggaatctttcagcccattttcctccccggctgtttttgaactactatccccaaatatcgaggatatctgacagagtgaaccatcagaataaggagcgattgccacagagttccatccagtaggggagggacttgatgtgcggggcaagcctgatgcccgggtcaggcgactgtgcctttcattctccacggagatcttgaacctagagtttccaagttccgaagagatgcggttgtcgacagctctcctagaatctctgatggctctgaacggggacaaaggtctagggcagagggatggtgtggaaggacccagccacggccattggaagagcagtttcctgcaatgtaatgctgtttgcgaccagcataagctttagctctctcccaggacgagccacatccgccccattcacggtccttattccagctcctttccctctgcgaatcacactgggtgggtcgctgggggcctcggtaattacggattatggcacagccaagaaaaatacaggttttcttaagcctgaagccactgacttgaggggggagagtaggagtaatgccagcagcagttttgtatttggtttttgtttttatattctagtctctaggccacaagacaatgttgcacccagtgccagtcgatccgtcacggcgccgcaaactttccctgaacggagggtttgtggctgacatctctagtttctcagagcctgggagtgatcactggctgcaccgctgatggcgcccaaaagaacgcgcatttgtctttggcaacagcgctgggtttcgcctcgtgcccgcgcctgaagggtcctagcgccgccagattctcacactcgcgggtccagcgcccagcgctgctcctcccaccagtcatcggtttctcacacgcacttcattggcagcactggcgagtcagttttccggtggcggcggcgctagttggtctgcacgaaacgtttcccttctcgctccgtgtgtcccattctccatcccacgtcctccagtgccggggtcatggtcgcagcacccggcgttcccgttggctcttttgccgctgcgcggagccggcggtttttctgtcacagcacttgtacggagtttctcggcggccgaacgtctctttttttctcagagacgacggtttcttggtgacagtaccgttggttgcgccgtaacgaatgttctccttgacagccccaccagctggcgtcactcgcaggctccagacgccgccatttcgccaagccgaggtctcttggttgcggcactgcttctggctcggtgcctgtattttctcggtgcctacagcgcccaggtcgccgatctgagggcttcggagtaccggccgggcgcggtggctcacgcc

SEQ ID NO: 231026 - DNA, 1659 bp, Homo sapiens
  chr5:43018998-43020657
  hyper
gggtacccgcgaatgcgattttttttaggtttaccgatgatcagtttagcagtgcctgggagctcttataccaagtttgttttcgcaatattgagtcccaccttagctaagcttgtgtgtattttaaactcccatggaagtcaggaaatgtccgcaaacgcgatttctggttaccaagctccgtttggcaatagcaagtcctgccgaacgcgactttttcctcttgtggaccaagtctgaatagaccagctactgcgatttttaagtcgtagtaaaaaaggtttaaccgtgactgcttttttttgttggtgttgtttgtttttgtttttgttttcgtaggaaatgtagacttaggtgtaacatgtaccggtttagatctgacagagatatcacaattgtaggattgcatcttttagcaaggtttgtaatttcttctttctaggattggttctctgtaatttttgcttatttttaaattctctctttgtcttttgctctgagaacgatgttaccgatgtgtttgctttccatgtttacttgcattttagcctttatttttttaattttgattttatttaaatgttatgtattttttttctactaattttgagcgtctcagcttcctgcttctttacttacattctctcaggatccggggagccgagctcggtctcagtctccctgctgtcaggtgccaggttgtgtctggtggctctccttcgtatgcggagctgatggttttgcatcagcgcttttgccagtagagccgactagcgttttctcagttacggcaccgttcttagcgcccagtgtgacgtttcccattcgccaggtccttatgttctctgtgctgtcactttcttggttctcgcaccgctagtatctgctaaagaacttcctaaaccatgttttactgtgcagaacggtgattgcacggagccgctgtacgcactagtaatttcatagcaccgttagctggcgctttttctgtcacaacacattaaaacgggttaaaatactgcaagcggattaaacacattaagaggattaaaacattaaaatgtctcaacacatttttctgacacaacacatttaaacggagtgggttcattcctccgaagaggatgtttaggcgtggaagcaccgctgtttcccaagagcacggtttctctctggcagcaccacttatggcaccaaaacaggtattttttggcaacaccagcactattcgctaggtgccggcgcttgctgagtcccagcgccgccagtttctctttcggtcgttaagtagctcagagccctagcggacagttttcaggtggcagtaatgctcatttcctggaacagatggttcgtggcccttgaagcgctgcgatctgtaaagctagttctctgcaaggtttgcttagtgtctgttttatttcggtttcttttcttgctatgtttatctgtcggaattacagtttgttttggttctatgtaatctctaaaatgttatcgtttttcttttgactactaatttttgtgcattcattactattgagtttcataatacctggcttgcctccgcccacggcctccggaaagcataaatgtccaggctaatgggagtgctgaaggctctgcctcgttgatcagcacaaacgcttgtgtcctgct

SEQ ID NO: 231027 - DNA, 484 bp, Homo sapiens
  chr5:43040739-43041223
  hyper
tgtaccagaaaaatgtgttgcggcatttaatgtgttttaatccgttcaatgtgtttgataggtttaatatgttttaacccgttttaatgggttgtgacagaaaaagcgccggctaatggtaccacacaattactagtgcgaacagcggctcggtgcaatcaccgttctgcacggcaaaacggggttcaggaagttcctaggagatactagcggttgtaggagcgaaaaagtgacagcactgagaacctaaggaccccgcgaacgggaaatgtcacgttgggtgcagcaactgagaaaacgcccagtgggcgccactggcaaacgtgctgatacaaaaccgccagctctgcataggaagcggagcctccagacagaacccggaacctgataccagcgaggctaagaccgagctcggctccccggctcctgagagaatgaaagtcaagaagcacgaatctgagacgctcaaaattagaagaaaaaa

SEQ ID NO: 231028 - DNA, 349 bp, Homo sapiens
  chr5:43041474-43041823
  hyper
tatccacggttaaacgtgtttagctacgtctaaaaaatcgtagtagctggtacatcccgatttggtctacaagaggaaaaagtctcgatgggcaggacttgctattgtcaaagggagcttggtaaaactgagacatcgcgatcgccggcatttcctgacttccacgggagttttaaaaacacacaagcatagctaagacaggactcgatattgcgaaaccaaacttggtataagagctcccaacactgctaaactggtcatcgctaaacctttaaaaaaaaaaaaaaagcattcgctggtacccagatttccacaggagttaaacatttcctgcgcagctaaagcaagt

SEQ ID NO: 231029 - DNA, 1454 bp, Homo sapiens
  chr5:43042087-43043541
  hyper
agggtggaaatcccaggcaccgcgaaatcgaaacttgctaggactaagaagccaacgacgcgcgaaaccgtggggtcctgcgacagagacgccggcggcgccgccacaggactgcgttctggaggccgagccggaacccgtgcggcggcgctgggaagagactgtgcccctgcagctcccctgtcaccggctccaaggagcgtcgggctccccccgcccagccctgcagcacccatccggcaacgccagactcggcgcaacgggggcagctgcgactttaaatctctcagatccgcggcctgagggctgccgccaccgagaaatggaggcacagagctgtgaacaagagaccacggctcgccgaaatggcggtgccaggagcctgaaagggaatgcagccggcggggttgtcaaggacaacatttgttttggcgcaaccagcggtgccgtcaccaagaaaccgtcgactctgagaaaaaaagagaagttcggctaccgagaaactccgtgcagcaagtgctgtgacagcaaaaccgccggcttcgcgccgctggcgaaagagccaacggaaacgccgggtgctgcgaccgcgaagccggcactagagggcctcggatggagaaagccccgcaccgagacgaggaaactgtgcacagcacgactagcagttgacacaaacagaaaagtgtctcgtctgctctctgggagaaagcgtggatcaaaaccagcaactcagtggagagaaccccgcagccactgaagaagttgcccacgtggcggtggggccagagaaacaccgcgatttcgacgacagccgtagggataccacagagaaacatgcgcggccacagaagtacatccagctccgcgcaatcagtggttctgcgatccagaaaccgccagctgggctagactagaaacttctaaaaaactgtcgtcccatagcagctttcctaaccacgacagacagtcgcctttagagagcacctaacggtgctgagaccggcctgggccagcaaaagcgcagagcggtgccagtgccaagaaacgcccgacttggtgaaaccaaccttgtgaccaccgattccactggcttcgcaggacgcaacgggcgaaggcgcggcggagaaaccgcaggctcccttcaccgattatgctgcgggctggggatggtggggggcacccgcgaaattgtgaaaccagcggcgctgggacccagcgatcagctgcccgtagcaaatgtctgtgcagttgcaaaagataatttttggccgtgagaaggttgccgccagagagcgtccgataacgctgacaaaggcgtggcgttgccagtgagaaacagccggcgctgggaaaggaacggtgcagcgaccgaccaactgcgcgctcggtgccaccaaagtgctactggctctacccactctgtcccccacgggcttagggaagtctgatgt

SEQ ID NO: 231030 - DNA, 444 bp, Homo sapiens
  chr5:43067119-43067563
  hyper
ggactagcagattcgagaaaccagcgggactggaacctagtacacttcggcagttgagaaatgacttaccaggacaaatactgcttctggctcgatggtgctgcccatgaacatccgccggctctgagaaacgagctgcactgtcagtgagaaaccgtgggcactgagaaacgagcggactgcaactgataactgcccacccagtgccactacgacaaagtgctgctggcactactcccaccctccgtcctcaaatcagtcccctcccgcctaagaagacctttatttttcctagcgaagtcatactgagggccccatcaaccgatcccttgcgatgcgcatgggaaaaggaggcagtatagggaccgagaatcgggcggattgggctggccctggtaacaaaagccatccgggtcgccaaccgtcttccactgcaagaaacaa

SEQ ID NO: 231031 - DNA, 36 bp, Homo sapiens
  chr5:43120913-43120949
  hyper
agcccagcaagcacgtgctgcggcagggcgcgggga

SEQ ID NO: 231032 - DNA, 32 bp, Homo sapiens
  chr5:43121558-43121590
  hyper
ttcccttgctggtcggcgcccggaaggcgtcc

SEQ ID NO: 231033 - DNA, 1326 bp, Homo sapiens
  chr5:43191849-43193175
  hyper
tgcagaacctaaaccctgcccgactcacccggaggagctgtcacggtggtttgctggaaaccccctttctgttgggaggattactgggtcacggtttcccaaggacatggaaacccttgctgaagcgctggaaccgctcggcacgaggcgtacgtcggtgggagctgtgtcagcccgctttcggccgtgtagctgctcccatccagactctagaaggggtcctctttgcgtcaggcccaatcacccccctccccgagcgactgcactgggtgtccctgcgccgcgcgtcccctccctctcgcccctccctcctggctgccatagaaaccagcttacaaggtccaggccggcgtccgggtgcactacaggccccccgtccctccttccccacgccagcccctcgctccggattggtccttcaggaaacgctgtggggcgtctcggtccccgctgcggagccggcctaggccggagggcggggtttgccctgggccgctgccggtcaggtcggccgcccctgacagctccgggagcctcaagcgcgacagcggcgccctcacctcgggacatccacacaccgaccgctcctgctccagaggcaacaacccagcgcgcctagcctggcgccgtgcagcgaagcccaagagctggcctcgccacgaaggtaagcgaggggctgggggactcgccgccagcacccccaccccgccacccttcctctgctaggctgcagacctgggtggctgaggaggaggcgcctctcctccccgcgacccaaggaagaaaggaagccctgccacggggtgtctgcgaagtggggtcagaagaaggttaggcgctttctggggcgtacccccacacctgcccaggccgatccgcaagcgagaggagggggcattagagccagggcgagagcgtgctcgcgcgtgtgtgcccgtgtcatgtgtggtgcccgtgtcatgtgcggcgcccatgtctatgtgcgcgcgtgtgtgcacccatgtctctgtatggtgtggacactcgtgtctgcgtgcgcgtccacacgtgagccgaggagcgcagcttagcgcctagcgttgcgcacagcgggtgcgctggaccagagccctaaggcaccagaccaaatctggagcgtttgttacaagggcagaagaccggcgtgatctccccacgcgcgccggccggtgctgctggtggagagaactgacatctaacgcatgtggcccaggagaacaaaaccttccattgcaccccacgccgcgactctccccagcgaaaggtgcttcttttggaagaccgcacgaagtaaggaagagcctcttt

SEQ ID NO: 231034 - DNA, 200 bp, Homo sapiens
  chr5:43313630-43313830
  hyper
gcccggcagcgcccgccccccagtccggcttctaccaatcaaaaggaaactagaggcgatgactcgctaggattttccctcgtggctggaagggcggggagaagaggcggggacaaagtctcagggccgaggaagtggtgtgagagactgacgtgaggtggcacgagagcccagttgccaatgacggagctgcgagatac

SEQ ID NO: 231035 - DNA, 507 bp, Homo sapiens
  chr5:43396923-43397430
  hyper
gcgctactggtatctgtagtcgtggctgccgtggaccaggagagactgaagtggaaaacagcgggcggtagccgaagcagagagcaaggaagagcgcgggaagtgcagagcgacagcaacaagaaaggggtggcgcgggacgtcgtttacctgggcgacgtccagccgcccttcccgcctctgcgcgtacgcaacctgcttggcgccactgacctggtgaggaggcttctttaaggccgtggacggttcctacccgcgcgcggagaggaccgacgtgaagaagctgccaaagtataacaagtactacgcgaagggtaggtagggtggagtcccaggcagcgcgtgacggccggatgcccagacgcgcacgtcgcccgcaggcgcacgcctggacccgggggagccggctggggcgcccaggaccaggcctagcctaccgcgggctgcccttcacagagctgcaggagaaaacgttgtattgtgcacgcattccctaacccttactag

SEQ ID NO: 231036 - DNA, 284 bp, Homo sapiens
  chr5:43484116-43484400
  hyper
tcgagtttctcctcgcccaccgtaggccccgacccctaaaaaggaaacttttgggacgtcagagtgagaggagaaaagtgtctttttagtttagttttgtcaaacctgaggattcgtttttcagtttagccggagctgtgccgcaaacgtagctgccgacatccccacgacgcacccaagtggtggcccggaagctggggatagaaaagtggcctccccgaatgccaggcacacaggccttactaccagaagcttgagctgggagcctcggccgtcgcatctct

SEQ ID NO: 231037 - DNA, 266 bp, Homo sapiens
  chr5:43514901-43515167
  hyper
actcacagcagttcggagccgaaaagttgcggaaatgaggcccagcaacggtccctggctttgatttgccaaaatgctctggaagccgcagcgtcggcgcctgcccacgactgcttcttcaggggtttcttcagtttgacaaattaccagcgagtgatatttcttggtgaaagaaaaaaatcacaaccctagaggaataaggtggcagggagagtgttttggccaagatgcccgccacgaaacaggaaagcggagacagcgccaac

SEQ ID NO: 231038 - DNA, 1175 bp, Homo sapiens
  chr5:44388246-44389421
  hyper
atgtgaagggagcgcgcttaggggaggggatgcggcagcacaatgtatacacgggggttggggggtgaattagtgtgaaagtattccacttaatcattttacaggggttggggacgtaaatatttagctggccacatctggaacagatttttcccccccgtgtgggctgggggtggataattggaaggaggggagcatgcatttgttacttactgtacgggcagttctccttcttggtcccgctgaccttcccgttcttctcaatcttgagaaagtacttggtgaaagagaatagctttctccagcggacatctccttgaaggtgattgtagctccgcacatgccttcccgcgctggaaggagaggagaaggaggaggaagaagagttggtggcctctggtgacaccatgtcctgaccaagggcttggcaggtgacagggacggaagacaccaagaacagcaacaaaaagcagcagcagcagcagccgggcaggtggggaaaggctgaggcacaatgtgtcagtatccatttccacattgtactgaaactctcggcactggaaattgtctcatcagaaggaacatactggaagggtaagacccgatgcaaggcaaggagagagctcgaggtggtggctgctggttagctccctctgggcgcggatctggccagaagtgaatgcaccaacatccataactcctcggaaaagccggctgactcccctcgctcctttctcggatccgctgcctacgcctctggagcctcccggtaaatggtggacgtgggtggccgcagcagcaggagctggtggtggcgttggtggtgttggtcaccagcgctcttcgctcccccaggagttactttgttctcttctttactcctttcttcaccatgttagatgccaaaaaggtctgaaaaacagatgacagcacggtgaacaaaacccaagggaggtggggtggggaatagggggagatatctgcacccctctgcggttggcaccttctggtctctctctgcggagccccagcctgcgagccacttctacaagtatatccctttggagttgtcagaagtggaggcagctgcccagtcgccgttgttttcttccctctcttcctttctgtttttagtggtgcctgccgatttgaaggctgccgaaagtcactttttg

SEQ ID NO: 231039 - DNA, 166 bp, Homo sapiens
  chr5:44389697-44389863
  hyper
gcgaggagagagcgcgatgcctttgcaccgagctcgggggctgccaggtcccttcctcgccgcggctgttgcggccgcagcctccgccggcgcctctagctctgtctaattcgctgctaaagcgtcctatgcttgcagcgcgggccacggcgctgacggtatcttc

SEQ ID NO: 231040 - DNA, 234 bp, Homo sapiens
  chr5:44390201-44390435
  hyper
atcactgatttctcgcttccgttgctgaagtaaaaagttcacactttggccctctctgccttttaagctcagggagatttatcgtcacccttaaaagttgcctctctcggcgcaaatgaaatcagggacccaaataaccgatttctaattgctaacatgagcccttcactgaatcatgcgtgcacttcaaagcaaacgcactttatggcgatcgcaaagattttaccatataat

SEQ ID NO: 231041 - DNA, 348 bp, Homo sapiens
  chr5:44808978-44809326
  hyper
agattccgctttccgattggtccctacagcaagagggcaaggacaattgcttaagttgacctctgggtccggaatcgcgggcaaagatggcggcggccaggtgttggaggcctttgctacgcggtccgaggctttcattgcacaccgcggctaatgccgccgccacggctacagaaacgacctgccaagacgtcgcggcgacccccgtcgcgcggtacccgccgattgtggcctccatgacagccgacagcaaagctgcacggctgcggcggatcgagcgctggcaggcgacggtgcacgctgcggagtcggtagacgagaagctgcgaatcctcaccaagatgcagt

SEQ ID NO: 231042 - DNA, 1533 bp, Homo sapiens
  chr5:45695191-45696724
  hyper
ttttgcctgccggccgctgtttctgagtaaacacagcgaggataaccagcgcctataaagaaaaacagactaaacacactccccaggggcgagcgcggcaggaactgctcgggcttgtgaatcgctgtctccggttacccagtcttcttctgagccccagaagcctccttttccctcctggttgagaccacacttgagggagccgcgcgaggaagggtggcttcccgcttcctcacgctctcgtctctgaagtaaaagtttcccttgtacaacttcgcctcctcccaggagggtgaccgtggcctccatccttccctgatctgtccccgaagttcaggaggccaaggaggagagcccgtccgggattcccgggcaacaggagcacatcctccgagcccctcctgggtggaaactacccggaggcgccgagtggagcctgcttagcccgagccgacgccgccggcagcgccaccccccgcccgccctcctagtccccgggacgccccccacccaagggcggggaagcgcgtttcagggcgcgcctgaagggagggtggggcggcgaccgggagccctcacctgaaatcactgtaagggtggataatccagaagcctgcagttttaaccctttcctgctccttttccaccgccttctggctcccaaacatgcggagggagaatttgttgaccccgggctgcagcatggaggtgaactgcctctgcatgaagccgtactgccgccggggcccctcggcgtcttcgaagccccccgccggctcctcgccgccgccgccgccgccgccaccgccgccaccgccgtccaccttgaagcacacggagttgccgtgctccttcgcgccggccccgccgccccccggcggggtgcccaggcgcttctcggccgcggccggccccgcgcccgtcgcggacgccttggcggggaagacgctgttgccatcgtcccggctgttagacgaagagttgggcttgccgcctccttccatgcccggaggacgcggccggcgacggcgcgggctccagactcgccggccgcccggcgccggagacacgtagccgagagggtaggggcccgagccggctgccggcgagcccagctgcccgtcgcggcggcggcggcggcggcggcggctgctgcttcccgaccgcgccgctgctagctgcgcgcctggctcccgccgccgccgctgcccttagtggctgcggtccgggctccggtgcggctggtgctgaagctgaggctgccggagctaggcgaggctcagctcggctcagccctcgcgccccagcgcctcccctcggctgccctctgttggccagaaagggtctctccccgtccgctctccacacatgctcgttactcttgctctacttctgcccagcgtgacattgaactcaagagccctcggaggagacattcattggtacacgtggagaaggactcggtgtatgtttgcatgaaagacaggggagagaggagagagagcaagactgaactagcgagtgtgtgttggt

SEQ ID NO: 231043 - DNA, 64 bp, Homo sapiens
  chr5:50259395-50259459
  hyper
tccgctcctcctccgcccgggcccctttctccctgggcccctcgatctcgcgccgcagactgcg

SEQ ID NO: 231044 - DNA, 349 bp, Homo sapiens
  chr5:50263366-50263715
  hyper
taacaaaagccacccgccagtcaaccagagtcagtcgctctctctctctccctttcttccctcctctcccccactcttcctcgtctcccgcccccgccccccatctttctccagctagcctcgccccaattaacgccctacagccagtcagccttacacctgctggaaaaatcttggtggcagtggtgggaggtggtggttttggtttttagcagagcgcgggagcaccctgtcacaccctcctgagaccgccctaggaccgtcctctggaatatcttggagccaggagccagggaggctttcctcagtcccagtcgttgcctgtcgccgctttcggtttctcttccct

SEQ ID NO: 231045 - DNA, 141 bp, Homo sapiens
  chr5:50264390-50264531
  hyper
acaacacacacgcacgcacgcacacacacacaccggcccaggacctcagcacaaagggcgcgctgacccagcgctaacacacaagacaaattaaagaaaggggcaaatcggaggaggggctaaggcgagggtccaggcatt

SEQ ID NO: 231046 - DNA, 886 bp, Homo sapiens
  chr5:50264822-50265708
  hyper
agaccaagagatccggagtcaggctgtgaacttgggaaagataagttgcccggcgaggttggaggtagactgaggaacgcctttttttgtgaaggacacaaatatttgcagagtttaaagctgcaggaatacaaaagcaggagtgagattatctgattacggatacaggatgtccgagttgttgcctcccaaaaacgactgcgtaaaaaaaaataaataaaaggccagttcgaaaagtgaaattttaatatcagtgaaagcatcggagggactcggattgaacgcggcagctccggaactggacaacagctgcgtggtgcagccaatcccggggcctgtgggaacgagcgaccgatctcaggaccacgcgggcgagagcaaggagcctcccggccacacagccacaggcgctgcggaacccagcccggactctccccggctggagtgtgcgaagggcttcccgcccaggggcccagggtggtcttagtgaaaaagggatggcgctgcagcactgaccacgttgccctggtttctccatttctccttcccaagtctctgcctctgtttccccatgacccggaggacgcgcctacggaagagacgtctggtcgagggggtgccggggagcggaagggggaggggaaggtctcatccctgggacgctgacacccccctccccgcggcactccagctccgaagagcgagcttcggttccgcccgccctccagaccatttgcttattctcactattgttttaatttattgtgcagcctgttgcgccgcgggcccggctgagccatttggggccctctagatgccctgcagggcgcctgtctccggacgaccaccacgcaggagcagcgggggcacgcgcgtgttttcttgt

SEQ ID NO: 231047 - DNA, 97 bp, Homo sapiens
  chr5:50673162-50673259
  hyper
atcctctaggccagcgattggattcacctcttctttcgcgtacttacgggcaaccgaggccatccgaggccctggtcccgaacgaacttgagtagcg

SEQ ID NO: 231048 - DNA, 492 bp, Homo sapiens
  chr5:50673739-50674231
  hyper
ctgagaagagaaggcgttgttgacctttcggggagcaagttaataactcagccgagttgatgaagtgacgttctttctgaaaggggtcgtctcctgggccccttttctcagtcggcatttagcaggtagggaggcagggcaaattcttctctccacgtgaagtcacaaagaattgatgagtttcaacagcatggatctgaagtcgtagataattctaaacacacccgcgccagagttcacactcttgttcatctctgcggagttggagcagacagcgaccttcaaaattgtccctaaaatctctctcgaactgaccgggcatttactgggatttgaggggtttttcttcagcttccaaactactgttacatgcagaatatactggtagatgccaccaatgattgcccacctctctttaaaagttgccccgtccacgcaccattcagcttacactaaactgtcccgacatgccttagccgtcagtttaattca

SEQ ID NO: 231049 - DNA, 314 bp, Homo sapiens
  chr5:50674561-50674875
  hyper
gggtaaatggtgtccgtcctttcagaaagaatgatcaactacatggaggtaacttgctctgggtttcctgagatctcgggcggacccgtccgtgttttgccagattcagtgcaaatgtagatttcagctgaaccggtcaggacttgagagatagctgtttcactctccggactgcaaccacttccgcgagaatctgatacatttaatgaaagctttgccaaatgtacgggtcagcgcgtccttgggccaccaccacttgggtcagcacactgcactcactagcgccaacctgggctccacgcagcagaactcgg

SEQ ID NO: 231050 - DNA, 363 bp, Homo sapiens
  chr5:50677750-50678113
  hyper
aagcccagccaatgcggccggccaggatttacagctcttatcaagggttagattttgcgaaagatataaagaaaggagtttcctaacacaccgggtcttctcacagcaacaagacaccgaaattaagccttctatggtttgtgtctgtaggactttttagataaaactggcagccccattagataagaaatggctttttagaagctttgggggaagcgcgggggttcttcgtggccttcctgtgactgtctttgggagaccgtaacagatgatgggaacatgtaagaatgattgaagaaggttaccggcgagttgcacctaacagtcttctctctccaagtagtttctcgagagaaaattata

SEQ ID NO: 231051 - DNA, 987 bp, Homo sapiens
  chr5:50678408-50679395
  hyper
agaagcagacctcgcgggtctgaaagacaaaaagtcagtccgcggagtcaacttcggtttaccggtgcgttccaacctgattgtcccaacagcaagaagcgcccctttcctcccacccaacgtttttagatatctgaggttgggggagacggagtaatggtgtagcagtcaggaaacagttcctctgggtttaatcatcccattcccgattcttcttcccctagcgcgccgagcgcagccagttctggaggaactagccctccggagcagccaaggcaggccaggccccggggatgtgcaccacggcgtggggaccaaaccaagctgaacggcctgctccaagttccccccttttcctagagcccgggagggacctcgtcaacaggtagacctacccaccagccactcgccaccggcggcagaaagtgagccccgcgcgcaacgcggccagccggactgcggggaccccaggagcgcagggcggaggagcagcgccacaggaggcgagggcgcaggcggcgcggccgggaaggaacgcgggaggggacagaaggaagaggaagaggaggagagggaggccagagccagaacagcccggcagcccgagcttcgggggagaacggcctgagccccgagcaagttgcctcgggagccctaatcctctcccgctggctcgccgagcggtcagtggcgctcagcggcggcgaggctgaaatatgataatcagaacagctgcgccgcgcgccctgcagccaatgggcgcggcgctcgcctgacgtccccgcgcgctgcgtcagaccaatggcgatggagctgagttggagcagagaagtttgagtaagagataaggaagagaggtgcccgagccgcgccgagtctgccgccgccgcagcgcctccgctccgccaactccgccggcttaaattggactcctagatccgcgagggcgcggcgcagccgagcagcggctctttcagcattggcaac

SEQ ID NO: 231052 - DNA, 46 bp, Homo sapiens
  chr5:50679667-50679713
  hyper
cttgttgccgccacgcctgcatgcttactgtcggttcttatcttcg

SEQ ID NO: 231053 - DNA, 183 bp, Homo sapiens
  chr5:50684684-50684867
  hyper
taccgagagggaggcgggggacatctcccagccaccgtttatctagagcctaggcagctcaacagagtttccgttttccactgcttgggatcagcccatctcaggaacatccatgtattaccttagatttaatactaagagcagggattggagatatggcagaaatagcgaatctcttcagcc

SEQ ID NO: 231054 - DNA, 542 bp, Homo sapiens
  chr5:50685533-50686075
  hyper
cggagaagaccacccgcgtgcggactgtgctgaacgagaagcagctgcacaccttgcggacctgctacgccgcaaacccgcggccagatgcgctcatgaaggagcaactggtagagatgacgggcctcagtccccgtgtgatccgggtctggtttcaaaacaagcggtgcaaggacaagaagcgaagcatcatgatgaagcaactccagcagcagcagcccaatgacaaaactgtgagtggctctggggccgggcagggaatgcgagggggaaggagacgcagcgtgcgaggtgcgttcctggtacgcaggatcgcacggttttcaatcctgctcctgggcaggagtttggccggggctgcccctcatccttacccccctacccatgccccgggggacaggctacccggcgccggccgccagctgagggcggggaagctgggaggctccgtgcgccgggggagcagcatccaggtcccaacctcgtgggtgggctcatgcccttccacctcgcctgtacctgtgaaccggagaaacgccgtc

SEQ ID NO: 231055 - DNA, 223 bp, Homo sapiens; identical to SEQ ID NO: 199836
  chr5:50694001-50694224
  hyper

SEQ ID NO: 231056 - DNA, 1008 bp, Homo sapiens
  chr5:50694660-50695668
  hyper
atgttatttgtggatttgaccgagttagctacttaattttgcgcgttgtcccattggttctacccccaggtgcgttgcccacgtccagcgggcagggcagcgcagcgcctgtctgcactcaggttaggggtgggaagtgctgggaatgggggacccggacactggtctaaccagccccgccactcccgcgggcaagtcagcccttgatcctttaaagcagggacaatcgacgtggtccgagagaggaaaataagggtatttctgggcccttctctttcaggagttgatcaggttggcagatctggagggctaatccaaacaaggcgcttgacttgtgaggtcgcgagtctagacagagctggtggctcggcggctccttatctttccctggaatcagccgaagaggcgctccccggcccactccgctcggctcgcccgggtccggagccaccgctcgacgcagacggcacaacaaacagcacctgaggctttatagctcgctttattgtttaatggagaatgcggcataacattcatttgtcttcttggttccgcgacctggccgctttgcagccacagacgctgggtacgggcgtgcgccagcgcccggccgttatggtccccatgttgagcagcgccgggcgttccgcttcggcatcgcgcgtgtaagcgcgcacggctctgtccgtgcgccctcaggcccctggagaggtacccagctgcagcccctttcttgcttccaaagcccggaggcggaagggtggagggacagtgaaagaaagcttaggcgaggtgtctttgactaatccagtatctcctcttgctgcttggaaatgacagttttgcgccaaagccatttatggttcgcagggtcagtgggctctgactcaagggcaatcaataaaatatttagttcagtaataagctgagtttttttcccgaatgtaccgagaaggatgtgtcaccatcttggacaaggtgtcactgcgtagccgatcgccctttccc

SEQ ID NO: 231057 - DNA, 737 bp, Homo sapiens
  chr5:52083691-52084428
  hyper
aaggggtgtgaaggcggagccactgggctggcaacaccctcccgaaggtccagcccttacccgccttcctaccaccttaggggatttggcccggagaacgagatcaccctctcaatgaaaggcagatgtccctttaaggtttgcttctacagcccgtggactttagcctaaacacggacccgcgaagctggctttatttgtccatgtctcggacagagcctgggaagctgccagtgagatttcagagaccaagagcgcgaaggggcgggcgatgtggcaatccgtctgggatgtgaaaagcgtggagcgcatttagaggaattcgacgaaaacacaggaaatcactcctctcccgctcctgggcgccgctgccactggggcagaggactgggaaccgcggcagcgggataagtggcccagccagagagcgcagctcccgcgcccggtcctgccctgcgaaccagcgcggccccctggcgctgaggctgctccggccatggcccctcggccccgcgcccgcccaggggtcgctgtcgcctgctgctggctcctcactggtgagcgactcgcttttctctgagcatctcctgctcgcgggcttggggcttggagcggggagggaggtcctcagagccatgggccagataggaagagagagcgcccatccactttcgggcattccaggtactcaggccaggctacggggcaggcaggagtttcgcgttctggttttgata

SEQ ID NO: 231058 - DNA, 1076 bp, Homo sapiens
  chr5:52284771-52285847
  hyper
gccaggagccgggcgctgccaagggctgcggaggggccacgttctcccggggactggggcatctcctgcgtgctggcgacaggctgcgggggcggagtggtgccagggcgggcgctcgcccgtcggatatgcccacccgtcccgtccagggcaggaaagcctgccagggcgccatccccatccccaccgcctccaggctgccggggctgggccgctgtacgggagccaaggtgcggtgccccgcgtgtggacgagccgaggtgcagcccgcggggccgcagggccggggtggggcggggcgcggccggagcagatccggtgtttgcggaatcaggaggggcgggctggggcgggccctcggcgctgcaggagctgcccagaaacttttccctgctctcaccgggcgggggagagaagccctctggacagcttctagagtgtgcaggttctcgtatccctcggccaagggtatcctctgcaaacctctgcaaacccagcgcaactacggtcccccggtcagacccaggatggggccagaacggacaggggccgcgccgctgccgctgctgctggtgttagcgctcagtcaaggtaagcggggatttcgctctgcatcggctgcaggagggacccgcgcggcttcctggggctcgctggagggattgggcggaactagggagcgagctccgtgtgttccctcggattccacgtggactcgggctcccagccaccaggacctgcttggaaagagatacttcttcgttcccttcctgctatcccaggccttgcgtccccattaggcgcgtctcgccctgtctgttaagcaccctccaaagtcatctcagtgagtgctttgttttaggtacacacacgcacacacacacacacacacacagacagacacgcacgcactcaagcatggacagtgtggggatccgcgggtgtcctggagaccgcgagtcctgcagcccaacttcccctggctcagacaggtgccgcgcctgccagagaccagggaaatccggaatccattgctgatggcggcctgcagctccccagcgcggtgcttgctggct

SEQ ID NO: 231059 - DNA, 53 bp, Homo sapiens
  chr5:52405480-52405533
  hyper
gggagagacacgtcgaggagggctccgcacccaggcccgcacgcacacccgcc

SEQ ID NO: 231060 - DNA, 119 bp, Homo sapiens
  chr5:52405741-52405860
  hyper
attagttttgcttcgcagatgggccgtggtggtgagaggaagcaatcagtatggaaatggagaaatggcttaccatgcatgtccttctccccaggagggaggtcgtggtgcaggcgagc

SEQ ID NO: 231061 - DNA, 388 bp, Homo sapiens
  chr5:52776321-52776709
  hyper
gctccccacccccaaggagccgcgcacaccctcgctcgcggccgccctcccacagccccacacactgggagaccgcccaccgcaaaccgcggagacccccgtctagatttaaagcgcggctgcgcccggcttctgacgtccattgaatcgcgcgggcggccggcggcgagcgcggggctgcgccgggatcgctgcgccctccgccgctggcctctgcgacgcgcgccgctcgcccgagccacccgccgccgcgccggctccccgcgccgctgcgctcctcgccccgcgcctgcccccaggatggtccgcgcgaggcaccagccgggtgggctttgcctcctgctgctgctgctctgccagttcatggaggaccgcagtgcccagggta

SEQ ID NO: 231062 - DNA, 617 bp, Homo sapiens
  chr5:52778273-52778890
  hyper
gtaaaaacatccgtcgcatcctgtttttgtcaggttctttaatctgctcttcgagtctctgcaggttatgaaatgggacgaataaaagtaaacagtctagtaaaagtcaatgcaagctgcacgtgttgtgtctgggtcactggtaactgacattgatatggctggggcgccctgtcttctccctctctccctccctccctctcgcccacctcccatctctgtgatcagggcttccccctccactgccttctttttccacccctccacccctttcgatttatttcctacttttctcccgcgtctctctcacttcccctcctccacgctcaccccctccccatccccgccgggtctccttcgctagccacctcgctctccctgccctgccaccgctcactgctcactcacccacctccccacccttgtctcttcacagctgggaactgctggctccgtcaagcgaagaacggccgctgccaggtcctgtacaagaccgaactgagcaaggaggagtgctgcagcaccggccggctgagcacctcgtggaccgaggaggacgtgaatgacaacacactcttcaagtggatgattttcaacgggggcgcccccaactgcat

SEQ ID NO: 231063 - DNA, 539 bp, Homo sapiens
  chr5:53606115-53606654
  hyper
aaggcttaccagccggctgcgggagaaagaaccccagaggcatcctatcccaaagaaagaaagcaaaaaggctgctcctcaaggcagggggccatcgggcacgccgagatccgagaggcgacatgccacccctgccctgcacctaccagataatccatgtacagaaacgcctcagttattcggagatcagacatccggcagcctaaagcatccggaacggctccgaacccggaaaaaaaaagcagcgtctctggctgcgagcgagcagctcctgaaaaagccagcaacagcgaaaatagccgaaagcagccgactagccggagattacacaaggggcgcggcgattggccaggcgggcgggcagaaggaaagaagcgtgctcattggctgcggcgcctataaaaggcaggccccagctggtggcaggagagaaacgcgggagtggtgggggatgtgggttcctgtgtgctgagcggaggagccggggtgggggcggtgcaagcggaagaaagagccaagagagcggaaaatcggctggt

SEQ ID NO: 231064 - DNA, 232 bp, Homo sapiens; identical to SEQ ID NO: 199843
  chr5:53813366-53813598
  hyper

SEQ ID NO: 231065 - DNA, 61 bp, Homo sapiens
  chr5:54469486-54469547
  hyper
tgtgaggcgtgttcgtcagctcttcgttttcagaaggcaagaaaacgtggcaagatttcta

SEQ ID NO: 231066 - DNA, 681 bp, Homo sapiens
  chr5:54472071-54472752
  hyper
ccttccccgaccttcgtcagacccttttcaatgtatttgcacgtgcacacatagagtctggccctgtggatctttccccacaaatgagatctcattatacttatcatttttcaacttgttttctctaattcactgtattcaactaatttccgagcagtgcaaaccggagagctccccattcccagcgccaacggcaggtttgcgcgcccctccggcccgcggttactccccgccctgctccaggctggtgcctcgccctcagcccgctcgcgcctggctacgcccgcgcccgcgcccgctcccgcccctagcttctgcgcgccgccctgcagcccctgcgcgcgcctactgggccaaagggacggttgggagtttgctccaactgtccctggggcacgccttccccgcccagcaggggttggggaacgcgagctgggagtgtgagggaaagcgccacgccagtgggggctgatacagctccagcctgtgcggggcaggcgttagactgcagaaggggagagcttaggataaccgcactcaggtggcgcaaggaagtcagccacgaagaaaaagaaagggaaggaaaaacatcgtcccagactgataaactctctgctccccggtgtaacgtcgctcagtatagcgagagcatggatggacgaatgaagccctcttgatgca

SEQ ID NO: 231067 - DNA, 747 bp, Homo sapiens
  chr5:54516329-54517076
  hyper
tcactgtggctcaggttcaacgcgctccggctgcagtctgtgcgcagcccccggaaggcgccatgcaggttcccgggcctggtgtcagtattcgcgggctctggcagcagtcggggccgcttgggatcgcggctctgaagggcttcatcgcagcgctcggaaatctccctcaggatggcgtccacttccgcgcaatcctgccccgcagcgctgaccaactcctccaggctccttttggccttcgccttgagcaggaagggctcggccgccgccccacaatcccgggactgtgtgatcatcagcttctacgaaagacagggaagagcgccgccctggggcctgccggaccctccgggttcggagcgtgcaaaaggtgacctaggcgcgctacgcaccacgcactcagcggtactctcctctcccgggcccccacgggtcccgatgctgggcggggatgcactgaactgttcagttccgacgtgctgcagttcccacacgcccgcgccccacttacatccagcaccgaggccaggtgccgggttcggctggcgagttccttcagctgcacgttccgctccttgagcgaggcgatctcctcctgtttctgggtcaatgtcacgtgcagctgcaggaggagacccaaacattcaggggtaggtactgtgctgggtctcgtctgcatatctggcatgaatcaaacccagatcctgacgtctcatcaggaactggggacgcacaggcatttac

SEQ ID NO: 231068 - DNA, 1008 bp, Homo sapiens
  chr5:54518559-54519567
  hyper
gatcccagataaagcgctatgtagatccagcggttcgacttctccacgggggagagaaatgtcctaaatatggaaaaggctgactctttgatgagttgctggagagtcgttgacagttggctgggtttaccaccttcacgaccacgaaatctgaactagtctgatttgggagtgggggacacccccgctgttatttaactgccaggagactgcacttgcctgaaatgagatcatccaccgtgtctctgaaatcttgcagattgaagtctgcttccgtttggtgggaatggttctgaaaaaaaccagaggtgtacactggttaacgagtctggcgttagaaagccttcaataaatattggcgtccctgttaaaaatctggcaggcactatgcaatatatgcacgtaacacaactgcacttgtacccctaagtccccccaaataaaacaatttttgtggcgggtccggaaccctttctagaccaacagacctcctcccgggctcggcggcggtctgctcgcacttacgtcgccagcccagtctcgtacccgaaaattcaagccccatccgagacagggaacccagcaggcttgcactgccacggtggggagcgggacgcacggagcacgacactgactgggggaagggggcagcagttcgcggctcctgcagagcagctgcgtggcgggaatgggtccttccaccggcggtgcggcggccctgcgccggctccgggcagccgagtagcccgccacccaccaactagctaagcagccgcctctgtgaagctcggcggttccctgtgcgcctgcgaaattttgactccgactcaccagcgaccggccaccgagccgccgctgtaggagctgagagcacgtcttgaacaccggatctttccacccaagacccgacagcgtgcaggggcctcgagcagtaatttgaggccgcgtttcccgccaaggtttggccccagctaaccgccccacccatgcaaccgagcgggaagaaag

SEQ ID NO: 231069 - DNA, 224 bp, Homo sapiens
  chr5:54523518-54523742
  hyper
actccggcctttgcgctcctgcaggatttagtaaggatgtagaataccggcagggatgccctggaacagcccccttattacagaagccccttccctcaaacctgaaccttatcctgggtcctgacttatggatttccacgtggtctcttttggcctgacgccaagagcccgccccgctccccaagccccgcactcttctcggcagtggcgcgtgagcacagcct

SEQ ID NO: 231070 - DNA, 922 bp, Homo sapiens
  chr5:54526944-54527866
  hyper
tcaccttccctccccgcagacagacacttgcaggatttagacaaaccacaactgtttattggtgaaagactcagcttcctcatgtgctcgctgcaaaataaataaaataccagatgctagtatcgtacactatttacaacctgcagctgaccaagcaggtcctgaagccttctctgtggaccagtactgcactcttctgaggctacgggagaggtccagcagccgggccagggactaaaaggaaacgaaggatctgttttatttcgagctcgggggcaggctgcacttctcgcagatctgaacgggcagcatgtgagtcaaggaagtactgtttatggccaccagcagctgcaacttgcccatacagtcctccagcgccgcctccgggtggtctcccagtcgcaagtccacgggccgcgagacccgcagcatgcggtccgccagcgccaggcagcagatcgccaggagggaaggggagtagctggtgaaggcatagtcggccagactcagctctgccaccccccgcgccagggcttgcgcttccagagcttcggaggcctcagcctgccccgcctccacgcgagcgtgcgtgaaatgctccaggaagaagctaatggtgggcgcacccagggtgaagtgcagcttgtgcagcacgatgcactcgaggttgcagagctgctgccgggagaaggcgccgcagcagagggccagaagctgcttcacgcgcggcgggtgcacctccacctgcaacacagggcgcactcaaccccgctttgcggcttcccgggccccaggcccaccccagtatgacgcccggactttccccatcccttccagagagacagccggggctctgcctctccactgcttccacgtaagtgacctagagcgtacttccagcgcagttgatctaactactgtc

SEQ ID NO: 231071 - DNA, 495 bp, Homo sapiens
  chr5:54528085-54528580
  hyper
agcactgaatcgtgcgcgctggaaagacgggcggccagggagtggcgggggagtttggctgcgtccccagatgccgcgtgtacctgtttgataccccaggtacctgtttgcaagcgatgagcaaggaggtgaccccaagcagctggaagcagtctgcagccaccggcgtggtggtgaggaagcggtccagagtgttcaccgtcaggcacagcgactcgaaggagaggccgaattggcggtgcaccgggatcagccagctgagcagcttacagcgggattccgccgtcacctgccgggaaggaggggggaggcgggcccgctgggcttagggtggagagggactgtggaagggaaggaagggccaagaagaatcggggagcttcccaggagaggggcaagaagatttcagaaagagaaacgcaatggaaactgggaaacgcgtgggccgtgctgagccggaacaccgggattgggacctggcgctgtgcagagagc

SEQ ID NO: 231072 - DNA, 238 bp, Homo sapiens; identical to SEQ ID NO: 199851
  chr5:54529891-54530129
  hyper

SEQ ID NO: 231073 - DNA, 108 bp, Homo sapiens
  chr5:54603781-54603889
  hyper
ctgtcttcggtcgcggggcatcgtgggtaggagggagatttgctctcactgctcccaaaaatggcggacgcattcggagatgagctgttcagcgtgttcgagggcgac

SEQ ID NO: 231074 - DNA, 78 bp, Homo sapiens
  chr5:54604144-54604222
  hyper
aggggggtcttggcgtttcctggtgtctgcaggcagcgtgatcttctgcttcaattcccttacgtcgatgttactgat

SEQ ID NO: 231075 - DNA, 177 bp, Homo sapiens
  chr5:54830957-54831134
  hyper
gtcagccaatcagcgccgtcggcctcatccctcccgacctgcggcatccgcccagaagtgcggctctcggcagccgggcggggcgtgggggcggctcccgttccgatccagggggctttgctctggaccgcaattgctcaggtggtctccgaactcggcctcggtacccccactagg

SEQ ID NO: 231076 - DNA, 328 bp, Homo sapiens; identical to SEQ ID NO: 199852
  chr5:56110212-56110540
  hyper

SEQ ID NO: 231077 - DNA, 109 bp, Homo sapiens
  chr5:56112631-56112740
  hyper
gttcctgggaatgcgaactgcactgctaagtcacttgagtgacttctgtttggagtttgaatttggcctttgaagtttgcatttggcggagtggtgtaagagccaggac

SEQ ID NO: 231078 - DNA, 206 bp, Homo sapiens
  chr5:56204903-56205109
  hyper
aactttgggaacacgggttcacgcagaagaagggctgctgtctggggaggactgaaactcgggttcccgaagtcgggctgctctggggccacggagagaaggggagagaacgtcgaggaagaggcagagctcaagtggacggaggatggaacacagagcgcggccgggacaaaggggcaggccagacagccgtgacagagaaacta

SEQ ID NO: 231079 - DNA, 71 bp, Homo sapiens
  chr5:56206157-56206228
  hyper
cgcgcgttaagaacgggcagaacgccactcaaaagcacgtcgggatggtgggtttcggattggggtgagtc

SEQ ID NO: 231080 - DNA, 648 bp, Homo sapiens
  chr5:56246408-56247056
  hyper
cattacccactgggaaccaccgaagacgtaagaaaataggacaaacctgggctcgaacttccaaaagaagcctaggagagagagaagaaaacgtgaggttagatcgcacagccagggaaagaggcagcgccggcaacagggcgcagaggaggcggagtcgagcgctcctccgcagctgccaaaagtgcaagacgtagcttcactcgaatcgctcccggcccctttcgggccccctcttggctgcctcgccttcctccccgagtcccaagtgtacaaactcacagacccgggacgaagcccggagtctgagaggcaactccaagtcgcttcttggagctcagcaagtttccaagcagagaagcaaaacccagagcagtcggctggcaccatcagtcccccatccctggcatctccggagtcctccaaatcccacccggctctccgaagccccaaacaactcgaaacgtaacacccttttctggaacgaactcgcgttctgagcacctagttcgcccctggggcccgggagccccaactccgaagccgatctcttcccctgcagcgtaggccagctcgaatcggacactcgcccccaaaccaaagcgcgagccccccatcctctctctcgagtccagagatgcagctcct

SEQ ID NO: 231081 - DNA, 150 bp, Homo sapiens
  chr5:57755330-57755480
  hyper
aagccgatccccagcgctgccggcgcacaaaagccagagggcaggtgaggagcccacctcgcgctgggatcggacccccgaaaaacccggaagcggcgggcgagggaccccgcgggcttgcccggcttggggtcgcccggacagacctcc

SEQ ID NO: 231082 - DNA, 1548 bp, Homo sapiens
  chr5:57877870-57879418
  hyper
tcagctctgcagcccgcggccagcggcagtgtgtgcgcgctaatgacggcggaaggtgcctgggggagggcctggggaggggctggccagcgctatcgcgcccctggcacttcctaagagactgagccctttctctgcagctgcagcttggattccacgctttccctccagaggaaagaagccctccatctaaatcagctgtcttctccacatccctcctttttctctccgccagacgccacccctaccccttctattgtgttgtgccttttcattttagccccgcttcctacgtagagccctaacctcctttgtagcgagggcacttgagaatttctgaacctcgagttgtaatggagctgtatggaaaggtaagcaggcgaaaggagttccttggggtgcttagccagaaatctcgctttcacgcacttcggtgtgcgggttgtgtgtgtgactatgtacgcgcgcgcgacttctcagtgcaattatgcggataaaccactttccttatgtgtgtaccgttaatcgtctttctcccctacgtttggtgaatgagattgtaaaactgccccactctgcctaaggaaacgtagaaactttcccgattcggatggggaggggtagggcggagagtcccagagaccagctctggcttcgtttgcattggaaattagcacaaggtagtgttgtttcctaatcagaaaatcaccatctacttccgaaggcgatagttagcaaagaaaaatctccagctgagataagctggggtcacattcgcctgcccctggcgaggaaaagagcaggggagactgggagaggtaacccaggagcgtttggaaaggagtagggaggctccgcggccgagcccgactggcggatcgagcctgtttaatggtttgcttgcttgccgggagttgtagttcaccgctcgcccgtttgccgggaacacccggagggcgagactacagctcccaggagtgcacggggctcctcggcagtacgcgtgtgcggcgccaggagaggacagctccagtgctgatgttggagccggttagcgaaccccaagagtgcagagtgtggagcgtggagcgccgggactgtgcacgcttgaccggaagcccagaccagtgcggtcctagccagagagaaaggacatttgccaacaatgagacacgaagcgcccatgcaggtgggtccataaagaaagagtggcctcgggaggaattgaaagagatgcttttccccttgctccgcgcacaagcagttcaacgtaaggaaaggtctaggcggtcacccgcggagatgcggctctgtgacatgaccctgggaacagagttgggtttctttacgctctgtgtggctgtgattggggctgtcttgatgagggatcgggctattcgcaatctttctaggctctgtaaagaggataagagtgtctgtctaaaatgaaaacccaagcaaacaaaagtcagaggagcatgcaatctcgtgttggcattgatctcctctcttggcatccggggtttgagatcgcggtgaaaactcacg

SEQ ID NO: 231083 - DNA, 1100 bp, Homo sapiens
  chr5:58334875-58335975
  hyper
ctgccataccccgccatgctcggatgcccggtgccggcacatgagggctgctccttcatattgcccagcccggcagtgcaacgggggcggaggctgtgctcgcggggcggccggcctcggggaggcacggtctctccagcttggcgtctcgggtcggcctccagggagggcgtgcaaagagcggcgagccaactttcacacagcgacgcgagcggaaaaaccactatgcgacttttcaactgtgcggcgggcccgagtcccagtccaggagcccggctctagcggatggcgagggggtggcgagcgcgcttgggtgcccgccccgcagaggagcgtctggtccacagccggatctcctcggtccccaacccggagccgcggccccacgcccgccccgcctgccgagccttctgcacggcacttgaagtgaatgaatcagccgcggccgggtgcgcggccaccacgtttcctgttttctttctcaactcctcgggcggcaggcgcagcgcggctccaacgccgcagctttccgggaacactccccctcacgcccctctcggccctcggcgctgcctggctcctcctcaacccccttacgaaaagattccgaattgcaaaagcctgtccctgtccgtgccacccgccgcgtccttcccctcgagctctgccccgggggccccgccacctcgcagtgccatccccccggcgcagccgggcgccactcgctttgaagtgcagacgaggaggcgcgggcgcgagcgtgtgtgtctgtggggctgctgtgggactgtctgtgctaggagagcggcggaaaacccggcgtggagcgcctgcagtccgccgtccggggtcgcgcccgccgcggggctcaggagggaccggcacgcaggcgcgcacggccgcgcacctgtctcgctagaaccccgcgcgccccgccgagccactgccctccaggttgcccagaccgctggagcctctgcgactccacgaccggctgcttcctgcgaagtttcacaaacaaggttatttaggaccctcaaggtttctgagggtttaagttttagggtttctgggggttcgtttctaaaggcttaggattc

SEQ ID NO: 231084 - DNA, 54 bp, Homo sapiens
  chr5:59105960-59106014
  hyper
ggccagcagatggcgcacacttctcagaaacatcaaaacgtggcgtgggaaaac

SEQ ID NO: 231085 - DNA, 492 bp, Homo sapiens
  chr5:59187968-59188460
  hyper
ttatcaggaaagggaccaaacgtgggccccacatccacctccacgcctgagttaagaatctggagctgactcctcagaatggctgtaattggtcctttactcatttccttggagaagcagcggtcaacttctactaaaactcccggttgataggcggcttccctgccctgtcttccggagcacttacgttaaggggaaatcactataatcaaatctctacgtcttgcctgctgctaaaacaaggcgctttcttcctgggattttgcagggacgactgatacacacacggtctccctacacacaagctcgcacacaccgacacagtgtaactcccacagcgtcctcgctccttctccctccctcacccccttgtctctctcaaggattgctgaacattttgctccaaactctccaagtcacccacgtgttctccccttttgctattcaatttacttctccacctgacgaagagaaatgcgagttgttcttagg

SEQ ID NO: 231086 - DNA, 1258 bp, Homo sapiens
  chr5:59188899-59190157
  hyper
tagaattggtggtgataagccgacttagatggagtatttgagaaaaggggaggtgaccctttgcctgaatgggggagggggcgctctccactcaccgcctgagtccctggaacgaggagggccaggacatcctggatttcttcaggccgggccggtggccggtctccaccgcgtaggaggtgcggtccatggcgcgacagtacaggtagcgctcggtgtccgagtagccgcgatgccggacgcggccggtggccccgctcgaggcgtagcggccgcgggcagccccgggcggcggcgggggcggcggcagggggggcggcggcggcggctgtagcggacactggggctggggctggggcgagggtggcggcggcgggggcaggtggtgatggggatgcaggaggcggaactggggctgccggagcgggtactggtggtgctgctcgtgcctccagagatgcttgggggctttgagcgtggccccgccggcgctgtcgctgccctctccgctgcccgcccgggccggcgcgctgctgccctctgcctccatcctggctcgcggctccgcgacctgctgcccagcccgggttcaccgcgctggcccgagcgccttcctgatgctgctgctgctgctgccgccgccgccgcttctgcagcccagcagaggctggtgcttagcttctcacttgaaggcgccagagcctcagggctaccgagagggggccctgccagcgggaggggtcacagaacgcggcagggctccttccaccgaggctatggcagagacacgctcccgggctccccaagtcaccaagactagggtgcgcggtgcccggtttcgccagaggttggtccttcttcctccctttcttcttcccttcctttgggcgccggcggcgagagcagggattgtcagcaactcgggctgcagaagcagcagcaacggcggcggcggcagtggtagccgcctccagggcaccggaaccctgatcccggagctgctgaaaagttggacagctccaggctggcacgcccgagctgtgactttcaccaaaaccactccagccagtcaggagtcagacctgtcctcttgatccttcccctcgccgtgcccgcgcctccctcctccacactgctccccactgccccggagccttcctcttcacctccgcttgcctcagtgctcttagagaaatggagtttggcgattcctggctggttctcagagcttgttgacgatgagccccatgctggtgct

SEQ ID NO: 231087 - DNA, 369 bp, Homo sapiens
  chr5:59996101-59996470
  hyper
gtgcgaacttgcccggggcgaaatctgttgcccaccctggtcccaccgtgcgagcacacctaggcaggtgcgactaaggggccgggggcgtctccccagcgctggaaaacgctgtgcagcgcccttcccagatttctgcgtccgcgcaacacaaacacacgcaacgctatctctacaaaagggtcaataataggtgttatccagcgaccgaaacccagctttgggccgcgtggataaatacctgtcctccctaccaagtgcactgtgagcctggaggtgctgctaacgctgggagaagcggtagtgaaatgaagcgaggcgacagcttttaccagtgtagggacatttaaaaacgggatagagagcaca

SEQ ID NO: 231088 - DNA, 262 bp, Homo sapiens
  chr5:60458162-60458424
  hyper
caccttgcgccgccgccgtttctgctggacaccaggagaaaaccacggcagctgcagccaccaacttcccctacatagccccacgggatcggatcccactccccactcaccgccagaccggaagcaggaaggcggaagtcgcggcctttgcgtcccgcccacaggcgacccgagccgccagccgggcgtgagtaagtctagggcccagtttccggctgcgccattgctgtgtgggtcttgggacctcgagttggaggacgcg

SEQ ID NO: 231089 - DNA, 147 bp, Homo sapiens
  chr5:60626828-60626975
  hyper
gccgccgtccgccgcctggcacgccgtctgccgcctgctgggcgatgtgtgcgcgagcccgtggggcttgcgcgcgccctgcggcgtgtgtactcacaaaggtgtgtctgctaaccccacagcccgggctgcgttccaccccgagct

SEQ ID NO: 231090 - DNA, 51 bp, Homo sapiens
  chr5:60627994-60628045
  hyper
ccctagatggcatcgtggcgtcgcgacggcgtgtgcgtgtcgcgcttccta

SEQ ID NO: 231091 - DNA, 158 bp, Homo sapiens
  chr5:60704664-60704822
  hyper
cagctgacgtcagcgccgccggttcagccgcaggccagagtcagagactgacagcgcgaggggcggggttgggagtcaggatggggcgaggcctgcgtgtgactgatggcgcgggggcggggcggcgtgtgtgtgactgacccgaccgcgcagaggcg

SEQ ID NO: 231092 - DNA, 280 bp, Homo sapiens
  chr5:60921445-60921725
  hyper
gttctctgagatgtcgctgctattactgtctcaaatttccttttaaattttgctgtttgagtaaattagtgctggcctttcctgagctccgcagctccgaggtggcccgactgccgggcctccaccccttttccccggtcccgggtcggtttctccgggcgcaaccagcagcgccacaagccggttgggtcccctggctccctctccaaggccagcgcggtcatgcgggcgggcgggcggtgttccccagagaccgcccatcccgcggtgggggtggtgg

SEQ ID NO: 231093 - DNA, 159 bp, Homo sapiens
  chr5:61699272-61699431
  hyper
ccaaccagggccacgaaacgtcacgccaggactgacaaactctttataagttcatcctccagctggaaaggaagtcagcggcgacgcgcagggcctgcggccgagtcggggacccacccctgccttccgcgctcacgggagcgcgtcctgaccggcctc

SEQ ID NO: 231094 - DNA, 74 bp, Homo sapiens
  chr5:61708381-61708455
  hyper
atggtgacagatccggctagtccggactcctggctctttatactgcgcaagcgcactgcgcaagcgcacacaac

SEQ ID NO: 231095 - DNA, 219 bp, Homo sapiens
  chr5:63254944-63255163
  hyper
aaaaaggacaagagcgtgaattaggaggaaaaattctacatcgtaaggataaaattgctctttcaggttttactgggggagccagctggagccttgggcacgcgcgccctggggaacctttcctctttgccgcccctgcgtgtcgcccctttaaagccttcttggtctctccaatcccaagagttccgcggcatcttgcgccactggctaaggcaaaaa

SEQ ID NO: 231096 - DNA, 226 bp, Homo sapiens
  chr5:63255343-63255569
  hyper
gcagtaagtaagtggcgatgtcaggtcgtacacactcgccagctacctgtacaaacagcgtccgctctctccactgtatgattgtcagtttctttggtgagtgctgacaccaaggcaagcataaacaaagtggtctgcacaccctcctcctccttgctctcccccactggcccggccttgtacttacaagtccactctaaaagataccttctagccacttgctttg

SEQ ID NO: 231097 - DNA, 618 bp, Homo sapiens
  chr5:63257338-63257956
  hyper
cgttctgcagggagcgctccaaggcgatggcagccaccacgcacgcattgcccagcaccgcgcagaagatgagcgtgcccagcagcagagaggtgatcacttggtagctgacggtcacgtcggagataccagtagtgttgccgccggtctcaaagggagccggtggtgatgtggtgttgttgccctgaccagggctgagcacatccatgcctgcgcgcccggcgcgggaagggggagggaagaaaaagcagcgcgaagattcgcctcgccccttcccctggggtcttccgcccttctcctgggaagtttcggaggaagggaatgcagagacccaagcaggaagttcttactgcttcggcgaagggtatctccgaggagcagctttcaggcgctccctgggctctcgcagtccagcgcgttcagaagctccagctgggaaactggagttggcctgaaagcagctccaggatctcccggcggcggagaggtggctggaacgtctgtctgtcgctgtccattttactttgccgctcccgaactggctgccggagctggagtctccccactagcaaacagtctccaatcccagaaatatctagaaccgagaagccccatcct

SEQ ID NO: 231098 - DNA, 63 bp, Homo sapiens
  chr5:63462188-63462251
  hyper
gagcttgtggggaccacacagccccttccacggccgattccctctgcacggttccactttcct

SEQ ID NO: 231099 - DNA, 1139 bp, Homo sapiens
  chr5:63801872-63803011
  hyper
aacagacaagcccttagagacgagggatcaaggcagccgattagagccaattgcttgctttggggacggccagtccttccaggcctggcgacagtggagggaggggaaagacgaaccgagtgccgctgcgggaagacactgaagcaagagcgacacccctttccgccccccaccttgcagcgcaggctttgaaagctgctcccccacctgaatggaaactcggaaccgccgggcggcgcgttccttctcgcccagccttgcaatccatgccgagaggaaggcagtgcgagcccgcgccagcgcccagctcccgggacagggtcggcaatgctgctgagcagaacttgatcgcgctccttcctcgctgctagtggaagcgatgctgcacggcacagctagcgcttccccggctctccttcaagctgaaggttaccgacccgcgcagccagccccagcactgtgagctgcgcgcctcaggtccgggctccggctgcttggcggcggcgcccagggcaacaaccgggccgcccgcgccggggcgcactgcaccagcggcttcggcttggtggatgtgtatgcatgagttctgcaccgaatgggcgcaaaaagcgccccagccggtccacccgctcctcgatcttccagatcagcaagcccccgctgcagagcggagattgggagcgcaggggcagcggctccgagagcgcccacaaaacccaacgagccctggacgactgcaagatggtgggtgaaaactgcgcctctttttttttttttttaattgagagggggtggggggagtcatgtatgttaatcatttgcctgagtgccagccactcccccaccctcagctcctcaatgccgatcacgtggcacatgcactatttttaaatctgcagtcccccaaattcagggtgacaccctggtcgtaataaccctgcagaaagaagtgtgacagcaagggtcttggggatcagcggctgtaggttgtgcctgtaccccctcgaagaatggtggatgcgaaagacacagtgaactggctcgctcacggaggagggagggatgaggaggtggggatgctgctttctggggacagagtagcaaacaaacccaaatacagcgcacggggcgctgcggag

SEQ ID NO: 231100 - DNA, 917 bp, Homo sapiens
  chr5:63986116-63987033
  hyper
ctctttctggcatcgagtggggacagctaaggtctccaggctgctgatgaagtgagggaaagtggaggagagtcggcgccgagatgggcggataaaaggagcgaccgctcagcagcgagagggagaggcgagagtaaggcgcccagacaccatgtggacaaggggaggagagaaatcagaggtggcgcgcgaaggctgagcgcccaggcagccagagcccagatcggaagagccgagtccgggcagaggggtccgcgggctctggaggtgctggacgggtgcgatccgagagcagaccggggccctcgcgagcctctcccggcccctgcccgcgatgagcgaggccagccgactgtgctccggctactacagcctcaaccagagcttcgtggagcccttccagtgcccccggcgcggcgagggggcagcgctccagtattgctgcggcttcgccgacctcaagtactgctgcagcgagccgggcagctacttcccctacaagcacagctacatgtggagcctcaggtgggctgagagcccgcgcgtgcggcggctggccgagcccggggctagggaggcgacaagcggagccacgccagggccagggaggttcccccgcgtccccgctatccgccctaggttaggtccctacggaaggacgcggagcctctgagggcgggtgagggcagggagagaaatctcgccccggctcggagctcccccgggagccaggacaggaggcgaggcgcacgctggaggagcgcgggctttgcgcccagggcgcacttggggcccgcctggctggccccgctgagttccccgcccgcctcccgggagccgactgctctcccctcgccgggaccagtcccaggctgatagccctactggtggagcgcgaggacaggaagataacccaa

SEQ ID NO: 231101 - DNA, 532 bp, Homo sapiens
  chr5:64064488-64065020
  hyper
acgcctctagcgacggcagaaccagtagatgcggatgcagtttccggacgagtcatattgcagaagacacatggtccgaaccattactgatagttttggagggggagttagtttgatctgcacacgagagtagtgtaaacaccgccaacacttatgaagtgtcccttctaatattgtaatacaaataacataaataacattaagctatggtaactttacggacttttctcgttccctggagtacattggaataacccttctcagggttagcggtgctcgggtccggtaacaacatggcggcgtccgtgaggggctcctttgggcaggggtagtgtttggtgtccctgtcttgcgtgatattgacaaactgaagctttcctgcaccactggacttaaggaagagtgtactcgtaggcggacagctttagtggccggccggccgctctcatcccccgtaaggagcagagtcctttgtactgaccaagatgagcaacatctacatccaggagcctcccacgaatgggaaggtgag

SEQ ID NO: 231102 - DNA, 511 bp, Homo sapiens
  chr5:64398788-64399299
  hyper
ggtgccctcgcctccggcaaccccggtgcttcagtgctcccgacctttctctgccgcccctcgcctcggcggccgccgggagcggctgtggggtgcgccggtcgccccgggcccgagcgggaggagagtcccgccccgccgcgccccgcctccgggcgccccgacgctgccggcgcggacgccattgctgcggccgctgtttgttattaaactgcccagagaaagggcttcgagtaaaaacaccaactttccagtcggggcggcgcaggtccccgggccctggaaagttctgggacggccgaggtctccccggacacccgcacccacgcccccgtcgtgccctttctggcttttggcttcctctcctcgatttcccttttgtgcggccccgggcagcttcctcaggccccgccgcccccacctggccgccctgggagctgttcctcccccagcagcaggagcatccagctcgggttttattacctcccgagacactcgaggaagcctcagg

SEQ ID NO: 231103 - DNA, 189 bp, Homo sapiens; identical to SEQ ID NO: 199875
  chr5:64777664-64777853
  hyper

SEQ ID NO: 231104 - DNA, 46 bp, Homo sapiens
  chr5:64859099-64859145
  hyper
gagttttgtgtcgcgccttttctgacgatgcgaacaacatggcggc

SEQ ID NO: 231105 - DNA, 162 bp, Homo sapiens
  chr5:64920140-64920302
  hyper
ctcaactgagaggcggggttgagccacctacccagaggcctctgcgcacgccaccggcgcacaggcgcagtaggacactgggcgccgcttagccgactcttactcctcctccccgcaatcgtcgggtggttagttgcacagcctcgcgcatgggcacttttg

SEQ ID NO: 231106 - DNA, 162 bp, Homo sapiens; identical to SEQ ID NO: 199876
  chr5:65017234-65017396
  hyper

SEQ ID NO: 231107 - DNA, 41 bp, Homo sapiens
  chr5:65017860-65017901
  hyper
gcgcaaacttccccggcccctaggccgtagaccccagaacc

SEQ ID NO: 231108 - DNA, 450 bp, Homo sapiens
  chr5:65220754-65221204
  hyper
ctctccgcaataaacgcgaaccctgccaggctgaattattagggccagcgcaattcaacgactgcaccaccaccgaaccgctggggttggaagcctgcgtcgcatcggagcgtacccatgtttcttctaacaaaggcacgatcttgaggccatttcgcgggcccttttcccactcccagcgccagctttgtctccccgccggtatgaggctgagacttggaggaggctgagctgcgccgctggggaacaagctcgaagggcgggcgtgggaagctgcaccgcgctgccgctgtggtttcctgcgacctgaccgtgccattagaggaagttggagtgctgcagctgcaagagatacctgctgccttcaaatcagggctggactccaacaacccctgtgcaccgattactgtcgtacaaagaaactccatcggccggcgcggcggaggcctg

SEQ ID NO: 231109 - DNA, 149 bp, Homo sapiens
  chr5:65439856-65440005
  hyper
gaccggaaggaaccgggtagacatgagcacaagactctcatcgacttttggggaaaacaaaaacaccgataaaaatccaggcggtgaaacgagcagcaacagccccagggacccgggagctggaggccgcagccgcgcgagaaccgccg

SEQ ID NO: 231110 - DNA, 47 bp, Homo sapiens
  chr5:65891728-65891775
  hyper
cttttcctccaacacgctggtgagtccgtgtgcgtgggtgactgtgt

SEQ ID NO: 231111 - DNA, 812 bp, Homo sapiens
  chr5:65892690-65893502
  hyper
ggaggcaccctgggcgcccgggcgcccgccgcgtgggctccggcaagcgtgctgctggagcgcggagtccttgcgctgccgccgccgcttcccggaggagctgtgccgcccgcgccccggggcagcagcgcgtcccaggaggagcaggacgaggaggtgggcctttccccagcttgcccactctgggttccggcagccgggcgaccgtagtttcccatcctgcgcacaggcagtgggcaggagagcgctgtggcctggagatagggagggaccccaagcgctctgccccgagcacgggacaacgatagttaggagcccccctgtgggttattgacttccctgtggctgttacccccgtgtgtgtgtctcagtgtgctgcctgatggtgtgtttttaaaatgtcagagaagcaaactccttcgtgtttgtatctgacttggttgatctgtgaaaggatgcgatctggacatctggcgtgtccccacaactcacctctgattctccaaagtgggcgttgtttcccaccgaagcgcttgggccgaggggcagggagttgagggggagaaatggtgccttgggggtaagaggcaggagtagggtggggggcagcggtagccgcggagttgcctgcggaggtttcagtggcgccagccccctgggatcgcccgcgggtggttttggcgcgtccccgcagcgtcggtcctctgggagaagaggactccccgcgctccctcggtggcgctggcgtgcgcgcctgcagctcccgttcagacttgtttccagcttgtccagatgaacgcttgtcaccaaac

SEQ ID NO: 231112 - DNA, 189 bp, Homo sapiens; identical to SEQ ID NO: 199878
  chr5:66124999-66125188
  hyper

SEQ ID NO: 231113 - DNA, 1079 bp, Homo sapiens; identical to SEQ ID NO: 199879
  chr5:66299576-66300655
  hyper

SEQ ID NO: 231114 - DNA, 178 bp, Homo sapiens
  chr5:66511673-66511851
  hyper
atattcagagagcccgtgcccttgccctgcttcagccccacagccccgcctgggttgctggtctgacccggctgggcagggtggctgtgagctgccggtgtggccccaggcacctcaaagggtcctcggtgttcaacaacaggaagtgctggcaggcttccctcgctagggaactgaa

SEQ ID NO: 231115 - DNA, 518 bp, Homo sapiens
  chr5:67583946-67584464
  hyper
tgtgcatagtgcctcgcttcactgtcggctacttgagccccgcgagccagccagcgcgctcagcagccagtgagactattttaggtcccctcacaatggccttctcatttcccaggcgaaaatgagcaagttggtcttgcattggccacttgtcagccgatgacaactttgacttgggctcccctccccctcccgaaatccctagctcagcaaatatttgaacctgcccaagttaatcatgaagctgcgatctttatctaagggagacgtgcgagcgcctgggctcctttcctccccgatacagtagcgaaatccagttggcttctcaatgaggagccggcagtgagcggcggtggcccggacgcactgccgggcggggcgtggggcggagggacgagccgagccgagccaagcggagctgggccactgtgcacgcccggagggtcctggcggcgcccccgctcctgcgcgcactctcggcgccggacacgagcactgcctgccgggaacaggctggg

SEQ ID NO: 231116 - DNA, 41 bp, Homo sapiens; identical to SEQ ID NO: 199880
  chr5:68179341-68179382
  hyper

SEQ ID NO: 231117 - DNA, 871 bp, Homo sapiens
  chr5:71014805-71015676
  hyper
cacctctagcccctcggcttcagctcaggcccctcggggagcatcccttgccgtgagactgacagcctttgggggcgcagggtcctgttctctgcgctctagcccatctgtgcgcagagcctcgttcccaggcgcctggaacccggcgggcattgacgtcaagcgccggcggagcgctgcctacagacggttgacccgggccctcctccacacccccttccttcttcgcctcctccctctttcctgcacgggggctcgggctcactataaaaggtgggagcgcgtggtgccccagcaacgacgagtttcagaacgatggagagctcccgcgtgaggctgctgcccctcctgggcgccgccctgctgctgatgctacctctgttgggtacccgtgcccaggaggacgccgagctccagccccgagccctggacatctactctgccgtggatgatgcctcccacgagaaggagctggtcggtattcccctcgctctcgacccccttgagctgtcgccttgtctcttctcttgcacgcctccctcctccccccacccccactcctattcccagagtcagggcgcggggagctgagcgcaacgcccaggcacccactgccatccgaagagcgtctcgagctcacgggctcctggcagtctgttgagcgaatccctcatcccggcccctctgagcaacagggaccccagcggctcagagacccgcggtcagtacctgggacagcgtccgctaagtttccacccctcgaccattccctgtgtccgcggagtcccaccgcagagtgcgtgtgggtccggggctccttataactagggctggaagtgcgcacctgggctgggctcgcagccaaggcggc

SEQ ID NO: 231118 - DNA, 2016 bp, Homo sapiens
  chr5:71402902-71404918
  hyper
aggagctcagcgggcgccccagccccttggctcgcggccctgccccgaccattgtccgcacacctcgtccctccagcttccgggccgcgggcgagatgatttgctgcagatgacatcagccccgggccaacggctggaagagcggaggcagccaccgcgtgaggatgtgccgggtggtcctttcctcctcctcttcctcctcctcccggctccctgcctagtctccatataaaagcggcgccgcctccccgccctctctcactccccgctcctctccgccgcgcactctccgcggcgctgggagagggcggagggggaggcggcgcgcggcgccagaggaggggggacgcagggggcggagcggagacagtaccttcggagataatcctttctcctgccgcagtggagaggagcggccggagcgagacacttcgccgaggcacagcagccggcaggatggcgaccgtggtggtggaagccaccgagccggagccgtccggcagcatcgccaacccggcggcgtccacctcgcctagcctgtcgcaccgcttccttgacagcaagttctacttgctggtggtcgtcggcgagatcgtgaccgaggagcacctgcggcgtgccatcggcaacatcgagctcggtaagtggccccgcgcccccagagacgcgcgctgggagacgcgcaaacacgaccccacccagggcgcgacggtcactgcgctcctcccgcgcgccccgcacccatgcctctcctcgtcacctctcatacttggtccagaccctttctgggctaattaagaataatccgaattattagatatgagacccagagggagagtctccaataaccttgagggatctgtcaccacgctgagtccgcagcctgtgctgagttggccaccgcctctcccgctaagtgaaatgcaggtgtcaggggagcagaggccacaataaagccgcaaccgcaggaggcagaagggtgggggagacctgatgcaaccactcctttcagtcctcttctggcctcaggaaaaggctgggacccccaccaccgcagacctggggccgaagcccatgtgccagggcccgcgtgggattcatcctcaccacggctacctcagcccctgagaaacgccttttctgatttcaaacctcccgatcctttctttcctcagaatgactaggctagtcctagggccacgcccgctccccccgcccccccctccccggggagatgctgggatgcagaaccgcctgcgcttcgccaccagacagagcccgcctcgctaccgcccttggggccttggctgcagctctcagaaaggacaatgggaccccaagttgcggggtggggctgctgcttttagaagtcccagcctcgggagtggtagcttgaagggggtcggtgagggagacgtcagcgggtagggtcagctcctcgcccggtgctcgcaccagtggcgcgctctgcggaggccgaatagcggtacgccggggaccctgggcggggccgtgagggtccggcgggcacagcctcgggcgcacagagagaccgcccccagccccacccgagctgccgcagtgcctccggaccgcccgccacacctgcccccccacactgcggcgcccccgtcgggcacggctggctgggcttgcgctccgcccgggcctcgggctggcgggggccgcgcgcccccacctctcagtttgcctggctttgttgccctgggagtccctgggtgggcagctctggtctctgcctttccctttatccctggcgtcccggccctcccctcgctcctgacagaggtcgccgggtccctccgcagccccagcccgcgctctattctcctggggtggtgctgaagcgtttctccgggagacaccggttggtgggcgtggtgcagtccgcactgcggtctctacggcagcccgaggcggacaaagggcgttcacgcagccctcgttccccactccccctccccaataaaagacgaaagaaaaaccttgttttag

SEQ ID NO: 231119 - DNA, 229 bp, Homo sapiens
  chr5:71616291-71616520
  hyper
gggtgggaggctccggctctgtcagctgccgctgccctctcggaggtatccgcggctttagcctagggaaggaggggagggatgggagagaagggagtgttagatcccagctagcatctctgtggagcagccacagctcctaagtcactcactggcctggagcgcaccctcgccctctagttgcacgtgggtgcagtggtgaccactgggggtcgtggatacccccagt

SEQ ID NO: 231120 - DNA, 130 bp, Homo sapiens; identical to SEQ ID NO: 199882
  chr5:72113263-72113393
  hyper

SEQ ID NO: 231121 - DNA, 217 bp, Homo sapiens
  chr5:72143776-72143993
  hyper
tcttcaggtgtttcgcaggggttttgataaggacttgactttttattagcccttaagtcagtagtaatctggacggaattagagatgggttgggttggagaaaactgcgtggcactaggacccagggggctcccgtgagcggatcttggggccagattgcaaattcgcggtgactcagtctggtcggctccttgcgctcggcggccgcggcggcagc

SEQ ID NO: 231122 - DNA, 980 bp, Homo sapiens
  chr5:72415782-72416762
  hyper
ggtggctccatattcgatggggagctcgcagcgagtcgcttccctctgtaaccccactccaggtctccagagcagtaggagggccacagggctgctgggtgtagtcgccccggacctcgcggtggccaaggccaaggcggccggggcacggtaccctgttcggcctgggccgcaaccacgaaggaggcggtggaggcgggggccggcgcttcctccgcgccccccacgccgccgctctctcgcgcccctatagaactgggcctcaggcctcgagggggagcgggcctcggcgggcggggcgcacagttccgccagccggcgggggcatctcaactcgccggccccgccaggtgtgcgggccaggcagccgtggaaggtgcccatttctcccagattcctcgcgcgcacggccacgagcgcggaggctgccaaacccgccagccctgggttccgaagccgcccctggctctccattccctcgcgggcgcgccccgggcccccagtggcggccagctcccaccggtcgctcctgcactgccctgccctgccctccccgggccgccgcgcccgcgcagcaccgcctccttctctaaatactgccgggtccgccctccgcaccaggacgcgcggtgggtagggtgcagggcggccggcgcagccgaggccgcgtgcggaggcggacgccgcgcccagccagtgcccacagcagcgcggtcagccaggcgccggacccagcttcaggtaagctgccccggcccgcgcgcctgcgccggcggcggcgggtcgggcgctgagctgtgcggccaggctgggcgcggggagccgcggcagcgcggaggcgctgggtatccgagcccaacctgcgtccctgcgagcccctccggctgttgcttgcgctcgggctccctaaaagccgcaaaccgatttcgcacagaaggcatttgcctctcgtttcgttccccaaacgcaccatagctttg

SEQ ID NO: 231123 - DNA, 295 bp, Homo sapiens
  chr5:72497765-72498060
  hyper
ggctggatagtcctcgtctgcagaagttcgccctttgctggcccctgtccaggctctcctctcgctggcccacgtgatcctttcctgccagtctcccctggctccagcttcctccacgcccagggctctgccctccgccgggccgacttcccgcgaaactgcagcggctccccctacaggacaaaggaggaaacgctagcggggccccagagccctctccaatgggacccaaagggacacatcccggcacagaccctccccactctaaggcagagcctttcgcagggcctatcac

SEQ ID NO: 231124 - DNA, 771 bp, Homo sapiens
  chr5:72511609-72512380
  hyper
aaacacctaagcccggagctgcaaagctgggactacgttactcgtggtgccttaaaccccaagctttatccgccccatctcccaccacctcactgcagacaccctgccctccgtccgtgcataaccacgttctcgttcacgaagcggccagcctcgcggcgctggggagaaggcttcctccttgtccgcacttctgggtcaacagccttagatggggcggggggggggggtgcggagctgccgaaaccttctcgaagatcccagggagtctctgtcccgcagaatcagcaccatcctcctcggagcgcagcttttcctccctgcccaagtgcggtgcacccgcgcaccacccaagcgcccagcatcgagggcgcggcggcggcggccagggcggccagggcccttgagcacccgcgcggttttccccctatggccgcatgggggcaggagagaggagctgtggcgcagagcacgcggagagggacctggagcgcgggagccaggacggcgcaggcagctggggaggccgcggggctgcccagcgagtggagtgcccaagaattggccggggtggaaaggtccgcgggagacgatccccgacctccgggaacaggcctgcggtcggccgccttggcacccaggctctgccgcccccggagactcggatcgagcgctggaagtggccgcaagggacgcgagggagagcagagctgtgaatcagccggaaagtcactccaactccagggaattccgctccgggaagaaaggtgg

SEQ ID NO: 231125 - DNA, 606 bp, Homo sapiens
  chr5:72526158-72526764
  hyper
ctcttccccaaccccggggccacctctgaggcatgaacccagagacgcgcgccctggtctgggaaagcaggaccgctgcgcccagcgcctcaggggtagaggcgggaacaggcccgcggtcgctttgctggcggggaagggcgatctgacgatcagggagttgcgcccctctctctgggcctcgtgaaggaacagagcaattacagcgctgggccggccacgtagtcctggggctaggtgggcccaatgctccgggccgcggggctggagcgcggaggctggagagggaggaggaccctccgcggctccaggcctcccagctggaggggctcacgcccgggactccccatcagacctttgagggggagcttctcaaaaagccctaaactcctcgaggatattctccgagtgcttctccttacccaagcgctgcttccagactccacgcctctagaactagctggcgtccacggtcggccagagcagttagggggctgcgctagcagggacatgtggggcaaaagagacgtattttaaaacccccaaacaaatgtgccctgaaactcacggagcctgagtttctgggttcctcgcttgcactgcccc

SEQ ID NO: 231126 - DNA, 1332 bp, Homo sapiens
  chr5:72529230-72530562
  hyper
aggccgccccacgccgaacgaggtgggatcagatattcccgcttgtgagtgttggtggggctgaagagatcacacgcggcggggtgtggaacttcgaggggtgtcacggccagggctttgcggccccagacgtcccagcggctcgcagggggcgccaggtccgcgcttccccttgggtcttcgagaggcgtgtgcgcaggacgctgccctctgttgcccaaagcccgcaccaggctcctgggcttccgcgggcttccgcaggcctcaggcgaggggcggggacgccacccgcacgctcccgagcgcagggagggctgtcgccgaagcggtgacccacgcgtggaccccgcccgcgctgggccgggccggtcccctgcccacccgcagccctgctcggccgcgttcccagcagccgggaaagcttcctccctcggtcaccgatccaggccgctggtccagctgtcaaaacagggggtgtctctttcattctggctcacaaagtcccaaaggggaacagggggccttaatgcttgtgtttggacacaagcaattatccctaattattctttttcttttgagcctgcccgtcccgccggcgagcccgccgcggaacaggccccgtaatcctccctggtcggcggatctcagtgggctctgtgcggcccgaggctcgggcgctttcatgtcactgcgggtttagagctgattcaaactcattgcgatgggggaattaaccccggggcccgggctttcaggggcctctgataagagattatacgtgttgatggcaagcttttcttggcaaaatgttttcaaagggcttggagttgttaaatcaaagcgccattgaattgctcgggaccaccccctcccccgcctcttgcccttcccccacctccatctttttcccttcatccctcctcccccatcaccgcccaggactgcccaaggcgagcggcccagcctccgggagtggcgagtcaccttccttggtacgattttcccccggtgcctcgcccgggaaggattgtttttgtaggtgctcctgctgctgggcactttggtaccccttcccttccccgcccctccccgccccttcacacacacttgctctggtaaagaaaacatgtcccagatgaaagacgtttttttcaaacgtacatgtgttttgcagaaaacggaggtgacagggtgggataacgaggagaaaggaagggtggctttcctgcctcccccacccccgaaaggtcatcggagtcagaggggtaaccatcgggttaaaaagtattgtgggcagagttcagatgtccggtgaatcgcacggttctgccc

SEQ ID NO: 231127 - DNA, 133 bp, Homo sapiens
  chr5:72593807-72593940
  hyper
ctgggaagcagcatcgtcattggattatctcggtcgttcccgctcacttaggccaagcaggcgatgggtgtctcggttctgcctggaactgccgtttttcggagggtgggccgcaccccgcagtgcgtccaac

SEQ ID NO: 231128 - DNA, 1567 bp, Homo sapiens
  chr5:72594247-72595814
  hyper
gtccccctgttctgcgcgggcgggctgtgcgggcctggccaggagccgggtcggaactccgtgcagcgatggcagctcgggcgcgcgccttgaggagccggtggggtgctgggggacggagaaggtcccaaggtccggggcgcgcgctttgctgccgctggaagcgcgccccaattgtcgcgccgcgtggttcgctcggttaaagccccgacccgagggttatcgagctgcttccgcccagtggatacgaacccggactgtcctgagtgcatttttttcctcccttatagtctgttaaattgactaataaacccaacgcagcgttctctgtgcagcttcaaaaaactcagtaatttcgttagaaaacgttgaaatccgaccccaaagtattcagcccaaatgtttagttaaagtaaccccgtgggttaataaactaaacaaaggcaacccatgcaaaaccggagcaatgaaaaccaggctacataaacgaagggaagtttataagaactctttgggaggaaaaaaagagaaaaggcaccgggcacggaggtttaatgtgaagcatgtgagcggggctcagtttacaggtacgcgggccgatggcgaagagcgctgtcaagcggcctcgaggatttcggggggtttgcgccgccgaggaaaccctacccggacgaggcgagcagcctggtggccctggcggccgcgagctcccggctgccaccgctaggcgcccccgcccggcccgccggcgctccgagggcaaacccgggcggcacagccgtgcgccctgggctccgcgcgcccaaggaaagggcttcccagtcaccctgcggcgacgcttctccctcccgggaatgacaccttcgctcgctttcacacagccaagccgttggagaggcagaaacagtgggtcccgagcccgcaggagaagttcccatcccgcccctctagccctcgggcgttggcagtggagtaacaaagacgctgccgcgccgttgaccccgaagaagctctgatgaaaaggagggcgggccgcgggataggagtttctacaattagttttttctgcctttacgttcccaagaagaagccgaggaagtagaaaggagagagatctgggaaaggcaagatccagaaatcaggagccattatgtttctcattttggagaaaaactgtaaaacagctcggcctcttgtccaccttgccccgaaggcaagtctggatatgaaaagaaaaaggcgggcaacggaggagatttatttttcattttaactttcctctcccaggcttcctcaccccctgcccccttcgattcctaggaggggcggccccagccctcggagccgattctcggcgctgcgctaggacatcagaggcgatacaggttcgatgttaaatgaaccttcaggccgccggacaatggcgcagacctcacacgggggcaccgcgccttcccccagccgtgctcggctcccgccgcttctttatttcacgtggtggaatcctccgcgtctcctacagccgccgaaccaatgggcagaccggggagagcgggacgcgcaggag

SEQ ID NO: 231129 - DNA, 393 bp, Homo sapiens
  chr5:72597813-72598206
  hyper
tgtttaaattcacccgcaatctggaagatgttttgtccaggaactcagacatgaggtgttgggagaaaggagagaaagtgacactaagaatctttccttgccttcacttgggcctcatgatcgctcccaaccctgcccagtcgccccaccagcacgaggcaaatgactgtcttcagctccgaacattaatattaagacatcagcattgcattagtctgcaatggaccatcaacgatcaagaaaaaaatacaaaggagaaatgaaatagctcatccgaaaagtcctactgtcatcgtgtttattttttgctttgctaagcccaagatataatttactcactgctctcttgcaaacaaaagggccgtgatagcctggcaacgttgaagagcccct

SEQ ID NO: 231130 - DNA, 908 bp, Homo sapiens
  chr5:72598950-72599858
  hyper
ttgtggtgcgccgccggtactcaaggagccacccgcgcgcaatgtggaagggcggcgagtcgccctcggggcccacagcgccgtcgggcaaagaaccagaggcgtggagcgaatgcagcgcccgggagtcagggctgttagtggcgtggcccgccgggcattgagctgtttcctccaacgcccggtcccccgcggcctaggcccagtgtttgcttttgcagatacgtcagagggaacattcaggaggggcgggctcccaggctcccaggagaccgcccggagcctccggagcgcgacgaggcgcggggcctcggagatctggcctgccagattgagggggaggggagggggcctggcccagcagctggacaggcgcgcagtgcccgcagcccgcgagtgggcgcccagctggcttcgcacgggtgaggggctcagcctgcacttccctcctccaccccgaccgccgaacgcgtcccggctggcttcagagtgcgcttctcgtggacgtgctgcgcgcaccctagggagatgcgcggcgtccgcgcgggtcagcgccccagtaccactccccagtgtactccccaggtacacgcttcccttgcgcggcgagtttcaactcaggtcagaacggagctgagcggtgggcggagtggagaaaggtcccggaaattggccaagagggggcggtttcgaggtagtgccttcgaagtgttgtccagaccagcagggagggtcgcctccacctgcggggcctcctccagctccacaaggtagccccgtagggacttgcagatctgccagacctagcagtgagaccactgctcccactgaatggcgccgcctgcgggctggcccaagctctatgcaccggctttatctcattttctcctcaccgttaataactggca

SEQ ID NO: 231131 - DNA, 359 bp, Homo sapiens
  chr5:72607509-72607868
  hyper
gcagtgtcatctccttgcagcgtgagccctcgctgcagcacgcaggacgaaggccgcctgccactggaacgcggtctcgcgggtgtcggggtgcagcgcaggccaggcggacaggaggtgcggctgtgagccgtcccacaaggacaatggaacttttatttctggcctgtcttggttggcagtctctctcccactctctttcttggttgggctttggtttaaagttaccctttcaggattaggttggtgttttctttcccatgccacctgggaagtttctgtttccgaagtggctgaacacagacgggtcagtcagtcccaggcctttacccggcagaggcgcgcggccggggcttctc

SEQ ID NO: 231132 - DNA, 662 bp, Homo sapiens
  chr5:72676273-72676935
  hyper
acccaccaggactgcgtcctgccagctcttcactccgctgacctgaccttccacgcccctagtcctcgagcggacttgacctgtgggggagtaccgaaccgtccccatgaggccctccaagcggccaggtggcctccgccactctctccacccccacctcctccaccccccagcccatcggtccatcttcgatctgcaaaacacgccgggtcagcgacgcatcggtcccaggcttgtgaccacctctttctctgttacttggggagccaggcccaccgctcaggatcacagtgaggagaaaaaagacacaaacgccaggacagggcggctggggaaggaaactgctagggaccgctcattgtcagcctggcgtgtcccacggatcgcaggacccgtcgaggctttgctctctgcgacccgaatactcctgggcctctcgacctcctcctcggactcaggcgtccgcgtctccggtcatcacgggagaccaattggtttacaaatagtgatgataaacctgggaccgaccttggggctgtgtaaaagtctactgacagatgtaatggagggttgttagcagtcacaaagcctgtcggacccgtagcattagttcaagagactattttcgtgtcgcaccaaaattactgcgcgtgtaaaccaat

SEQ ID NO: 231133 - DNA, 487 bp, Homo sapiens
  chr5:72677215-72677702
  hyper
cgccggggttcaggcgtttgtgaaagacagaacctttgggctagggacccgggcactggtgcttcgaagtccgaatccgccggccgagaaaacgacaagagaaagaaaatccagcgggcgctctctccagcgccaggccggtgtaggagggcgctggggctcggcctgccacccctacccgacattgggaagcagcccctgcgctcccgcggcgcctcagcctccggtccccgccccgaggtgcgcgttcctcctcccgcatgcccgtctcgggccccacggagcaagaagatagacgatgacgaggcgcgcccatccatccgggccgacgaggtcaggcccgcgccacaggcaaaaattgcgcaagcccggccgcagggatttcgcgggcgcctgggtcccaggtgcgcggccgaaatcctcagggaaaatcccgaggggccaacggtctaggccacagggctgctgggcccgggcctggctcaga

SEQ ID NO: 231134 - DNA, 406 bp, Homo sapiens
  chr5:72678008-72678414
  hyper
ggtcaccgcgctcccggacgccggaagccgcgctggcggggccgcggggagggaggctgggtaccggggccgtccggccggaggaagcggctccggccgcgctgtccgcgcttgggagccgcgtgcagggttcagccgtgtttcagttgccctctgacctgaccccgggcgcacaaaggcctcccgggtgcgccgccatggcccagtcttccagtcgctgccaaattaatgagcccacgtcaggttgggtttacagctcggccgggaagcagccgagtggaaaatgagctcggggccgctccagaggctcccgcacaactgcagaggctgcccgcgtccctggccgccgcaaaggccgggcgcagcccaggagaccgggagtcgcggcccgcgcggttccgccctc

SEQ ID NO: 231135 - DNA, 1078 bp, Homo sapiens
  chr5:72715199-72716277
  hyper
tcagaaatgtgccctaccttcggccaaagaagagaacctcttttccaataaatatttggccgggtagtggggagggggcgccaagagtaacaaagggagccagcggcctggtttgtttggattgccgggccggcgcgggagcggccgggcgcagctgaccacgggtacagataggttaatttccacatggagctgcagaaaccctatccgcgggttgcgaagcgtgggtcagccaaggcatgttaatctgtttagcatgtgcgccgcgcggaggagccagaccaccggggcgcaggaggcgcggccgcagccggcgctcctctgggggagttaataaagagcttaaggcaggcaagtaagtgtatggaggctgcgagcggcttcttgcgggcggcccgggggagggcgaggcccggctgcctgcgctcgcgttcccaggccctcggaaccgcgcgccctcgaggccgagcgagccccgccgcgccgagcctcccgggcgtccgcaggcctggcgcacaccgaagcggggggcgcagtactgctctcccgccccccggagccgagcctcttcgcgttcgcaccgtgaaaggaggggagcgaggggttagccatctcgaacatttttaactaatcaaaatatttgctgatgagtatttatttttacaagaactcggtttggctggagacttcccgagcaacaatatgggctgccgtattaggtttgtgacggagccaagtgtggttggggcttattgaatctgcgggccggagatcgctcgctccggagacgtttctccgttctggggaagcagctttcccaaaaccgtccttctgcagatggctcttagaacacaaccacatgtcccctaaagcacgggaagcttcgtgttttatgtttgggctgaatgaaaagaggaacgcacgctctttcctgcccaagccaacaaaagagaaaatagcgggaaacgtccctgacctgagaaaggaaagccaaagctcagaggttccagtgtaagcacaaacaacaaaactggatgagtccaaaacacctacctcaacacatcgcttcatcgtgcta

SEQ ID NO: 231136 - DNA, 635 bp, Homo sapiens
  chr5:72733151-72733786
  hyper
gccgagcagccaaagcgcccgggcaggtcagaacctccagcaaactaacatcttgataagtccgctgacaacaaaataaacagtggagaaggctggagggcggggggcgccgtggcccgcggctggttcgcagcagctcggcggccttctgcgaggggaaggcgggccgctctcggctttgtgcttggggctttaggaggggggcggttggaggagagagagaagccgaattatctccctttccgcgtctcattcccgtggatggagggccccgggagcgtttgacgatggcagtttggggcgtgcgcgctgcctcgtcggcccctacgacgtcaggcgccggagctgccggggccccgggcgagcgggcagcggcccccgcgtccctcccggacacagcgccaccgagaggccgagcctcccgctcctgttgccatttcaagggctgacgcctggaaaacaccgccaggcccctggccgaaggaggtaactaaccgagtcgaaacggcgatcagaaattaattcagtgccctgctcaggagcaaaaccgtcaaaaccccatcgagatgttggcgcaagcggattcacacacaaaggaaaacaataaaagtctcgttagatcatttttctggaca

SEQ ID NO: 231137 - DNA, 710 bp, Homo sapiens
  chr5:72739651-72740361
  hyper
gtgtggtccttctccgggagctgcctgaaccatcagccccaatatatccctctccctattaactgcaattccctcccgactgagcttcggtcatttgtctcgaggctctacgggggcgtttgatgagcagagaaacaaggagaaggggagaaaagcgtcgggttaatgagttgtagcaaatccacactttgtagttgggaggaggagagctggtggccaatgtttgttcaactggtttatttttcgagacccagcctattgaggaaggcttgttcaagcaggcttcgttcctacaaacacacaaacatccttctgtttgcctacaaagaaaaggggaccagcgctggatttgcatgcgaatgaggagccccaggaggagacgtccttgcccatcaaaggccgcggtagcctggcggccccgcagcctttgttccagcacctgctcgcctgcacggcctgacggggcgcgccccgcgctcctggctcgcccatccagggtccacggctcactcgtccctcgcctgccccgcggcccacacctctcgcagctcatacctcacccgccccgcggccctgcttcccccagtctcatcctctcgggagcaggcccgcagggtctgcaaggccaagaacggaaccccaaacgcagagggtggggaggtgagcggcaggacgcaaaactcggaatcgaggcggcttgggtttacacg

SEQ ID NO: 231138 - DNA, 728 bp, Homo sapiens
  chr5:72742464-72743192
  hyper
gttgtttttcatctgccaaacgtcaagggagcctctagtgcctggacagggcggactcccttccccggcaccctcttcctccctaccccaggtcgggggttggggggctgtagcataggtcggctttgcataaatagagggacccgcagagccaaaaggcgcgcccgggctgttgacagttttgtccgagaattcgcagcggcgaaaatgggcgcgcgaggtcgagaggggccgcgcctggaggagcgaacaaaacaccgaaccaccaagacgagaaaaggagccgggattcctaccttcttcctcgagcgcgctaacatagcgttattaacaattggaaatcctagcagtaaagttctcgacactggacagggcagtcccttggtgcagagtccccaaggcggcggacgaggagactgaggaggcggcggcggccgcggcggccacgagggatcgggtgagcgcggccgccgggcccacggccgcctgcgccgcgcagcctcctccgctggatccgggagctggcggcgccgccaccggcgagggcgagggcgaggcctgagcggcggcggcggcctgcgcggcggcggcggcagcggcggccgggcccaagctgcccccgatgatgctctcgatggagaagggcgagcgcgccagcgctgaggcgcccgggccgcccgccttggccgcggaggccggcagggggccgggtagggcggcgccgagcg

SEQ ID NO: 231139 - DNA, 201 bp, Homo sapiens
  chr5:72744932-72745133
  hyper
tgtaggagccttccagccgggggataaccaccccatcctctgaggtggcccctgggggacgctctggggtcggttgggggtgtccagcccctccagatcgggcgagcggccccccattggatctgatgcgaagccccccaatttaagcacgataataattgtttattgaccctttaacccattctcttcggttttactcca

SEQ ID NO: 231140 - DNA, 226 bp, Homo sapiens
  chr5:72745163-72745389
  hyper
aaaacgctgtgagactggcgttttactcacttctctgcgattgaatgccctagagacttgacagttaaactaagccactctaatgagacgatctgacaaatgtcatgggaataaagaacgtaataattgaattcggagaagaaattgaaatttttagtgaaaacccaaatacacgcacaaaaattgcacctagaaactactaaaaagttcgaccagcctggccaac

SEQ ID NO: 231141 - DNA, 45 bp, Homo sapiens
  chr5:72745569-72745614
  hyper
aaaaaaaaaaaaaaacagaagttcgttcataatggggctatatag

SEQ ID NO: 231142 - DNA, 1007 bp, Homo sapiens
  chr5:72746976-72747983
  hyper
caacctttagctccgcagtcgcgaaattccccgagcgcggaaactcaagcgattcacgtcttgcgcgacccccttgtctcccccatcgtcccctaccccgggcctccttctctacagcgctcccagctttcggccccagctggtaactctcccccggctccccgcccccaagctggtacaagggaccaaaacctttcccagaggcgagccggggaagcgacgcgaagacccccgtccggcgcaacccgctcgcgtggacgcggaaagtggcgggcggcgggtcccggtggtgcctgcgtagggcagagttgccccctggcggcggtgcgacgacctgcgggccctcgcgcccgggccggcaactccctgggagctcggcccgcgcggggaactcgcccagcagcctgtgtttctcgagtgtgggcagccggctcccgggcgtccctcccaccggctgcgggggcccgggactgggcggtagtggaggcaggtccttggactgcaggctgaggctttttccccccacgagcggtttgggccctccaggagcccctgcgcgggggtcacgtggattacgctaggtgagagccggagaggctgcgccaccgtcgggaggctccctgcctccgccctttgtcctttgcccctgaccatgagcgccccaagcccagggacctccttagggggatgaaggctggaagagacctgggggctcagacttacggggaaggaacctaggctattccttgtgcatcccaggattttacccatgaacgtgaacatgaacgtgttttcaaccccagcggttcccctggcgcctcgaccctcctttgaagagtcattctagaaggctgtattgcgatagtgtttgtacctgtcactgtgagccctgaaaagagacagaagaaaacgcgagtgcctggcctgagggtgctccgtcccgtgggtagccaggtaggtagttattctgcccgatgatgaggtcctcctgacgcccccgcgaaagg

SEQ ID NO: 231143 - DNA, 339 bp, Homo sapiens
  chr5:72921423-72921762
  hyper
agcttgcaaagctctcggccagggaacatgagcttcaaataagagggcaaatgctgtttttaaaaataatatttcctattgtaatagacccgggccgtattatgtcacgggtgtggtggcttttggctgggaacagcctgagcctccctcgggcctggcacaactcctttcgcgagcgggcagcccagcgcctccctcgggaggcgccaaggcgtgggggcgcccggggcgcaactggcactcctgtggcccgccaggtccgcgccagcctccgcgcctccgatctccggaggccaacggccgcagccccgcagcgggagggggctggcggagacagcg

SEQ ID NO: 231144 - DNA, 504 bp, Homo sapiens
  chr5:72922062-72922566
  hyper
gggggcgcgttccgaggcgccctcaggcagggcgcgggggcagagcctcgcctgggttctggaggctgcggggccatcgctccaggtaaatgctctttgggactccatcgtctgcgtttccctgcagctctgggcggaaaagtttgtccacctgagttcgcatccgcagggccactttctccagggtccccagggatgcgagggtcagcagaggtgaccggggaaccgctgcaggcgctgcggcgcgagggctgggcgccgcctcccgctccctcgggagcggcaacaagtggagagggcggcgcagcctcgtgcggcggcggcagctgcggagcgcggggtcgctcgggcgcactgagagccgggggctgggcgggtgaaagccccgccagtgtccttcgggagacagggaaataaacagcactcctgcggtggagaagggagaacgtcgagagttggtgtccgcccttcccatccatgcttcagctccgggactgagggtgc

SEQ ID NO: 231145 - DNA, 62 bp, Homo sapiens
  chr5:73935724-73935786
  hyper
ccggggaggatgcaacgtgggccaaccatcccgcgcgctcggccctggaggctgcggggagc

SEQ ID NO: 231146 - DNA, 162 bp, Homo sapiens
  chr5:73936897-73937059
  hyper
acagccccggatctgagggacccaccttaggggagcgcagcccggggctgtgcgcttggtgatgccagagcccgcgagatgctctaaaaagggctgcaaggggcgagctgggtatccgcaggacaggccctgggcacgcatagacagcgccttgggtaggac

SEQ ID NO: 231147 - DNA, 362 bp, Homo sapiens
  chr5:74161900-74162262
  hyper
cgggtctggtgctggcgggggcgcggggcccggcgcggccgtctcggcctcacccagcggtccgcgccggggagagggagcgcactcacctcagacgcgccccgggagccgctggaagagcccgggaaaggaggcggagccgcgcgaatgaatggagccggcggctgctcgctggcgacctccggccggtcccaggccgcacagctcgcggctgccagggcgagtgcggctgcctcccgctcgccccggacgcccggctcctcgtcgcgggtcggccgcggcccaccgtgccctccgacgacgtgacgcactagcgccgcagcgcctccagccttcgcttccgctccgcgcccgcgcccacc

SEQ ID NO: 231148 - DNA, 343 bp, Homo sapiens
  chr5:74348351-74348694
  hyper
cacctcgcaggcagacgatcccggcccgctctgcggcacaaaaaacttgaccttaaaaagcccagaaactggtctctgggaagggcgcggcctgggaggcgcggcccgcagcttccgcccccaaagaacaactcggaggccccctccagccccggttgccctggcgcagaagccgcggtagcagtcctttcaggcgccccgcgtccctgtcccgaagcccaggggcgggggctcgggcagcatcgcttgtcccctctggtccagggctgcggagaagcggcaagcggctccgaaaggcaagcgtcacgaagccgggctcagtagctcccccgggccccctgcg

SEQ ID NO: 231149 - DNA, 249 bp, Homo sapiens
  chr5:74348874-74349123
  hyper
gagcccaggaagccggctccgcggcccgcgcccgttatccaggacacgctccgcgcccgccgcccgctgccctttccccccgctggcctcggggaacttccccgcgtctggccgcaggcggcggctgccgcggggagccccgaagttgcggcgtctgctaggcgcgcgccgggtcgcccacccggcccgtgacgctgtgtccgtccgccgcgcgctctggtggccccggggctcctgcaggcgcggaga

SEQ ID NO: 231150 - DNA, 704 bp, Homo sapiens
  chr5:74349303-74350007
  hyper
cgaccctcgctcccccgcgtggccaagtcgacttacgagagggagcgggccagccccgaacgcggggtccgtgcggctgcggaggccgccccggcgggggccgagggttgcgctctgggttcccaggctctccgcggcggctcgctctcgccgcgctcctccgtcgccctgctggggagccgctctcgcccggcccggggtgggagagcgctgagcggcccccgtgacgtgcggagaaagtaggagcgcctccgcgctcccgcagagggagctccctgccctgcgctcccagtccccgggccgcgcttcggacaaagttctcaggcgcgcgcggtgatctcggctctccgccgctgcccggagcgtcatccacgttcggttccctcccacattagacaagaaatctgaggtcaggagagctaagtaacttgcccaaagtcgctcacaaggcagtgacgaagcaaactcacatccgcggctccttttttctccttgaacgccgggctctgcggaggctcaggccctgcaggaatcgcccaaccagacagaaggcagctcgctctcatgggtgagacgaggagtgtcccacgcagccgcgagaaatattatcagcagcgtgggaaggtggagctttttgccgaataactagagtgcaaagttgtttttcaaacagtgcctacatgccaaatcggcttgctttttat

SEQ ID NO: 231151 - DNA, 111 bp, Homo sapiens
  chr5:74632844-74632955
  hyper
tggttggccgagccgtggtgagagatggtgcggtgcctgttcttggccctgcagagagctgtgggcggttgttaaggcgaccgttcgtgacgtagcgccgtcaggccgagc

SEQ ID NO: 231152 - DNA, 391 bp, Homo sapiens
  chr5:74807675-74808066
  hyper
aagggcgttggtccgtcgctcgcgcagcctcctgggagttgtagtcgcgatcctgaggtaacgggtgagtatcccgcgcggggatcgcttgtccccttggggccttgtcagtcggtgggtgggcttcgtttgacagttgcgtgaccagcccctcggcctcgcttctatccttgccttgtgtgtttatgacgaaccctccgggcttgcgggcccagacgtgagagagctttccgctgaagatgacgggcctgctttccagggcggcttgtcgaaagcccgggagcatctggccgcttccgcctcaaccatgggctggggttttgtgagctactagtgccaagggttttctttccaccagaccaccgctgtaaatctcgagggtcttactcat

SEQ ID NO: 231153 - DNA, 119 bp, Homo sapiens
  chr5:74965024-74965143
  hyper
aagagatagcagctcgtggtgttttacctcggacctcttgtgcttggcacaggaaatgaaagcttccgtgaacatggccacagggctctgcttatctggctacacgggaccctgatgac

SEQ ID NO: 231154 - DNA, 186 bp, Homo sapiens
  chr5:75013171-75013357
  hyper
ctcttagccgcgtcgcagctgcagtgtcagcaagtgcagcctcagcaagcacaaccgctacctagacggcaacctgacagtttcaaactgcagggaggaattaaggaccgccctgggcattggtcctttgtttcagcaatctgccgtttgattggtccgagagctgggggcggggatttgggccgc

SEQ ID NO: 231155 - DNA, 1218 bp, Homo sapiens
  chr5:75378679-75379897
  hyper
ttgctccctggaagccaagtcgaagtgaacaagtcagtcccaggcccggaaatagaatacaaaccctctttttgtccggtgctaacagagtccagcagtcagaactccctcgcgtctcacgctggacctgacccggggcgccgccaagtgcgcaacgcacagtcacagttggtgactaattaaggactgccgcccctctccttcacctgctacaaactcagagccctgacttctccagaagtacctaccacttggaggtggctctccttccccgccccctgccccagtcccacaccgcagcagcgcctcagcaccgcgacttgccggagcaccgcgagtggcgcgcgggtcccgcctcccccgcgcgccgtgactccctgcgcaccgctggtactctcgccacgccgccgcccggcactgcagcaccagggggaggaggcaggcggaggagaggaggaggaccgcagcgtgcaagccgggagccactttcccgcccctcctctcgccgctgacacgctcagaggagtcaccactccgcgcgctgcaggcgagagtggcagacggaggcagcccggggaagcgagccggagcggcgcccgcactgaggcggctgcagtgctgacaccactcagggcaagggtgtccgacggctggagcggtgagtgggggaggtgaagcgggcatccgcggggagactttcccccgctgctggatttctcttcccgactggtggccgggcgctgcagcctggggaagtttttgcagcctttcggaagcgcaactttgccccgcctgcccccggggaagcggctgcaggtgcccgctgctttgtaggcgcctttgttggagagggaccaggaaagtaggggtaaaatagatgcagtgaccccagggttcgctagggtaggtctggggactgggtcgcactttatctgggattcccagaggaggtgggtgggcagcagcggggatgcaggggccgcatctgcagcgaccgccacgctcttttttgcttgtgtggtttgaccggcagggataggcagattcaaatctagcagcctagagccccgggctgggtacctggacctataccttcatagctgccttaggctcaacttttcggcggggatccctctgcagacgtgcaggtggcgggagagcagaggtagccgcagtaagtgctgagagagcctgaaagaaacaccatgaattttcaaa

SEQ ID NO: 231156 - DNA, 85 bp, Homo sapiens
  chr5:75380377-75380462
  hyper
gggaccttaggcggcgcgcgggggcggggggaggggctgagccacgggggctagaggtgccgcctggacggcctgagctgggggc

SEQ ID NO: 231157 - DNA, 238 bp, Homo sapiens
  chr5:75698434-75698672
  hyper
tagccggaaaaggtttctgtggcttgcgaccccagctgggcttgagagaaggctctgcacactggggcgggggcgggcacaaggtgatcggagggagggggatgactcgcagttgtgttttgagtggttgccttgggttatcttgttcctccagcacacacacactcagtttcttgtcataaggggaaccctgttattttgtagacaaaaagtgacagaagcaactttcgaagcaaaa

SEQ ID NO: 231158 - DNA, 557 bp, Homo sapiens
  chr5:75698852-75699409
  hyper
tcacttccaccctcgaaactctccagaagcgagaaataaggcggggtggccgccacccccaggccaccagctgtgcgggggccccagctgcagggggtcccggcccagcgtccctctcggccccttccctctcccccgggggagaaggggcgggtccacgcggcctgggcgctgcgcccgacacgcggtaggggtcgctgcgtctcggcgcgcgctcccaccgcggtgaataacggggcctggctggaggagaaaggaaacctgctgcgggaggcggcggcgaccggccagggagcgagggaggagagttcacttttacttcagtgtcagcgcgcggcggccgtggctggctctggcgagagagcaccgagggagtgggtcgcagatcttcgggcggctaggggaaatcggcgagaggcgggatccgagcgcgccggcggggcgcagagcccgcgagcctggccagcgagggtagccgcggggggcgcgccccgggcgggcccccggagacgcgcaggatgccacacgaagagctgccgtcgctgcagagaccccgc

SEQ ID NO: 231159 - DNA, 98 bp, Homo sapiens
  chr5:76010895-76010993
  hyper
gacatggtggcgcgcgcctttctgtggtcccaggtaatccggaggctggggcgaaagggtggcctgagccagggagatcgaggctgcagtgagccgtg

SEQ ID NO: 231160 - DNA, 1778 bp, Homo sapiens
  chr5:76011053-76012831
  hyper
aactgtaatatcgttcaagaacgtgtgaaggacacttggaaagttaccaggccatttctctcctgggcgcccgcggccctagaacgccggcctcaccggcagacgcgcgccctcctcccagatgcgcaggtgaccccggcgggcggcgcgggaaagggaagagctccgcgaggccgcgcgggggggaagcgggagaagccgctcttcctattccactcgcagtctgcgtgtgggggaaacgagtgcccggcgtatgaaacgcctaacttcgcgaaataaagagagacgtataaaagttcaagaattctgtccagactcaagggccctttctcatttaggggcaaccctgtcactacatcataaacttttaaatccgtgatccccacgttacaaaagcagaagtcccttttagacttttagcgaaaactgaactttgccggtgtcccacacggagggagggaggacgggaggccacgccagggctgcggggctgcagggcgtggacgcatcctggccggggcgtccactgtcgacgtctccacatcccaggagggtcgagacggccgcgggaagcagcctgcgagccgtgcggccccattccaaggaccccgccagtgtgagtcactgacagcttcgcgaatcaacggtgcccagaggaaaaaacttctcatttggacttctaggcccggcagtggccggcggccagggccccccagtagggcagggcggggcggggcggggcgcacagagccagaggggcttgcgagcggcggctgagggaccgcggggagggggcgccgagcggctccagcgcagagactctcactgcacgccggagggcgcccttcctcgctcgcgcccgcgcgaccgcgcgccccagtcccgccccgccccgctaaccgccccagacacagcgctcgccgagggtcgcttggaccctgatcttacccgtgggcaccctgcgctctgcctgccgcgaagaccggctccccgacccgcagaagtcaggagagagggtgaagcggagcagcccgaggcggggcagcctcccggagcagcgccgcgcagagcccgggacaatggggccgcggcggctgctgctggtggccgcctgcttcagtctgtgcggcccgctgttgtctgcccgcacccgggcccgcaggccaggtgagagatgcacgggaatggggtgcgcgggcggagggacgccgaggggagactgcgggggtcactgttgcgccttctcctcacccctgcctcagtttcctccgaaagccaaactggcatttgggctgagatctggagttttttccagtcacgtttaggtggggcgtgccacccccttcgcgggcccagccgatgcccctttggactcgatcttggagggtgcagcccgcctgccacggggtgttggatatggaggaggatggagcggaagccccctgggggagcctgcagtcctgcgttgcacttgtcattgtgtttctcccaggaccacccccaaaaagaaaagctctcacgttgctccaccaataaacgtttcgatctttaaaatataaagtggcgaaccgctgccgctgaagttttgctttgttggaagtttttttcttgcacattttacaggcgagaaaagtgatgtagagaaaagcccaggcagtcccttggcatgtttagcagagaatcagtaccagcagcccccggcccggccttgtgtccaggaggtgcgcagggtgcgagatatatggtgacaatagcagaggctccgcgtggtggcgggg

SEQ ID NO: 231161 - DNA, 1294 bp, Homo sapiens
  chr5:76114396-76115690
  hyper
cgctttcgtgatgtccgcagttgcccacctgcctctacaataaaaaacgcatccctcctcctgcagggtccaccgcaccgggaagccctgtctgtatcagttaccaaccacaattgcagtgagtacgaatcgtggctttcccacagtcaggaaaggcaagggagaccgacgacccgcttctctaggagtaagtaaagattaaaggtagttcgcggtatagcctaggcagggattaacccgtggtcccagcgctcctgctatttgcattccaaagcagacacctcatgcgctcaaccccgcccgcaggcggctcccgcagtctaagggacctggcgcgagtccgggaagcggagggcgcagctgcgcagggaagggggccgggggcgggaccagggcgcgcgttccggtcccggggcgtggcctcccgcaggtgagtacgctgctccttcggtttccctgaaacctaacccgccctggggaggcgcgcagcagaggctccgattcggggcaggtgagaggctgactttctctcggtgcgtccagtggagctctgagtttcgaatcggcggcggcggattccccgcgcgcccggcgtcggggcttccaggaggatgcggagccccagcgcggcgtggctgctgggggccgccatcctgctagcagcctctctctcctgcagtggcaccatccaaggtgagaaacctggccaaggagggctcttatctctgaggagctggggtcctgggcacgctgggcagacggtgggatccgggcaggtgtgcgaaggctgttctgctgccggcacccatctctacgaatcccttagcctccccttggtggctttgatgtgaggtctctgcgccaaggaggcacccaggtgggacatgcgggagcagctgaagtcagcggagccgggcagaggcagagatttccccaaagaccccacttcccgtagaggctgtcatgctgggcacctccaggccccagcgtgggttcggggaaagggagggaaggaaggagtagctgtgtctaaagggtacgcagaggacctagtcccctccccgggcttggttgctttgtaaacactaagtcattaagagctttttgccaactccggagacttcctccgctggccccgcggggccggtggggttagcgagctgattgcgcagggcagggcggagtgggtgggaacccgcggcccgggagccttctaggttgttttttgcgtccctctccaactgctggaagcctttcttcgggttctggcccctgcgttcgagacccacccggg

SEQ ID NO: 231162 - DNA, 601 bp, Homo sapiens
  chr5:76249315-76249916
  hyper
cctctctctttattcgctatgctgagtggcagggagggtgccccgctcctggtccccttttttatccccagcccttgaacttttccggactgacctatgtttcttgccagctgagggaagcggcggactacgatcctttcctgctcttcagcgccaacctgaagcgggagctggctggggagcagccgtaccgccgcgctctgcgtgagtcgaggctgcccggctcgcgggcgcccgggacgcggggaaggtgggactctgtgcggggggcagagggctcgcggacatctcggggaaggggctggccggaaccgccaggggcgcggtccccttagctaaggatcggtccgcggaggcgcgccaggagcgggagagggtggcgcgcccggggcgcaggaacccagcgcagcctaggctggaagtcggggcgctgggcactacagagcccgggaatggggcgcgcggagagcggccgcccgaggacggcgctgcggcggctgcagcccgggacttattgccccatgccctcctcccccagggtgcctggacatgctgagcctccagggccagttcaccttcaccgccgaccggccgcagctgc

SEQ ID NO: 231163 - DNA, 254 bp, Homo sapiens
  chr5:76326226-76326480
  hyper
gcgccgttgtttccggctcaactggggagctgctggagctcttctggcctctggttttccgactgcttatccgacgctcctccctctgtctctgtagctggagaaggtagtttccaggaaagttttccggtttgcaggccgcgcacatcgggcaggggccatcctcggtccccttgctcgttgctcgcagccccgttcggctacaagtgagtttcagggcgtcatggccaggggccaccgcggccagccgggtg

SEQ ID NO: 231164 - DNA, 182 bp, Homo sapiens; identical to SEQ ID NO: 199911
  chr5:76383033-76383215
  hyper

SEQ ID NO: 231165 - DNA, 721 bp, Homo sapiens
  chr5:76476058-76476779
  hyper
aggacccaggcacccgccggcccggggacgcgtctggaaagtgaaggcgcggaggctcaggctcgctgccagagtcccacggagcaaccagagccttcacgtgggcacgaggcccggggagtggggtgcagggtgcgccaggccggtgccctctgtgcggggctaaggcgccaggcacgggcaccaccagggcgcccaggagccgcccgccgccggcatggaccagctgtactgcccaccgagcgcgtgccaggtgagcccccagcgcgggggaccgcgcagccctcggccgccccctcacacctgggtacccggccgctggcacaagcccagagccggcttcagggccccctttcagacacccaggtgctagggtggctttttttcttttcttttcgcccttagtccctgcgtgtcctagtgccaactacctccttcctttccaggcgggaagcacctcgagcgtctagtgtaaccgtcaggtttattattcccaataataattgaccacagacagccgccgttcgcgtccacctggcgcttctcagcaggagctggacctgtttctccgtcgggccggctcctcgggctgctgttgcgcctggtgttttccacgcttccccggcgcgggacggtggggcccctgcattcctcctcgtgcttccagtggctgcaaagctgcctccccttctgagtagtgagtcgccggcagccccagcgt

SEQ ID NO: 231166 - DNA, 172 bp, Homo sapiens
  chr5:76506242-76506414
  hyper
gccggggcacctgaggaggaaggagggtgggagcgagggagggaggggacgggcgcagaccgaaagtggggaaagaaggtgcaggcaggcgggcaggcgggcgggcgccctggcccagggccgcgggtgcgggagcccggcgaggtcgagctgggcggcggcgggggccgcg

SEQ ID NO: 231167 - DNA, 59 bp, Homo sapiens
  chr5:76507254-76507313
  hyper
aggaaatgtggtcagaaaaaggcccctggaggggtcctggaagcgtccttagctggtcc

SEQ ID NO: 231168 - DNA, 805 bp, Homo sapiens
  chr5:76923707-76924512
  hyper
agtttaaaacacaccgcaaaccttcccctcggccgaccgaagaaacggcatttttttcctactcctttggggcagtcccctgagcacgtgcctgaagtcgaggttagtacgcagccagcagggaccctgacaggaaaccagagcagccccggggttgggggagccctggtaggtgctggtcgtcccggacacgcctcttctggagaagcgcgtttgtcccttacttgggaggtcccgggtatctgaagcggatcccgggtctggggacatgaaggggcgccgtggccttagggaaggccccaaagaggcctaggccccggaggaggcaagagccgcggcctagcttccaccgcgtacctggggccagacacggctggggcggcgccggagagcagaactccaggctctgaaggccgagggtgcgaattgtggtcccctcccacccacggcctccccatcacgcgcacgcagcccgcgaggggcgccctccgcgccactgccccagggacaccgttcatctgaggaactctcgcgccctgcgtttcgtgccgacagcgacgctcggagtcccacctgggaaacctgggttggcccggaaacctcgggaggctcagagcttgcgtgaggcgctcgcggcgccccagcatgccgccccgtcgcggagacctcaccttgcagcccagaaaccgaacccaagcccactgcagggcgaagggcccacgcgttccaactggcgcgaatataaccattcccaagaccggcccctcccctccccccacgagacccctcccgccgttcaaggtca

SEQ ID NO: 231169 - DNA, 1753 bp, Homo sapiens
  chr5:76925469-76927222
  hyper
cgtgtctgtgcgcgcgcgtgtgtagcgtctgagcgtgagcgagagtgcgagtgtgtgtgtttctgcccacaaaccagtccattggtgtctgatttcagatcctgagtcgactccctggtacgtaaaatggcgggaaggatactttttgccgggcgcgggaggagggtcgcgaagtgtggggaaagaggggaccggaggggaggcggcgggcgaggggggtcgtaggcgtcgcgtcgaaggtgtgggtgggaacgccgcccgtcagaaggccaggaggagggcgcgagcacggccagcgcaagcagggaggccagggtggcgggaagggtgggctgaggcgctggagaccgagccgagggcgcagctgggtgggaagggaagaggggcggccgggagacgggggaccgcgggcgatcgaaatcaggcggaggggaggcctcgcgggctggggcttggggtgagcccgagcgagtggaggagagaggcgaggacgaaacgagacggggcgaaggccggggcgggacggggcagggcgccggggtccgggtgcgcgccggaagggcctcggggcggcccccggggcggtgctgggggcggagcgggccggggcgcggctgcattaagtgaagctcatagagactgtgtgctctagcgccttgcggcggagggaggcgatgctggtgccccgccacacgtcgctgctgtccggggagctgcagagctggggcgaaccggagacgttgctggggccggggagggaggcgggcaccatgccggggaaggcgggctggtagaggtgcgactgcagccccgcgccgttggaacccgccaggctgttggacaggcccatggagttgggcggcggaccggccgccaggctgcactgggacagcgactgcgccatggcctgctgcctgcccagcgccggcggcagaggcagctgtgacacgccaggcatggcggccgccgcccagcgggtgtcgttggcgtggaaagagcacaggctgtcgcccatggcggcggcagcggcggcggcagccgacgggaactgaggcaggcctggcgtgggcagcagtgtgccgggcgcacggaacacgttggtcgtctttttgcgcttcttccacttggcgcgtcggttctggaaccagacctggagcgggcggggcgggagacagacagggagctattagccggcccggcggctggggagttggggcttgagccccagaaacccgcctcggatacagccgctctgccctgggaggaacaagtgccgtaggcccgacaagcccccatacccagccggagactgtggctccccaccaactcctggcaactggcgccccctgcacccaccaagcgcggagtcctgcgctcctaagagctcgtgccccgaagagtttacgcactgtgcaaacacaccaaatgtgtgcagtcttcaccacgcccctgcacattctgtgcactgcacagattcacaggtctgcagtcaggcatgtgtcaaagttcgacccacaggtgtacaaatgaagataaacgtgtacccatgtagcttaatagcatgccttataacactgatgtgctatagaattttcagaaacgctggaaatttggaaattgatgacaggctgtggatgacatagtttcaaaatcgaaagacaaaggaaaacccctaacgctacggttgacagagcggagaggttaatacagtgatctgcgtgggaaagtgaacgccactgagctacagtgttgt

SEQ ID NO: 231170 - DNA, 332 bp, Homo sapiens
  chr5:76928250-76928582
  hyper
ttgaccacgatatccgtggaaaaaaacgttgtgcatccgttaatctaacctatttagtgtttactctgcaagctaaagtatcaggggtatggacatacctgccctcggtctcggtgagccagcaatgttcagcggtgtgttcatgcccaggcaagcgtagacgcactctacgcttaccagtgtgaacggtgttgcagtctagaatactcccccagcttggggccggccctcgcctttctaccgtgcctgcgccgtcgcctaccactttcttcctgtggtttctaccccattttgcagattgctgcgtatcccagtgtcggcgatggataaac

SEQ ID NO: 231171 - DNA, 46 bp, Homo sapiens
  chr5:76928795-76928841
  hyper
ggaggtagacgggacggtgtctgtgactaaacggttcccacacctt

SEQ ID NO: 231172 - DNA, 1175 bp, Homo sapiens
  chr5:76932320-76933495
  hyper
tcggctgggccgcccgggggggcgctgaggttgccttctcaggcggaggaggcgaaccctgtagcccgacaacgccgggcttcgattttgaggagcttcttccgggatgtcgctatactggccggagacgggccttgcgtgtccattgggggatggcgatggggaccagtttccgggtagagaaggagataactcgatacaggaacgcacaggcagcctgaaagcagcccaggatctcgacaggggaagggaagaccctgctccctttgcccaaatcctcccgccctgtccttgccttctgtcccagatcccaagcccctcgtacctgcactcgggactcggtcagcccgatacgcagtgccagctcctcacgcataaagatgtcggggtagtgagtcttggcgaagctcctctccaactcgttgagctgtgcgggggtgaagcgcgtccggtggcgcttctgcttctgttggccctgctgctggccggcttggctggggttcgggccgccctggggcccgggctgcttgtccgggtctttggcgctcaccgccagcgaggccggagtagagcccactgtggtgatgtcctccccgggcagcagagtggctccctccactgggtcagagttgggcgccaggtcccccggatggcccccggggtcggagccccccacgcccagcctacacttcaccgcctcccggtggcccagaagctcggcggcatctttcatacctgaggaggcaaggggatcgcggtcactactttcttggcgatgccaggaggggctgtcttccccgcgcagccttccttcaacccgtcctcggccccctccgcacccgcgcttgtcctaaggaagaaactcccagggtattcagctgggttccccagaatttggacagccgggttggaataatatctcccggccccttgccctcgccgcagccggctcccgtagtaaacagcacaagctttcgtctctcccacaataaaacactcccagtcccggcaataaaacatgcctctgaatcccttccataaaccgtaccccaggcgccccaggaaatcgagagcaaatctttggacacaggggtgcggggggcagaaagaaaattaaacaattcctcggttgctgcggcacctgcgcttcggcagcctgacgaactgtacctccg

SEQ ID NO: 231173 - DNA, 946 bp, Homo sapiens
  chr5:76934314-76935260
  hyper
ccgggcgagaggcgcgcactcacctagcctggcgtccaggaggtcggcatgagacagcatcgcgcaccgctccagggcgaaagctgttcccccccaaattttagcggctttaagttatttaaaatagatataagctataagctatacgatatagatatatatagatcacctaaatgaaagaaaattcggtttgtggttaaaaagggggcttcttgcattataatgtcctttagagagacggggaggtgcttaacagttgaatgaacccgtgagcagctcggcgaggggaccaatcaggagggcagcctgcaaatgtcagcgcccggagagtcccccactccgcccgcccgctcgcctgcgcccgcctgaaggaggcggcggcggcagccctggcagctccagcccggagcaggagctaaagcagcctcagccgcctcggcctcgccctgagcttctgggcccggctccctctagttcttccctgcgattttctccaggctcccctttccttccccttggccggcgctgcgcgcttcgaaggcgtagctctgtgcctctgagctaacatcttcctagggcaggggcagagcaggggtcagagcgggccatgaccctggcgtgacctgagggtcgcccccacctgcgctctctgggcctgccgctcatattggcccgccagcccagggcgcgacgagggcacaccgcggccttcagacaacgcctggacttcgccgcggctcagtaggcctgcgcctagggtccaggcgccctggctgtgccctggggtctatacgagccccaaccccacagtgggcctagagcgcaaagaggagtcggcttccctggcaccgccagcgcccgctgtctgctttggggaccctcgcggagtgtgggttcgagcgctctgcactcttctcaccgggcttcttcccggctcctgctcttc

SEQ ID NO: 231174 - DNA, 782 bp, Homo sapiens
  chr5:76936253-76937035
  hyper
caccagtttcttctgagctgcggagaccgcttcccgggaagctccgggccggactgggtttcagcggctgctgcagctgctaccaacgcggcctatgtgggactgggcgccggggtcgtggactcaggctcgcggcgtgtctgggagccgctagggtttttggcaagcggccgcagcccttctgagaaacgctttgcctgggaggagaattccgagacctaaagcaaacaaagtctccccaataaaagctttctttgcccccaaacaaaacctcaaatctagaagctagagcgctgggagcgcacagcaaaaggaggccagacagcagcccagggaggggcggcgtgagctcaggacggtgactcgggagtacgcaccggcccgcgcacgtccagggactcgcaggaggtttctgcccacctgggtggggcttgcagggtgtccacaccggaacgcagggtcagaagtggggggaaagtggctaaggaagagacagggagacctggctccagaaccctgctcccagaaataggcaggtccgccaggccgcacagcctggctccacacgctgtctggagggagggagaaggggccgcgacctggggagacaaggataagggcgcggggccgcgcgtctccacgtgcgtgcacacaagcgctagtgtccccatcccacagtcgcccccggaacggcgccggctgtgcagcgatctcccacacgcactcgctcgtatattctgttttgttgtatctttcaggtcgataaatgaatgtgtaatagt

SEQ ID NO: 231175 - DNA, 116 bp, Homo sapiens
  chr5:76937333-76937449
  hyper
tggagccaggtgcccgccgccagcaggcagagcgagaaaaacgacaatagcctggatgtaaaaagctcccccctgctcccggttccctctcggtagctcgttttggccaatgtctg

SEQ ID NO: 231176 - DNA, 33 bp, Homo sapiens
  chr5:76937479-76937512
  hyper
taccagagttttattccccgtcatcttcccacg

SEQ ID NO: 231177 - DNA, 46 bp, Homo sapiens
  chr5:76937948-76937994
  hyper
acaggccagggaatcggctcctgactccagccgccctgcgcgccca

SEQ ID NO: 231178 - DNA, 106 bp, Homo sapiens
  chr5:76938270-76938376
  hyper
attctgattgtctctctaatcgtatttctgcgtgcattgtgaatcctttgtagacacagaaacagacagaataaaaatatataccgggtgttgtgggaagaattgg

SEQ ID NO: 231179 - DNA, 587 bp, Homo sapiens
  chr5:76939329-76939916
  hyper
gagcgcagggactccgggaggctctcagccagctgttcgattgatgtcgctgagggggccctctggccgcaacaattctgcctacaggacccaggatccccagcctcggagccaaatgccaagcaacgttcaggatccacacttggggctttctttctgttttttaaacgccggtagcaggctgcgtgtgcatgacacgtgtacttgtgtgtgcttgtgcgagcagtgcgtgttccttgcctgttcactcacacggagggggcatgccaggcgctgcggaggggcagaaacctgccccaaagagtctcatttcctatcccacccagaagcctttcgcaatacacgagctcgacatatacacttttttcttttctgcagtaaacagtttcccacacattcgagtttgcaaacttcaaccagacagtccacccgcctgacttttcgtgggtgcaagggccggtcccttgctcgttttttctcccatctttcccttctaactactggcgctcacggccctccacacagaaagctcgacacaaaacaatgacggattagtatccgccccctgactgcgtatcttgcttctc

SEQ ID NO: 231180 - DNA, 145 bp, Homo sapiens
  chr5:76940345-76940490
  hyper
gagccgcctgcgctcgcccactccccgctcgctccccgcccggctcctacgtcccaatccttttcttttcgggcgcaattagtgccaggtttgcaacagacgccgggactcggccgctccagcgactctacgcttcggggggtgg

SEQ ID NO: 231181 - DNA, 854 bp, Homo sapiens
  chr5:76940865-76941719
  hyper
ccctccccgcaacccgagtgcggctaattccgggcgtctatattcactcaattagagaaatctacagagaagatcgatcttccatctgcagacatgccagcttaacaaattagattcttgtttcgtgcaggtgatttggtgacagttggggaattagaagtaataagttgttgtgtttgagcccgggcccccgccccccgcccgcgcccctccccgcccgggggcccctcggccgcgcccgccgcccgggcaccccctaccgcaccccccagccggcccgcgccgccgccgccgtcgccgcatcccccgccgtaattagtgctgctgccctccatgtgggctcgattaaaccgtgatttagccgaaagaaatataattatggctgcaaataaaataatcagcattgaagagcgatttccttaatgagatggagcggttgcacgtcacggagtaaaggggtctcattaagaggtggtaatgaggcttgggtggatggtgcagttacaaaatagcccaactcctctgcaggccgggcccgtccgcccgaagtggccgccgcgtcgccttccagcggtccggaggtgccgcggtcccagaggggactcgggcccgccccgcccggcccccagggggcgcagcgcccgcagcgcggcctcctcccggcgtctcccgcgccgtcgggccgggcgggggacacaagccgccgcagcggctagggggccccgccagcccggcccgctccgcctcggctgggcggccgggttggcacaagcaactgccaggcccccgaacactggagaagccggcccgagggaggggcccttgcctggggcgggtgccgagggtcagtccag

SEQ ID NO: 231182 - DNA, 336 bp, Homo sapiens
  chr5:77140504-77140840
  hyper
gtgcatgggctgtgcgcaactttgctgagccattttcccgcgaggcccccagcggcgcgggggctgtggggaggtggtgtgggagtacggtcgctgctgcgcggcgtggggagaactggagcggctgcccggacgcccccgccctggtcccgggtactttctcggcctggctgcagccgcgtggatgtctctcgaagcctccaccctattctccttattgttatttccactcaccccccaaccccctcccgccgtcctggttccagaccgcctctctcaggctgccggggagggggcacatcgcgccctccccgagaccctcggctccccgcttta

SEQ ID NO: 231183 - DNA, 1117 bp, Homo sapiens
  chr5:77147566-77148683
  hyper
cgtgtgcaagtgcgcgcgcgtgtgtttacacttccagaagtcaaatcctttctaggactcccccttgcttcacccggaagtgttcggtgacccctccacccaattaatgaaaacaaagcaaagggcccgagcgggcctccgacagcccggggcttgcggagctggacgccgacagggcgtcagcccggtcgctcgcggcgcggaggctgctgcggttcggagctggggttctgcactctcgctcccggctcccggctcccggctccccgccacccgcagcctcctcgcgccgccgccgcgggcaccgccggggcttcagtgacaccaggcacccgccccgggccgcgggaggaggaaattccctgcaaaatagcaatggttccgagaaaaggatcacaacaaaatattgaataaattcccttttaatttatttgatcattccacattacggggctatgaattgctcaaatttgataacaagtactcaattcaactcattatgtaagttaaattagacttcgataaaatttcagtggcgcgcagtggttcctcgaatgaaatgtaatttgtgcaagaatttgttgtatctgtcacaaatatttccaattagcgaccgtaattatttgatagtttctgcaattatggcttaaacgggtgaatttgggactgtggaggaccctaattggcctaaatttgatattttgcatatttgcataatgaggaaattggtagaaaattgtgttcattcatttgtgaaaaatcctatgaattttatgaatttgaaagctctgtttgtgcagactgtgactttgcctgctgatccctgaggagctgacgctgaacgcctgaatgggcagcgcgccaacttcgctgctccaggaggggggtggggagggagaggaggaggaggaggatgaggagagaggggaggtggaaggctgtggtaacggtgggcggaggcgggaccatggcgcatgctccgcgacgtcccgggccgcgggcggaatcccccggctaacctccttgggggtgagactgggtgggatgggggtcggtgggggaagttgcatggggtgttatacccgcccggttacaggccgctgccctgtagcataac

SEQ ID NO: 231184 - DNA, 164 bp, Homo sapiens
  chr5:77269303-77269467
  hyper
gggaaaccttactcctcgcaggcttcaacctgctggggcgtgtttacgtccgcaaagtccgataatatattttgtccccacttcttaggagctgattcttcttaaaatgcattgccacgttatctctaacgttggctttctgacttccccgcggggctcggagg

SEQ ID NO: 231185 - DNA, 387 bp, Homo sapiens
  chr5:77591340-77591727
  hyper
ctcaaaaaaatgaaaaagaaaagaaaacatcttggggccaccagttcccgtttggagctgaagtggtgcgtcctattggcgtctagctaccaaaaataaaatggaccacctcgcgcgccagtcgtgttactcactaatatgcactagggagcctaggcgggatgcttgcctggccccagagtagctctctccgggtgctggcacccgagaaaacctctttcccggggtgccttcccccagcccgccttctcaggtgggtttcagcgccttccctctcttctccccagtgcctcccgtccaaggaaggcattaacacccaaagccctggcggccaggtactgaaactgtcaagggattctaccaggtagaacgcgaacctggaggccg

SEQ ID NO: 231186 - DNA, 68 bp, Homo sapiens
  chr5:77656465-77656533
  hyper
gtcgggtgggtgacgccgagagccagagagatgtcggatttcgacagtaacccgtttgccgacccgga

SEQ ID NO: 231187 - DNA, 400 bp, Homo sapiens
  chr5:77805996-77806396
  hyper
tccagagcatcgagcgacaggtgacaatgacatgacacatattgatgttccgggcgaagaaagagtcaggagtccacggagttaatcaaaacaagaaagtcggtggggaaggaggctcgggcggcccgggaaggaagtcgcagctgcagtcattcactcccgccgccggccgcgttcatgctggggacagcgctcccggacccagagcaccgcctgcggcctcacctaggggagagggagggcggttagcagcgccgccaggccccgccccgccttcccgccgcgcagcgacaccgtccaagtccggcccgtgcccgcagaaccctgccagcaagccccgggcctggctagcatgccaggcggttgttgcactggctgcgtttgtttcaagttcttcctg

SEQ ID NO: 231188 - DNA, 122 bp, Homo sapiens; identical to SEQ ID NO: 199917
  chr5:78281720-78281842
  hyper

SEQ ID NO: 231189 - DNA, 804 bp, Homo sapiens
  chr5:78407584-78408388
  hyper
cccacgcccaactgcgggtataaagaggcaggctgcggactcggagcagctcggggctgcgcagcgggaaggctcgcctagtcggtccgcatccgtgtcgaccacctgtctggacaccacgaagatgccacccgttgggggcaaaaaggccaagaaggtgagtctccaggggacccgagggcgctctccttcccctcccacctgctctgtatcccagcctctgggagcgcagaggggccctcggaccctgcctggtacccatcatcctcctactccctcccctccctcagcctcagaccagaatgtgcttccagaacttctccagcaggaccccaaggcgcctctgagcctccccactcctgccccacgttcagagcgcgcccccagagcgcctctgtcccctccagccccagcccagcttggaccagagtgcgccccagatctatgtgatccttgcctctcagacccaaaggcaccctctgagccctccctgacggctgggtgtccccagaactccgagccttccaatatcttctgaatctggcaccccaagaccagaaaactccctagagatactgctcctagccccgcaggcgcgatatcccgtccccacggagcccctccgcatctgtgtccgaggccgccgcgagcgccctctgcacccggcgcgcccagaacagggaggagtgcacggcgctggctccgacatttcccgcctggatctgcaccgcgggtgtcggggccgcctccccgccgggttctcgctgcacccaaggcccaggcgctggttgggtgattgcagat

SEQ ID NO: 231190 - DNA, 210 bp, Homo sapiens; identical to SEQ ID NO: 199918
  chr5:78531492-78531702
  hyper

SEQ ID NO: 231191 - DNA, 1561 bp, Homo sapiens
  chr5:78531954-78533515
  hyper
gtcgaatggcaacattgtggcgatgctgaggcgcagagtttaggagacgggttcatcagtcaggccggctccgggctttctgcagcagcaccaggggcgggggcggggatcttgacctgggcgagcgaccgggacgcatacagcgccggcctgaccccgcgggacccgcgcctcaccaccggagcgccgcagacgcagctccacggcctcgcgcggggggcggcgggcggccgcgaggcgctgcggcagcgcggagcttgtaaacagatccggccgcaggtgaccatgtgaactacctgctcccgggacgcttattgtccttctctcgatccgcgccacaaaggagctcggcggtcggggcgcggagggacaggcgaacgagccgggagagccggccggcgcactaagatggctgaaggcgcccggcgagggtgagcggggggcgcggcgcagccagcggggagtcctcgggcgggccgggccggcggcccttccccgcggcgagaagccggagccaccatgtcgttcgcgctggaggagacgctcgagtcggactgggtggctgtgcggccccatgtgttcgacgagcgcgagaaacacaaattcgtctttattgtggcctggaacgagattgagggcaagtttgccataacctgccacaaccggacggcccagaggcagaggagcggctcccgggagcaagcgggggcgcgagggggcgccgaggccggcggagctgcgtccgacgggagccgcgggcccggcagcccggcgggcaggggtcggcccgaggccactgcctctgcaactctggttaggagccccgggccccggcggagctcggcctgggcggagggcggctctcctcggagcactcgcagccttctgggggacccgcggctgcggagtcctggcagcaaaggggcggagagtcgtcttaggagcccagtgcgggccaaacccatcccgggtcagaaaacatctgaagccgacgatgcggcgggggcagccgctgcagcagcccggccggcgcccagagaggcccaggtgtcctctgtacggatagtgagcgcctctgggacggtctccgaggagatagaggtgctggaaatggtgaaggaggacgaggcacctctggcgctctcggacgcggagcagccgccgcccgccaccgagctggagtctccggccgaagagtgcagctgggccggactgttttctttccaggacctgcgcgccgtgcaccagcagctgtgctcggtgaactcgcagttggagccgtgcctgccggtgttccccgaggaaccttcgggcatgtggactgtgctgtttgggggcgcccccgagatgaccgagcaggaaatcgacactctgtgttaccagctccaggtctacctgggccacggcctggacacctgcggctggaagatcctctcccaggtgctcttcaccgagaccgatgatcccgaggagtattacgaaagcctcagcgagctgcggcagaagggctacgaagaagtgcttcagcgggccaggaagcgcatccaggaggtgagtgagt

SEQ ID NO: 231192 - DNA, 35 bp, Homo sapiens
  chr5:78908116-78908151
  hyper
tccggctgtcttgcgcctgcgcattcaagcaaagc

SEQ ID NO: 231193 - DNA, 45 bp, Homo sapiens
  chr5:79330929-79330974
  hyper
gactgcccatcttcgcccctaccctcgcgcgtcggggccgtgtct

SEQ ID NO: 231194 - DNA, 146 bp, Homo sapiens
  chr5:79551152-79551298
  hyper
gctgagttttcccttcgcccagacctgcgcccggtagtttggaagtcaggcttcgagacattctcaaaggtacagagcccacgctcgactacgagatgccaagcgcaacctgcctgggttgtttgacccgagttttattcagggca

SEQ ID NO: 231195 - DNA, 428 bp, Homo sapiens
  chr5:79551988-79552416
  hyper
ggagcaggctcgacccgggctcgcacttccgctggcgtcaggcgggtgggctgctgcgatcacttcccggttggggcgccgagctccggagtcggccgccagcctttgggccccacgctccgggtctggtgcgcggtctggccgcgctcgggccctcgccaaatgagagcgcagcgcctctccgccttcggatccagagaaagagcttgttgctgcctctaaaaggttggagccttagtaagcggttcctgcctttcctgcacagaccagaccgccgggtgctggtctgcgctctgccgcgcgccgactgggacagcccacccacgagatccttgttcctgaaatccctttccttccctcatctgccaagaaaactttcaacttttgggctctccgcgcctcccaagcttcctcgaatccctgggccc

SEQ ID NO: 231196 - DNA, 111 bp, Homo sapiens
  chr5:79703638-79703749
  hyper
cccgacctaaggtcgaatcatcaggcgtccccgtcacccaacaacccactcaggcacttccggtaagaaatctagtgcccttggctcggaacctgcgtcgtagtgcgcaag

SEQ ID NO: 231197 - DNA, 86 bp, Homo sapiens
  chr5:79704429-79704515
  hyper
cactgtccattcccgcacccatgcattttctcttggttagagaccagaaggatgcagtggccgtctttcccgctgcctttcctttg

SEQ ID NO: 231198 - DNA, 329 bp, Homo sapiens; identical to SEQ ID NO: 199921
  chr5:79783875-79784204
  hyper

SEQ ID NO: 231199 - DNA, 101 bp, Homo sapiens
  chr5:79865229-79865330
  hyper
tggtgccaaggctgtgcgcacctgagaagggcgggaaccggctgcccgcccctgtgtggctcctggaagcaggagctcctggaagctgcaaagggctccgc

SEQ ID NO: 231200 - DNA, 1117 bp, Homo sapiens
  chr5:80255909-80257026
  hyper
gttgtgcgcgagtgtgcgagcgcgtgtgagcgggtgtgtggtgcggccgggcgcctccacctccctgatccgccccatcccggcgggcgcccgagcagaggcagcggcccgggccggggcgggcgagggagggacgcgagccggggcaagcgggctgcgccaccgccggcgccgcgccgactttgccctttaaatcggtctccaagccgattacagctgagctcccacgtgacgttttaccttctgtctcccggagcgcgttgcccgaggacagtccttccccggctgccgccccagcccgccgcgggggctcggctcccgcaactttgggcgaagcggcggccggctcgggcgccctcgcggggccgcgctccacgcgggcgttgggggcttggggggctccgggggctcggccgggagggtggtggttagggcggagagcgtgcctcggccccagcccgcgcccctgccaccgcgcgccgcggcctcccgaaagcgggcggggtgccctgcgcgcggcgtggggaaagggggcgcccttcgccggccgggacctgagcggtcgcgccctcgagggagccagctgggccatggccgcgaggcaggggtgagaccggcggccacccgtgagccctccgcacccgcaccatgcagaagagcgtgcgctacaacgaggggcacgccctgtacctggcctttctggcgcgcaaggagggcaccaagcgcggcttcctgagtaagaagacggccgaggcgagccgctggcacgagaagtggttcgccctctaccagaatgtgctcttctacttcgagggcgagcagagctgccgcccggcgggcatgtacctcctggagggctgcagctgcgaacgaacgcccgcgccacccagggccggcgccgggcagggaggcgtccgagacgcgctggacaagcaggtaccgcgcgccttctctccgcggtctcccagccttgatcgccgcactcccttgccgtcctaatccggggatcaggggtcgggggtcgtgaaagagtgcggggactatgctccgaaatccccccgcgtcaccagtggcgggacatctccacgctccttccgatcttcatccagggattctc

SEQ ID NO: 231201 - DNA, 265 bp, Homo sapiens
  chr5:80597468-80597733
  hyper
gctctgggggattcgtgcgcggtaagaagctgcgcggtagcgcggtgaggtgaggttctcagccaccaaagctgcagggtctcgtcgttcgttccctctggcctggcggaacttgcgtgggaagctgggaggacagaaggcttagccgctgggtccctgagctggctggagcgcgggctgtctaggggcggcgacctcagctgttgggctccggctgctgggggctgtgcgtccagccgccctggaatccgcctgtgggtgggcc

SEQ ID NO: 231202 - DNA, 675 bp, Homo sapiens
  chr5:80689544-80690219
  hyper
caaacaaaaaaccccgcagaagctctctgggctcctcacttgtttaatggaatgaaggagtcccgagagccacacatttgggaaccaccggtctcggccatgcccagcgcgggcgcactgttgcaacacccctatccctggctgcgcagggttcagctctccgcaagtaccttcctcgccttcctaccccccccagcccccagccgccgccgctcccgcagccccggtcccgcgcctccccgcagccccggcgcccgcctacccgccaggcaggcggtggtgtcgatccacttgagcagctgccccgcgctcagctcgccgcgcgcagtggcgtgcgccggctggatggcttggctcatgaccacctcgccgggcgccggccgctccatggccagggcgagagcgctacgcctgcggcccccgacaccccaccatgcccgctccgcccgccccgccctccccgcccagctccagagggcactggcgccgcccgcccgggccgcgaacccctggccgccaggtggtgggagctgcgagtgagggggcccgcactgtcatcccaggactatcgcgagtgggggaaaaccagcgctctcgggtctcaggagaagtctgggaagtgcgcggggagggggctcccgggtagacaggtctggaaggcggctccccgagagc

SEQ ID NO: 231203 - DNA, 110 bp, Homo sapiens; identical to SEQ ID NO: 199925
  chr5:82372772-82372882
  hyper

SEQ ID NO: 231204 - DNA, 235 bp, Homo sapiens
  chr5:82373208-82373443
  hyper
cgtctgcccttctcgccctctccagccgtccggttgggcttgtcacggcaccgcctaccaagacgggcggttaagacactaggataggctcctctccaccggaaaaggcgggatttagatcacgtcccgcaggccggcggaagtagctgatactctcattggttgcaaaaccttgatctgtgaaagcgggcgttttggaagataccggaagtagagtcacggagaggtaggatcc

SEQ ID NO: 231205 - DNA, 804 bp, Homo sapiens
  chr5:82767179-82767983
  hyper
agctgcacggggggcggggaaatgggggtggggaaggagtgggagggcagtggtttccgcgagcagagcgatgttactgagtgagtccctgaatggggagcgctgctgtccccaagccgattggtacttcttgtcaggaagaaacgccaagaggtgggagtgcctggggagggaggcaggcggtccctaccgcaggcgcggggagctgcctttccgcccctccgcctgctttccaagcctggactcttaggagtggctgaagctgcggagcgcttttggagcctgtgaatgaaccctcctcctctccctcctccttcttctcgctgagtctcctcctcggctctgacggtacagtgatataatgatgatgggtgtcacaacccgcatttgaacttgcaggcgagctgccccgagcctttctggggaagaactccaggcgtgcggacgcaacagccgagaacattaggtgttgtggacaggagctgggaccaagatcttcggccagccccgcatcctcccgcatcttccagcaccgtcccgcaccctccgcatccttccccgggccaccacgcttcctatgtgacccgcctgggcaacgccgaacccagtcgcgcagcgctgcagtgaattttccccccaaactgcaataagccgccttccaaggtaatcacgtttcttttgttccccccttaaaaaacaaaaacaaaaaacttatagaaaaaaacccgcgagcttagaaaaaagaagcaattggtagaaggctttaattaaggcaaagagctgtaaggcgaagttaagaaaatg

SEQ ID NO: 231206 - DNA, 2360 bp, Homo sapiens
  chr5:82768274-82770634
  hyper
acagacaagtccccgaagccgccttggtgcaggccacctggtttcccagcccctggtgtgtggtcagtgcctggtgttcctggaaagccactcccgggcagctcctgacagtgcgacccggcgcccaagcagcctgggaccttgcgcggacctgaccccttcagaccgcaggcagtctgggaggaggtccggccgggggaggtgcaggatccccgccgtgtctctttgacgacttggggactgtcacggttctctcccggcgcccctgggttcttttgtcctgcacgcggtgcgaaggggccagcagggaaggagcagaggatggggggtggggttgttggagccccgcggaggtctgggaggcccctgggcgggaaaagcctgttctgaatcggcagggatgtgcaacaatttttctcaccctgaagagtgaaatagggtctgtcgctcccatctcaacaagcaaaccggcacccagagcgcactgcagacaaaggtggctcggggacccgaatcaggggcctctgggtcagtcctctcgcccagactacaggagtcctccgtttccttacatattccccaccctctcctagttctccgctctagttgagcaactttactggcaggtctagcggcagcggcgcgcgcgtgtgccgggagccccgggggacgtcctcggctggagcgccccaccgtcctgcagaggcgtgggcgctgtagggcgacatccctggtgcgtgcagacctagggcatccgggttgttctggcccgcggtctgtgtcactgggcgtggagcggtctgggtgttaggcagaggagagcggggtagaaaaatagtgtcatagcctaaactatttgctctccaatccaactgcgtctcggcaagtcctgcatgtccctgggagatgctgcgggaagggggagaaatctacacggcgcctggagagttgtcctgccgcgcgcacacccgcggcagagtctctctgggtcgcgttcctcatctttgtgtctccctctgtctccatcttctctgcctcccttcccctctcccagcctctgttctctctctctagcttctgcgtcccctcccccacagctgacaaatgaatggctagtgtgaaatccctgcctttcccgtgctccaaggcagcagggagggaggagcgagggaggcggtgcgctccttcggatctgcccccagttcagctcacaagacttgcagaacctagatgtctaggaattgggagttttgcggcgggtgtgggcgccccctgatggagaagtcccgcacaggcggagaaaaacaagccccccagaccaagcgagcatctttcacaaccttgtgttcaaggatggaaggccctagttttcccttaagtcattcattttgcactccacaatctgcggcgtacatctaggagtttggaggaccctgaaaaaaggtcttggtctgtgcaaagtgcagagatgccttctcgcgagtcggctggaacgcacgcggcgccctgggtccagttcgccgcttagtggacgaacgcacatggccagggtggagccaggtttcggaggtctagacgcgccaccctgggcgtctttaagaaagataatacacataccgtgctctcaaaacccatgaccacttgaacccaacgctagggccccgccccaggatattgcaaaagaagggctcctaatccaaaacttaaacttcctcaacttcagggcgggcgtcggacgggaaagtggagagaaggcgggcagtgggaggaaaaaagaaagggaaggaagggaagtggaaggaaagaggaccgtggaggggaggaaaaggagaaaggaacggagatggggcagatggcattcaaacagccaggaacggaccggaagggttcgtttcggggtttgggtctgaatttcgagactcgttttaggatactcttttccctttcccagcggcaacaaatgtgactgcagaggcgtgccgggatggaagggtgggaaagaactagacaagcggaggtggtccagccccgcccaaaggggctgggtctggggcccgcccccactcgctcacctcgcgccaagggaggacccgcaacgggcgctccccgcagcggctgggttagccagccgccacgtgggttggcgcttcggctcccagccgagacgggtgtgacttcctgggctcagagactgcagtacagccgcacaggcggccggcgcagccgaggcccccacccaccgaggccaatgggggcggggcggggaaggcagggcccagcttaaccgagagagccgagtggcctcgcccccaggattcggggccggctgcttctggagctgacccgagttccatccagac

SEQ ID NO: 231207 - DNA, 171 bp, Homo sapiens
  chr5:83018266-83018437
  hyper
caatgcaggtggccggtgtgcagatgagccagcgcgcggggtgcggccgccgggatgcccgatccgagtcgcgcgggtggcggcgagcggcgctattgtcttaaagataaagcctaagccacggggactgcctcctcctggactctggagagaggcgggagagattgcagg

SEQ ID NO: 231208 - DNA, 2639 bp, Homo sapiens
  chr5:83678127-83680766
  hyper
gctgtgccctcggcgcgggtatcttcaggagacagagctcctggctgcagcgagccgggacttgccgcgccccggggctccctcaatcagacccagccaggcaagcgcggccacataggcaagcgcggccacataggctagacgcactatcttctcctctaccccgcgccgccctccacctcggagcggggacgtacggtggtggcggtgacacaatgcgagtgagtgggtgagtgtgttttcgtgtttggggtggaaacgtaggcggggaagagaaggaggagaggggagtgcctgcagtccttcccccttcccttcctgctaagagatcaaagtgcagaggaaatccagacgggaaatgagagaaaggaaaaacagcagccgtggaagcactctcttttttatatcgctggagactcggccgagcaactactggaaccattaccatttcttaacctttagtggagtggctgcctttgcctattaactggaagggcactttgtaaacgcaggcgaggcacacacctacacacacgcctacacgctgggggaaaataaccacattctgggggacggagggaggcccaggcaaggcgcggccatggatctctactgccagagctgcgagggcatctggccagcaacacccggcttcttgggcgaacagtcgcccaagagtccacaattttcttgtgactcaaatagatggataggtgcatggatggatggtgcagaatattcatactctgtctaatctcaagtggactggagtcaacgcatttttaaatccatctaccttttttagaggcacagcatttaaaaccctgtagttcactcagctttccacttgaagctgcctgcagaggattctattacccgcggatccctcacaaggggccgcccgcatctgtgagcgcaggagtggcacagctcccccaggcacagctcccactcgcctccccacacaccctgctgcccccgctgcccttttccggcgactacttcagccccggccagcggtgagacccaggtcagcacaagggtttgtatggacaagctgcacctcgcaggggacctggaagtcgcctaaactactccagcaggacactcgtcgaagtcctgcgttttcttttaaatgcttttttctttttaatttaatttgatttttatttttctgtttttattttttcgtgcaattcacagaaggcatcaccctacaagctctcacaacttttccgctcctgtgcggggacgcgaggggtggcttgccccgcactattccccattaccaagagttaacactggtactcggagggggtgcgcagctaagctccaggcccctggggtcagactaggagaggcgggttcctggggtttgctgtaatcgatgctgctcctctgggatggggaggcaggagaaagctgaagtgacctgtgagactcctctccacctcacccgcggccaaaacgcccagcgccgggtctgggtttgcgaacggctcagcccaggccctgcgccagagcaccgcacccgggggcggacggccctgcagctccccagcctcttcccgcatcaactagctgacgcccgggcgcactggcttcccccgctcccgcccgcacgaaagccctgcccgacgtctgcagtcagcatcgcccgcactgcctagggagggtttgcgccgagacccagtggccgagtgagccacagagtcgctggtcctggggacgctgtcttctaccgctccccaccgtcctcctctttcctgtatctcaccccggtaccccgcacccttctccccgctcggccccgcgcactctgctcagactttacaagcactttctcggggcacccaggactcgacgcctcctccgcgccgccagcggcgctcgccacccttggcacgccggagggaccgcctccggccccctgcgcggcgtttctcaggggactcccagcccatccctcacccagctgtccgggtcccgacgccttacctttgccgaactgggggacaccgaggctgagcccgaccaagagccagacggctaccgagcgcttcatgatcccgtctcccggacgtgaccccggctggtcaggggtcgtcgcggagggcagtgtagccgaggtggcagcgcagggcagcagcagactccgcccctactaaagaattcaagaagacgttctctttcctcagcgctttgttaaacaaattcttggagagggcgagagtggtgactaaagagaggagcctttcctccccttttgcctgcgctccggcgcgcggaggtgggtgagctccggggagccgccggcgggctcagccctccgctgcgggtgggtcccggcagaggcgcggcgggcggggcgcgggctcccgcggccgccccgggtctgctgcgcgggcaggcagacccaccggcagacaggcggaccgggcgctcggctgtcgctgttctccgcgcggcggctgcggggcttctgacttggagaacaatgaagcgtgagctggaggggagcgagcgggccgccgggagcgcactgtgtacaaacagaggcggcgtgcgtgtgagtctgagcctggcaggcgcgctccccactcccccggcgcccgcccgccctccgcccgccctgttat

SEQ ID NO: 231209 - DNA, 148 bp, Homo sapiens
  chr5:86564357-86564505
  hyper
tcccgcagtgtgtcgggtgaagatacccgcggccctgcctgtggcagccgccccctatcctgggctggtggagaccggagtggctggaactctgggtggcggagccgctttggggtcagagttcctaggagccgggtctgtggcaggg

SEQ ID NO: 231210 - DNA, 393 bp, Homo sapiens
  chr5:86708645-86709038
  hyper
acgagaacccaaacgcatcagcgtcctggcgtaaaacacccgtacccccaccgaagatctcgcggaagcctagggcgtccggctagccggcgctggcgcgctgtcgtcacgattacgcggccagcccgtacgcagttgcatttccggagcggactaggaacagaccgtatcccgggttcgttagggcgcccactgagacgtaagtgggcggagcctagagaacgctcctctcggtgagtctgggacatagctccgccccttccaggcaagatttaaaggagaagcgcccggcaagagtgttcaaggggcataaactgagggtacggagtaggcagatgtaaattcacaggggataatcagaaatgaggaaaggatttcgtagggtgctcattt

SEQ ID NO: 231211 - DNA, 594 bp, Homo sapiens
  chr5:87436529-87437123
  hyper
taacagtaacaaactattcccggatcttgttttttcttttcttttcatgggtccccgtttgcgctcttagtcggcttacccgtcctgttccaggagccgacagggaacagcccacctggagcaggtcttgggccaccactcgccccgccccccgtctctactcctcactcgctctccccgctcctattaagcagccaacgctgggtgatctcctctccagttcttcgtggtttcattgtagccttgatatacaagacaaatgcacactttactctgggcttaaaaaaccatctatcatcatcctttgggcatgacaaatacattgtgtgtttcagagaaattaatctggtatttagggggagaaaggcatttccaaccagtctccgtgcagaaccttcccgcaaaccctgtagcggcatttttcgacacttttctcctcctttcggcaagcctcaaacttgaccttcgagaggattttaagggtagagccttcctccctttccctcgtctgctccaagagctcacgtaggccttcttctgggaaacagcggctcaggaccagagctcggagaactgcgcgtccaggagcgcggg

SEQ ID NO: 231212 - DNA, 162 bp, Homo sapiens
  chr5:87437363-87437525
  hyper
gtgattggctgatggccgggggctgggtctgagaggcggcccctgaatggtttaacggaggaaattacaagattcattcgactaaagaaagccggggcgggcctggtcggcgcaatatgcagcctgtccgcaagggggcgcgatggcctatctttgttctgg

SEQ ID NO: 231213 - DNA, 44 bp, Homo sapiens; identical to SEQ ID NO: 199932
  chr5:87437944-87437988
  hyper

SEQ ID NO: 231214 - DNA, 175 bp, Homo sapiens
  chr5:87438273-87438448
  hyper
tacacacacacacacaaacacgcacacacgcacgcgcgcctgcgggcgggacacacccacagcctatgtcctccgcccacgggcacgggcagagcaccgatgccatcaacagcgctcagtacagttgtccagaaaacaccaatgcgagaaaaacgaaagaaacccaccctattca

SEQ ID NO: 231215 - DNA, 79 bp, Homo sapiens
  chr5:87439124-87439203
  hyper
ccctttttgaatgccaatttcgttttcaggcaattgcctctttgccagccaaaagatcgggattggatcaccagggcta

SEQ ID NO: 231216 - DNA, 263 bp, Homo sapiens
  chr5:87564866-87565129
  hyper
gtggctgcgcttgcgaggaccctgaggtagattgggtggtttcaacaggaacgcatccactgtctgagaggtgacggaggcacacgttggtgtggggagcgggaggggagagggaggggggcgggtggggggcgggagggggccaggggtgggagtgagggtgcgcgatgggagtcgactccagacccaggtgatttagagagagtaaagaccacctttggccgtcattttgtctcagcttaactgacgccctcttgttaccc

SEQ ID NO: 231217 - DNA, 580 bp, Homo sapiens
  chr5:87955350-87955930
  hyper
aaacagtaatcagaccgaaagtagttgaggaagcctatgacaggaagttgttaataatatccttcgaaatttacctgtgaaatacagagcttgactacttttgtaaaagtggaattgaaagtaaacggcctctgtaatgcaaatcgaccagcagcaagaaagccactacctttggagtcccacgacttcacctgagcttgcaatagaccttgtgcgccctttggttcatggaatcaaaactgttttgacatgttggccagtgcccttcggtgtcactgaagctcagcccgcggacggcggtgtgtcagtgtgcaccgggaggcctgggcctcagtccctgggctcgtgcctacgcaacagcaggaccgcccgcggcctcccaggaccagtgaccgtcacccgcagtaaggatcggggcggctccgccagtttcggccctctttccaagacctctttccaaggcgctctttcctagcctcacccgagggccgcagagccggacctgtgccgggcgagttggatttagcccagttagagttaagatggtatcattagctgcgcacagcgtgacttcccgcta

SEQ ID NO: 231218 - DNA, 1115 bp, Homo sapiens
  chr5:87956179-87957294
  hyper
ccaacgccggccaccgagcaaaacttccccgcccccgccccccacccagcttccccgcagggagaccctttccgttagcagcttttcactaagttaataacggtgtgtgtgtggtggtggcggggaggggggatttgggggttacacaatatctatatcaatgatattgatcacgtccagggaagaagcctgggcaaaactagagacaccgagtgtcagcaaaagaaagcttcttaaccacaagttgcgtgccgcctgaggaaggtgccctgtggcagggggtggccgctgggagatgcctgcctctaaccgacgtccaggcgtgactaaacctcgacgccacccccattcacaagctcaactcagggattcccaagcaaccgcagaccggaggtggcgcagaggcagtgaccgaggtcgctgattaggggccgagaggctggcaaataataattttaaaaaaaaaaaaaaccggaatagccttcgcggacgcagctcagcgtgccaggcaaaggacagtctgacgacccgcccctgccgagccccgcagcgcggcgccggtgtccagcagcctccaaggcgccgagcgcgggcacgggaacttgagctagcgcaaacttgggcggcctcccagcctgctacccgggccgcagcgcgcccccggcctcccagtcgcgcgccaacccgggagcgcgcgcgccggcgcaccagctccatcagctagaggagcccgtctcccgggaaacaccaatcagacgcccgctttcaggcgagggccgcgagccgcagcagctgcaggaggactcgggcagttggcggtcaccgggaggcgtcgtcctgccccgcggcgggccagccgccttcgctgctgccactgcctagcctaaccgcatctgcagccagtcacagagtcggctgtctcctctttgcaccgcccacgccaagtaccttgcaaggcggctgctaagcctggctaattttagatctccagaatgcgctatgcccgcgctcaactaaaaccaagtcaaaccatcaagcacagtgatgtgctgctttttgaacaaatatggctcaaaactccgtatttccctgaataaagtcgattatctgcactt

SEQ ID NO: 231219 - DNA, 1104 bp, Homo sapiens
  chr5:87962610-87963714
  hyper
ttctggtttttactgtctctcggctgtagtctttcattctcacacgctccccggcgatcttgaaggagtttttactttcggttatctagctttatgaagaccaatacactcatacagctagataaccaaagataacaactcgcttcccacacaggcctctgtcttcctcttgccagactccaggtcctgatcctttctggcagtaccgaagagtggtcgtccaggatacttgccgcgcttaagattcctccttttatgtaaatatgacctggtttctgtttgtgtgtgtgcgcggctaaaacatccaaacgagatctgttgccttcagagtttattccgaacttttctttttcctttcagcaagtaatctccggcagcgttagccaacaattcatctattaatatcagaaaataaaaccagctattaaggtgcagcaagctgttacgagtgagcagcagcatccgtcccttcacaggcctctatttgcattgtaaattgcttctttctcacgcaagactctttagcctctctctatagagatgtataaagccaacggcaatttccagcgcaggttaaggaggaaggaaaaaaaaatcccattctatagaagtgacagctgattcaaggatctgttcctgatcctttttggttaggcaccatggctttttaccaagcggtggcagcttgattgcacatatcttgtgtgtatgtgttttagggggaagatcctcgatttcacagggcttctaggctgggaaggagaagatgccgtcttgctggcctgctgctgcccccggtctgaaagaaggagaaaagggccatcattggaggggctttcactgccaaattgtggaccagcccggcaaggtcaaaggttcgagaccgcgggagaccaaggtaatgatgatgtcatgagaaatctcaagtacatggttattgatatgcatcagtgatcagccaactgccccacgcctgctgcccgagcagcggcagcgacagcagcagtagcggcagcattgcaacaatccctattttctcaatcaacatctcttccgctagcactaccgactgctcctggaaaagcaacccgcggccttttacct

SEQ ID NO: 231220 - DNA, 359 bp, Homo sapiens
  chr5:87967774-87968133
  hyper
agaaagggaggaaacggaacccgactctgcggtgctgggcccaaggcagccacagctccaaaggggcccccggccgtggccgtgacttgacagagcctccggtctaacttctgatcaattccactgctctcctgacccctcaagacagtcccccattcaagcaccgcgggtacatttgcaagataaaacgccgcagacactaatgcaaatacattgcccgagttcccatcaccctgggttcctgcagataattccaggccacagaaaggagttcttgccttcctcagccgggtctagactctaagcaaaccgcaaagacctagctccgtttggataccagaagcgtcttaagctgaacc

SEQ ID NO: 231221 - DNA, 238 bp, Homo sapiens
  chr5:87968621-87968859
  hyper
ctgaagcaaagccccggactggccctcggagcggcccgcagcgggactctgcgggcaccggctagcgggcgaggtgaggagtgcgggcgcggggccgcggcgggcactgctggcctcgcgccgcgggcgagctgcagcctgagggccgccacgatactcacttgatctccctgcgccaggcaatgctgccccccaaatccagctgggcaggaaccgaggcgccggctgaaagacaaga

SEQ ID NO: 231222 - DNA, 2270 bp, Homo sapiens
  chr5:87969872-87972142
  hyper
aatgtaccagggacgcgccataggggtcatctatttgaggaggaagaaaaagcgggtgtgtgtgtgtgtgtgtgtgtgtgtgtgtgtgcgcgcgcgcgcgcgcgtctgccttccacggaaagagagacggagagatgtgggagggtgggggtggaagtatgcagacagagaagggtgggggcttcgaggggaaggtgggcttcctgcaacacaagcggagaggctgtcaggggtgtgggcacgggggtgcggggaggcggtgcaggaatccgtcccgccgagtgccgtcggcccctgtgggcctgtttgcgcgcctggggctggccgcattctgggcgcgggtgtctgcgtgccggggtggtagttccgagcctgcgcgcgtgcgaccgggtacgggagggggaagagtgccgtaaaaattcagacgagtggcccgtatgtaaatgcagcccgcggggagcagggaggcggtaatgacagccgctggcgctcagccccgccggcggcccctagctttcccgccaagtgcagccggaggacagacagccatgcgtgtccttggcgggagagcccccacccgccgcgcgcgcccgacccccgcgcacacgcacacactcccctcgcaggcgtggggcccaatggccacgaacatgtcaggaaaacaaagctggggctgcgaggtggaacgatgaaacggcacacttggcggccgagggcagagcggagaagtcgccaccacagccaccggcgcccctttcttgcctgctcgtagatctgccctccggcccagaagaggccgaggaccatttcttagctgccccagaggagggggcgagcagaggagggggcggatgtgcacagggaggtgccagcggtccggtgcgcgggcacgcacacgccggcgcgcagggctgccgcgggcggaaggaggggaatgacaaggcctcggccgcgtctcggagaggcactacctccgcgctgaggccgctgagtttcaagtgcaaaacaccaggccaaatccggcaaggcggcggctacagaatggctcacacttcaagcctccttcctcaaacaatccgatgggaaggacctggctgttcaggggaagcctttgctggcctctctttttacatggggtgaagtcgaaccccaatctaggagccctggcctagatggctccgcagatgagtcccagacgtggccatggaaagactgatctctctctgctcagagcgcctgcctcggtgctcactagcgcaagcacctcccaacacacatacatacatacacacacacacacaacacagcactcccatcacattaaaacgcgcgctcatgatcctgccgttaatgaagccgaggcgcataatgagtgcacaggtaaataggtaccgaaaccagaagacttcaccagtcggctgggcgatttacctctccctacagggagcacttgtagttatcgtgttttaggagtgatttgctgttgtctgtggtctctcgctcctcttcttgtggagagaagccaaaaaatatatatgttccgtggtcagagtcttctttctgataagctacccgagcattggtctaaaacatctgttttatctgttgattttggtttgttgttttggggagtgttgcttttctgagggaagcaaaagaacgtgtgtgtggtggggctggaagctcagggcaagagtctgcgtgtgcggccggaaggctggcgagtctgagagccgcgcggtgcagaaagaaggcggcggcttgtcctcccccggggccggcactggtcccttggcaccccggcctgggctcggctactgccgccgccgcccgcgctctcgggctccgccggctgccgctccgtgttttcccccatcccggcttcacgttcaaggtttagctgcgaggtcacgtccattgacgtcagctccctgtctccctctacgtccggctacatttacatacatcaaggaaattagggcattaaaaaaatatgcaaatcctgcgcgaagaggagcgggtgcattcctggcgcgatcgccttttattgaagcttttaattaaaggggccagttggcgagcccctgaaacaaccgccaaaaccccccaaaagagaaaaataaacgctgtagccttcgagaacggttgtttcggctcctgttctgtgggcggctgaggaccgccggctgcccggctcggagaagaacaggttagaggaggcagctccagcccatgcataatcagggctccgcggcgcctccattctttcc

SEQ ID NO: 231223 - DNA, 124 bp, Homo sapiens
  chr5:87974355-87974479
  hyper
caaccccccgccccgcattaccatatggaggccgagtccctgcgaatcacagcagcagcgggaggtatttgaataagccccgcaaccccgcgcagaccccaactcctccgagagcagcatgccc

SEQ ID NO: 231224 - DNA, 946 bp, Homo sapiens
  chr5:87975971-87976917
  hyper
ctttctgtagctagctcccacgaagctgggattttcaacctcttgtttattcgtaaagcccatatggaaccccggttgaatctcccctcttcggattttaccaggaggccctcagtgccccaccgccgcccatggcacgtgaagagaaaggagggagagttgggagccacgagagaagccggctcggagccgcttccgtcggggcccatgtttcgccccaacagacccgtctctcctttctctccccgaaggtacttccttaggccggcagtgtcgctacggtggtagccaggtgagcacgggcacagtcccggggcgggggcgggtagagcggccctctctcgggagctccggtgggtctgcgaacctgccgggagcggaaggctgagtggcgctgggggcccgcgcggggctcctggctcccgccggcaggggaacagcgacacctactggccgcatgggtaccgcgcccgggccgtcagggctgccctgggacggggtgccgggctccgtggacttgggaggccgcgggaaacttcaccgaaggctctgcggactgctctaggactcgtccgccctggagaagacaaagccacgctttctggagacccctgggaggactgtaggatggaactgaacacacaggcacacacgcatgcccattttttctggggaaccggataaaccctcagatgcagttgcccaccgtcccttggttttatgagagagacccaagcagaggtcggagccttgacctcctcaggttcatgacccaggcctcttcaccgcctttcccagttcagcactgactaaagaagatatctttacaaattaggaaaagaaaagagttcattatcctccctgaagcggggaaatgagtgagtcaaagacacagactcacaggcagcggttggcgccgggcacacgaaccggccgagccctcctg

SEQ ID NO: 231225 - DNA, 451 bp, Homo sapiens
  chr5:87979353-87979804
  hyper
tcttttgagtggggcgaggctctagctttcccctcctcctttcttgatctcggcaaacaaaaccattctaccacttgagccatctgccgcaggtgtaatggatggcagggggccgacctaaccacactccagtctcttctaggtcgtcaccgctctgcaccaaacaaatgagtcctgtttcaccactagggtgccgaggtggatggtggatgctggcccccgcccctggcagcgctcagcccttagaaaccagagccagctgacaacacgcgaaacacacaggcacagcgaaaacgccgagccgacgctcattccctctgccccctccctctgctctctgtaacaaggaggacacgtacacagcctttacacacttaaaagcccttgcgactccctctgaattcttagttacttatgacggccttcctcactgcacatagcccctggggtg

SEQ ID NO: 231226 - DNA, 631 bp, Homo sapiens
  chr5:87979864-87980495
  hyper
cgcgcacgcgtgaatgtgcatgtgtgtttaaaacgcttattggtaggtcatcagcagctgatcagacatggtaatccaataatttttttgaatacacacaatttttcgttgaagttaatttttttaaagaaaaatggaaaactattaattttctgcgcaagtctagggttcccagtttaggttccagagaacagcagatctgcgcagcccccgccttaccaaactttccttttctagggtttgaaagaggctcacattctcacttcatgacagagcagcggctcatttgcacgcgggtgtgtaaaggagggagctgtcgaacgcgcgacttaggaagggaaatcggatagctggagccccacgcagtcgctcggaaccttggctggaggcacaaggtgcccaggggcaagagcccggggtccaagcttccaggcgcacatcatcctctgggccccgggccctccggctggagcactccctcacccgcatcccatccccgttccattttgatcattatttgaatagcccaggtaagggtgcccatctctcggctatgggcgggggctggaccctgacaggtacggactccgcgggaccccagtgtgcttacctcgagcgaggccctggcaaa

SEQ ID NO: 231227 - DNA, 411 bp, Homo sapiens
  chr5:87980868-87981279
  hyper
tgggatgggacggcgaggaataaattgctccccacccagctgcggtgcgacgcccccagcgtcccaggggagccggtgcgtcagctcacggctggccaaggcggggccgtacaaaagctagcgccgcgggacccccttcatgggcttctaccctagcagaccgagcgctggaggccgctccacgcgcgagctcgaaccacggagggctctcagctcggacaagcgtcgctgtctaagagctccaagctccacggaactttgattttatgcccgggagcccggtcatccacttctgcatctcagacaagcgccggaggctcgtgcagcttcctcgcgtcctcttcctggacgcggggcgcccaccttagtcatagcccctggtcccggcactgctcacgccgtcggtttccc

SEQ ID NO: 231228 - DNA, 217 bp, Homo sapiens
  chr5:87982594-87982811
  hyper
gaggatcatattttaccaacccaggtggtgttttaaaaattctttcaggcaacagtgataagagaggaagcaaagagcacgcagacccccgcccagcccgcacccgtgttcccagtgtctggagcacacactctaaacacatcgggacccccacccccatgaattcgccctgtttgagactcagtttctgaggccaagagttcgttctcggtggatc

SEQ ID NO: 231229 - DNA, 269 bp, Homo sapiens
  chr5:87983366-87983635
  hyper
aggttctatggtgccggcactgaggagtgtgctttaaggttatcagtcttataagcaccacgtgattagacaggaaaggtaacttgaaaacacaacctgattctgagcgaaatcattttgtcctgttggcatgaaaatgtagttacacctccaagttctgctcaggaacagacggctgcgtgtgggggctggtccctacccagatcagtacaggatcttcagctggcagacgagatccagcaaatggaattcacgaagaaactcatgtg

SEQ ID NO: 231230 - DNA, 59 bp, Homo sapiens
  chr5:87984578-87984637
  hyper
ggttcggggggctccgtttggctaatttttagagaactgcttggcggaggctgctcgca

SEQ ID NO: 231231 - DNA, 127 bp, Homo sapiens
  chr5:87984847-87984974
  hyper
tcctcgtcccctgcgcctgaaattcaggtcgcctgcagctacggcctcaggtgagtggctcagggaagggtcgctgaggctcttcccagggcccccgggcctctcttgggccgctccctgggagtgc

SEQ ID NO: 231232 - DNA, 39 bp, Homo sapiens
  chr5:87986628-87986667
  hyper
cggagccgggccccgccgaacctgcgctcgcagagaatg

SEQ ID NO: 231233 - DNA, 445 bp, Homo sapiens
  chr5:87986873-87987318
  hyper
cgggtgttaattaacgcgctaatttgagcttcaggagcgggaggcggccggtagcaccgcgagccgcgaggggccagtgacctctagtggacatgaggagatatgcagcgcgagtgagcgtgtagcagagaaaactctttcctgagcagctgctcgcgtgtctcctctgaatccaatgcaagggagggacacaagtccccaatttaagggagaaagagccgtcagcaagtggtgtcgaccaaagaccttagctcttctgatgtatctgaaatctaaacgcaatttaagcgcgcgtgcacacacacattgttacttatcagtttttccagcgagagaagaacatatggaaagggtttgagaagtgagcgtgaataactttggtttctgaacctagagaaaagcagggctttcaaagctccggaggcaccagcgattcaggggaagg

SEQ ID NO: 231234 - DNA, 931 bp, Homo sapiens
  chr5:87987787-87988718
  hyper
ccagtagaatcccgcgaccccacagcctcagcgctcagggttccacggtccagtacaggctaaactgacctcgccgacggccgcgcccacttgggcacttctcccgggtcttgttctacgggcgtttgaggatttcttagtctctttcttccctggcactcttcctccgaggccagaagtctgaattactagcagctaccagccgcttggagcgggaacgtggaggtgatcccctccccgggagtagcctgtccgtcccagctctcctcccttctgtgcctggcggttttgcggtacccgaatctgtcctcaagggttgggggaggggtggatatggggggatcagagacattaccttttcccaaactgtgagcacagcccgcttggggttggtttcacatcgctcaggactggggttccacgcctggagcgcagttaccttgttgcgcccgcatgtgcctcgggaagtgcatctgcgaccctaggtcggggaccaccgcgttagtgagggacagccgagtcggggggcagtctcccctggtggacagtatgaagtttggacagcaggggaaggaagagaggaactggaggttgggggaggctagagagcaacgtttgctctctgaacttttccttctcccctttgcgccttctgaaatggcctgggagttagcagaggtcgggaagctgctgtaagagcgaaacgttgccccacttggcggtgtccaggtctcgcagtaggctcgggtcacaggagggagggggtaggggttcagctccgccgaaagagttagctaccgtcccctcctttctcggccggagacgttaagagttcccggtgaatgacaccgtccagggtcagaagtcagtggtggctatactcggaataaggctgacagttcgcagtgagggaaaacgtgtaacctggcag

SEQ ID NO: 231235 - DNA, 231 bp, Homo sapiens
  chr5:87988974-87989205
  hyper
tcacacacagcaaccgcctatgggagagcagtagttttccttgaccttccctacactgcgccccgggagttccccgtaaccccagagcagaaaaattcaccaactttggaatctagtcagaaaaacaaaacaaataaaaccgtgcggacccccaagcaaggattcactaacattcctaccggccttgcttaacctccatgcccccgggaagtggcgcgaatcactcttggc

SEQ ID NO: 231236 - DNA, 402 bp, Homo sapiens
  chr5:87989955-87990357
  hyper
accccccaccagcccccacccgctgggaacaggaccgacaatctttcccactttcttgtggaaaattttcacacgtacacacaaaatctggagtccgagataataggtgatgagccgtcctgggaacggtgtcgcaggctgaggatgtccaagacctggcgagtctcgggtcagaggagccggagggggcgacccgaggccccgcgccccggctctgcgctggggggtggtgctggctatttctctctgctcccaactattacatttcttttttccttcatcttggctagagttatacgttttatgtgtggggcgatttagaaaataaaattggactatataagctattctatatataaaaaagaacccgaaaagcctcgcgttttttctcttgtgttttcc

SEQ ID NO: 231237 - DNA, 570 bp, Homo sapiens
  chr5:88178386-88178956
  hyper
ctaaatcttaaggcgtctacttcaaggtcacagaacatgctgtgaaatattaaaatccaccaggctccacacgctccaccatatcaaacatgctaatgacgtgaactaacttcatgaaactttaaatacactggtgtgacaggaacgagtcaggagtgatttcaatagctgatggcaaacggatacgactatctaaaaagttacttttagcaacaaacaaggaaatcatggaatctaacgaaaaagaatgcacaacgagcctcaacttcagccttcaaaaaaggcacagggatagatagacacagtgccgtggaatatattgatgcagattttagagacaatacccgggttttctatttcctcgagaaatatcaggggtacttacatgaaggaagacccgatcagattagtccttgggatattttcctttcttaagagagagagagagagaaaaaaaaaataacaacaataatctttacttcgtccagcgttgaagtgcttctccacctgattcaaacatgcagccacggcgacccacacagaaccttcaaagtcaatccaatagcagcc

SEQ ID NO: 231238 - DNA, 1221 bp, Homo sapiens
  chr5:88179188-88180409
  hyper
cagcggccggtcggattaaaagtaaccagactcgtccagaaaactgcgtccaggaaggaagtgacagaagacgaatgggaaaaggagaacagctcacagcgtttgaaacatcgcgtaaaaaagactgggggtggtgggggcgggggggattgaaggatactgggaggggaggcgggggtggtagggaagacggagcacgaatggttggggttctaagcagcacgtccgatgaaatgtcttttgcctccttttttccccctttatttaattttgtccttgcctttgcttcgcgctgcctttttctctccgtctctctctcccccacaatcccaaaccgttgactctttcctcgcgagctggagaaatcatcagtttcactcttgcaaaaggggggcgggactagacctcggagcattttaataaaacaaacatacagcagctccctcctcacccctccagtctcaactagattgataaattactccactacactactttaattatgtatatggtatgcagaataaatcactgaacatcagtacctcaatcaagcacttttaaatgataattgcatcttggtgaatcaatctttccattcctgacattttgctaattttagttttacggtggggtaatagcacatgccatacgcaaacctaatgacaattctttattgcacgaaatgaagacaacacggcgagctgcggctccctgctcctctcgcggcgcctctgcggaggacgctcggagagaacctagtctcccgctgcggcgcgctcgcttgctctccggggacgctgcgagccagccagcaggaaagtccttctaaagtcgggatctttcctctgaccaataggagcgcgaccctaatagttgctcttgtgacttttcccccttttggacacgcgttagccacttctctcttccaccggtcggtgcgctcctccgttactcacgcgtaaaaaccacggtccaggatgtctgcagcactcgattccagcgtgcttttcctgcacgcccagaagtcgcggttttcaccctgagaggttggagcgctagaaagcgagccgaaaggtttctctaatgttagtaatgtacgaaataataaaataattaccagtatttgagatctcgacttcatcgcggggccatgaactttctaatcagtttggaaatatttaccgaggaagcagcttcctcggagttccccccctcccccca

SEQ ID NO: 231239 - DNA, 991 bp, Homo sapiens
  chr5:88184853-88185844
  hyper
taaaaaatctttacccggggttgtggtggaagtggggattaaaaatctcgtcctgcgttttggtgcccacttctttgtttggaaagcagagcgctgggactcaatccggacggccctcaaagacccagacgagggacgcctctagtttgagcaactcactccgctgagttattgattgcaggcagcaacaatccctccggttgatttgtgtgaaaagtgaatccgctctggctgggcgttcagcagaggcgcaacagctgcaacgccatccaattattgccgatcctcccctccaacactgctctcatcacctatatactcttctctctgcccgtctctgcttccccccccttccccccccccttttctcccggccgacggagctgaaggggcgggggttccttccttggagtgtttctagagctcggaggctgctggtagggggtgagtgcgccacgtgcgtgcgccacgggcgagcaggaggcaggctctgggccctcctggggacctgctggacctgctggacctgggtgcgacgagtgggcggccacgctggtttggcgcggggaaggaagggggtgtgccgacttgtatttagttgggggttgtggaagtcacggctgggggaaaagcgtccggtggtttgttggtaaagagggtgcgtgatgggctctggggaatggaggagggcgcaacggctgtgggtggactgtggaaacgggcggtggcagtgccggggtagttgtcctgctggtctggttttgggatcctgggctggagaaatgcgatccaaaagagctcgggatgggctcagagcgacccacgaaaataccaggggccaagtaaaatgaacccaccctttaacagtgcacaaagcgctggcacacggtccacgtctggtgacgcaggctgcccgaagcgctccaaccattttgcaaacctgggagagcaagaggggctctgcaggtctagccgccgcccctgtcccact

SEQ ID NO: 231240 - DNA, 73 bp, Homo sapiens
  chr5:89705880-89705953
  hyper
tctctcgtaaagccgtgcggtctgtgggccgccattcagaaactggatggacagcttcggcggtgggaaggga

SEQ ID NO: 231241 - DNA, 43 bp, Homo sapiens; identical to SEQ ID NO: 199942
  chr5:89770671-89770714
  hyper

SEQ ID NO: 231242 - DNA, 783 bp, Homo sapiens
  chr5:89854217-89855000
  hyper
ccatggtgagttccttgtgccgaagggggcaactagaaagtttagccaaaggagacgattagaaagcactgaccgcgcacttacattgggacgcccaggcagaggcaagactcgcgcgctcctaagccgaggcaggtcagcctaggcgcctggctgctggaagagtccattagggatggccaaggcagggtgttcccgacgccagagcgcggacctggctgcccgctgcggagagcagagtgcgcagcccggggcggccacccccgctccgctggtcaggtgagcgctgccccgggagccatgggtcctattggagcagagcgaggatgcagagggaggaggcaagggagggggagaaaggggaggaggatggagccctcctcctgatcctgtagtggtagtaagaatcagcagcgcgggcaaggagtacggacgggagtcagaggcagagcgagggtgtgtggagggccggcggggaccgccgggagcgcgcggatgtcggtgttcctggggccaggtaggctatggctgaggggtggtgctgcgagcatcgctgagccccaggggagcgcctcagcatcagcacctgttgctgcaggtgggcggcgagggcggcgcggagggcgggccacagccgggcccagggaggctgggcgcgcacccggcgccgcggcctgcgggtaatggggcatagctgcccgcgtcggttctgtccaaggctgcggttttgcagggagcgttaggttcctgcaccccctacccgccctttccaaagatgtctga

SEQ ID NO: 231243 - DNA, 121 bp, Homo sapiens; identical to SEQ ID NO: 199945
  chr5:90676143-90676264
  hyper

SEQ ID NO: 231244 - DNA, 49 bp, Homo sapiens; identical to SEQ ID NO: 199946
  chr5:90678446-90678495
  hyper

SEQ ID NO: 231245 - DNA, 283 bp, Homo sapiens
  chr5:90679120-90679403
  hyper
ctccttacaaagacgggcggctaaaagctgccagctcactttaagagcagctttgtgaaaaacaaccccagtgcgcaggcgcaggccgcggctgctgtccgccctccctgcgcgccccctcccgcgccgcgccgcgccgcgctcgctcccttgcccgctcgctcccgggtacagtaggtgtagagctaggggaaggagatactggagctgctggccggctgaacctgacttctcttcattgtgggctcctattggtaggcaggctaccgtataccctcgacgt

SEQ ID NO: 231246 - DNA, 394 bp, Homo sapiens
  chr5:92906253-92906647
  hyper
gccaactgcccgcgcggaaccgggccgtgggcctggggttcgggaagcgtgcgccacccccggtcgggcctggcttccttcttgaatgcccccggcgcaggcccggtgctttgtccctccggccttctcaaggagtggtggccttctgcgggggcgagagcacggcctctagccttccgccgacgtctcagtgcgcagataccgcggcccgggcccctccgccgcgcgggggaccgcactagcgtcgacctcccggcagccaaccccgcgcgcaaggctccgcggccggatatgggcctagcttccgggatccgctccctgcggggccgcgcttagggtcggagttcgctagtccagggaaaggggtgggaggggccctcggaggggcccctac

SEQ ID NO: 231247 - DNA, 264 bp, Homo sapiens
  chr5:92908611-92908875
  hyper
gatcctccgcttcccgcgactgccggagtcgcgctggactaggctgaccgcgcagggcggcgaggctggaagggaggtctccgcccgacaatgcgcaggtgccagaggagccaggaggagtgagaagcgccctagacccgcggcctcaagcgccatgcacgtcaaggggaagtgactccggagttgtgccaggaagaacaccaagaacgagctgtgcgtttttgcgcagagaagtagtcttcgcaagaccgcagctccctgccg

SEQ ID NO: 231248 - DNA, 1666 bp, Homo sapiens
  chr5:92914942-92916608
  hyper
cctccgaaaagccgcgggcttccgctgctccgggcatcaccaccaacagcttcccactcccacccctgggactaggacaggggacttcaccctcctccttccttccggaggagcccgcggcttcgcctgaggcctcgcgggcccaacttctccccaccgctagggtcacgccgggtcccaggggcctctttcaagtttgaaagctctgtgggggcacggagagcccacagtaaggatgggtgggcgcctctgctcccgggcaggctcagctgtcatcccgtctcgccttggccctcacctacagggcctgaccccgggccagcccagctaggcaaggcctcctcgcttccgagaccccccagcccccgggtgcagtccccagcatcggctgcccccgccccccgcgcgccctctgacgcaaacgcacgcccctgccccgcacggaggaaagcgctcttgttggttttaattgagcctcttcctttcaacacaccccctctgtccccacccctgggaggcgaccccctccccgcccccagccggctggcagcggcgcagggagtctggctcggctgctaggctgcgaatcccggtgctctctcgccgccgccgcaggttgtctgctcgggagagcggctcgatgtcccttttaatccgctgacactatcgcccacatcagacaggcagccatcgatcgcgttacattaggggatggcgttacaaacggcgtccgcaggtgggcggctgcagccaagctcgccaggttcaggccgtaaccaggcaaggcgcgggcacaagggccagccgggccggactctgcagccggctccaccgcgggtcgcgctcggcaccagcaggaacagccgggccggtgttaaacgtgcgggtccccgtcctccgcccgggcatccgtttcccgcctaggagagagagggaatagcgggtgggggtgggagcagcctgttttgaatgtggattgctgctcgcctggcacgatcctcccctccaaggaggcgcggcggccgcgatcctcgccttagcgctacggcgagacagaggccgagcgagggcaactcccgagcaggccccgaagaaagttctcctcgtcccgccctggctgcctagactctgctctcggcctgcggaggccgtgcgagccaagactgcctcccggccctgcccgttaccaaccccaagttcaagagaaacgacaaccattatgttacttgcctggtgaggcaggatttggccgagtctcgtttctggtgcccacgacgcacggtccagggtccgagggcggctgggccggcggactgggcatccagtgtgcctgcggtgccctggcgctcgctgtcgctggtctcccactcccttcgtctctctccgcgttctccttccctcgccctatctccctctctccgcctgctgcctctgccctcgactccctgcctctgactgtatggggagtacgatttagaatctgtacatagaaaggttttcttttctttcttttcttttggtctattttaatcgtgttcgtttcaccttttaactgaccagaagacgggagcgcgtttgcgcgtttatttgggcatagggacgagggcaaggagcccctgctacccccagtcgcctcctcgccatcagctgcgtacaatgggccacc

SEQ ID NO: 231249 - DNA, 102 bp, Homo sapiens
  chr5:92916848-92916950
  hyper
tctgtcaatacagcgtggccatttacttccacctttacctgagggcgtgttggcgctaggaatgctcgagctgagacaaacttttacgccctcgcgagtcga

SEQ ID NO: 231250 - DNA, 62 bp, Homo sapiens; identical to SEQ ID NO: 199949
  chr5:92918896-92918958
  hyper

SEQ ID NO: 231251 - DNA, 89 bp, Homo sapiens
  chr5:92935166-92935255
  hyper
agcgttggcccaaccgtggggtcagcgatcgatctctgggctcagaggaaagaggagagagacagggtcgtgcacgaggctctgtctgt

SEQ ID NO: 231252 - DNA, 124 bp, Homo sapiens
  chr5:92938150-92938274
  hyper
ccggcgtcctcgagcgacgcagggcaaatgaggacgcttcctgagcatatttctaggctgggaaccccgctgaaatttccgcggtgcctgggaattcctagagcctgagcgcctggctcaaccc

SEQ ID NO: 231253 - DNA, 483 bp, Homo sapiens
  chr5:92939753-92940236
  hyper
tgccaagtgcttggggcctccgcccaaggtgtttgggggctgcgtggtgagccgaggcaaagccagggtaccccgatcgtcttccgggcgcatccaccatgcggcaccgccccagccacggcggccgcgcgtggagacccgggggcttaacaaagggctccgcgggggcacgggggggcgcggccacgtgacaggcccgagcgcgacgtcgctgtccagccgcggggaggggcggccagcccggggggccgtggggcttcttgacatagaacgtccgggcctcgggctggccgcgccgggccgcgctccgccgggatgagaagtacttgtctggctccgcgctggagaagccgcacctctcatctctccggctcttacttgaaaaagcacttggaagaaactgtgtgtgcgctgggagggccgcggggtgggccggggccggctgcgaggctgaggggggccggctggtgggtggatggggag

SEQ ID NO: 231254 - DNA, 62 bp, Homo sapiens
  chr5:92943194-92943256
  hyper
cgcctgtcaggaggcgtctgggcagccttgtaaactcagagtgacttctcatatcgtgctat

SEQ ID NO: 231255 - DNA, 557 bp, Homo sapiens
  chr5:92943286-92943843
  hyper
tgaagccctgggaatcatttcagcccaaggtgagcctttcaggcactgctctttgtccccatttggataagaaggtgcaaaactagttagacactaggctgattttggggaggtggtaggaggggatggagaagcggcctgttctaattaaagacaataagcaatcctgcgaggagctgtcctttagccttggctggaggcagaaacggtctgtctcacctcagttgttaggtttatttgagctggtcggtgaggcgaagagcagaaacttgcaggtagctctgggctcaggtgagactgggtggatggttaaatcacagcaagtgatctcgaagtccccctttacctccccatcccctgtccttctgtgctctgtgcttgactcaggcatactttgattctaactttgcttgctagatggcgctcggtgtctcaggactttctgtttcagaattaaagcggctttttagcaccgttgttctgaactatttgtgggcatttgatcagtacagtgctggtaatgttattattgcccttgttttcgtcacactttttct

SEQ ID NO: 231256 - DNA, 309 bp, Homo sapiens
  chr5:92946485-92946794
  hyper
ccggaaggctagaacgaatttatccaaagatggaagaaagctcagcacctggaagctcccccaaagggtactggccaaagatatgcaaacattatgtagatatttcagttgcgggtttagatagtgggagatggatcctagtctagaatattcgagtcttcaagtcactattattcaacaggtcttcgctatgctgcacacttcagatgccaaactgcattagctaacgtgagttgtcccccgttttcgtaggagggtcgtgttgctagtttagtttccggcatggccgagtttctctagtagcatgga

SEQ ID NO: 231257 - DNA, 269 bp, Homo sapiens
  chr5:92947618-92947887
  hyper
cagggagaggtgccgaaaagcacagcttggacttaaggtctgcaagcaggagaagaggtgatgggtattgagccagacgcgtcccctttttggtgctgtcaagtaagttgccgtcaggctctttagcgcgcggcgggccgggcgcccgcagcggagccgcctctctccgggaggtaattaaccagtgcctgggcgcacccgagccagtccgacagctccagccactggcagagccgtgggaccaagggccggacgggtatggacttaga

SEQ ID NO: 231258 - DNA, 134 bp, Homo sapiens; identical to SEQ ID NO: 199951
  chr5:92957179-92957313
  hyper

SEQ ID NO: 231259 - DNA, 382 bp, Homo sapiens
  chr5:93954161-93954543
  hyper
cattaatatcaggcgcaggagaaaacccagtaaaatcacttaccagtcttccacctccggtgctgatctagcaagagcctgacccgctggccagactcaagctctgcaccaggtattaccaccctggcgacggctccggagcgtcactgacaaccacccggaaatggtactatcgcttccggggctgcctagcgcgcggcgggaaattgtttcccagagcccggattcgtgaagcagttgagtgctgcagcggcagtcgtcgcccctgccgccgctgccaccgaaggaagcatcccagacaccgggaaggtaaaggggctcagctaggaagacacagtgtattctgtctctgtggggatgtttcttcgccgggcggtacctc

SEQ ID NO: 231260 - DNA, 1875 bp, Homo sapiens
  chr5:94619388-94621263
  hyper
tttgctaaaccagagcgagatgttttctttcgactgtttcatctacttagaattaatagcatttctcctcccgcctcccggcccccgccccccgctccccgggtggtgaacgcctgaagagggaggcgtggtcccgcgcaccttgtctccggccgcgccaccggcactcacctggctgctgccgtgctcctcgcccgtctccggggcccgagactccgcgggactccgcgccggctctgcgggaggaggcggcggctccagcagctgctccaggcaggcggtgcccggcagagaggagctcttctggtggcacaagtgcgccccggggccctgacgccgtgcaccctcatctcgggcgcggtcccccctcgggggaggctggggcgaggaggacagggaggatgaggcggaggaagaggaaggagctgagtcgggggagcgtccgccaggaggcgtccctcccgctgctcccgaggccgccgcgggcccctttacggcggggagcaaatgctcgcggatccggcggcgtagcgtggacccctgctcggctctgccggcgccgccgggctccaggggctccggcgacgagcagcacaggttgggctgcgaggaggagaagactcggtccagcacttgcttccgcttcttgaagccgctccacctgctgcctgcaccactccccctggccggtgcattccctgtgcccaccgggggtggcggggagggcgacggggtgtccgcagtgcggcgctctggacccccagcgcgcccgcccccgccgcccttgctcctgcccacccccagctgcaggttcttccagagccgggcctggaaggaggaggacgccgccggcggctctggctcgcccgccgcggcagcccggggctccatcctccaccccctgctcctcctctcccctcctcctcctcctcctcctcctgcttctcctccctcttcggctgcacctcctcccgggtccccgcggcgctggcggtggcggcggcggcggcggcgggcgcagcagcagaaaccgggagtgcccagcgacttcaggccagctcgggggaaagaagcggccgccgccgccgaggctctctggcctcgggactccggcgctgcctcttcctcccgcacctgctggggtgggctggagccgtaaccgaatcccggccgcggcgcctgcaaagtttttccctcgaagctccgcggctccagtccactggcgtcccccaggccgcgccctggctccctcttctctctgaccgagctcgggaagctgcacgcaccggggcgtgcgcgtccagctgcgccagggaccgcacccggcgccctctgggcagcacctgtcagcggcgggggcggctgcctccaaattgggcgcgcacgcggctcacacaacaaggcgcgtctggctggagactccggggaccagcagtccccctggggcgccccgggaccatcctccagctcctaggtgggagggccggtaggagccgggtggagctaggtagggcccgaagccagcttgctccctaggatccggccacagttgcccaggcagctcgctgtgcgctggccgctggccgcgctggcgatcgtctgggtcggatgaagcgagctggagtggaaactatgtgccctcgatgggtctcgtgggggcgccgatcgtccacactgagcgatgaacccgacggagttctaaagctgaagacgtctgcccccgccccgttgcgctccctgggtccaagacgagagtttaatttcttctgtcttgacttcatccccatccacccctcccttttctttatttgcctctgcactggtctcttatgatcaggttctagcatttccggagtctgacgataaagccagccc

SEQ ID NO: 231261 - DNA, 152 bp, Homo sapiens
  chr5:94890673-94890825
  hyper
gctgcaatgagagcgcatgcgcctttcccaggactcattcacgtgactggaagtggctgggttctgatttgctcggtatttgattaaaaggtcttaacgtgggtaaaagcgggaatttctctgttgcgcatgtgcgcgctctccgcctgata

SEQ ID NO: 231262 - DNA, 659 bp, Homo sapiens
  chr5:94955630-94956289
  hyper
cgcccaggggtccgcggcttccgcgagggtagcgtcgggggccgctgcagagattggaagagtacccgccgggaatgggagggaagacgcggggaaggtggagaataggaatcatgtgtgttcctcgagtgtacaacccacatttgagtgacaaatcacgaggacaatcgacaaaaacaactaagcgcaaagccgcccgaatccatctccctctctgtgcgtgtgccttttcaactaactttgggaactcgtatagacccagcgtcgctccccgcgccgcctcgcctccactttggtttcccgcgtcctgcccgccctcttcggtgcctcctcttcctccgggacaaggatggaggatctctttagcccctcaattctgccgccggcgcccaacatttccgtgcccatcttgctgggctggggtctcaacctgaccttggggcaaggagcccctgcctctgggccgcccagccgccgcgtccgcctggtgttcctgggggtcatcctggtggtggcggtggcaggcaacaccacagtgctgtgccgcctgtgcggcggcggcgggccctgggcgggccccaagcgtcgcaagatggacttcctgctggtgcagctggccctggcggacctgtacgcgtgcgggggcacggcgctgtcac

SEQ ID NO: 231263 - DNA, 495 bp, Homo sapiens
  chr5:94956769-94957264
  hyper
cgcaggcccccgcggctgcagcgccctggtcggcgagcccaggtcgagcccctgcgcccagcgcgctgccccgcgccaaggtgcagagcctgaagatgagcctgctgctggcgctgctgttcgtgggctgcgagctgccctactttgccgcccggctggcggccgcgtggtcgtccgggcccgcgggagactgggagggagagggcctgtcggcggcgctgcgcgtggtggcgatggccaacagcgctctcaatcccttcgtctacctcttcttccaggcgggcgactgccggctccggcgacagctgcggaagcggctgggctctctgtgctgcgcgccgcagggaggcgcggaggacgaggaggggccccggggccaccaggcgctctaccgccaacgctggccccaccctcattatcaccatgctcggcgggaaccgctggacgagggcggcttgcgcccaccccctccgcgccccagacccctgccttgct

SEQ ID NO: 231264 - DNA, 65 bp, Homo sapiens
  chr5:95157378-95157443
  hyper
cctgaagcccaggacgcaaagccaaggatgctgaagagagggaagtctttcggatggaggagagc

SEQ ID NO: 231265 - DNA, 505 bp, Homo sapiens
  chr5:95157904-95158409
  hyper
cccacttaccctgccgcacagcagacatcagctgtactccctcttctgccccgtgaagacctttggctgcagtgccgccgctcattcaagtgaccgagatcctctctaaggcgccctcccccacaccccccgccccgcacagccctctggacgccttgaagtacggagccgcagccttatcctaaagaaaggcacagctctgacaagaaaaggcaatccgggagcctttccctagccgtttaaaatgaaactcaccgttcttgctcccgtgagctgttgcaaataatcttgaatctcgttagtgtggttggtggctgtgatatcgacaaattccagaagcccttgtttgatgggcaattgactgaggatctcttgggccctcctgcagtacgggcaggtgggcttgatgaacacaaccaccttcccaggctggattttgcagttcacaaactcttgagccatgccgatgggctgcggtctccccgggaagaatcctcagttgcag

SEQ ID NO: 231266 - DNA, 39 bp, Homo sapiens
  chr5:95170784-95170823
  hyper
agctgtgaggagccgccagagagcgcagcgcggcggccc

SEQ ID NO: 231267 - DNA, 108 bp, Homo sapiens; identical to SEQ ID NO: 199955
  chr5:95194595-95194703
  hyper

SEQ ID NO: 231268 - DNA, 483 bp, Homo sapiens
  chr5:95767461-95767944
  hyper
gccgattactcatccgtgactccagcggcgtctcaaccaccacctccagaaaaaacgcgccaaaatgttttacaactgcctcctcccacgcttcaatgcagaccaacttcccaagcagggggcgagggcttgattccgagccaaggaaaggaaagctctagactagaagtcacactccctagggtcccctcggaatcgctcagctataagcagtctcccacttaatgtcttgacgcccacccacctccaaccagctacctatcgaccaagccttcacttggacaggcaacaataagctgaaattcccgggaaaacgattacgtacttggctgaagaacaagaaagaaatagatcccttccccatagtcagttcggcatctcgaccctgcagtgggactggccgggcaaagttatgaagcttggactttataagttcccagtgaaaagccggagctccctagagagtcgcggggatagatggtc

SEQ ID NO: 231269 - DNA, 427 bp, Homo sapiens
  chr5:95768193-95768620
  hyper
cgcactgcttctcccgggggcgcttggttggtaagagcttgagtgtatctcaagttccctgaacaagcgtggagggatttttcttccaaaccgcgcgggaacggatttcaattctagagcggccaacagtaagcataagccctacccagctgcagcggcttccttctgcttggctgcgcccagcctaaacagtaaataatgcaagctttctctctctccaagcgcgacaggggcgagggctggagcagctccttgctctttgctactctgggctctggagagtgcaacctggggctcccacttggaagaccgcgctccagtcccgccagtcccctggggccccagaaagtttcttgaaagtggaaactcttacctgacccaaaaggtcatagcccagctcctcggcgatggccgaggctgcttccgg

SEQ ID NO: 231270 - DNA, 117 bp, Homo sapiens
  chr5:95768894-95769011
  hyper
gaggagaggctgggcggcggcgagcgctcagtgaagcgcttcggtctccaggctgagtggagccccagcccttcccagccagaatggaaatgagtgtttacacgtcaaatcgacgaa

SEQ ID NO: 231271 - DNA, 80 bp, Homo sapiens
  chr5:95769979-95770059
  hyper
ggattgaacctggcgggagataccagtgcctagtattcagcaccgaggtctggacagcgacacacgcaggactgccgcag

SEQ ID NO: 231272 - DNA, 565 bp, Homo sapiens
  chr5:96038225-96038790
  hyper
cgaagtgcacccaccgtcgttgccttattctggtagtcacagggtgacagccgagggagcggtaacctgtaatcagccggcggtgcgcagcccacacagcacgtggtccgcatcacaggctgcgttattgagtgagccagtctccagatgccaggcgcatgacgagtccacggagcgggacctccctccccacgcatcccgggctcccggggcggggccgccgggcaggggggcggggagcatcctgcgtcgccttcccgggaccgccccgccccgtcgcactcagagagctgggctggagctccaagcggaaaccgcgggagccgagcccagctaggaatgcagacctcctgaaaaccaagccgaggactgcggggtccggtgtccacgcagagtgagtactgtcttccgccgctttgctccaggccgcgcgtgctcccgggtctagggcctgtgcccccggctacctgccctgcgtgtccggggcctggtccctgcagcggactccccaggctcgggacgtgcgcttttcctactatcgcgaccctggcgataccgtgcgttc

SEQ ID NO: 231273 - DNA, 242 bp, Homo sapiens
  chr5:98104049-98104291
  hyper
agctggagagggtcgtagattcttgcctaaggaggcaagaagtgacctccctgagtcaggatacttgagcatttgacttgactaagagaagtagcccgctagttccaggcgttgaacgcgccaattagctgccgctgagtatctgggatgttttttgtttgtttgtttttctactttggaagatcaatgtaaggtagaaagttaatccctttcttcttgccctccacgccttccacgctgat

SEQ ID NO: 231274 - DNA, 811 bp, Homo sapiens
  chr5:98104604-98105415
  hyper
gtggcggggggcagcgcatctggcgccttggccggggcgcggagtgggaacagcccgcacgcgtccgctgccgccctgcctggcgacgagtggcacaatcgcccaccaggaatcggctggtgccgcgggtgggcgaaggcagcgccgccggcccggagggcggcgcggagggtggcgctggcggcgtgaaaggcgtctttgtgcaagattgagtgtggtggggggaaggcgaagagagaactgatccaggacctggacgcgggggtctgcggcgcccctacgcccccacgcccccagccgtccgcagtgccggaatgagccggatagcgccggcagggggcagtgtggcgatataggggttgccggggggagaggagggtctctgttcacctctatttgaggctgactggggagaaagctgcctggaggaagctgctggggtgcggggggctgagggatttggctccccgccctctcccctagatggcggagaaatcgggctagctggaagggcgcagctcctctcccagagctcattctggagtcggagaactgggagagcggcccccgaggcggagcctccctcccgccccgagtcgcgctgccccccacctgggggagaggggcgggcgccgcgctgccttccctccgcgcctcggccgcgtggcttgcggcttattttcccagctggcaagcgtcgcgctgcagacaagggaatgcctgtggtgagttgtttattttgttgaagtttgcggtgggcccgggggacgtggggggcgagcggcaggcagcggccgggactgttttgttt

SEQ ID NO: 231275 - DNA, 95 bp, Homo sapiens; identical to SEQ ID NO: 199956
  chr5:98107032-98107127
  hyper

SEQ ID NO: 231276 - DNA, 208 bp, Homo sapiens; identical to SEQ ID NO: 199957
  chr5:98108684-98108892
  hyper

SEQ ID NO: 231277 - DNA, 79 bp, Homo sapiens
  chr5:98109581-98109660
  hyper
cgcggactggctgcgccggctgcgcgctgcttgctgcggcggtggtggcgccccatctgctacacgggcctgaagaagg

SEQ ID NO: 231278 - DNA, 432 bp, Homo sapiens
  chr5:98110190-98110622
  hyper
tttagcgggcgggggccgcgcgcccgagacaaatgttccggatgctttattgctctctgcgctggtgtttactgaaagtcaggctcggatcaggtttccgccgtcgcagccgcctcggagggagacaaggagccttgtgctgcttttctggagttgggggtggcggcgaggcgaaggaagtacaccagatggaaagatttttaccagattttgcaaacctgggagttaatctcgaagtaacgtcaacttttttgagcagggatttctttcgttttggcaaaagctgcgtttgttcagcgatcagcctcccgggaaaagctcgtgttttgtgactagccgggtgtcttcgggctccgtgaggggttgacagataaccatgctgccttctggaggtcggcgcttccccagccttgaggcgtatgttccaaggga

SEQ ID NO: 231279 - DNA, 1359 bp, Homo sapiens
  chr5:100236035-100237394
  hyper
ccgggatctggagccgaacctccattccagtttactcaaaactcaaaactggcctctccacgtggcttgggtagaaagacagtcaatgagatgatttgatggttttatgagtcaactcctccaccagaagcgctgtttgggagttgaaacgaaataatgagctcgggtcacaagcttttccacgaacctttcatcctggagaaaaaggaaagtgctcagggagcctagctgccctcgcattgttcctggcagctccaactccttgcacagtcttggtctctcaggagaccaaggcagtcaggacgctacagggcacgggtgtaagcgcgacgttcgcggccagccctctgccttgccccactgtaattgcgggttttgattaagaaggaggagccagttgccgactgagctttgaaagtgactttgggtggggggtgggggtggggtgggggtggaaggaggggagggaccaaaagagcctgagtcctgcaataaaggtttccccctatcttctcactcattctttccccctcgccgccggcgctctggcagcaggggataaccccggtgcgcgcctctcttcctgtttggtttactcaagcgcctgccccaacgccttctcagtcaagctgggaggaaactgcttcagcttgaaaaggatgcgggcaaaagcccagcccgactagctcaaccgccgcgccagtgcccgcctcctcttccttaacgcctagggctgcgcccaccagccggcaacgtccaggaaagggccacaggagaaatgacacccgtgcaatgcggagtgtcccggctccgcttccccgcagggactcgaggtgcgctccttttcctggccacggtttagggaggctcggagatggacacctcggcagtatctggcgaccctcttctcactcgctccgcccactcctgctctccagggtcccagccaagggcccgaaccctcggagtcctagtgagccttggccgctttgtctgggatcaggcttatcctcctagcccacggcccgggagggaacaaagagcctcgaccctcaagctctagcctctgcctctcatcggagccccatgcgcccattcatcacctttctaaagacccctttgtctgcctggcaagcacaggtctgcaagggatgcccacgcccctgcccaaagtcctgcttttctaacaactgagctagattggattttcaagccacccagtcttgtgtaaacgacctcataccggtcttttttaccccctcagaatagaccatgtatagattcgttgatgcatgacgaccattccagcccattccttgctagctttttcattctcttccagtccgctttgactgtgct

SEQ ID NO: 231280 - DNA, 47 bp, Homo sapiens
  chr5:100237670-100237717
  hyper
ggacgcctccaaaccggaacagggaggatttccgaaacaggactttg

SEQ ID NO: 231281 - DNA, 703 bp, Homo sapiens
  chr5:100238183-100238886
  hyper
tgaaaacaggcaaccgtttggtgaataaagacatttctcttgagttctgcccacagattaaaaggacaaggacacacgttctttgttgacacttctgcagtgacttctcctttggcgagagagcacccagggccaacacaactgtcaccacaaccacacagagcaagttgaactcatactgggaacagcttagagaagcacgcacatctcaacaacagcctttgttatttaattcatgacactaaccacgcgcaagctcaaacaaacacacatgctatcctaaccatcactctaccctctatattcacatttcatttatggcttgactttttgtcatatcctgaaatgaagctttgcatttacccgatgagttgcgtctcctggtgctcctcagttcttgctatttcttttgtcttataaaagatcaggagcagacttattgtgcagatcgtccacctcttcctaatggagcgcatcttgggtgcccgagaaagtcctggttgccccagctcccgcaccttctcttgatataaaggctccgttttggggagatagtcgcgggggtgaaatctgtaaaatgcgaggagagcttggagccgggatcccgggatcagatcactggggtcttctgtggccgagctccctctggtcctcgaacgctgcccagcgacctctcgccctgtttgcgccagctctgccaggg

SEQ ID NO: 231282 - DNA, 144 bp, Homo sapiens
  chr5:100239186-100239330
  hyper
cgtacacgcagaatcacacacactctcctgggacatcaaagcatcagctctctggacctgggagctccaagatagtctatccgcatctaggtgagagggcacctcgcctggggacagattacaaaagcgtcccgccagaggaat

SEQ ID NO: 231283 - DNA, 943 bp, Homo sapiens
  chr5:100239570-100240513
  hyper
tcaggattctgcaggaaacaagtgatgatagaggtgtcattaggaactttatggatatttatgcgcctccctttcattgccatttggaaactcctcacgcagaagtcaaggaaactccaatcccacttaaacttcattgcggagaaacagagttctgaaaaaaaagcagctaccatggacctctcttttaaacgcaagtacacccacacacattcggataccaaggaaggaaggaaagaaagaaaggaaagaaaagggaggggaggaaggaagagcaaagtcctctctaaaagtctcaattatatatatagcctctgattgtcacctctcctccgtcccaccatttttcgtacttgtattgggtggcagggacacttttcaagagttctgtgttcgattgttcactctgagtacctctccaccatcctccagtcgttgccctcattgggagagatgcttgctactctgctagtaccacgccttggttccggtctttactgttggctggtaggtcgggaggcacctctagcatgagacagtgtctggaagccaggatttccctcatctatatgcgccggtccccagctccctggtcgccagggtttctctccagttgaattccgtgttccttcaggttgaacagtagcttcagcggtttttcacgctcagaaatgatgaggcccaattccaatcttccctcccgccggaagtaagaaggggaattctgagttgcttgtcgcctgacagcttaaaatagcaacgaaaacagccagcatctttgcttaaaaacccaaggttcccgccagtgtttaccatacttcctctagagtttaagaagttaagaacttccgagatcttgaatttcctctttgcagcacagcgaacggggtcgggtataaaaatgctccaaggagcaagtaattacgaacgtttattgacacta

SEQ ID NO: 231284 - DNA, 1094 bp, Homo sapiens
  chr5:101631422-101632516
  hyper
ttggaaggctggctgggggccggtaggttgaccttggtgagagcgcaagcaagttccaaacccggggccaccttgcagggcgcgtccaccgtcccacggaccccgcgcacctgccctctcccccggctggctcgccgtgcccacctcgctctccactggcccgagcctcaagcgggcgctggactttaccttgcgtgacggccaagaggcagtagtgaagcagaaagcctccaggtgtgttgcagcgctggagacattgaggatggaagttcctccagccgtaagacccctcctcaaactcggacagcgacagtgaccggagcttctcttcggagacattgggaggggctgaaggcagagatggctctggtgacttctggggctcctggggcttctgaagctcctgtggctgagaattctctctttgggggtcagaggacaaggcagagacttcgatttgggagggcgacgcagacaagcggcgcaggatgtctgggctggaggggacaaaagccaagttctcaatacctttggcgctcttcatgtctggatgggttctcccgactccggtgcttcagagcagcagagccaggtccctctctggctcctcccacaggcaggtgacagcgcccccgtgcgggaagcttcccgcctcctggccctccagcctccagcgcactctccgccaccgcctgaaccttcctactccagctcgcagctgtctggagcgcagagcgctgagcgggggcgttagcgccccagcctgtggctttggcgctcagctgtgcctcacccgtcgcctcaaggaccaaccggaaggcgcggcgtgggcgtgccacccggcggcggccgagtagagggggcgagagttctcaccccacagccttcgaccggagtccgcctccgcccaagcccctgcggttctgacctgagccttcagcccgcagcgcgcctcccttgagcccaagcactgggaacacacagagactgtgggagtctctggccataagctccccttgggtgctgacatgaaacctgtaaacagttgcatcaggagattgttcaggaaactatcttgcgttttcttcctttgc

SEQ ID NO: 231285 - DNA, 49 bp, Homo sapiens; identical to SEQ ID NO: 199966
  chr5:102090424-102090473
  hyper

SEQ ID NO: 231286 - DNA, 102 bp, Homo sapiens
  chr5:102091104-102091206
  hyper
gagggtgggggcgcggaagggggcctgggctcgggatcctgctgccaccaattcctggtgccccaggaggttgttgctttttctcccgggctgcccgggtcg

SEQ ID NO: 231287 - DNA, 897 bp, Homo sapiens
  chr5:107005032-107005929
  hyper
actttagatgcaatcggtactattaataaatagcacctaggagggcaccgagaccggcacacagctggaagctagcctctgtcccagagaaagcagtgcggtatgggcctagcggggccgacttctgtgcacaggccgggaagcaataaaggttcggaactgctccagacccggaggaccccgccgggcactctggataacctccccactccacttccagggtccgaaaacacgggacgtctgcgactggccggtgtccagcacgcgcactaggaccgcccccggcgcccacctctagtctcccgcatacccggcgggcttcgggacgcctacaaatcggttccaggtaatcgcgcgcgttcctccggcagcacatcgccaggccgcgggcgaagggctcccacctcctggctcggccaactctggcagcttgttctgcacacatgacgtaacccggcattagatcaaactttctggcaccttgaacccactggggtgggtggagggatggagaagatgggagaatcctctccactgccaggcgcgccgggcccagactgactcaggggccgaatgatttcctcgcagttgaagaggaaaataaaaacctaaagcttccgcttcccagcccccctcacttcccccagcccgtgcgctctctctgcgcgcaccgggaaaagagaagggaaaattaaaattaaaaaaaaaaaaaaaaaaaaaaaaactttgggggatgtttggcgggttctctccgcagtccctgcggacccacgctccaggaaggagctcccggctgcgcacactgggggctccccgcgccgggaaccggatgccagccagatgccggggctgggaagcagagaagtccctactccccggctcccgcccttttccgag

SEQ ID NO: 231288 - DNA, 32 bp, Homo sapiens
  chr5:107006469-107006501
  hyper
caccaagctggggaggggtaggagagcgagaa

SEQ ID NO: 231289 - DNA, 253 bp, Homo sapiens
  chr5:107007401-107007654
  hyper
cggctggagagcgggaggggaaacaatcactttcaaatggatccctccaactcctggatgggccgatgtcagtctccgatcgccttccgagagggagactgagcccccacacgcggtgccaagagcccggggtgagctctcagaagtgtccctgcgactccagcgggtccaagcctagcaacttgtagagatgcatcaatcagtttgaaatgggaaaagaggaaaaaaaaaaagcgcacgagcgagtggcacc

SEQ ID NO: 231290 - DNA, 145 bp, Homo sapiens; identical to SEQ ID NO: 199972
  chr5:107008360-107008505
  hyper

SEQ ID NO: 231291 - DNA, 173 bp, Homo sapiens
  chr5:108064027-108064200
  hyper
ctgggccgccctgcgccgggagccgcccaccttcgggctgggccgggcctggccagagtctgggctaagcgcagggcctgcatgaatcttcagcctgggaggtggggcaggagcacggagaagtctcgaagaagtggaggaagcacgcactggctgccgcgggaaaagctcag

SEQ ID NO: 231292 - DNA, 123 bp, Homo sapiens
  chr5:110074205-110074328
  hyper
cacagtactttcgcgttcactgggcggtaccatatctctcaatagatttgatccaaaaccccaagtgcgggagacaaagctaggtggaacgttattaaccctccacaactccaacctctacta

SEQ ID NO: 231293 - DNA, 554 bp, Homo sapiens
  chr5:110408731-110409285
  hyper
ctccgggacgccgccgccgggggaaaggggacatctgggctgtcagagcggggctgcgcctagcttgggacaacacttctgttccaatttagggagaggaagtctctatccggaggaaaggcaaattgggaactgggacgagggaacgttgttaggggcaccacctgctggggtccggcgcctccgcgctcgggctcggaattttggcagcctccgccccctggagacttgggaggagcgagcgtgggtgacagtcttttcgcgacgagtgccctccgccaccctcgccacgcccctgctcccccgcggttggttcttccttgctctactcaaccctgacctcttctctctgactctcgacttgtgttccccgctcctccctgaccttcctcccctcccctttcactcaattctcaccaactctttctctctctggtgttttctccttttctcgtaaactttgccgcctatgagcagccacattgccttactgaaatccagagcctaaccttcaatcccaccgccggctgcgcgtcgctcgccaaagaaatgtt

SEQ ID NO: 231294 - DNA, 37 bp, Homo sapiens
  chr5:110427832-110427869
  hyper
cctctttgtttcccgcccttgcggttctgtcggaacc

SEQ ID NO: 231295 - DNA, 214 bp, Homo sapiens
  chr5:110428255-110428469
  hyper
cgcgctcaagcgccggttctatgtaacaacctgcgtgggcaagagtttccacacctatgacgtgagtgacttcttttgttagcttcccaggaaaaccaccctccttggcctctaactctgtcctggagcagtccggttctcccttcccatttaccacgggcttcccttctttaacccctccctgtcctattaatatttcgccatccggtcacgt

SEQ ID NO: 231296 - DNA, 57 bp, Homo sapiens
  chr5:110559840-110559897
  hyper
gagaaaggaaagagggagggcggcgggaaaggctcggcgcgggaggagggcgggtga

SEQ ID NO: 231297 - DNA, 77 bp, Homo sapiens
  chr5:110560497-110560574
  hyper
tgcggctcgagtccttcccaccccaccagagcgcctaggccggtgcagctgtaggatcagcccgactccctcccacc

SEQ ID NO: 231298 - DNA, 169 bp, Homo sapiens
  chr5:110848486-110848655
  hyper
ttggttgggttgggttgtcctgtgatcacttaattgtgaaagaattttgtcaagcagtaaaccgactgggagaaattgaaacagaaggcgaagtgaaggatcacagtgagggataaggtccaaattcatcccgcttgtggatatcctagtatctcgcaactacgctact

SEQ ID NO: 231299 - DNA, 38 bp, Homo sapiens
  chr5:111093185-111093223
  hyper
gatggagctggcgcggagccagcgccccagccttgctg

SEQ ID NO: 231300 - DNA, 112 bp, Homo sapiens
  chr5:111496536-111496648
  hyper
aagcattgtgggacggaagcctgtcctttcttccttttggtgcgagcttgctgtggtttttgctctgggtcctctgggatggcgcctggctgtggccgcgtggtctctcacg

SEQ ID NO: 231301 - DNA, 882 bp, Homo sapiens
  chr5:111754513-111755395
  hyper
tctcctccccaccgcgcagagtcgcggccgccgccctcgacccaccggtgacagccctcaaagcgatggacccccgcacccgccctgccgccaacccccggaacgcgctccgggccgcacccaccttgatgccctgctgctgggtggtaagggttaacttggattcatccaggagcaaaacttcgcagtaaaattcttccggaacagcgcagaaacagcccatgtcggttgtggtcgtctccagccaggagagaaagctaccaccgaggcgcccagccgccccctccactcaagcgcgatgcattaatttattgtccgcgccgtggcgagggtgagacgagcagctcccggcggggtccggggaccggccgccgaaccgcccggcggggcgggagcgagaaaggcggaaaagcccgggagagtcagcgcccgggagccgccggggaagcgccggcggaactgggcgcggagggcggtggcgcgtccccgcgcatcctgcggctcgagctcctccgaaggcgggggcgcggggcccctcccgcagtcctggggacgacaaaagtctcctggcactgggggcaagagaccagaaaaaggagtgatgggaattcgaggctctccccggccttggaaaaccctggaagcgctgcacctccctcctgccgcacggatttgagcgcggccccgacgtcctggcgtccgatcggcctgcggagtcccccgcgggcgcgcacttccagccgcgaccccgccccgcagccccgggtcagatccgccgagtatgaagcgctcggcttttcttttgtgtgaggagcacccacgacgccccgaccatgggcgcaggggcagaggcgaaggtcgtcgctccgtccgctaccccgt

SEQ ID NO: 231302 - DNA, 199 bp, Homo sapiens
  chr5:112043091-112043290
  hyper
gcgaagcagtgcccggcaagcggagcgcagcacccattgcgcctgcgcataacaggctctagtctccgggctgtgggaagccagcaacacctctcacgcatgcgcattgtagtcttcccacctcccacaagatggcggagggcaagtagcaagggggcggggtgtggccgccggaagcctagccgctgctcggggggga

SEQ ID NO: 231303 - DNA, 192 bp, Homo sapiens; identical to SEQ ID NO: 199979
  chr5:112257954-112258146
  hyper

SEQ ID NO: 231304 - DNA, 120 bp, Homo sapiens
  chr5:112312392-112312512
  hyper
aggggcgtgactccgggggctccgccccgagccttggcccagtcttggggtccaaggctgagggagcgggacggaagtgagcgggtcccgccccttccccttctcgtctccgttggagtc

SEQ ID NO: 231305 - DNA, 1435 bp, Homo sapiens
  chr5:112629391-112630826
  hyper
gagcccaggaattgcaaatgcgcttgcctcaaagactcaggagtccagatccgggcaggaaataaagttctaaagcggctttgaagtgctttctccccagacccctccccagcgcgggtcattcatctcagcctagggaagagaccaccttgcctgaacgtagccaaacgcatcgcacgtgggagccaagtgggagatgaaataatccaatgcgtccccctcaccaccaccacccccaccaaattagttaccgtcggcttaaactcatcgggaatgtccgtgtattttaccgatcagggaaataaaagggtgtatataaattagtggaagcgggtgggaaggaacaagggatgcagactgtcgtgagtaaaacgcctcgcggcttggtgagaggttgtttcttttttaagccactcatttcagactgaaatatcaagccagttcaggtcatttcctgagtagcactacaagttaaaacaagatccagaaaatctactaatcttcaattgcgctgcctccagactgggagcacagggggatagggtgtagggctgtggggaggtcgaggggagggggatttgtggaaaagcaaacgcccgagaaaccctagctcccgacctcagctgtttcttacctcactcagctcggccgaggagtcgtttccatatttcatggcaactccggaattcatgatgcacttttcagagctgggctctcagtcccccaggtctcggagcttaagagttggacttcacaggctcaatatccactgcttggtcccttctgccacattttagtctagacagccattttcacccaggacagttgcgaagcgcaaacggaggatgcaggcactcttaaaaagagcagccgtggctcgcgtttcacggacgagccattgctgcaggaggctcggtggcgcggcgcgctcgcagctgcggcagcggcggagcccgcgcggggaccctcccgcgcgcacccagcgccccgttccggggcagtgccaccctgggcgccgcctcgccactcctacggtgcctcgccgccccccattaccaggatggagggcacttcccagcacgagccgacaccctagagggcaccggcgagctcccgaaaaaactagggcggtggggcgaggaagatccgcgcctcggattccagagaaggaaagaaagctagagggagccggagcggagctgcacttcacgccgaagtttccccttcgaatcgtctggagttgtaagtggtttctgattgaacacagctgtctagctgctggccacggggtgcgcggaggaggcggggctagagggagaaaagggtgggggcgagtagcctggaggccgagcagaggagaccgtgctgggagagcagagcaggcatccttccagttctctgcaatagtaattaaggacccgagtccaggaggggg

SEQ ID NO: 231306 - DNA, 561 bp, Homo sapiens
  chr5:112823742-112824303
  hyper
cacccccgcaaggcgaacagagcagtcccctcggccttcgtggccgagccggctacgcgctctcggagtcgcggccaacttttcccgcgagcttctgagcaacttgccgcaagttggggcgagggggcagagcaggggtcaagggcgcgcggagggactgatctcgctcctgtcggtttcctcgtacctccccgcgtacctgctgatgtatccgtccccgtcgccgtcgcacgtctggaagaggcgccgcatcctctcctcctcgccggtgctggacgtgtcgctgctgctgctgctgctgccgctgccgccgccgccgccgccgctgctggagctccccgcagccgctgccgccgcggccgccatcatgcgcccgctccctacttgggaggaggagtacgcgcgaccgcagctggaatccgcgcggcgcgcaagctgcctgcagccccgaacttgcctgacaacggagcatgcccagtggccgccggggcgctccgggcgagggattccacctctccgggttttgcccggactgggaagatgggcgctctggaatcgccc

SEQ ID NO: 231307 - DNA, 232 bp, Homo sapiens
  chr5:113028782-113029014
  hyper
gtaaccagggtacccgcagatttccatttttactttatttccgattcaggaaagcctcgtttcatacagaggaagggaagaacacctctcccccaccccgcttatttaggtctaactaataacattcacctgttggtagctaaaatgtttcagaggacgcagttgtttttaaacatttaagctgttagaaaatcaacaggaaacatcgggatgaaaacgggagggtggtaac

SEQ ID NO: 231308 - DNA, 921 bp, Homo sapiens
  chr5:113391104-113392025
  hyper
aagtggagctataaatagagcggggagggaagcgccctcctgaggggagcgggcgggagattcccggctctcccctccgccgccgcggcgcgttctacgccgggggaagccggctggcgggcgcgcggccttaacccgtgcgacgccgggcagctcctgcggcagccggggagggcgtgatggagaccacgctggaaatgggaatcaaggcacgtttctaaccttgtactggaacgatacatagtctgcgatttctctccctccctgtctttcctctgcagctccccccggttaacacccgaaattcggccttagaatacacacacacgatggaatttgttccatatctttttttttaaccttcgataggcataaatccaaacctaaaattaaaatcatccccaaatttggttttgggaatcatgttggttttcacccttgagcggcgttccctccccagtgccgcatgctgcttaaggactgttactttcttggggagggaagtatcaaatggaaacggtgtgtgtgtgcgcgcgcgcgtttatttttggcgcatgcacacccctcggtagcctcaaggtcggcgataccctgagcattcgggcccccgcctgcaggactcgctcctgccagccaaggactcaagaaggagggagtccccagtcccggcggggcgcctgggattcggttcaatatttagcacagtcagtaccgaagcaggggcagccaggtgggagctgggcgcccaaaagttggaccccaatcagcagcgagtgggcagcgggggcctggctcgcccgcgcccgcgccccggagctctccggctggctctctgctccccgaagctggggagccgggggcgctctcccgggccgcaagcaggcacggaatttgacgcccgagaggcagatggtcctggct

SEQ ID NO: 231309 - DNA, 3285 bp, Homo sapiens
  chr5:113696413-113699698
  hyper
aaataaataaataatgataccgaactccaacaaaactccagcactgtccgtgggcagcgactattcagcccaagctatcattcttaatttccctgccaggctgcgactaccggggtgaatcagcccgcgccaggcccctttcccacccgccgctgcagttaggacttggcaaagatgctcgatatttgcgtatttgtgaccggtctttgctttgtgtctgcgctgcaggtgaggaggaggaagagaagcagaagagcagctggaggccggcggtggctgagcagcccccacacctttgagcgagccgcctgcctctccaccggcaaggaagccctgggacctccggattcgggctgccggagggcctgagcgccagagcccaggacccggcggccgggggcgccatcccctcatgttctggagaaggcgcaaatgtgagctggcggtagcggggaaagccctccgcccccgccaggggggacccgggaagcccggccggctctgtcggcagactgcggggatcccctcctccggccccgcccccacccacccccggccggggtgccgaggcggttaaccctacccgcgccgcagcgcacttgggctagagcgccgcgcacccaatccagattccagagcctgccggctgggaaagatccggtctcggggtcggctatgatcccgcagcggccaaggcagggctcaggccccgggattctccccacacgctgctgcactggcgcagccggtcgccaaactttttctccccaaagccagtgcccccgcagttacttggcgggcagccggcagcccactctcggcgggatgatctgggagaagcgggcgtgggacgagggggctgctgttttgcagccctgcgaggcgtgcagtcggagaagtggtcggggttccacaccgtccctgagcctgcccccggccaaggtggcccgacgtgctgcagtggctggcgcaggtgatccgggcagcgcgtccggcactagtcaagggggcagcggcacgggagggaggggcgcctttctcttttctcctccccctgcagcccagctgcactgcgtgggggctctccatctccacgcaatcagcaggcggaatccctgccctggagcgccctggctctggactgcacccccctagggtttgtcctgcagattcccctccccatctttctctgccacacacgcttccctaagccgcgcgcgccgcaaactcagtctcggtccccgcaggtgatgtcatgcccattgttttggtgcgcccaaccaatcggactcgccgcctggattctaccggagccggcatgggcccttcctcgcaccagcagcaggagtccccgctcccgaccataacgcattgcgcagggtgcaccaccgcttggtctccctgcagctttaacagccctgacatggaaaccccattgcagttccagcgcggcttcttcccagagcagccgccgccgccgccgcgctcctcacacctgcattgccagcagcagcaacagagccaggacaagccgtgcccgcccttcgcgcccctcccgcaccctcaccaccacccgcacctcgcgcaccagcagccggccagcggcggcagcagcccatgcctccggtgcaacagctgcgcctcctccggtgccccggcggcgggggcgggagataacctgtccctgctgctccgcacctcctcgcccggcggcgccttccggacccgcacctcctcgccgctgtcgggctcgtcctgctgctgctgctgctgctcgtcgcgccggggcagccagctcaatgtgagcgagctgacgccgtccagccatgccagtgcgctccggcagcagtacgcgcagcagtccgcgcagcagtcggcgtccgcctcccagtaccaccagtgccacagcctgcagcccgccgccagccccacgggcagcctcggcagtctgggctccgggcccccgctctcgcaccaccaccaccacccgcacccggcgcaccaccagcaccaccagccccaggcgcgccgcgagagcaaccccttcaccgaaatagccatgagcagctgcaggtacaacgggggcgtcatgcggccgctcagcaacttgagcgcgtcccgccggaacctgcacgagatggactcagaggcgcagcccctgcagccccccgcgtctgtcggaggaggtggcggcgcgtcctccccgtctgcagccgctgccgccgccgccgctgtttcgtcctcagcccccgagatcgtggtgtctaagcccgagcacaacaactccaacaacctggcgctctatggaaccggcggcggaggcagcactggaggaggcggcggcggtggcgggagcgggcacggcagcagcagtggcaccaagtccagcaaaaagaaaaaccagaacatcggctacaagctgggccaccggcgcgccctgttcgaaaagcgcaagcggctcagcgactacgcgctcatcttcggcatgttcggcatcgtggtcatggtcatcgagaccgagctgtcgtggggcgcctacgacaaggtacaggcttgaaccccagcccacgctaccggagtcgggcactgggtggttgggatgggcactggcggggaccctttgcgtgcggatccctagcctctccgggacgatcaagggagcccgccaggacagcgggcgcgtctaggacgcgcatccgtagtcagctaaacaactcggagatgaaccctttccgcgtgcagccaaagttctcgaggcagttaagagtgctcagcgcattcgggcaccttaagtaagtggttctggaagtcggtggggaaaccatctgtaattcatcccctcgtgaattatgtttagaagggccctttcaacccgctctcttgaactcagaagtaagttcctctggttttgctagcctggaacagcggcgctcgcttcggtcctctatggcgtggacccagcagcccagccacgcgtcttcccagtctttccaggtctactctcgtctcttttggttttgaggccgagtgatctgacagatcacagagccaagacaggtgcacccctctccccttatcttccttctgtgagttcaggtccacctgtgggggactgactgactctggggacgtggaaggcggttaaaagtgcttctttcttaaaagtgcttctgtctgactgtgttgcaggcgtcgctgtattccttagctctgaaatgccttatcagtctctccacgatcatcctgctcggtctgatcatcgtgtaccacgccagggaaatacag

SEQ ID NO: 231310 - DNA, 1455 bp, Homo sapiens
  chr5:114514884-114516339
  hyper
ttaggagcttctgccggcaatttctcggatgcagcgcggagcccagcctcccgcactgactcaggcccggcaccaccccgcctgctgagggcgtcgtcgcgggcgccaccgacggcgccagcctgcgttcctaaaggctccaggacaggtgtggggctgaaatcccgctcctccagcatcttcccctccctaccaaaagaaggctgctttaaatattcccggcctggagcagcagcagctaaggacctggaaagaggcccgaaaaggccagggcagggcgaacgaacgtgctgtccctatttaccggccacacgctctgactgcgggctgaccctgatcgcacacttcgagcctgttcactcgctgggcggaccctccctccacgctccgcgcccaggcaggcgaggtcacccactcgaagtcaccacgtttgagtagccctggttggtggggcagcgcccccttggccaacgccccgccctcctctccatcttccgacgctgggctctcgcccttcggcgtccgagagcccctattgctgcccagctggccccaaaagcgtccgaaagtcccctcttggcttatttcagagatgccacgcaataaagaaaaggcggctactttgcattccgcagctgctgggacgcccgggctgcgagcgcggctcctggattccagcctcccgcccttcccaggcgctggaatggacacggacgcccacagtggcgggccaggtagtgccggagtcgggggcccaggccgcggcgccccgcgcctcatcacttaccttgcctttagctatcaattccatgatgtagccaaattcactcatctccccagactccgacatgtttacaccccttcacaaactctggaggaccgacgcgggtgtatcgaatttgtcctttcttttctctttttctgtttttagtctgagttttgccgagctccccgcccataagctgttaaccaggaaaagaggggaagcgccggggaaagcaagaagcgggcttgggtgaaatgaaggccatcgagggctcccgggcagcctcgcccggcttgctaggatccgggtgcagcggtcggggctgcgcgatctaacggaacaaacgagggcggcggcggcggcagcagaggccgtgaaaccctcaccaggcggagccgggcgcgcggaggccccgcctcctcgggggtcgcggcagcggttcggaccgcagcggagacaaacaaacgcgcacacaaagcgggtccgcactcggctcagcgcggccccagctagacattccccggcctttatcgcatgccggcaggttggccgtccccggctctcggcgcgaagatctggaaaaaagccccatctcactgtctggaggtgcgagggcagacagaaacgaatacagaggaggcgcaacaaaggggctggctgccagcgccggaaaataaataaataaatac

SEQ ID NO: 231311 - DNA, 34 bp, Homo sapiens
  chr5:114598419-114598453
  hyper
gagtgaagaatagcgctccggcaaaacctggagg

SEQ ID NO: 231312 - DNA, 289 bp, Homo sapiens; identical to SEQ ID NO: 199993
  chr5:114632026-114632315
  hyper

SEQ ID NO: 231313 - DNA, 1562 bp, Homo sapiens
  chr5:115151171-115152733
  hyper
aaaaaaacgacggtcgaatatttaatctgcgaaacttggcagtggatttgaataaacccacagtcggggaagttagttaaattggtttgggaaagggaacagcagaaattccgtagtggcagctgacggccacaagacgctattttacatgagtaaaaatgcttgctataaggtgcccggttgcaggcgaccgaaggcgcagtgatggagaactgacgcgggtgacttgtcttcttcaacatcacacacttctcccgatggctgatgtagtgctcccctgggagcaccctctgctagtccggccagacggttccttaaggtgtcaggagggcccgaacctgagtgcggtctctccgcatctccgcgcccggggttaacgatggcttgggagtgtgggcattgctcccgaggccaggggcaggaggactggtggtttagaagcagaggggtttgcgggagagaagagaacagaaaatctcgcagacgcgcggtggcctcccttcccggcgcctgtccgccgttcccggccggaggtcagcaaggccagtaggatccaccttccgcctgcgctgtggccgcggagccccaagcgagtcgtgccagccccgcggctggccagcgagggggcgagcggcggacgcagcgcggcccgagcttcccgagccagtcactttgggctgcgtcccccacgtccattcctcctcagacggggcgagtgggcgccgcctggcattgaagctgcagcgcgctcacctgtactggtcgaacttggcgtacattgcccactcggtggggtcgctctcgtaggcttccatgatggcctgcacctcctctacattgacctcatcgccggcaaagagctggtgcaggatgcggatcagatcagccagggtccgtggcttcagcacttcggtctgttccatctcgtggggagctggctgcgcgcgcgtctcactgctgggctgcggtggaggagctgagcgagccaaggagctgggggcgagggagcctaacagcccgctagaccgctaagcagacacacacgcacaaacccagcattagagtgccgaaacgtaaggatgtcgtcgcagagacagcaagagacccacccccaggcccctggcagcgcagtggatccgggatcgctggagacgcggtgcacacacaaatcaggttcagatctgtggggttcatcctcccgggccccttttaagcgcttggagtcactaggaatgtaccaacggccctcggagggaggacgaggcggagagccacccaagaaaggtggcggaggcggggagaccctgcgggcacggctcacgcgcacatccccggcttccccgggctccgcgccttcccaagagccccgttgtctccggcgtcccagggatcgcgtgggctccgcgcaatctctcccccactttaacggcgcgttttagccgcccggcctaacgcctctccccgctccacctccgccgctgtggttcgcgacgctgggacgtagacaaaaagggtcggaggagatggctgcggggactgacgctgagtaaaggaggaaaaga

SEQ ID NO: 231314 - DNA, 107 bp, Homo sapiens
  chr5:115177406-115177513
  hyper
gcagacctctgaacgttagtaacgcaacatgtgtttctccgcgactacagacctcgggagaggagcggtgggcaacgtgtctgtgctcggtcgaatgcgcacactcc

SEQ ID NO: 231315 - DNA, 1809 bp, Homo sapiens
  chr5:115297264-115299073
  hyper
tgtgaaagcctcagcgactagggtaccgccgggaaaaccagttccagcccaggaatttctgggtggaaacactggccgccgaattgttttattctctttgcttgattcgagtcggttctgaaagcaggtgtcccctctcccccggcttcaggaagggaaaccccggccccaggcagttgcagagctaagaaaaaccatcccgccaggccccttcttgtggtaacgcggtcctaaccctgctctgccccacaaccccatttcacccgggagacgcagacgccaggctccctagcactttgtcgcctcttcctccagcctggcttcctgagctctggaaaagttccgggcctccggacgttgtttccatcttcgccttcgctgcctgggccgcatgcctcctgggcttatttaggaagcgaagttagcgccacacatttggctccagaaatttgttctgacggcgcggccgacgccctgcagggtcatttctgaacgcattcccaaatatcctggtcctcaagcccttaccaccccctagcacacgaagccccagctggcggtggagcaggtgtgttgctggtagctcatcgctggcttggagatagaggtgcttggtacctgtcccctttccgacaacacctgaaaccgtatcggggcacacccctcatccaaatatccacgtttaaggtgtccggattcgtttggcttgaccaccccctccccgcgccaaccctggaggcatcttccgtggggtctgtctcttcgaacccaaaggggtacgcgtctgggtgagccaggtccgcctcttccctggcgctggccgggggcgggggtgggtaggctgggacctgtgtctgattagctgggagggggaagccatggtcccaaccgctgtctgctgagctccagtccgtccaggctcttccaggaggaagaggcacgatacaagagaggaggggcaggggtcgcagcactgaacaccctggccggggttttgacagctgccacagtctctgagctccagcctcgcgcctgaacccggtccctgccatggggcccccttccagctcaggcttctatgtgagccgcgcagtggccctgctgctggctgggctggtagccgccctcctgctggcgctggccgtactcgccgccttgtacggccactgcgagcgcgtcccaccgtcggagctgcctggactcagggacttggaagccgagtcttcccctcccctcaggcagaagccgacgccaaccccgaaacccagcagtgcacgcgagctagcggtgacgaccaccccgagcaactggcgacccccggggccctgggaccagctacgcctgccgccctggctcgtgccgctgcactacgatctggagctgtggccgcagctgaggcccgacgagcttccggccgggtctttgcccttcactggccgcgtgaacatcacggtgcgctgcacggtggccacctctcgactgctgctgcatagcctcttccaggactgcgagcgcgccgaggtgcggggacccctttccccgggcactgggaacgccacagtgggccgcgtgcccgtggacgacgtgtggttcgcgctggacacggaatacatggtgctggagctcagtgagcccctgaaacctggtagcagctacgagctgcagcttagcttctcgggcctggtgaaggaagacctcagggagggactcttcctcaacgtctacaccgaccagggcgagcgcaggtaagggctgtacagcccggggcccctctcggcccccgcccctgcgtcccggtgcaggctgcgg

SEQ ID NO: 231316 - DNA, 67 bp, Homo sapiens
  chr5:115420530-115420597
  hyper
cttaactccaacacgattggagtgtcgggagggcaactgggctgccctctccgccctccaggactgc

SEQ ID NO: 231317 - DNA, 146 bp, Homo sapiens; identical to SEQ ID NO: 199994
  chr5:115421021-115421167
  hyper

SEQ ID NO: 231318 - DNA, 683 bp, Homo sapiens
  chr5:115909339-115910022
  hyper
tgacaacaaaagattctctccgcttccacaccgtctccgcggaaccccttctcccacctggcactggacgaaaacagcgctgttatacccaaccccctccagccctcgagggcagaaccccttcccctgccttcgacacaccgggccagggagcttccgagaatcccaccatttagggcccgctctgctccctgctgggcacgcgggaggatgagccttgggtctcgcacacacacccccaggaggaacagccatacgcgccgtcgcggcccggggcggcgccgggcgtgtgcgcaacgcgggtgggaaagctctcgacgtggagccggacgcactctggggcgcagggcagagaggaaaggcaggcagggctcacggctgctcccccaggaccgggcaaggctcgggaaacagagacacaagacaaaataaaacgcaggcaccacaaagccgacagcacgcgctagccacggccccgggaccctcaggctggagtccagctgcccgggaggtggggcgcgcccgggcgcccggggcgtaccttttcggtgcatcgacggacaggcggccggggctcggagcgaactggtacagcgtgtatcccatttagtaatccattatcgaggggatctctccgggccgcgggctgcgctctctccttcgcaagcctttgtcattcctac

SEQ ID NO: 231319 - DNA, 185 bp, Homo sapiens
  chr5:115911052-115911237
  hyper
ccagaagcgatggacgctctacgtagttagatgaattggatagaagccggtgcggttaaaaatacacttggaagataagaacacagctattaattacgcacatacacacgttaataaagcatgtgaagtaagcaaataaactacagtgcagagaatggcgtttttaacgacggcgatctatttta

SEQ ID NO: 231320 - DNA, 262 bp, Homo sapiens
  chr5:115911447-115911709
  hyper
gttacaggcttgtgccaactcgtcgggccacaccacgttcccctccccctgccgctgcgccccgaaatcaactgcgcgccgcggctcttgctccccaagggggcttcgcagatggtacggatcctagtcgcaacctttaaacaaagtaacatcgggcggcccagcagttctcggagagatatttactagtcatggagttggctgagaaaagcaagtgcggagatcggggtctcagtcccacttaggccgagtttctttatat

SEQ ID NO: 231321 - DNA, 195 bp, Homo sapiens
  chr5:115911926-115912121
  hyper
ccagagctgtcagcaggggccgctatccccacctttctcgggcaaaggcctctatagacctggggtagtggggggcgcggccctaggtgcgcgcgcagcccccgcggcttcaagagccagcctcgggagggggttggggagtgtggggcggtgggtaggattgcgctttcccgcgggttgggtgggggccggctc

SEQ ID NO: 231322 - DNA, 351 bp, Homo sapiens
  chr5:118406922-118407273
  hyper
agtgtgtggacagcgcggccttcctggccggtgagtcggccccgggtcgtggccggtgaggggaccctgagcttcacctgggctagcgcggggagtgacaggtgcgcgaaggagcgcggcgctccgccctctcgccgacccgccccctccgggcctcgccctccggggctcgggatgagtcgcgggccccagctgagcggctccggctccaggcgcctgtcgctgcttctgccgtcgccaccgaagagcggccgccgcccctgagggaaggagggagggaagcagccgctgacccgtggcatgagctggatgcggtgtccgttgcaggactagggcgccgacatgaacctg

SEQ ID NO: 231323 - DNA, 285 bp, Homo sapiens
  chr5:118604723-118605008
  hyper
gagtgtgagtgggtgcgtttgaacaacttgtttaggtgggtgtgcgtacgagtgtgtgcaggagcgcacagcctcggaaactccgcgaaattttactcggttccagtgccgcactgaggatccaagaccccttttaggaacccttacctattcagggcgacctcttaaccacctcctgccgtgagcctcattccttccctccctttgtaactgggttcccgctatttgtcacgtcctcctgtaaccgcacatactggcgaaagcactgcccgggttatcagggtg

SEQ ID NO: 231324 - DNA, 90 bp, Homo sapiens
  chr5:118788277-118788367
  hyper
caccgctgaggttcgacgggcgggtggtactggtcaccggcgcgggggcaggtgagcatgcgaaggttggaggccgcgccccttgctgag

SEQ ID NO: 231325 - DNA, 1747 bp, Homo sapiens
  chr5:119799801-119801548
  hyper
gtggcatctgggagatatctcgaagggcaacgtcgaggggactgcaagcgtcaaccctggcgcggcagcacggcgcccctctccgcgggcggggagcgagcgcgtgtgcgcgagagcgccgggcggcggcgggaggaggcgcaggcgcgctgctcgcccgtctgcagccccgagccgagcgccgcgtctcgggagttgatggcagcaccactgtgcggccgcccggccgagcgcggagcgcagccactcgccgctgcccagggagcgcccaagatgtggggggaccggggcggcagcggccgtagcagcgccagggacgggggcacgcagcagcctccgctcgcccgcctgtcctgacctgcctcgcttgcccccaaagaatgtcagccaagtccaaggggaacccctcctcgtcctgtccagccgagggaccgccggcagcctccaaaaccaaggtgaaggaacagatcaagatcatcgtggaggatttggaattagtcctgggcgacctgaaggacgtggccaaggaacttaaggaggtgagaggcgcaggggtggggagggagttcggcacccttcgacccctccggggtcccctttccgattttcagcagggacagccagatttccaaactcctgggaaactacagaaaaggcgcctgcagacggactttctttgctcctggagtcctgagaggagttgttgttgcactttttaatttttttttttaatcaggaagaaatcaactagtgttttaatcgatggacctgggctggtgggagggatgaacgcacgcgtgtctctgaatctgtgtgtgtgacgacgggggagagggttagctgggggtgtgtcggcagaggaagtcgtgagcagcccggctggagcgtgcaagatgctcctctcctgccctattgcttccccagagtcctttggcaagtccgctgcctatctgtcagcctccccaagtcagggctgaagaggggccgggttctgggccctgggccagatcagggagggcagcctggaggaagcttggctcagactaccctccctgtctctcgagcctcgctgtagggaaggcgacccgggctgctggcagccttggggctaaggagggggtctgggactttctcactttctcagtttctgaagcatcccctgctctcctccgaacgtcgttaccagtaactctgggccttcccgccaccctacctctgcttccttccttccaccctgtcgccacttggcattgaacccgagaagcaggacgcgcaggagagtgtatgtgtggccggggtcttgccattggcgtcctggctctctgcagctgggactgcttcggttcttccccgcttttcctatcccacttcggttcagccctactcccgcccgcccctagccccaggtgatccagatggaaagaagcagagaaggtgtcagggctgaggctgcgtaactcaggcggcggctccgggcgggggcgggggccgggctgggaggggtggggtctcccgagccaggctggctgccggcggcgtcgcggagctggtagcagagtcccagcgcgccgctcactactgaatggggtcctggtgcggttctcggtgagggagtccgcagctccgctgcgtgagagctaagactagaacttcgaaggtggcggtggctgcagcgggaaaaggggtggggcgtagtctaggtccaaaattgtaatcctgtttctgaagccaacggggaggagactga

SEQ ID NO: 231326 - DNA, 48 bp, Homo sapiens
  chr5:121297472-121297520
  hyper
agctaccagcccccgtctggtttccataggaacgcgcaattccgttgc

SEQ ID NO: 231327 - DNA, 1746 bp, Homo sapiens
  chr5:121412480-121414226
  hyper
cacttcctaacacttgtctgcgcgaagcagtagcagtcagaaccaggcaccagagcgccccctgaaggtagaccggggagcggggcctcagacatatcagcccgtacctggccagacagttttcctccgccgcgcatctcaggttgtacatggacatcttctgcacgtacgtggacgcctggatgtagtaggggtcggccaccaggtctgggagacctaaacgtcagcaggcgacgggcgcagcagtgaaacaacccggcgccccccgctccaactccctacccctctaggtcccttactcctcacccttcgcccaccgggactgcagagtggagcggaggacagcaagagaactggggacgcccgggactgcaaagcaatgtgaaaaggaagcaggaggggccagacgcgcggtttgcactggattccagggctgccactgcaggcgcgtgggggagggatcggatctgcgaggaccggggcccgccgcgcccaggcagccacgtcgagaagccacatagctggggaccaggtgcacgggtgcttccagcggacttgggggtacttaccgtactggaagtagccagtgccgtatccgggccggtacctgcccccaggtctgggcctttcataagtatcgtagtagttgtaataagggttgtcgtcagagtacttgtaggggttgtaagggtcgtcgcccaccatgccgtccacgcggctgggcggccgcaggttactgagcgcaggaacttctcccggcgctgtctggttctccgcgcgcgaggcgccagcttcgcgggctctagatgtcgagtagccagcttggaaccagtgacgggcggtgggcctggggcggccagcggtgactccagatgagccggccgtccgcgttcgcgccgcggcggtgcggttgtcgcggatcagcaggatcggagtgcggggctgctgggcggaggcgttggctgcaccagggacggcggcgcccgggtcccggcggcgctgaggctggtactgtgagcccaggctcagcaagctgaacacctgcccgttgttctcccattggatctgctggcgccaggcgcccggagccgccggcggctcgcgcgggggctgctgttggccggcggcgggaggggcgcagtgcactagcgcgcagagctgcaaaggcccgagcaggagcacggtccaggcgaagcgcatcactccttttgccagattgaccccgctcgaggaggacgtggctcacagaaaataaaaacggggctcaaatcacgtgagggaaggagaaatcttcaaccaaggaggcgagcggagcacgggtatctcagtctccaccaagcaatgccaagggtgggattcagacccttccccagtcaaggcggctgctcggacgtggcacccttccctttcccctttctcagtcctggaaggcaacggggagcggcgcggcagtcccggagagcgggcagtgtctggagtgaaggaaggaggagagattttaaactttctggcacgtttgcaaagttacacaagccgttctggcccggccgcccctcagctatttgttcacgtaatgcgattggaaacgtgcaaggcggacagctcctcgcctctgcccctccctctctcccgtccctgccctcctccccccagacacgttgcacagggagcgttaaggggaaagaacaaaacggaacacacatcctgagacacactggcttaatctggggcgaacatgcaggaatt

SEQ ID NO: 231328 - DNA, 70 bp, Homo sapiens
  chr5:121647494-121647564
  hyper
tcgtggacaggagccggcgggcaggccgggggatccctggtgaggaagcggcgagggaggggcgtgggcc

SEQ ID NO: 231329 - DNA, 212 bp, Homo sapiens
  chr5:121648044-121648256
  hyper
tccaagtttgcaccaggcgaccccggcgggtgtcgccccgtgctccccaagccccgggacccctttgtgccgcgagtctcggctgctccgggcagcagaggcgcctctgcagaaagggtttgagggggaggtctctatagtaacagtaacagtggtggcggcagcggctgctttactggggaaagggggaaacaacccccgcctcggtttcc

SEQ ID NO: 231330 - DNA, 133 bp, Homo sapiens
  chr5:121648436-121648569
  hyper
tctggtgttgctgccgcccctcgctcatcagcaccagctccccgactgccctgtccagcccgggctccgccagcctccctctagtgctgttctgcgtcccaggctggtccgcgtggatttcagaggggaatgt

SEQ ID NO: 231331 - DNA, 232 bp, Homo sapiens
  chr5:121648819-121649051
  hyper
tcattttcaatggacggctaggaggggggaaacgtgttgttttttcctgtgggaacgttgctttccttgggaaagttaattaaggaagcattactgtcggtgccccttttcacttgctggaggcaggatcggattcctcttggctgttactgacaagtgcccatcaaagagcccggaggacgggagaactgctgcaggacagtctcgccacacaccacgtgccgtggagcct

SEQ ID NO: 231332 - DNA, 887 bp, Homo sapiens
  chr5:122110539-122111426
  hyper
cgggtcagcaagtcggtggcgaaaagagggccacgtcccagactttctgggaggaggcgggacaaaggggcggggcgagcgcagcgccctccgggtgggcgccgtcaagaggccgggggcggggccgagcgcggctgggcggggccttgagaggccggccgggggcggggaggctggcgggtcggcgcgggcccagccgtgcgtgctcacgtgacgggtccgcgaggcccagctcgcgcagtcgttcgggtgagcgaagatggcggccgagagggaacctcctccgctgggggacgggaagcccaccgactttgaggatctggaggacggagaggacctgttcaccagcactgtctccaccctagaggtgagaccgcgtcgctgcgggtgctgcgctgcgtagctgccgcgcgtctcacctttcccctgccccgacttgtccctccccatcccccgtgtttgcaaggaccgtcttggggtgacacctgtgacgcgagccccacctccggtgcctgtcagagggatgtgcttgggctgagcgcagggcctcctcaggagagcagcctgcggcccgcgggtgccgacctaatcctcagaggggccagaaccgaaccgagcattgcagcggcgctttcccagctcagctggccttcctcggtgtctcttgcacgtcctcctcttcaagccggagaagggcttgctctgcatcccagtaaacctccaccgagctcttttgaaggggtgctcgcttttcctttccagagggagggtgtgccgctgccaggggagcgcaatgaagtgagcgctgaggggccgagggtctgtggggaacgaatgggtgcactttcccaggaatggcccttcacggactgctggttcctcttgag

SEQ ID NO: 231333 - DNA, 59 bp, Homo sapiens
  chr5:122180920-122180979
  hyper
ctcttaatggtggcgtctagcaaactgcaaatcaagctccagccggagtccgcagggca

SEQ ID NO: 231334 - DNA, 350 bp, Homo sapiens
  chr5:122371100-122371450
  hyper
agatcagagcttctcgaaaccatcaggctgtttatcagccccgcccacaacgtggcacggcctttctgcgacatcagatgctgagctggacctcctcctccccaccccctagtcctccccgtcctcaggtggcgtctgcggtcgaggatgtaagcattctactcgttgattagtatcgtttccattgacaaaccccagactgatgaagaccactttcagctgcagcccgccccctccagcttcagcttcgaagacactattgccagtgggttttctagaagtggtgatcatgggcaccaaattatcccctccctctccctgcattctcccattatcgtctacccttggtt

SEQ ID NO: 231335 - DNA, 134 bp, Homo sapiens; identical to SEQ ID NO: 200003
  chr5:122371731-122371865
  hyper

SEQ ID NO: 231336 - DNA, 878 bp, Homo sapiens
  chr5:122372079-122372957
  hyper
tccagtccccctgcgcccgggaagcctccacctcgcccgccctgacaccgaggtcccagtatccaaagcgcccccagggccccgcccgcaacaggggaagttgcagcccgccgctctcggtcaccttggccgtcaccgaggggcctcgcttgcggaagccctcggcccccgaagaaaacacaagtgcgccgagccccacgcaaagcacgagaggtagcagcagccgaggacccgggcccatggtgagcggtggcagcggcgctaccggcacgggcgctaccggcacgggcgcgacacaggctctgggacagctgacgggactgccggccggctgcgcctgcgcgctcccggttgcgggggatggggatcgggcagtccgggaagggcggggacccggggcgcgttcctcccaagttcagactcgcgacccgaacttgggattcggaggagcgcgcccacagggcgcagccagggctcgaccgccgcgccttaggcgggtgcggagggcgccagggacgggagggagcccgggttgcccaggcgcggagccgggcgcagcgggctaggctgggagcacctccaggaatttaccgcgtaggcgcggattaaacttggacgggaagaccaggactctcgggcttccgcgtccgcccggcagctagcgctccgcgggactgggaactctgcagccggtcccggtgtgattgctgccgccttgggagcagcctccgccgcggccgccgagttccaatggcccattggaaccttttgctaggttttggacgcttagcagaactttgacatcgctggaggcgtggagccctgttgcactcgaataatggcctctctttgagatgattcacgtctagggaacactg

SEQ ID NO: 231337 - DNA, 282 bp, Homo sapiens
  chr5:122422048-122422330
  hyper
aagtgatttgtttccgtggtcttctcagtattgaagggggtgggggaagcggatttgagggggtgcatgtccttgccgtcggtgggctcactttctaaaaactattgagatgcgccagggtggccgtgaccaagcgggcccagggtcaactgtgtgagggggaagcgcccctcagagcgcgcgcagcgtcgggggtccagcttacgccgctgcgcgcccttgtgcgcaccgggtgaggatgccgagctctgcgggcatcccggaagccgcggtggaggcagg

SEQ ID NO: 231338 - DNA, 172 bp, Homo sapiens
  chr5:122423303-122423475
  hyper
cttctcccgtggcccgacaagccactcttcggcagttctgcgagcagattaattgaaacgggcctggaacttcatcctctcctcccgatggagttgctggaggtctgcggacactgcctggttagcctccgggaccacagcgccgtgggctttccctcgtggtgtctgcctt

SEQ ID NO: 231339 - DNA, 909 bp, Homo sapiens
  chr5:122423765-122424674
  hyper
tatggccagaaccccggcgatgggaaagtacctcctgagtcggtcaatttcacacaccctgcctgtgccctctaccatctactaccgaaaatgccaggaagagctggggggcaagtgcctccttcgtgggtgcgagactgcatcgaagggctgccctggcacaaagtctggggagaggacatggtggaggtggggctgcactcccaccctgcccctctaacaccaggttttgggtagagaaacctatgcgtgacctcctgcggcagccgcaggcagctgaccgcaaacagcctcgcccgtgtcccggagcagttgtgccaccagacgtaacactggatacttgtctccgggccccaagaaggagagggaaagagccctccagaagacaacccgagaaggggtcagcagagcgctgggtggagtgcagactccattgcagccgcctcccagccccacggccaagcttgagtccctccaggaccagctgctctcggtctcaggaccctcggtcctacgcctccctgcaccgacaagcctccctcctgggctgcagacagagggtttcactgcagcgcgcaacccgtcccgctccgcccccaacttttctccccggaggatttatgttagaggttgcgtggcgggcgagtggactctggcacccagaagcacttcaggaaaaactgagccgggcaaaagcgcaaacccggtcctggcggcgcgggcttgctccagcgcggacaccacagcgtgtgcggagatgcattcccgttgccgcatttccactgctttcaagatcagggcactgagctgggacccagaaaagacatatcatgggcagaaagagacaacaggctagcggcagacgtcacgccaaaaaaacaggggatgggagggcggaggagtttgtgc

SEQ ID NO: 231340 - DNA, 1045 bp, Homo sapiens
  chr5:122424885-122425930
  hyper
ctcactctattttgtgctgtcgtaaaacccacgtgtccagccgggaagctgccagagcgtggaaccaaggagccaggacgcggcagcggccaagcgcagcagcccacggcggttgagtcgggcgcccaggtccgtccgcactctcgcgccctccgcgggcctcccaattttctcgcttgcaggtcgggaggtttccgggcggcacaatctctaggactctcctcccgcgctgctcaggggcatgtagcgcacgcagggcgcacactctcgcgcacccgcacgctcaccgagacacccgcacgcacccaccggcagcaccgagttttcaggtaaggtgaggctggtctgggacttaagagtctagggcttggtagataggaaggttggtggtcctaggttgggggcgggcggcgagactgttctgcctcctggcgcctgaggccaacgcggctcgggcgctgcgccacgccggctcgggtcggctccgggcgctggctgagggcgggggctgcgtcctgcagccgagttctacggggcagcgccctcctgtcgggccccagcattgctggatgggagctggacgctgcgatcggggaggcagagcagggtgcacacagctccctctgtgcggcgccgcagcttcggagtaaactttgcgcccaagcggagttgggaagagggagccgcggaaccgggcggccgccggctgaaccaccggctcgggcactttctccagggtcccagtggccctcttcccggcccctttcgcccagctcacgcgccccctcttccctgccctctgcccccagttcgaggcgccggacatgctgaagcccggagaccccggcggttcggccttcctcaaagtggacccagcctacctgcagcactggcagcaactcttccctcacggaggcgcaggcccgctcaagggcagcggcgccgcgggtctcctgagcgcgccgcagcctcttcagccgccgccgccgcccccgcccccggagcgcgctgagcctccgccggacagcctgcgcccgcggcccgc

SEQ ID NO: 231341 - DNA, 55 bp, Homo sapiens
  chr5:122430020-122430075
  hyper
ccccttctgccctgcgcctcctctgtcaaagaccagcgagcgccttagattgcag

SEQ ID NO: 231342 - DNA, 777 bp, Homo sapiens
  chr5:122430553-122431330
  hyper
attaatacagtcatcggaagacaaataagacccacattttctccctcccaccttcttgctctcttctttttgtctctccctcttggtcccagggtcaagcccgcagccaggcagggcagagaacgcccagagcttttgcgattcgcggggagctttaaactcgcgtagagggagagttcctgagagaattcccaggagctgggccgccccgcagggtcgagactgaaatcaattggctccccttccggcggccaggcaaacctgcctcgcctctggatctgcttctagacccgctcccggggcttggaagacccctgccgggtagaggaggagggccgggtgggtggcggggtgcagtggggacgtcggatcgtgggtggtgtcggcggccacgcctcatgtcagaagagagcctttcgtgggcaggagcggggtgggaccttcaaaactcagccttcggcgctgaggcctgggcgccccaccccgcccatcgctccctttcagccatcccatctagcctatagctcgagaaggcagtggggggaccgcaggctggagccccgggggcgtgaaccccacgcgagaagttcgggcccggatgctctgcctgcccgccctctgcccggctccccagcccccacgcccctccccgcctagggcgcacgcggcactgccagcaggcggcactcccgggtcctagtcgccgggctgggatcgatgggcgccggcccctcgggtctcggcctgcgagactgagggccgcgaccttggcggcgg

SEQ ID NO: 231343 - DNA, 1593 bp, Homo sapiens
  chr5:122434061-122435654
  hyper
caaggaggctgggtcgcgccggcgggcgccgaggccaccttctcggggcaggccatccgcgctgaggcgcagacacggcggctcctccaggcccattaataacccggagggcgctgcgatccgacagcgcagtcgccacaggctctatttcccgtggccgcctgcctccttccagcccagttcgagtggagggatactgggcgcccactaccgcccggcccggagggtgggggtccctctcgcgcaggctgctttggagagtgtcggagagagacagctttatctacagcttcacccattgtatagcacaacagaatcgcatttagcctggagaacagccgtcggggcaggagttggtgccttctctaacaattaggctgatcgttaaatttgctattcctttcttccggcgtctagggagagcgtgcacaccaaaccctccagaacagcaccccggtcccccaccccgccccacctgtccccgccctgcttcagtgcctggagggagaactgactggtcgcttgagggaccccatttcgggcgcgcccttggagtcctggggctgcggctcctgctctaccgggctgcaggcttgctctgccccgtcccgtggcgtttgggaggcagtcgaggaagcctccgagtctctgggtcgaaggaagtgcgaatggcacccgcgatagactggccgtctcccccaccccgccccgtctggtgattttaaatcgtctcctgtgtaattgtaaaaagaggaaagctgaatacccagacgaccagtatagaatctcttcgagacagcagattgggcaagagacgggctttttttcgcaatacaaggataaacacatcctgaaactccagatagaaacctcaggaatgggcgagagggtcagaaggaacgagagacagtagggaagagagagagagagacagagacagagggagagatgcagagagactgaaacgggaggaagaagcctggaactgtcggttccgtggagagcggacatgctatctgcgcccagatccgaaggctttttggggagcctagagtcctggcccggtaccaggcagatctgggtgcggcgaattccaagggagcggcgcgggttctcttctcctcctcctctgagttgcttcggtgcccccaaggcatcaccttcctcgaaggtggcttacccaggcgggcggtgatgctgttgtctcgggagtttactcaaagatgggccgctcggggcggccggattaacccgctcccttcccttcctccttcttgtctcccgcaggttgcgacatgtgcgcggacaaccgcaacggcgagtgccctatgcatgggccactgcactcgctgcgccggcttgtgggcaccagcagcgctgcggccgccgcgcccccgccggagctgccggagtggctgcgggacctgcctcgcgaggtgtgcctctgcaccagtactgtgcccggcctggcctacggcatctgcgcggcgcagaggatccagcaaggcacctggattggacctttccaaggcgtgcttctgcccccagagaaggtgcaggcaggcgccgtgaggaacacgcagcatctctggg

SEQ ID NO: 231344 - DNA, 197 bp, Homo sapiens
  chr5:122621171-122621368
  hyper
agcagaaaggtgcgcgtggtcagttccagctcctaaaatgatgtgcagtctgcaagctggaaaggtctcggcgcggggtgtgggcagttgtgtggagctagaacctagccgctgcagcgggatcccagggcctgaggcgcaggaacccactgcccggggccccagcgctgtcagcccctcctgccctccacccaccc

SEQ ID NO: 231345 - DNA, 77 bp, Homo sapiens
  chr5:122621428-122621505
  hyper
tcccgcccctccccccactccctctaccccgactccctctccctcttcccccacgccagggacgcaccgcccttggt

SEQ ID NO: 231346 - DNA, 52 bp, Homo sapiens
  chr5:122759250-122759302
  hyper
gtgggaccagctgcgcaagcgcactactgctgtaaacgcttcctgaagctgc

SEQ ID NO: 231347 - DNA, 113 bp, Homo sapiens
  chr5:122759572-122759685
  hyper
gacgtaaactccccgagaatttcctgtcccttagaaattacccctaaaacaaaaacactgtcacgtgggcaatgaaatataaaggttcttccacccccgatgacaaagttatt

SEQ ID NO: 231348 - DNA, 41 bp, Homo sapiens
  chr5:122847730-122847771
  hyper
gccgtctcctttccggtcggcgatccgaccaatccaagaag

SEQ ID NO: 231349 - DNA, 1223 bp, Homo sapiens
  chr5:124082317-124083540
  hyper
gcgtccgctagtaacgagacagaatgtgctaacatcgggataaattagtgaaagggaagaaagaataagaagaaaggactgaaaatctgggctggattccgcctgttagtcgggaagtggcatttttccgcccgtcctgacagatttgatttcttgaactaacttaagagaaaaggagggggggagtagagggaggaggaggagaagaaagggtgggatgagaaactgggcaagaggagaaaaagaaaggtgtggaggaggagacagcagatgattcagtgagctgataaaccagttataacagcattcgctcggggcggggggcggggggcttggggcggtggggtggggaaaataacggcgtttaaaatgggctcagtcttcgaaacctaaaggatgtgatgttttcctgtcttatgttgttttaagaaaaaggaactgagttcctagtatagctcccgaggggagtggaatcctctgtcgctcaggtcagccagtcatgtggtaattcgataattagagtcaaaataaggtttttgttttctttttttttttttttaaggcgacccttttcgggagtttttccctcttatactcgcagcaaacggtgtgtctcccttttatttattttttctctcctctcccttcgcccagcccctcctgtgtttagtcagatggccccggagcttggcttagtatttttaattagctggcgtttggaagctaaaagcagtaatgaattgttgatggattggaagtggagagtcgctttgctggaaatgtcggggctgggagagggggatgggcgagttagtaacaaccaaccatctaaaaggagcgattttgttacagtgcaagcctttcacatcacgtgaggatcaagggctcaattggttgtcgtgagaacaaaaatggtgacaagcgtatcaagaaaatactgatctggtctttaaaaaaaaaaaagctgaaagtctctcccctccccctgcacacactcccccaacctcctccccccgcccccccgcagtgggcgaagctacaagttatgaatgtgaaacatttctcggagatctaggatctccgaagttcggaaggagcgaaatgtaatgagcacaagagcaaagcagatgttttaaagaaacactttataaacctttcctcaacttatctccaatttgtcggctttcccaaggggccagggacggggacgcctgggggaggga

SEQ ID NO: 231350 - DNA, 60 bp, Homo sapiens
  chr5:124083787-124083847
  hyper
taatattaaattatcgggcactgggatctgacaggagacagaaatcggcttgttctgccc

SEQ ID NO: 231351 - DNA, 69 bp, Homo sapiens
  chr5:124084307-124084376
  hyper
aatctcttcaacaaatttattattaaagaagatggaccatcaaatgtcacagaccgtcctgtgtatttt

SEQ ID NO: 231352 - DNA, 44 bp, Homo sapiens
  chr5:124084646-124084690
  hyper
ttgagatatacacacgtataaaacacacactgagagcgggtggg

SEQ ID NO: 231353 - DNA, 765 bp, Homo sapiens
  chr5:125930478-125931243
  hyper
cagctccaaaatgacgtcgattctgcatagcacacaaggacctaaaatctaagtttttgttttaaaggcaccctacacgagaaaacttttactgtggagcttcaaaatctcccatgctactaccgcatccagcgccagcggggagtcggtaggtcagtgcccgcccggcctcctcgagcgagccccggcggctgcagagatttcttgagcgcccgcgtacctctccccggcctccccagcttccattatacacgccctcgttttcctcgcggagccccagctctttcagccacgcatactggggctgattgatgaggagagtggacatgaaggcggcaggcctgctccaaggtccagagagcttgctggtctttgcagcgtgcacacacagcgcgcgaggaaggcgccacatactgagcccgggactcgggatgagcccaaggccctgagagctgctgaaatagagccccgccccccgcccgggagaacccattgggcagacccgacccctcccactgggcacgaccccgccaccgccccgtctgcccctggtcttccggaggagcctgcggctgaatcctgcctggaacaatgggagtgctacagggaggagtgggctgctgccatctggtgaaagactccgggagccacagttccagctgggaattcttttcagcaaaatattggcgctgaagtacagtaggctatagcaggggttctgaaactgtaaaatgcgtgtaatgacctggtcgtcgtggtaaatgc

SEQ ID NO: 231354 - DNA, 588 bp, Homo sapiens
  chr5:126626227-126626815
  hyper
atttgctaacttcgcgaccaggcctttggcggggtcacccaccaggcggtggaagccgctcaggcaggggcgactcacgatcgaggtgcagcagtcaggccgggaagatcctgcatgttgcgctagggactgcgcgcggcgccaagcgacaaccccccagcggccactgccccggcagcagcagctgcagcagcggcaactgctcgaatcccggccccggctcgggttacccgcccccaccccctccagcatctcgggccagacagagaaaaccttgttcaagtttgcagcaagtactttcccggtgcgcaaaactgggcgactgggaacgcgttgagacgttcctctttcccgcttctccacctttacgcctgaaagaagactcccaaagattgctttcttctgggacgctgcttggacgctaaccgcgttgattggaacagattttgtgtcttggctggctttgggtgaagaccggggagaaaaggttgcgctgcgattctcaagatctctggacctgggtaagagttgggcaaactcaactccggcggctcctggaccttggccggacgccggaaggcttctcat

SEQ ID NO: 231355 - DNA, 233 bp, Homo sapiens
  chr5:127420001-127420234
  hyper
acggggaagccagcggcgagagcgagccggctaaaggcagcgaggaagccaagggccgcttccgcgtgaacttcgtggacccagctgcctcctcgtcggctgaagacagcctgtcagatgctgccggggtcggagtcgacgggcccaacgtgagcttccagaacggcggggacacggtgctgagcgagggcagcagcctgcactccggcggcggcggcggcagtgggcaccac

SEQ ID NO: 231356 - DNA, 334 bp, Homo sapiens
  chr5:127536982-127537316
  hyper
ttgacatttctcagatttcacgataagagggaagcgaagaaaaaagcacgtgacttgaaaatgtttttctctttttaaagccacatctttctgcttcattttgatttcagtgtaactcgccgagtgaggactcttggcccacgctgggagcccgcagccggcatccgccaccgccgggcaggtgtgcgctgggcgggcgcgcggactcgcctttgcccggcccgcggctcccccgtgtggcctgagtaggtagtgatgcgaataacatgctttgagaagtcagaaggctggcgtctcttcctccggagctcacggaggagtctctctggtttcc

SEQ ID NO: 231357 - DNA, 560 bp, Homo sapiens
  chr5:127872745-127873305
  hyper
tcagaacctgttcccgcagcgcgagctctgcacacgctctgcgatcggcacccctggaccccctaaccacccgccgcccaacccccggagagagggctttccgcccgctgagctgcggggttgggaaggaaaagggggacgcgctcctgggggtctttggatattctggcaaagggggctgcagctctaggctccagctaaagggtctgggacggagtgggccagaaagccgccaaactgaggattcccccctcccccaagccggagccctaggtgcggagccgcttgcccacttaccctcggagcacgtcctgctgtcctcgccggcggacgcggctggccactgcggcaccctcctcgcgatactcgggcgctagaaacccgccttcagagcctgctgtagcggaccgaacctgttgcggcggcggctggggccggggcggcttgggcggaggaggctgaggctggccggccgtgccctgcgcccagagcaccacacagcccagccacaggaagtagagctggagacacagcctccgtcttctccccatcgccggcgc

SEQ ID NO: 231358 - DNA, 94 bp, Homo sapiens
  chr5:127873665-127873759
  hyper
caaaagaaaaaagggcctgcacgcagagctcggcggattcccgtgcgctccgaagacggatattggaaagctgcaaaagtcaccagaaagaaac

SEQ ID NO: 231359 - DNA, 1030 bp, Homo sapiens
  chr5:127874059-127875089
  hyper
ggcgcagagtgggcggggacagagtaagggagagatcgggactgaggaacgaggggaaccagggttgggtgaggggaagaggaaggaagggggggagggcgaagggagggaagaggacggagattggggagaaggggggcgaacccgagaggaaggccgggctggaagagggacttggaaagagggattggcgagcccgggtgcgagaggaaatgagcgggggatgggggcgaagttagggcaaagagagaagtgggaaaggagagggagggccaaggtccgggcgccgagaggaggggcccggggggccggctggagggggcgaggcgctaggcggctttgcttcccgtccccgtcaattggccgctagctctgttttgactgcctgtacaaagcgagtagacggcgggggatggggcgattagggaccggatttgggaaaggaggcagcagccccttcccctccccctccgtcctcgcccggccgcggaccagggactagggtgcctaagcgcgccaggcttggccggacccgcagctgaactgacccgcagctgaacttccccgccggacagaggccgcaaggttgaggatgagaacgggtctttctgtagggtcccggcccctgacctgggatggggggattcgcagtcagccaggaatagaggctcacggggctgttggttgcagcctcaatccaagaaggaggagacctcccctttgccctcctacccccaccgccccaccgggagcggcgtcagtctgcgggaccaaattaggggctgggagtttccagattgaaatgcgccctccaccaccaagagggagctcacgcggccgcggggggccgaggcagccagccggcgccgcggtcctggggagtccgtgcaggggtgtgctctggtgtgaaacctggcaggactctgcctgggcttgcatgcagggaggggttagagactctgaaatgtactagcgggcagggtggtgacaaggcgggtaaatgaggctcggggcatgcccttgcttcctg

SEQ ID NO: 231360 - DNA, 673 bp, Homo sapiens
  chr5:128300650-128301323
  hyper
ttcaatggatgacctttgtgcgacactgttataccttatcagcctcgccagggcccccgcgccgcccaatcccagcaactctggttctcctgtgaccccaagccttccagatccctgggtttccccccacgggactgtcacattcttccccgccggagacgccagtcgcggggcctcctccctggggtgtgagcaggtcggcgcgccacacttctctaggtggccggacgcgcgcccagggaggagctggcggcggggcccaggctgttccggctgcggcacgccaggggatgtggttagccctgagcctggaggccgaaggtgggcaggcaacactcccaccatgtttcggaggagaatacactaggctagcctaacgacactcggagtgcgagctgcggctggggtaggggcacccctttccagcgggcgcgtgggtcaccaaggagcagttctccgggacccgttgcgtcagagggactgggcggggctgggcggggcaggacgggggcggcgctcaggaaccctggaacccgctggccctgaggccacggaccgagacgtggtgctgagcccctgcgcggtttctggtgcgtagagactgtaaatcgctgcgcttctcagtcatcatcatcccagcttttcccggctcgaattcagcctccaactcaag

SEQ ID NO: 231361 - DNA, 1020 bp, Homo sapiens
  chr5:128795584-128796604
  hyper
gagactgtgacaccagcctccgcccgttccgcgcgggtgcaggcggcgagcctcggctcggacaccacagctctcctgcccgcgccgggcagtcctctgcctgtccagaggcagcactcccggctctcggctggctgtgggtctgtcttgtggggctccagcactagcctgctcggcctcggaaactcctgcagcgtccagaacacagaaaatagactcatctcctaattcgccagggagctcgagggctgcggggccgcggggctgcctcccccgctcctcccccaacccgaccccaccccacccccgccagggcttcggcggcctcccggagtcacacagcctacccccccaccccaacaccccctcccccggcagacaaagggcctgggcaaattcgccgcccggcctcctagcgctccggggaggccgctgcgccccggagtggatcgcgctggaggcgtgcgccgggcgagaagccgcggccgcgggagcgcagtatggggaagaaccgcgagatgcgcctgactcacatctgctgctgctgcctcctttaccagctggggttcctgtcgaatgggatcgtttcaggtaagttcttccgtgactttctcgcttcctttccagccatcccagcggagaccgcgaacgtacgggtcggcagggctggtgcaaccggtgcgtggagagcagggctcagtgggtagcaataaaaatgagcttgaggtgcaggttaaggggtcaagttcggaaatgaagcacacttctgccggcctcgttttaaccgtatgtggaatagtttccttctaattagagcaataatatttgcaaaggtacgtttacagcacctggaggaaaattagaacgtacctaagttgatagcaacgctctgctctagcatacacttcagaaatcgtttactcgtgctggagtctttgcatcggttttcttttcaacaatgaagtgcggtcaccaaactttgattccccctcccccgcccctaatataatcgtactttta

SEQ ID NO: 231362 - DNA, 66 bp, Homo sapiens
  chr5:128797204-128797270
  hyper
ggcgacgaagtgttgctgcggatcccggccttctctcgggacctgtacctgctgctccggagagac

SEQ ID NO: 231363 - DNA, 586 bp, Homo sapiens
  chr5:129239686-129240272
  hyper
tgggccgggggaggagagcacggtgggacagcaacgaacttgctgggggctcccggacccgagctccgccgatgaggtcagcggagcctaggcgccgggaggaggccagtagagcccccagacacgagtgtcgggaggccagcggaggggcgggacgggacgggaaatgggacgaagagcaagagctgggggaggagggaagagggggcgtcggcgctgcaagccggaggcggcccgacagggatcgtttccttccggagaggaggccggctctggactgaggcgcggacggggggcgtccaagggcgggtgacggggaaataccgcggcccgcgcttctctccggctggcagcggtgccgcctgcggctcctcctccgggccagctcggagcccggcggcggggggagcgggaggcgggagtgagggcgggggctcgggaaggagggaggagggagggcccaggcgcgccactgacagggtggcagcctaggagcggacgcgttgccgccgccgctgctcctcctcctcctcctgcagctcctccagctgccgctgctgccgccgctgccgccaccgccgccgcc

SEQ ID NO: 231364 - DNA, 330 bp, Homo sapiens
  chr5:129241292-129241622
  hyper
catgcgcgccgacgacgatgtctacatcaaaggtgacctccctgcgccggctttccagcctgccagtctccccgactcctttctctgtaaccggtcctagcccctgcccagcccctccgctgcttctctgccagcacgtgcttcgggctcccacaggccctggcccgccctccccaccccttgcatccgcccacaattcgtagcccgttcctcgtcttctgcaatctggaccctcctcacacctgcctggctttattcgccttcctcacttgctgttttcggtgccgcctcgcgcttgtcccttagtctttacctcgtcggagaggttag

SEQ ID NO: 231365 - DNA, 37 bp, Homo sapiens
  chr5:129241842-129241879
  hyper
tgaggaatcgtcttcgctgtcccggaccctttcctat

SEQ ID NO: 231366 - DNA, 115 bp, Homo sapiens; identical to SEQ ID NO: 200024
  chr5:130970643-130970758
  hyper

SEQ ID NO: 231367 - DNA, 79 bp, Homo sapiens
  chr5:130971007-130971086
  hyper
gttaaaattggggcggtgcgagtaagtcgtttcctgctgtcgtcgtgagatttaaagacacctcgcgagacctcaccta

SEQ ID NO: 231368 - DNA, 67 bp, Homo sapiens
  chr5:131131878-131131945
  hyper
tttggtcttccttcggcagtaaccctaaactcaagtttcacatttctccttcgataacattaaggtc

SEQ ID NO: 231369 - DNA, 31 bp, Homo sapiens
  chr5:131133364-131133395
  hyper
cccgcaaagacgacctcgagcaggcactgcg

SEQ ID NO: 231370 - DNA, 772 bp, Homo sapiens
  chr5:131346923-131347695
  hyper
acgcaagaactcggcgggggtttgtggtggggtcgcagagagcaagccctatatctccctccgcagacccaggtgctccccaaacccggcccggagcccgcgagaactgggggcggagggtgtacttaggcggccctggggaccttgacgggacagctcagcagcaggggatgggggctcggcggccgcggagatgtaacacctccacctcgggcgaagacctcatagcctgcgggagatgggagtccgggacgcggacaggacgggcacttacctacgaatagccagagggagccccccgacacgaggaagaaggtcagcatggcggtcagcggggcccggcccggcccggcccggcctccccgacccgcagccccgcagccccgcagcccagcagccccagcagtagccgcgccgccgccgccgctgccgggtatttttagcccccgccctccggccccgcagctcccgcctccccgcgccgctgcggagacggctcaagggggagggcgcggcgcgcactcgcaaccgagccttactccctgccctgcagcctggccggccgggtctggggcttgccccgcactgaccgcggtgtcggaaccgccaagctcccgggcgggggaggggcccggccgcagagcgaaccagccctctccggccccgctctccaacgtcagtacctggcattctgcggaaaccggctggaagggggagcacgggcgacgagcgccagagcgtgacattgagcccaccccgccgccacccaccc

SEQ ID NO: 231371 - DNA, 634 bp, Homo sapiens
  chr5:131563041-131563675
  hyper
tgggagggtgcagaacgggcttagccaatatgaagaggcccctcagggccaggcggacgccgcgcccccgctcccaacagccggcagcccggggtcaggccgccacttcccgggagcctgacagggaagagcggccaagttcccagccccgcccgacagccgagggaactgcacgaagggcgccgctgacctcaccaccctgagctcgggaaggcttgcgggcggcggcacaagaacccagacgggtgcagaaacagggcggagggtgcagggtggcggcccggactgcgctgctggcggctagcggcgcgacccccggccccggatccggccccggcccctaactctcagccccgcgcgggcagaacgcaccgcctggcgaccccagcccgcgccccagcgctaaggttgatctggcggctgagcgggcggggcgctcacctggacactcgcagctcccggcgtttccagaacctcccgcggcgtcgcccggtcagctcggcgcctcctcccttggcgactccgcctcgggccgctgccggggctccgcccacttgagccgccgccacgtccccacctcacgctccacacgcctgcctgcgtcctggtccccagctccggtggctccgccggg

SEQ ID NO: 231372 - DNA, 313 bp, Homo sapiens
  chr5:131593127-131593440
  hyper
agcaggatccaggccgtcggggccgtccgaacgcggggatctctgagagctgagtgggggtgccgggttgccggcagccggggctgagggcgggtcctcagagccccccgaagtgggagggtcgggctggccgcggggccaatccaggcgcacagggagcgggggcgggggctgggccgagtggggacaggggcgggcgggccgggggcgggcgcggcgtccaggcggcggcggcggctgcggcggcggcggctcctcctcagagtccggctcaggctccggctgcggctccagcccgcgatgccccattccg

SEQ ID NO: 231373 - DNA, 286 bp, Homo sapiens
  chr5:131705174-131705460
  hyper
ccgctctcccactcgctccccgcccggcgctagaggagcgagttcggactcggaccccaaggcctcgagtcccgctgccttcctaagccgagcccgggctacctcggtcgtccccagcaggcttggctggcagaggccgggcctcgccaggtccccaggacaggccccgcccgggcctcaggtgcactcccggcccgccccgcgccctcgcgtcccgccccagctccgccttcgccggcgccgctctgcctgccagcggggcgcgccttgcggcccaggcccgcaa

SEQ ID NO: 231374 - DNA, 153 bp, Homo sapiens
  chr5:131800391-131800544
  hyper
aggggcctggctctcgattaatctgggccatttcataccggctgtgctcacccaggcacaaacactgaaagcaacagctggcaaagccatcgcttggtagcagcttggaagacaccaccaaagaagctctcatggaagcggcagatttcctga

SEQ ID NO: 231375 - DNA, 250 bp, Homo sapiens
  chr5:131825630-131825880
  hyper
tgaatccattctacgccttcctgacagccacagcgcccacaacgctaagaccaggacgctaacccttccggcccggtttcccctcctctggagaagtggcccaaggaacacctgtggcgcctcttcccgcagtctccgtaggtcacgattccctccagccacctgggcagtaagccagcccttgccaccagcacagggagcccaaaacctgtcgcctgggcgcggagctgggaccgccgaaagccgggag

SEQ ID NO: 231376 - DNA, 98 bp, Homo sapiens
  chr5:131831522-131831620
  hyper
cgctgatggccgctgcggagcttcatttcttataaacaccgccgttgggaggaaagagaactcagccccctgtcagtcccatggggccccgaggccgg

SEQ ID NO: 231377 - DNA, 374 bp, Homo sapiens
  chr5:131892942-131893316
  hyper
gcacgccttgcttcggcctcagttaagcctttgtgggctccaggtccctggtgagattagaaacgtttgcaaacatgtcccggatcgaaaagatgagcattctgggcgtgcggagttttggaatagaggacaaagataagcaaattatcactttcttcagcccccttacaattttggttggacccaatggggcgggaaagacggtaagtcttcagtagccgccttcagtttacaggtcgctacatctttcggagaataaaatgggaagttgagaactctccttaggagcagaagcgtccctagggctccacaggtgtaggcccttaaagtgccttagggtgtggcctgcaggctacagcgaccttaggagtttg

SEQ ID NO: 231378 - DNA, 417 bp, Homo sapiens
  chr5:131991823-131992240
  hyper
ggctgccgctcggccgggcccgcggggtccctcggcctgacatggccggtgctggagcggcacgtgcgcgcctcggcccctcggccgctcccgcccctcgccggtgcgcaccggcgctcggggagccgctggcccgggtgtccagccggcccttgccctgcctggcgctcggaccgccacctttgccgccccctcgccagcctccgcagcttccagactggccggtctgcgcgcccacccctgcctcccggaccggccaccgccggaggccgcggaggagggcccggccgcgcagatcccgcttatcgggcccatctcccgttacataaggccacccccctatctccgcgggccatcgccgccgcaaccgccgcgccagcgccttctcccacgcgcgggggcgcccctgcccaccgc

SEQ ID NO: 231379 - DNA, 182 bp, Homo sapiens; identical to SEQ ID NO: 200030
  chr5:132072698-132072880
  hyper

SEQ ID NO: 231380 - DNA, 168 bp, Homo sapiens
  chr5:132073294-132073462
  hyper
tctcaggctctctcggcccttgaattacgcctgcgcggaggctttccgagtccatctcctaggacgccagactgaggccgcgcgtgcgcaatgctgccattctgctgcgctagaaatgtggcacgcactgaggcggaggtaacctggcagcccggggttgggaggagg

SEQ ID NO: 231381 - DNA, 660 bp, Homo sapiens
  chr5:132082786-132083446
  hyper
ccagggtctgtgtccgggagtcctggcccaaggcgggcgcagtctccagccgccccacccctggctgggggctctgctcagggagcacggccggcaggggggaggaggcgtgcgctaggcagcagcggggatggagggaagggagggggtccgccacccgcctgtgcgcgcccagtcctgccgcatcctgggtgcgcgccgcccacccgcggggcgagtgcccaggaggcgaggcgcggcccggtgcgccagaggtagctccaccgcgagcgttgtgggtggggcccgccgagcccgcctccccacctcccccggcggcgccccaggctgcagtgttccgggagctgggttataaaatgccgggttaagcggcaactcagactcaggatcccgctcacgacatggcctcgggcgctcagctcccgccgcagccgtcgagctcagaggtcagcgccgtccagagcccaggcgggcgtcccggcgccggtctggaggaaacagccctgggcgttcctctcccgccgtctccgggggaggcccctctgccccgaagcaaccggagcaggtgccctgggacccgccagcccggagcggcctccctccacgcggcgtccgcagcagtccccgtgcggccccggcgcggtacggcgccagccggga

SEQ ID NO: 231382 - DNA, 179 bp, Homo sapiens
  chr5:132148851-132149030
  hyper
tggcggaccgcggcgtccctagggaacacacccacctagcaaccgagaccagagctggagcgctgcgcctttaattctggggcgggcggggggcggcgggaatttctgctccggttccctctgcatcgcgggggcagctgtcacctgtaaggcgagcgcggcgcgggggatggaagcag

SEQ ID NO: 231383 - DNA, 288 bp, Homo sapiens
  chr5:132386958-132387246
  hyper
tttcaggccaggcagcgtgtcacttgcctgtgttccttgttagggcctaccaccgggtaggtgcttggaatgtgctgtggattaaaggcttaaatcctgcgggcccctcaatctgatctaaggacatgagtggcttagagaacggcgcaacaaggctaagcgaaagaaaacaaagcggtgtggctgggagtgggctccttccctccgctggtgagggtgcgatcttagactcttgagagaacccgacataaaggccgcgttccaatggcggccttctcccctaccggc

SEQ ID NO: 231384 - DNA, 121 bp, Homo sapiens
  chr5:132387666-132387787
  hyper
ggtgctgcggctccgctctcgtcgcaacgagatctttcgagatcttctccgcccccgctaccggcgcctcctctgcggccactgagccggagccggcctgagcagcgctctcggttgcagt

SEQ ID NO: 231385 - DNA, 1785 bp, Homo sapiens
  chr5:132946702-132948487
  hyper
acaggcttgcaacaaatttacgaaggtaacagaccaagctgccggcgctgtttttcactggaggaaagctcggcggaagcgacacctagaggggagcggcgggctgtggccgcgccattcatcagtgtcggcggcccgcggccgcgagcgagggctgctggacagcgccccggcacccgctctcgagccgcgacaccgacctcgccgggcccgccccgctgacccgcgcactcctagtgcacttgccgcgccgcgcggaggctcgccgcgctctggaaaacaagaaaccccactgcctcggcggctttccgctcccgcaagagttgcgggcacaaagtcctcaggtggcaggcctggggttggcgccgctttgtcggctgcagggagccccaaagactagcgtcagctcgtccccaaactcgaggcgacaggcgccgaaagcagagtgctgtgcctgcctcgtccaggtccctcctgaaactcagaactcgtctttgttttgcgggcgcaaagagggcggagatcatccacagtgcaagctctcttaggaccaagcccccagcccgaacgctgaacgcccccaacacactgctccctagacacgttcaagcgggtaccccgggccgctcactctggaccgcggccggctacgcacaagcagcgccgcaggctgcctggagtcgggtcgtgccctgattccttcctccccagcctcacatgcggcggaccccggggaagccagggccaggcgaagcgcagcgggccctttgggctgcagcgaggagacgcaagtttccccgcaaagccgcggggaggaggtgctgagaatgcctgcccggcgccccaacccggagccaagggcaccgggcccgggccgaggggccgcgctcgcctggctccgccggggccgctcggggtcctgaacccaagaacggcgcctgcaggatttcggagccgggcgcgagctgcgggctcggcccgagcgcttctgcgtggcgccccgcgtgccaaccgggtcactccggtccccaccgtagaccccggccacgagcctcggcgtcccagcctctcctcgagtcctggccttggccggggtagccctgccgagccctggcccagcggtcccttccccgcgggcaaacttggctttcccggcgcgggcagtaaggacaagcaagcgcccgcgccgggccctgcagcaagatgcggggccgcgggcgccaggaccccagtggggtgcagcgggaccggctggtggcggcgccagcgacatggcaccctccccgcgcccgctgggagctgcgcccgcgtacctgagacggccggggccgaggggaagaccaggtggccggacttgggcgggagggagggagcaccccgtggcggcggcggcgaccccgccccgcgtccttcggctggtttctcgggctgtcggcgggtcccgggctcgctggaggctgttgaggctccagctccctgagccgccgctgcccgctgctgtgccaccgccgccgcggctgccctatttctgccgccgggaccggagcccgtgacgtcaccctctgggccccgcctgcccaatcgccgccacctgtgcgcgccgcccgcccgccagccggtcagacccgcgcggcggccacggcaggtgcgcggagcaggcgggcgcgcacgcggggcgcgatgactccggagcgctggggccatctagggcccggagggaggagggccagcgtagcgctcctgcctctggctagcgtggagctcggcaagtgacagcccctcttc

SEQ ID NO: 231386 - DNA, 643 bp, Homo sapiens
  chr5:133449610-133450253
  hyper
aagttccgagtctccgggctgcaggttctagtcacggaaccgagttgggagagtcataggggctgggacttggaggatcggctgaggtccggtgctcttggctgtgttcgcggctcggagccgtcgcctgactgaggggcccgtcacagatgtgtgatgtataagctctgcacgcaacaggagctcaataaatgtgcgaaggggggtatacttatgttcgcactgtatgcaggcggcctagaaggaagtccctgattggcacagggatggaggatggggcaagagccgcaacagcgccgcggagttccaacgctgccggttccctggggtacgagcacagcctcaagcagcctcaagccctaggaagcccccagttcaaagcacagggcgcattggagcctgggcacgatacagttcacaccacggctgcgatggtaagccacgcccaagtcccaagggcctaggggacccccgccctccacagccggaggagaaacctgggcgcagaaagcagggggaatatctggttgtaggtgagtaagcggggtcaggagttcccgttagagtctctgcgtttcgggagaagggtgatcattcccaggcttgtccgacgtctctctcagggtgcgctccggaagagcga

SEQ ID NO: 231387 - DNA, 167 bp, Homo sapiens
  chr5:133450980-133451147
  hyper
gcccctcactcccctccggttctccctccaggctctcgggcgggaacacgctgcgcagagactcttcccggacaaacttccagagcccctggaggacggtgagtttctgcccggcccggcttcccttcgtcgcgctcaggccctggcctcggtgggacggggacgcc

SEQ ID NO: 231388 - DNA, 129 bp, Homo sapiens
  chr5:133706907-133707036
  hyper
acggggagggagacgggatagtgtttctgtttcgtggtctttgaatccacaacctctagtctgaacacagagaacacaaatttgtctattacttcaggaagcccagggggaaccgcgccccgctgaagg

SEQ ID NO: 231389 - DNA, 291 bp, Homo sapiens
  chr5:133862964-133863255
  hyper
cgcctgggtgcagacttgtggctccccatggtttcttcccgcccatccctgggtcctgagacatcctctcctctcggccaagggacgagaggggtcaacttggcgattcgcagctgttctgccagaggatggggttgcctgcgagacagccaggaaggcttcactctagcttccagaggcccagccctgtcccctactacacacagctaccaccccacccgcccctggggctcggctgcccttcccggtgtctcttaaacccctcccccgacctgggtgttaagcccaccc

SEQ ID NO: 231390 - DNA, 130 bp, Homo sapiens
  chr5:133863495-133863625
  hyper
ggcctcttgctggaggctgggggaggtgaagggtcactgggtgtctttgccgtatgccgaaggcacactgcggccggcgattctggtctctgcagatttccaaacctcgccgctgcgtctagcacccctg

SEQ ID NO: 231391 - DNA, 154 bp, Homo sapiens
  chr5:133968282-133968436
  hyper
ggtgaaaaacaggcgccccttcacgcagtgccacaggcagggactcagagtaggtcttggccctaaaagtgcgccttctaggggatccatagctgctgcccaccggtcctcccagaaggaggggctgtcactcacctgcgactggagggaacgc

SEQ ID NO: 231392 - DNA, 35 bp, Homo sapiens
  chr5:133984158-133984193
  hyper
cagtcccaccccacgaaagcggctactgaatctca

SEQ ID NO: 231393 - DNA, 97 bp, Homo sapiens
  chr5:134074104-134074201
  hyper
tcactcaagatggcggccagagcctcgcgcttggtcgcgtggggcggtgcgtgagtgcttagctcacaggctccgggaccgcgctcgggggcgggtc

SEQ ID NO: 231394 - DNA, 356 bp, Homo sapiens
  chr5:134094187-134094543
  hyper
ccgcattatttagcgcaaattaaggcagacatcagcctgcccaggacgcctctttggctctggcgcgaaacaccctcacgggccggcgaggctgacgcgctgcgctccatcgcactaatcagccgggcgtggtgcgggcgccgggaagactgggcggggcgaaggcatcacctttcgatggggccggcgctgtgcgtcctccagtcgaggtggggcgctgtggaagagcggcagcttccggtcggcttttctcttccttcggctgccggcgccagcacgtcctgttttcgttggccgcgctgggatggccgccacagctgtaggtgctgctagtgtttagcgctggtctttgccgg

SEQ ID NO: 231395 - DNA, 74 bp, Homo sapiens
  chr5:134210444-134210518
  hyper
gccgcgttcaggccgccctcagcccgtggctggtagccaggagggacagtgcggtaagcgctgctgaggcatac

SEQ ID NO: 231396 - DNA, 118 bp, Homo sapiens
  chr5:134240152-134240270
  hyper
ggggattacaggccgggtttccacactttttggtccaggcaaacccagacgagccagctggctcaagaacttggcagctgcgtgatgactgaacagaggctgcgttcgaacccactac

SEQ ID NO: 231397 - DNA, 422 bp, Homo sapiens
  chr5:134363123-134363545
  hyper
aacccgtagagtcccgcagccgcggagggagggggttctcgctaaggcgtcccgcggacaacgccgagaggcacagcttagcgggtgcgcaccggacaggctcgcaacgcaggacggtgccctcatgggagccaggctgagcaggtcaagaatggtggtggggaagcggggtaggcagacctcggcgggggctgcctcggcgctctgctcctacccaaggggcccggttccctttctacccacagttccctttctatccgcctccctcctcagcccaatgaagcagtcggggctcagcagtgcttagcacgctcggactatggttttaatagacgtacatggacaagtcgatatagacagatttattacagtcagtccaacatacacagggacgctgtaaacaggggcgcgggccggagagc

SEQ ID NO: 231398 - DNA, 862 bp, Homo sapiens
  chr5:134363810-134364672
  hyper
ggctctaccaggcgcgccggggccgtgtgcggctccactgagtgcccgatcctgggctgggggcaccgtccccccaaacccaacgcccgccccaacacggatccgactcgagctaaggcgctctcggccgggcctagctcggagagggcaacttggtttgtacggggtcgggaaatcctaggcaagtccaggccccgcacatccagtccgcaggcccggccactcagtccggatccagcgcggcggggacgcgggatacgaggtcgtcctcccccggccgctgggcctcggcgctcgcctaccgcgccgcgtgccctccgcggagtgggcctccggggcccgtgggaacacacacaccacccgcgccatcccgagagaaattgcaactcatccattttttcgcggcacttttctccgacgtctttttgcttttttttttttttttttttttttgtctttttggagggcagagtggggtccggaaaagcaaacacaaaaccaacccggagtgggaagtgggaggagggggctgcgcaggtgtgaggtccgcggcgcggtgagctggggcttgcgagccggggccccgcgtgcgtcctccgcgcccgcgcccgcgcccttccccgctccggccgccggcccgcgtggtgcggcggggcggtcagctgttgtactggcacgcgttgaggcccgaggccgggccctgcaggccgccgtagccaaacgacgagtgctgtttggacttgagccgcaggctggctaggctcgagttgcacgtgtcccggtagacgctgtagggcgaggcgggagtgccgtacgggcaagcgcccggcgacatggccgagttgagcgaggagccggtgag

SEQ ID NO: 231399 - DNA, 39 bp, Homo sapiens
  chr5:134364913-134364952
  hyper
aggccgctgaactgcggcacgtagccacccttgcacagg

SEQ ID NO: 231400 - DNA, 269 bp, Homo sapiens
  chr5:134364994-134365263
  hyper
cggttcttgaaccagacctgggggaggggacgggagaagggtcagggccgctgcgggccgggagggaccccacccccttccccaccgcctggagccttccgtcggcccgctgccctccgaacgtcgtttctctccttcgaccgatatttccgctcctgcattccctccacaatggttcctttcctgtccccagaaaatactaatttctttttccgatctttatcctctcccgaaattatatccgttttcttctccgaatacggattctc

SEQ ID NO: 231401 - DNA, 916 bp, Homo sapiens
  chr5:134366513-134367429
  hyper
aggcacctttcaggcttctccgaggcagccagacaggacctgcctttccctttcgttttcgggataaggccaacagctcccgaggtccccagcggcagggaatccactgcccagtctctggcccagggtatcctgctaacatctgagtgggtcctgggccccatagggcatgggggagtcccctgggggcacaggtctttgggctggggttgccttagtccgaggatcaggtaggatgagggtcaaaggggttgaaggtccgaggcgcctggaggcctggcagacgctagtgggccagggcctaaggtggggatctccggtggagggagggagcaggtctgaatggtgggagagtgaagttctgcttgtgggtctaagctttggagggctgcagcagaggcggcccgggagccctctgcgcgggtgcccttaggcgcgcaccccttgctcacccgcacgcgcggctcggtgaggttggtccacacggcgatctcctccctcatgctcatgtcggggtagcggttcctctggaacgtggcctctagctcttgcaactgctggcttgtgaagtgcgtacgttgccgccgctgcttcttcttcttggctgggtcgtctgcgccgccgcagcccgtgcctcccgcaccactgtcctcgggccccttgggttccccgccgcgctccttctctgcagtaggcaggacggggagcgggtcacctgggcttacgccccgttgcaccccgtcccggctccaccgaaccgctcgccaccagcgctggcggtcttccctccctccctccctctagggttcctgggaactgtccccactggaaagcgcccgccgggtgctggtcgtcagtaggcacctctagtctggtgtgccgcggagaagagcccaagaatcggagctggagccgc

SEQ ID NO: 231402 - DNA, 1572 bp, Homo sapiens
  chr5:134374377-134375949
  hyper
cattactgcgatcccggctttggggccctgcctttgccgcgggagaataggctccaatttacgaagctggtcaatttcagaaatccgagacccggttcttgagaagcgactgcgtgctccgggaccctgcgtcaacaaccaaacctgggagaagccgcgggaatgtctttattggacgttacgaagggaattggggtttctctcctgggaagaaaaagcccgacctgtgccggcgagagcaggctgccttgggctgggggcacctccgagcgctgcggcgggacgtcggggtccggggcgaagagagccagggcgcggaccgacgtctgctgcttttctgcggcattgctgcccgaacgaacgaacgaacgaacgaacgaagcggtttcgtttaggaaaaataccctcttgacgcgaagccacggctgaagtcccgggccacgcagaggggccagcaattccatgggtggtggggccctccatccctggacgcagcggggagcagcgggcggccctctctcctgcccacttctcctgggggtgggggagccctgtgtcacccgacgctgcgaggggctgccacgggcttctcaggttgtgcccttcgcggggccgtggcccgtgcccccgaggctgctaccctcttgaggtgcccggagccaaagcagagggttgatcccgccggttgggtgaggtagcacccggtgacggcggctatgactgtgccctgggcgcaggaacgagctcctcgcgctgcctcgaaggctcctgaccttccgcgccttgcgctgtcccgcgccgccgggtggacccacacacgccaggagcaaactgcgcaggactcggccgccacctccctgcgcccctccaccgcggagaccctgcgcccctagcccagcgtctcttaccccacctgggcagcgctgcgtctgcggctcgtgggctccgggctcgcccgccgcggactctggctcaggtttcggctccggctggggccccggatccagctctggctctggcactgcacggttcttcggcccctgctggttcgctacatcccagcgcgcgaggccggggcttcctcggctcggcccgctcctcccgccgccgccgcccgtcgcccgcggggaaggcggggacactggccgggaggcgggaagggtggggggaggggaagctaggtgttcgccgggacctgcggggagaggggcggcgcgcagtcccgccggctaggggtcctggcctccctcggggcgtaggctggggtccgcgcggctggcggccgggcctcgaggccggggagcgcgccctgggacctccgtggaggggccctgccgcatgcggacgaagccagagcgggtcccagcctggccctggggcactttctctccctgggcccagtttcccacctgactcgtgaggggctggccctacttccgtttagacgggggctggtggtcgagtttggggttttgagattggacctttcttctttctgctcagcctgcgggagggagctggtcttgcgtgttggcagggagagtccgctgcccagagcgtggcagccaggga

SEQ ID NO: 231403 - DNA, 601 bp, Homo sapiens
  chr5:134376163-134376764
  hyper
tgcgggcctgcgaacggtgacgcctccacccctgtggccccgcaggccgttcctggctggctgccgctgggagacgggctggacgcaagggaactgggagcctgtcctttgcccaccctcaggccacagggctccccagcgttgcctcgtggccagataaccctgtgcgcgaagcctcatggtggaaaccagttggccgaacctactcctggtaccccgaagtgcccagcctgagcctgcttgctgttgggattatgggatgggaccacagggcaggtcgggctgtggcctgcctttctcagggactggagcggctaagcctgcccgccgacggccacgggctccagagcgaccgtttccggcgcaaggtgccgggagatggcagcgcggcagccgggcctgaatctttcatgagatgcagtcagcagcggcgcctccctgcctggttctcgccgacagctgctgcgggagaggccgcgacccgcgccacctcggcgtcctgctagtccgtgcctccagggccgcttggcctgggaacgcagagacccacgaccccctccccaacctccgaagcgggaagccggcccgacccaagctcaca

SEQ ID NO: 231404 - DNA, 394 bp, Homo sapiens
  chr5:134385981-134386375
  hyper
agcgccctgagcctcgctggagcccatcccggcatggctgctgggaccgacaggccgatcgcgggccgcgagcacatctcacagagcctgggcacagagggcccgaactgtgcccagcgaggaggacgcgtgtgggttttgcctgcaagggttctgaccacttggggacagcgagggcgcgtagaggcgcggagctcactacgcgccgcctcactcttccgcgcgaggtgccgggtggcccagcagcaggtgctcgcgcgcaggtccagagcggcgcgttgcagagcccgctgtgccaccggagaaccgtggagcagccagggccgcactcgggcgtctgtccccagcctcatggttgccagcagagctggcgcaggggcgcgcaggcggtgag

SEQ ID NO: 231405 - DNA, 213 bp, Homo sapiens; identical to SEQ ID NO: 200040
  chr5:134527188-134527401
  hyper

SEQ ID NO: 231406 - DNA, 141 bp, Homo sapiens
  chr5:134802302-134802443
  hyper
aaggctagagttagcgttgccgcagggctgtgcctcagacgaccaggcacgaccaagcacacaggtggtgctcaagaaatgaatgggagtagatgagggcattctggagactgcatggagagccagggcctgccgtagcag

SEQ ID NO: 231407 - DNA, 61 bp, Homo sapiens
  chr5:134802485-134802546
  hyper
gggacttgttctttccggttgcacctctaggctctgcggagtttaacgacgaagctcagcc

SEQ ID NO: 231408 - DNA, 267 bp, Homo sapiens
  chr5:134824589-134824856
  hyper
ggcttccacccggcggagggcagaagcgtcttcttggctggctagagaagctccgccggagtggcctcctcccctcccccaggccggggaggaggccgccgagggctctccaattggagagcctttcatctctttgtttttacagtgattaacccgtccgagcgcgctccgagcgtggctccaggcagcgcagggggaggggagaggacggctgggcaagggaagggagggaggagggccctgggctttgtcgctttcagggaactc

SEQ ID NO: 231409 - DNA, 1406 bp, Homo sapiens
  chr5:134825092-134826498
  hyper
tcccccaggatgggcgcctggccttgcgcgcctgttcccctgggagccacttcgtctccctgggtgtcgggactggagggaggcgagcggtccagcccctgtccggccggagggaggccggggcacctgccggtctttccacctctgcatgcatttcacactttctatcctgttaggcgtccgcacttctatgccaatgaggactccccttcccacccctgtttttttatgtcatgtggatttaatctagttagacgattttatgcttaaaattgcattgttaacagcaattgtttaaaagggggccgagagcgagggcgcccaatctttgaactggtcgggttttgcatgcctccgctccgagcccgtggagcgctgcacaaaatcgtctagcgcggagcagggcggggacggggagagacacaaaacaatcctcgggctttctcgctactgagccttcggggccgtttccccaagcgcaaacagatgcaaatgtctctgcaaacattgcacaaagctattcagagagaggcagcctctcgcggcctcaatagccctttaaacctagtccaattgcccccaagtagaggtaaagagtccacatgcattttttcactttggctggaagaggggcggaggaggcgagggccttggggagcaaggtatgagggctgctctggttcagcggttcgtgccatcgacccgagctgcagcgtgcggaagaccggcaggagagtgcggtggctcgggggactacgcgcttcgggccgggcggggattgaggtgcagccgaagctggtgccgcgggaatgcgcggaccggagaggcccccgggacctttcaggcccacaaacgccgcgctaaatagccacgcgcacaatagcatgaaagggctcactcggaccttactgcaacacagtagattcacacccctccgaggggactaataagctcgtaactaacgcgcaacgctcagcggtgagagcgggcttgcgccctgctggcccctcgcagtacgcagactcagtctttcagcgtcactcggaggcccaagggcagccgctgcacggagggccaggcatttccttctaacctcgccagtagaggagcctggggcctgccggtgcagtccttaatgcaccccaaactcacgtggggctggcgaccccggaggctcggcatttcctggcccttcagaagacgatgtcgggacctctagactccaggctgagcgaggaagaagctccagtaaaagatgccagcgtaggcgcggtcttagccagctgtggccaagccgcctccacctccagttcagggccggggcctttcccgtcgccgcacgcagcaggtgctctggacgcgatgggcggcctagccagagcaggcacgtgcgctgagggcccgga

SEQ ID NO: 231410 - DNA, 412 bp, Homo sapiens
  chr5:134827197-134827609
  hyper
attatgagtttgttacaaaccgagcttctttcttctccaaccccacccccacccgcagctctggagaccatttctccaggctgggggacgcaacctgcctcccgagaggcgcgtccctgtcgcctcaggcaggtgcaggccgggcgggcgcgtggggcggggcaggggcgttatctcctgaccgaagagggccgcacatctgtttatctctgaagcggcgctggattggatttctcgatgtttatctccctcagaggaacagcgcgctggggctgcggagagcgcagctgcgggccgggcagtgattgacaggtcgggaacagggcctcccgcccctcctccgtctgggtggggggcgcttggctgcccactgcgcaccccatcctagagcgctgcaggtgagcatgccggc

SEQ ID NO: 231411 - DNA, 209 bp, Homo sapiens
  chr5:134844204-134844413
  hyper
ctctgagtgtttgctggagccgggctgacacagatctgacagaggttgtcagatctctgaagaacaatcgactttctaagcagagccccttctctgagtctcgcggtgccgcgttacatttgtaaatgccagcgcgctgctaagcacgtccccgtgaatagaagtgttttgatgttttgtttttggtcggagattgaagtccagtgtct

SEQ ID NO: 231412 - DNA, 1820 bp, Homo sapiens
  chr5:134870244-134872064
  hyper
cagccggctcaaaccgaattttcatgctcgtttttcttcattagagttctacaaattgtaaaattgacttttcacctcgtcttcaggggctgatctgtcccttttctaaatcacactgaagtggtggctggggtcagttctgagccagtcacaaaggaggttttgtggagttcagaaagtgcaaaaggaaaggccgtctaggggcgggcaggaggggcgctgggctgagggccggagaaacagaccaagagacatccgccgcgagggtgcggcgacctaacaagcggctcaggtatccccgactgctttaaagctcccgcttcctccctccgcctggagagggggtcccgaggcggcagctggggccccatctattgcctgctgactaggggagggggaaagtaacagtgtctacaaagggcctagtggtaaggaatgaaacagggcgttgtgtggagcaagtctttgggcaggcttgggaaggagaaaacagggtcgccggggcggtaggtgaagtcttcggaggcggctgggctactggggtcagagagcggggaggcggcggcggcacctgagccccaggactccgcgtcgctggcggggcttgggggaccgggcaggcaggggacgcactgcggcggcaggaggcgctcccgggcaccgcctccgggcagcccttgatccgccaggcgcagtgtctcggccagagcccagatgtagttgtaggcgaagcgcagcgtctcgattttggtgagcttggtgtcgtcggggaacgagggcagcacgctgcgcagtgcgtccagggccgcgttcaagttgtgcatgcggttgcgctcgcgatcgttggccttgacgcgccggctcctgcgcagcgagtgcagcagcgcctcggagcggacccgcgtccggccgcggcgccgccgcctctcctgctcgtcgtcctgtgcccctggaacctcagacgcccgggagatattgggcgcgcccctgcgggccggcgcgggcggccccgaagcggaggctgcctgttggagtctggcacagtcttcctcgtcggtgaggaagccggataggtcactgccgctgctgctggcgcagtcgaggtcggagatgcaggtctcaaggcgggctggcatcgttgcgctgtgcaggaccgacggacagatagaaaggcgctcagagcgctgcagcccggactgagggcagagccgccagggcgcacttacgttcccaacagcctggggttgttactctgtgccagttgcgggtgcgagagcctggaagggtgcaggggcgcacggagaacttggcctggcctcctcgcctcgcctgcaggggccacgcgcccggccggtctcctgagtgatgtcgccggcgatcagatcagctcgtgtgagcaccgagtgtggcacacgactggcctcaggaccccttaagtacccggcgcaacaatgggcgcccccctcccttgccacctccgcccccgcggcagcccgggtgaatggagcgaggcggcaggtcatccccgtgcagcgcccgggtatttgcataatttatgctcgcgggaggccgccatcgcccctcccccaacccggagtgtgcccgtaattaccgccggccaatcggcggcgtcgcgcggccccgggagtcggctcgggctaagctggccagggcgtctccaggcagtgaaacagaggcggggtcggcgggcgattagcggccgaggcacgctcctcttggggcgggctgggcgcccctcgctggggtgggacggggaggcggggcgcgagcgcgaaagtgtgagccgcccagtgagttgc

SEQ ID NO: 231413 - DNA, 823 bp, Homo sapiens
  chr5:134879162-134879985
  hyper
tgaattattagtactcccctcgagttaaagggggaggaaagcgcctcattttctatgcccccaagggacggaccgagcgggcagcctctaaacaatgtatttatcactttgcatctctttgggacgccggccgcgcccccacccttgccgccgccgtcgccgccgccacttcggttttgctctggctggggagacccggcgtttctggatttcttttatgcagccacaaataaaggctcctaggctggaagaaggggatttccccccaagtcttgagcaaacgaccctagcgccgtggctcttcctacggcgggggcctcggagaacccggcggggcgcgcggggggacgcgtgggcactgccgcgtgggcgccctgaccccgcgcccgcgtggagcgagagccgggactctgggccagcaagttccagttccccgatggggccggctcgcccggagccgcgtgaggggattagggccgcacgagaggcgaccgcgccgcggcctccagccacgtgagcacagacacggcttcaaacgtccccaacgcactaatccttgttatccggcaggataaccgcggccgcgccagcacccggcctgcctcctccgtctggctgcgggcggggagtgcgcctggctcccgagcccctgacacggatttggggcctgcaatgacgatctaccccacaccatccacattcctgggaccctcggggcaaggtcctacagtccttggtgaccaccacgcctgcaaaaagcggtgggaaagttgttacgcttagaaaactaccaacacgcgcatgcctgtaatcccagttactc

SEQ ID NO: 231414 - DNA, 583 bp, Homo sapiens
  chr5:134880105-134880688
  hyper
aaaacaaaaccaaaaccaaaacaaaacaaaacaaaacctgccgccgctccggaagagctgggatggagaataaggatgaattctggagggaaatccggcaaaacgggcattggcactaaaataggacattcgttaaggaaacaacaaagatggctgaagaatggagtatggctgaaaaaagcccactggagaggtgcagatagtcccctctgggcgccttccgaggttgggagggcattctggcccccgcccctccccgccgcaatctgtcgggacccgccgggtttccatatgaagggtcgagccggcgccttgggagcgctgaatggccgctcgcggtccggcgggcgcgcacgccccgcggcccgggctggatttggccgcatttgcatagcaggtgctgatgcttgtccattcttacttaaagaagttttaatatgggataaattaccaggaactaggagctgacgtgggcgggaaaaaaggaatcgtgtcgccagccagtcttcttaccgctgcctggcctggaaggataggaggggcaaggagagaaatgcgaagtaagattcgattttaaaagtcg

SEQ ID NO: 231415 - DNA, 851 bp, Homo sapiens
  chr5:134914167-134915018
  hyper
cagcttcttcacgtcgctgtagcggatcttgggtcccttccgggagcacttgcatttggaccctgcgagcgagcgcggggcaacggcttagttgctaggcggtctcctgcccctcgaccaccttggtgcccacccagaccaccccccgcgggatcccaggatgcctagaaattggcgcttgggttccccaggacaggacaagacgagacggcgacaaggggagctccccgcactcaccgtccacacgcgcggtgtacagcgccagcagcagcaggagcagcgcggccgccaggagcctcatgctgaccggaggggcgcggcgtgggagcagggacatggggagggcgctggcccgtcggagcggcggcccggagacgccacccagctctgctcggctttctctgcccggggcgcgccttccggctctgctggctccggctgcgccgtcggtggatgcccagggctgtctgtggccgtgcgctgcgctctgcgcttgtctccgcgctctctccacagcctccctccgcccgccctggcctcttttaaatccgctcctgccctcgcagcgagcgagctcattaatatgcagaaccactcggtgactcactgagatttctcaatgtggtgaggggaggagaccttcccagcccgcccgtcgcccgccccgggaaaggacccgctatcgcagcggcgcacacccggagccacgcgcgcacacgcacacacacatccgctaccctctcgctcacacaacacgccgccttcgcacacttgcacacccataccacagcgcgcacacatttccagcgtcccgctctgcctttggggagcccagacggtggagaggctgc

SEQ ID NO: 231416 - DNA, 538 bp, Homo sapiens
  chr5:135170259-135170797
  hyper
tctgggatgagccgcgcggagcgcacccttatccacccagagtgctgtgcctttaaggtccactgggggcgtgatgtcagccgccctccggcacttggagaggtgagcgcggcagcccgcgcagccggtgactgggggactgggtttggagtaggacctgcggcgtgctcgagactccgacttcggtcttgcggcgcgctcgcgcccgcgggccatgccccactgactctaagtgggcactgccccggctccgggagggcgagaccgagcgccggccatgggaagcttccagctggaagactttgcggcgggctggatcggaggtgagtgtgcttaccggggacccccggtcagagagagcgagcctggcggagtttgcctctatgctctgaggaaactttgcctctgtgcgctgccatcccgctccccgttgtgcgcgcagcctgctttggggagtgcccggccccgagatccccctggtggtcttgcagttgccagggctaaattctgagagcttcacagcgtttcgggctgagct

SEQ ID NO: 231417 - DNA, 100 bp, Homo sapiens
  chr5:135170998-135171098
  hyper
tgggagccaggcttcgagattaggccggcccaacggggcgtcccgactggagggagcagagctctcacagcagggagcggagcgccggctgcaggtgccc

SEQ ID NO: 231418 - DNA, 639 bp, Homo sapiens
  chr5:135265849-135266488
  hyper
gctcccggaaccgccgcccctgcgggaggagcggctggggtctcagatcgccgtgcgtgacttggtgctgcgccaggtgggcgccatcgccgcggcctgctgggggaggcggcctttgaggagcgggcgcgaggcggggccaggcggggcggggccttgggcggctgcggtctgcgcggacccccgtgcctaggcgctcctgtgcctccagtgcgcggagccggcctcgctcgggcgtgttcctgcgccgaccggacggccggactccagcaccttggcccggcccgcgaacgctgagcacgcgcggaaaccctttaaaggtagcacatttttcgggtgtcgcgggggcaccgccggcggtggcgacgtggggcggaatgggctcgctctttgggcccgggaggcgtgcgctcgcgccctgggccacgtcggggcggtctcgggcggctgagcgccccctggagcgacccctcccgcggcccgggcccggccgcccccgaagccggggtgagcggggcctggctcgggccgccagtgaggactcgcagcccccgggcgtccgctttctcgctgggctgggtttctgcagtgccgggcgcccacccggccaccccatgagccgcgcgtctggctcttcgg

SEQ ID NO: 231419 - DNA, 1119 bp, Homo sapiens
  chr5:135528122-135529241
  hyper
gccttctgccttgaccgtggctcctggggccagcgcgctgcctaccgccgcctcggggccgcccgtggcgttgaatatgtcgccgtacatggcccgcgggtcccgccgaccccagccggaccgcttcacttggcctggagcatactggcgcgacccggcgcctccatggcgcgcccctcccgccctgccgcgcccaactgaccgagagtcggtgccttggggccggcggggactgcaaagaccccgggacgcgtccgctcactcgcctccgcgctcagctgctttccccgccggctggcggaccccagttctcggagctggacagttctgtgcccgcgcccctcgggctcactgtttctctccgtcgccaccaggacagaggtcccagtcactgactcgcctttcggctttacaacagcccgctcagctcggaccctcagctccagtgagctccaggtgctgggcgcctctgggctgcggcggcggggagaggcactcagcaagtgcagccgcagcccggggtctctgctgagcgcccggtggcagagcgcacggagggcgggtggccagggagtcctccgcgtcctccggcgccgccgccaccgcagcgtctcggaacagtcctgcaggctctggtccctgtcgagacgcccagtgttcagcgagcttgtccccactccctccggctgctgcgctcctgttttgagcaggagactgagctttctggcggctctgagcgcgctcgtgtcccgggcgggggttcgggggaggggcgggactggcggcggctgcccgggggagcggctgcgaaccaatgagggcaagagaggacgcggctgcgactgcccccagcccggcctcacatcactcagggacagagggacagagacagggacagagagagagagagaaagagagaaaagcacagggtcacaggaagactgacgggcaaagacacagttacagacctatgaacagagccacacgccaaacagggacaaaccgttgaggtaagcaaaccaactcagagacaaagctcagctgagcgtgcacacctgcgttcattatcctccttgacaggctccctccaggcatggcctggtttgttccgagtgccca

SEQ ID NO: 231420 - DNA, 239 bp, Homo sapiens
  chr5:135700986-135701225
  hyper
atccggtgttgagtcgccagaagctggctccccatgggtggtagccaaggatgtaccgctctccgtggtgctgaagtatagagctggtcaagtgagttaagttgcaacgatgtgaaagcgcgctcctctgttctttgtgttgcagtggtaaaaactcgccttccgaggcagaaccgtgttaccgtccttttcctaatcggggggaaatttcccagagaacatgacggagaagcatctgt

SEQ ID NO: 231421 - DNA, 370 bp, Homo sapiens
  chr5:136833978-136834348
  hyper
acacacacacaccccaaccccgcttcaggggtcccctccgagaggctccgcgccccccagggccgggtggcgccggtactcacgtctcgaaagcggttccagtacttgtcccggtcgtactgggagacggtgctcagccactggtcattgtctaggaaattgccgtggttggggcccgcgcctccggcgagcgcgtccaggtgccggctctcgacttggaggaagcaccacgccgcggcggccgccgccaacaccgcgatcgccggcatctgcggggcagggcgcgcagggcgatgagcgaagagggcgggcggccgcgagccccgggcacccaggcgtcccagcgccccagcccggaggcggggacccc

SEQ ID NO: 231422 - DNA, 124 bp, Homo sapiens
  chr5:136834528-136834652
  hyper
cctcctatcaggggcttggtacccctccccagaagcggggagcccgggtccgcacgccgcactcccacagacggtgcggtgcacacggctttggggcaggagaggggagaacagggctccagca

SEQ ID NO: 231423 - DNA, 206 bp, Homo sapiens
  chr5:137090009-137090215
  hyper
ccgccgccacctccgctcccctatctgggcaccacacaaagaggccgctgaacgcgcgcgcaccctccccgaggcgtgcgtcaccgccgacgtacggcagcctagggctaccagccaatccccgcctcgctccccttaatcccgcctaccgcgccgcagcgccgctctagatcacggactccccgccctccgcggtctattcaagc

SEQ ID NO: 231424 - DNA, 225 bp, Homo sapiens
  chr5:137369084-137369309
  hyper
caggcccccagggcgcccatatccaggtgaggagcacagagacctgaaccgaaaaccgctgggggagacctaagcggtgacttcggttcccattcccagagatgtgagttagatccgggaccacggggctgcacctgcgtcctgcccgcccccaccctaccccttcacctcaggacctgacctagactccagagagaacagtaaggcttcggtgccttagtctgg

SEQ ID NO: 231425 - DNA, 267 bp, Homo sapiens
  chr5:137474816-137475083
  hyper
gggctcgagggggcggtagagcgggtggtgggggctcgaggggacggtggctggtgggcaaccacacaccattacagcggcgggtgagcggcctcggccagctgcctctgtgaagcgaccctgtcccgcagggacctctctgtgcatagggtcaggctaattgaaaagcagggcctctaggtccgcggggactttccgggttgcacctgcaaattctgaatttgaccctctctaagtactcacctcagcggccgtcctcatatggta

SEQ ID NO: 231426 - DNA, 238 bp, Homo sapiens
  chr5:137514786-137515024
  hyper
tgcacctcgtgggcggagttgtgctctgcggctgcgaaagtccagcttcggcgactaggtgtgagtaagccagtatcccaggaggagcaagtggcacgtcttcgggtgagtgtgcggctgtgctggagcccgggttaccagctcttgcccgcgcggaataggctttaagaaatcggagctgcagccatctgtttttctcttaatgctgcatctctgttctcacggtggtccttggggt

SEQ ID NO: 231427 - DNA, 267 bp, Homo sapiens
  chr5:137577611-137577878
  hyper
cagggctgcccaggcaggggcgcccgtccggcaccggactcccgccctgggcccagctccggcgctcggccagccccgtgccccgggcggccgctgatagtcggctaatgcgtatcgaatttttgtggagttcggcccgcgcagagtgcgcgcggaggcgctgcccgagcctcttaattccctttgcatcgatcctgccgttaatgacataaccttctcccctaattaactgacaactgcattaggcggcgcgcctccgccgcacgc

SEQ ID NO: 231428 - DNA, 266 bp, Homo sapiens
  chr5:137667421-137667687
  hyper
ctgggtaggccaacgtcggactcagagtcttccctgagcagaaggccaaagttacggcctctgagcaagaatatcaacagccgcaggcgttgaccattcaaaccttccgccagcccagtaacctatccccgctcgcctctaagctgcgtcagccaatctccgcgcgcgcgcccagggcctcatggcctatcgttgggctcgcagatcacctgggggcgtgtgcttgctctggaaatggtaagacttgccccgccccatagccagag

SEQ ID NO: 231429 - DNA, 131 bp, Homo sapiens
  chr5:137673655-137673786
  hyper
atggcctcccccgcgggtttcaagatgtgcctccaactggggccgtccactttctgcgatattttggagggggtgactcgttagtgaggaaaccacccccatccctaaatcaaagcgccaggctcgttccc

SEQ ID NO: 231430 - DNA, 106 bp, Homo sapiens
  chr5:137879232-137879338
  hyper
ggaccggggtcgtcgtcttttcagtccattctccttgaatagggtggacatctgaggctttgcgactcgaagctaggcacttgggcccgacgcgcggtttgaacgg

SEQ ID NO: 231431 - DNA, 60 bp, Homo sapiens
  chr5:137910697-137910757
  hyper
tgacactctagatcgcgaggggtgtgactcagcagggcccaagccggaggcaaaaccttg

SEQ ID NO: 231432 - DNA, 113 bp, Homo sapiens; identical to SEQ ID NO: 200053
  chr5:137911538-137911651
  hyper

SEQ ID NO: 231433 - DNA, 376 bp, Homo sapiens
  chr5:138609205-138609581
  hyper
agttactgcagctcggcgaagaatcccactgcagggcactagggaggccggtcctgcagaggtcagcagtaggagtgactggcttaatctattcgaaaacctcctggaaagatcccgaagaccgtggaccaaggtgacctgcgtgggtgagcgatccattagccgaatgacagcgctgccgcagaaagccagaaaaaggatatgcgtgggaagcgcaaaagcgtgggctgggcctgcagcaacggaaaggcgccacgctcgtgagcggaaccagcgttccgggggcgctcagtgtgggcaggcaggaagcctggctccactaggacacacagattctctcctgagcagctgcgaactatgcgccccttctaccctt

SEQ ID NO: 231434 - DNA, 124 bp, Homo sapiens
  chr5:138677832-138677956
  hyper
cttgggccgacttcgtctctgtcttctccgagacatggccgtcgcttttttttcattgtcattattaatgatttggatctcgcagctctctatccgggtcctcagtggcgcgagggttgccggg

SEQ ID NO: 231435 - DNA, 36 bp, Homo sapiens
  chr5:138775186-138775222
  hyper
agagaagggggcgcggagcgcggggcacgctggtca

SEQ ID NO: 231436 - DNA, 240 bp, Homo sapiens
  chr5:138923041-138923281
  hyper
gatcctggattgcacgtcagtaggcgggctgcagaggaagggcgctgttctggttggtcctggccttaccccgccggagggcgccagctgccccggcgacgacacgggggaccggacggagcctcgggccgccagggaggggcctggctgcagaggcagctttctcactagcgactcgggcctctcaaaaccagcctttaggcatttaaaaagtgatacggttcacgccggtcttcgcca

SEQ ID NO: 231437 - DNA, 273 bp, Homo sapiens
  chr5:138940460-138940733
  hyper
agctgtagccacgcggcctctggaaagagatgtgctaagtcccaggacttcagaagagctctgtgaccttggccaagtcccttcctccttcaggagcgctgcagtgggcctaagtgcctcctcccgggactagtacggggacggtcgtgagatctggacaacattcgccttttaatatttattgatcttttgtgacacgcgcgtgggtttccatcagcaatgaagtcaacggtcgcggcgctggagcctgcagaactcgcgctctagatctcg

SEQ ID NO: 231438 - DNA, 89 bp, Homo sapiens
  chr5:139016856-139016945
  hyper
tccgtgtggtgagcgtgcctcctttgtggtgtgggtggcctatggtggtgcttcctttcacaaattgtgtgtccgtgtgacaccccccc

SEQ ID NO: 231439 - DNA, 297 bp, Homo sapiens
  chr5:139017725-139018022
  hyper
accgtctttctgagcacttcgcaaagccaaacacacacccgagcacgggaaactgaggttcatagaagctcggcccaaggtcatgccgacccattccctgctcagctgagtgggtcaccctctgaaaaccatcccgtcggaggacccgcagccccctgtccccttctcgctcaggggcctgagccagtttccagactccccggttggaagtgctgacgtggctctgggcagctgtctggggccgggaagcggggcagatgtcacgcagcccaggggaggaggcggctccgcggggag

SEQ ID NO: 231440 - DNA, 530 bp, Homo sapiens
  chr5:139047725-139048255
  hyper
ctgccactccctccgcctcccagacctctggggccatgaatcatttatgaggcaaaaatgaaaccaattaaggacaaactttgaaagcctctaattgctgcgcctggtggcaccgtggaatgaggggaggccagccttctcggtgcggaatctccttggcccaggccttcccaggctgcccgtcccgccgcggctcagggcgcctcccggctccctgccgcctcccagccggacgcggacgtgcctgcgcggctctggcggccgcgtctgccgccccggcgcccgcccgggtcccaggccgactaattaggcccggctacctcccgcgccgcccactgcccgctccaggcccgctgcccgctccaggcccgaggtgatggcggctgttcctgccgttctggggcctgtgccccagagctggccgcgtttctcggggcgggagccagctctgctcgcctggcttaacccagacgagcccaggacgccctatccctgaaccccatcgtggcgtgcaggtctgagtaggctct

SEQ ID NO: 231441 - DNA, 75 bp, Homo sapiens
  chr5:139051074-139051149
  hyper
aaccctgggccagccgcgggtggcgggttggggcaggcacaaagagggcctctgtgcggccggctgggctgccca

SEQ ID NO: 231442 - DNA, 61 bp, Homo sapiens; identical to SEQ ID NO: 200061
  chr5:139091111-139091172
  hyper

SEQ ID NO: 231443 - DNA, 934 bp, Homo sapiens
  chr5:139126893-139127827
  hyper
gctggcaggtgggcggggctgcagcagagcgggggtgagagagggagacgcagcctcccccccagctgttaaccttcacgcttcaggcctctgcggatggcagaggagggggaaagcccagctgccagcttggcggaggtgaccgggcgggggctgggggctgtccctccctctgggctcgtctctggggagatctggggccggaaggaatgtggtggagggcgccttcggctgaggaaggctgttgccggatgggtggcctcctgaaggcttgtgctggcgaggcgggtgcccaaagggggctctgagcggtgtcggccctgcccgcagcccggccggacgtgggggccggcgtgagaatcccgcccatctgtgagccggcctcacgccgtcagacccaatttatctcgccgccaaagtttcacagccatctgctcgagtggaacggcttccagcgctggccccaccgggccccccagccagcgcggggatgttttccaatacgacagcatcgccccgccaaagcaaggagggggtgtagggggaggcggcagagcgcggtgcgcggggctggcaggcagccctctcccgcgagcgagccgaccctgaattttaagcgattgatcaggaagctcaggccgttcccatcactttgagcagccaaatgcgacggcgcagggatttcaaggggcctttgcggaggcggtaatgaggtcaccgtcactgcgccagcccgcgggcgggagggggcgaaggtctgcggacacgtgtgaacacagcctgtgaaccgagccacatctgtattcacgtgacccccggggccccagcactgacccaggaaaactcggcatttggatctgagctgattcacactcccccgcccccaccccacctacccagccagacacggttcgagaggctgagctagaaccca

SEQ ID NO: 231444 - DNA, 346 bp, Homo sapiens
  chr5:139135575-139135921
  hyper
tctgtctgtgcctccgctagtgtccccgcggctgccgtccgccctcccgcgccccgccaggtgagcgcagcccccacccccagtcacgctgctctgggctgagcctcggtaatttccgagtcggcggcggctttgtgtgcaccggccgcggtctgggggcggggagggaagggagggttatttctcccccctcttcctttttattgggtcattaacaacggctcggactgccgctgcgccccccctttcatgtctgccgcgcctcccgccattatctgcctccgccgcgcggcgtaattcgatgccaatcaggttggggcgcagaggcagccggatcaaagccggg

SEQ ID NO: 231445 - DNA, 36 bp, Homo sapiens; identical to SEQ ID NO: 200062
  chr5:139175356-139175392
  hyper

SEQ ID NO: 231446 - DNA, 322 bp, Homo sapiens; identical to SEQ ID NO: 200063
  chr5:139175997-139176319
  hyper

SEQ ID NO: 231447 - DNA, 739 bp, Homo sapiens
  chr5:139227517-139228256
  hyper
tcctgcttggcccgcgggggcggcccgcggctgtgtctgctgctggcccgcgtgctgtggctgtccagtgagtagtaagtcctgctgtcggccgccgggcacagtggcggcgagtccgagcgcagcgcgtcgtgcgccccacgcaggcccaggaaaggtgtgctctcggccgccagcgccccgtccgcgtcgtccgcgtcgtcgtccgacgccgaggctgagccgccgcccgagccgctgctcagcgacagcgagtccctcgccgcccgtgcgcgctgcgccgccagcccgttgaggcgcgagcggcgccagcgccggggccccgccgacgtcctgcgggacgcaccgcgcgcgcgcggccgcggcggcggcgggggcgcgcactcctgcgtggtctcgtactcgtcgtcctcggggatgcggaaggggctggcaggcaggctgcccaggctgccgccgagcgcgcaggtcccgcgccgcggtccgggccccgccgcggggtaatagtagctgtcatagctgcgctgcatgtctgcgccgggcccgggcccgggcccgggtccgggtcccgggccggggggcgccgggtgccgcagtaacggctgctgctcggccaggcggtaactgatgggcgccgccggcggcagcgacacggcgtgcgccgagttgggggacgtgatctcgaaagttggcacctgcgtggccagcgagtagtggaagtccacgggcgagaggcgcg

SEQ ID NO: 231448 - DNA, 108 bp, Homo sapiens
  chr5:139283630-139283738
  hyper
gcgcctcttgcccgcccctgcgtggggacgcggccgcccggggagaggcgcgcacagccactgtcgggctcctggcacgcagccccttgctctcccggccgcgacgac

SEQ ID NO: 231449 - DNA, 40 bp, Homo sapiens
  chr5:139284098-139284138
  hyper
tccgggggaggggagcagcgagccttaactcttcccctcc

SEQ ID NO: 231450 - DNA, 91 bp, Homo sapiens
  chr5:139423001-139423092
  hyper
cagcccgcaggggcgcgggaggaatcgtgccaccctttgctcccgggatttatcggcatgacagtgggggtggtgcgtgaggagaaggcga

SEQ ID NO: 231451 - DNA, 636 bp, Homo sapiens; identical to SEQ ID NO: 200066
  chr5:139487907-139488543
  hyper

SEQ ID NO: 231452 - DNA, 615 bp, Homo sapiens
  chr5:139525366-139525981
  hyper
tcatagttgctttgttctatcgtctctccccatgccttcaaaggcggcctgccttcccagttcccagcctcccgccagattcttgcgtgacctcgggcggcacccagtgctgctgtggacagctcattccgccgcggcggcggctgcggctgcggcggctacaacggctcccggcgtgtccccggcgccgccagggggcgaatggggtgcccgccggctcctcggactccgggcgcgccggcactgcgctccggagaggcccggccagggaagaagcaacttccctccgccgccgcagaccagccgggcagagacttccagccccaccctcaagccctctcggtggctctgtgcgcccaggcctaggggtggggggccgtaggtgctgcgcgcccgcacaggtggtcaggccgtcagcatgcctggctcgtcgcgcacagaacactgcccaggggttcacccagctcccctccctcccctccgctgccctcctggcagctccagctctgctctcgcggctttccaggttttggggtgggtgattgagtaggccgcacctgggacactgtgactggaggacgccggaatttaaggaggggacgagggagacgcagc

SEQ ID NO: 231453 - DNA, 111 bp, Homo sapiens
  chr5:139682661-139682772
  hyper
ggtgcactgtaagcgcctgcgcagtgggagttggactgaaatagggtggggaagggcgcgtcttactttgtgcgccggtctttcttctgcgcctgcgcatgagttggacta

SEQ ID NO: 231454 - DNA, 169 bp, Homo sapiens
  chr5:139726535-139726704
  hyper
atctaagccccataccaggggtctccatccctgtcaccctctaagtttcagaagcccaccttttggcctaccaacacggcaagtatcaaataataattaattcatctatcatttaaaaattagacacgtgaatgccagccgttctcataaacccgagataaccagagtt

SEQ ID NO: 231455 - DNA, 258 bp, Homo sapiens
  chr5:139742886-139743144
  hyper
gaggcccaggtgtcgccatggttccctcgccggcagagacaagagcagccgctagggggcagggcgccacgagctctggaccgagtcgcagactggttggagatcctcagccaacctggggttcccctcctcctcaggcttccctcgcaacagcgggagatcagaggtcccgccgtcccgcgcctgacctcggctgaggacaggcaccgccatgggccacacgcacacagcccggagttgcagcggaccggcaggtga

SEQ ID NO: 231456 - DNA, 422 bp, Homo sapiens; identical to SEQ ID NO: 200069
  chr5:139927089-139927511
  hyper

SEQ ID NO: 231457 - DNA, 98 bp, Homo sapiens
  chr5:139944032-139944130
  hyper
tggtgcgtgtaaacgggcgtctggatccccgaatggttgcgtgtttccgtgtgtgggtccgggggaggcccacgaacgccagcgaaaccgctgacacc

SEQ ID NO: 231458 - DNA, 829 bp, Homo sapiens
  chr5:140011816-140012645
  hyper
ggctgcacacctgccgccgccagtgcggcgcacacgcctgtgggcgtctccattcctgtgttgcgcagcgctagattctggatggccgggaacttgtggggacagagagccgccatcagtccgcgttcgcccagtccaggattgtcagacaggtctaggctggtaagggccgggaaggcgcgaacctgttcgcaggaaaaggcaggcgagtgtgcttgggcaatgctcagtaccttgaggcctggcttgagccactgctgcagctcggcgagccaagaacgccctgtcgcccacgacacgttgcgtaggcgcaagctggaaagtgcaagtcctgtggcttccagaggcagcggaggcatggtgccggttatctttaggtcctcgagcgtcagttccttgaggcgggagtacgctagcacacgcagggcgcctaccagtagctgagcaggaacctgtgcggctcccactgtgagccgccgcacgcggagagccttgaccgtgtcagcatactgccgcgggtcggcgtccgcatcgacgcgctttagaaacggctctaggttgagaccgccggcatggatctccacctctactgcagacacacactggaaggcttcggaccagtcgggctgaggttcggagaagttgcagacgcagcggaaatcttcatcgtccagctcacaaggttctggcgtggtcgcagagacgtgcaccagcggcagcagcagcagcaacaagcaggacgcgcgctcctggggagagagcagaggtctaggaggccccatccaacccctgtggctcccgagtggcacgcgttcgaccccaagaccct

SEQ ID NO: 231459 - DNA, 132 bp, Homo sapiens; identical to SEQ ID NO: 200072
  chr5:140027367-140027499
  hyper

SEQ ID NO: 231460 - DNA, 34 bp, Homo sapiens
  chr5:140044228-140044262
  hyper
gggaattgacggtcgcaccgtctacctagcccaa

SEQ ID NO: 231461 - DNA, 272 bp, Homo sapiens
  chr5:140071090-140071362
  hyper
gactagtgaggtgcgcaaacgcccgagttttccctggtgcgcgggttccgcctttgcagtgccctccacccttcctggtgtctgacccgcctccttcccaggccttttgttcctgtcccggaaagccggcgtcctgccgcgcgatgcccctgctcggacttcttcccaggagggcctgggcttcgctgctcagccagctcctgcgaccgccctgcgcttcgtgcaccggggcggtccgttgccaaagccaggtgagcgagacagaattatct

SEQ ID NO: 231462 - DNA, 206 bp, Homo sapiens
  chr5:140187031-140187237
  hyper
attctcggatcgaccgggaggagctgtgccggcggagcgcggagtgcagcatccacctggaggtgatcgtagacaggccgctgcaggttttccatgtggacgtggaggtgagggacattaacgataacccgccggtgttcccagcaacacaaaagaacctgtccatcgcggaatccaggccgcttgactctcggtttccactagag

SEQ ID NO: 231463 - DNA, 1415 bp, Homo sapiens
  chr5:140305692-140307107
  hyper
gtgcaggacagacttcaacccgcagcaggatccagcgcggaaagctctgcagcaggatccagcgcggaaagccccccgcagcacttctttcggggggctcctgtttccttaagcctagaaggtgtggtcgctcacgttcaccgtcccgcctctcgccgcctccgctcggcagctccacgctgagtcccgccctctccgccggagaggtgcgccggggtcagagcgccgggacccgacgcgcggctcccaaagggcggcaggaagagcccagctgggctcagccacagttatcagcaatctgcgggcagaggatgtggaggttaagatctgggcagcctcagggcgttgtcctagaaaacaccgtttaaggagagaagtgttagtgtctcggggcgtctcccaggctccgccctgcgcccgcagccagcgtggtggtcgagaccccagcccgctgctactggagacagcacctctcgcgcccgggcgggcggcctcgtctctgcacccctaggcggcgctgcgctcctcaacacccggccggctccgctttcccagacggctgcccagcctccagcctagcaagcccggctcccagctggccagccccggcaatgccggcgttcgggaggcgcaacgtcggcggtcgctgagtatccagcccgcagcagtgacggccggcaggagcgtgctcttccccgcggctcgtgctctccaggagtccggagcatggtcctgggtcaccgttggtgtagcgtgttggtggaacgtggacgcctagagggaggatggtgggctgtggggtggcagttttatgtttgtgggtttcctgcggcgctgcagcgggacagctcgagtactcagtgccggaggagacggagcggggcgtagccgtaggcaatctctccgcggacttgaggctgccagcggccgctatgtcctcgcggaactttcgcttcctttccagccaccgcgagctctacttcggggtggatctacccagcggcaatttggtggtcagagagccggcggaccgcgaacagctgtgcagggccaaagctgcctgcgtcttgacctacgacctggtgctcgaggacccgctggagctgcacaagattcggattcacgtcctggacaccaatgacaactcacctctctttcctgccggcgacgtgcagctgcacatccccgagttcctgacgcccggagcccgctttactctcccgaatgcccaagatgacgacgagggaagcaatgggatactaagctacagcctaagccccagtcagcactttcgcctggacatgggatcgcgggttgacggcagcgaatacccggagttggtgttggagaaagcactggatcgcgaacagcgcgccacccacctgctggtgcttacagctcgggacggcgggcta

SEQ ID NO: 231464 - DNA, 357 bp, Homo sapiens
  chr5:140345951-140346308
  hyper
gagcagtccgggttcgctgtccgccacttcggcgcggaatcagagcaggacttgctgagccctcctaccgctccctttccccctccccctctgtcttcccttctgtttccttttccctccccctggagctgtagcggcagcagcagcaggaagccgagccgggttgagcgactcggaggcgagcggaggagctggaatatggggagtcagcgaggacggtggggccaggagcccttgggagggcctacggagggagcggccccaggcgctttctagagcgtgagcggtgggggagcaggcgcagggtggcacgagcggaggcggggcccgggcgtggggcacggctggggaagctgc

SEQ ID NO: 231465 - DNA, 271 bp, Homo sapiens
  chr5:140381529-140381800
  hyper
ggaggagggagaggcggggtgtctctgcgcggaaagcctggaagttcacttgcaaacacagaatctgcacagccttcggtgccctgactctttcctgggcatccagaggcagcagcagccgccagcgccaaagaacgagcagtccaggggctgggccggaaacggctataatcatttaatagcctttgccggctgcactgacttagcagagtgggcggtaggcaggctccagagtgctgtctggcaagatagtccccggctttaatcaaaa

SEQ ID NO: 231466 - DNA, 352 bp, Homo sapiens
  chr5:140419804-140420156
  hyper
tctgccaagtcctgcgcgctgctcgccttccacaacaccttcctcagcttcgtctgtatttgaagagcttagtaaattaatttcccaggggcagagaagggaggaagagggagtgtctgagggctgaaaaatgcagtcgactcgccctctgctggttaaagatccgaatttgtcgccgccaaaacaacggggaatgagaaagcaatccatatggtacggaaaaattacaacaaaaactcggcttaatttaacccacctgtgaaccttaactgcctactgttcctctttagcgctgcttacttccccagcactgagatttaattagattgattctaaacgctagcccctgaac

SEQ ID NO: 231467 - DNA, 209 bp, Homo sapiens
  chr5:140431053-140431262
  hyper
tgatggcgggtacgcgcagaaaatctttgcaaaacaggcaagtgggatctcttctcatttttctgtgcatatctgtgggggatgcgacaactatccgctattcagtggcagaggaaatggagagcggctcgtttgtggccaacgtagctaaggacctaggactggaggtagggaagctggctgcgcgcggggcgcggctggtttccgag

SEQ ID NO: 231468 - DNA, 31 bp, Homo sapiens
  chr5:140593428-140593459
  hyper
agatcctgtgaggacgcgtggtggcgctgca

SEQ ID NO: 231469 - DNA, 111 bp, Homo sapiens
  chr5:140613724-140613835
  hyper
cacaaaaatgcaactcggaaaataggcatatagaaggagcatataatttaaatttatagacaaacacacaagaaaaattaatattttgtctgaaacgtattggaatttatc

SEQ ID NO: 231470 - DNA, 533 bp, Homo sapiens
  chr5:140700004-140700537
  hyper
tttcaactcacaaactctcccggaacaaagacactcaaaaaatcagggctcagcgagctctcttcgcctcgggtacttacaatccagtgacgattataagttcagtttcaccgggccggagcgaagggaagaggaggccgcaaggagccaagcgggagagagccgagcgtctccttgtcgtttccttaattcttcctgccgcttggcagagtgatccactaccgattactgatgaaagggcccgggatgggcagcgcgaaatcttgccgagaggcgcagctcgcatcaccagaccccgcacctcgccggccctccgtccgggtcgcctacccagcaaaaacggaagtgctacgtcgcgacgcggggcgggaggcggctgtgagtgacagcccctccgggcggaagggcggagccccagctagcgcaggcgcaatagcgcaattacgctgcccagcgtgaaactcatcttttcgcgagaacttgtttttccgggatggaaatgacagtgtttcggaagagctgttggtttcaaa

SEQ ID NO: 231471 - DNA, 320 bp, Homo sapiens
  chr5:140797158-140797478
  hyper
tgggcgccgccgtcggccagtgcagagcaagcgctgacgccggggatccctcagcctctagcctgggattccctgcgcagccaacaacagaaaagaaaaccagctcccacacagaggctcccggctgcgcagaccttgcccagcacaccagattgccagctccgagacccgggactcctcctgtcctgggccgaatgctcttttagcgcggtagagtgcactttctccaactggaaaagcggggacccagcgagaacccgagcgaacgatgggagggagctgcgcgcagaggcgccgggccggcccgcggcaggtactat

SEQ ID NO: 231472 - DNA, 601 bp, Homo sapiens
  chr5:140800537-140801138
  hyper
gaatgggctctaggcgccgctgctcaccaatcagggaatgggaagctgcgcgccattgagtccctccctcccccgcctctaccacacaaagcggaatgagatggatactcacagatcctgacactggagacttagaagtattttccttcgctttctgatatattttggatgtagtcggcctaggacttcatagatacataagccgattcacaaccaaccagctcgagaaaccgcggaatatcggcttagagcctgccatggcgaatcggctacagcgcggggaccgcagtcggctgctgctgctgctgtgcattttcctggggacgctgcgggggttccgggccaggcagatccgatattcggtgccagaagagaccgaaaagggctccttcgtgggcaatatctccaaggacctggggctggagccccgggagctggcgaagcgcggagtccgcatcgtctccagagggaagacacagcttttcgctgtgaatccgcgaagcggcagcttgatcacggcaggcaggatagaccgggaggagctctgtgagacggtgtcctcctgttttttaaatatggaacttctcgtggaagacacctt

SEQ ID NO: 231473 - DNA, 1274 bp, Homo sapiens
  chr5:140855366-140856640
  hyper
aaggaaagtgaagttcctggcgctagcgcgtgtcctgctcagagagcccggcgctagctcattcttcgtgcagttattggctgggactctgtgtgccgctgtcggccaatgaagacgctggagatcgggcccctgcccgtcccctttctgcgccccgggatgaggcagagactgaacagccggcgagcaaatcaacggcatccagaaagccatgtcggactcggcgcccagcgcccaagcgctaacccgctgaaagtttctcagcgaaatctcagggacgatctggaccccgctgagaggaactgcttttgagtgagatggtcccagaggcctggaggagcggactggtaagcaccgggagggtagtgggagttttgcttctgcttggtgccttgaacaaggcttccacggtcattcactatgagatcccggaggaaagagagaagggtttcgctgtgggcaacgtggtcgcgaaccttggtttggatctcggtagcctctcagcccgcaggttccgggtggtgtctggagctagccgaagattctttgaggtgaaccgggagaccggagagatgtttgtgaacgaccgtctggatcgagaggagctgtgtgggacactgccctcttgcactgtaactctggagttggtagtggagaacccgctggagctgttcagcgtggaagtggtgatccaggacatcaacgacaacaatcctgctttccctacccaggaaatgaaattggagattagcgaggccgtggctccggggacgcgctttccgctcgagagcgcgcacgatcccgatgtgggaagcaactctttacaaacctatgagctgagccgaaatgaatactttgcgcttcgcgtgcagacgcgggaggacagcaccaagtacgcggagctggtgttggagcgcgccctggaccgagaacgggagcctagtctccagttagtgctgacggcgttggacggagggaccccagctctctccgccagcctgcctattcacatcaaggtgctggacgcgaatgacaatgcgcctgtcttcaaccagtccttgtaccgggcgcgcgtcctggaggatgcaccctccggcacgcgcgtggtacaagtccttgcaacggatctggatgaaggccccaacggtgaaattatttactccttcggcagccacaaccgcgccggcgtgcggcaactattcgccttagaccttgtaaccgggatgctgacaatcaagggtcggctggacttcgaggacaccaaactccatgag

SEQ ID NO: 231474 - DNA, 51 bp, Homo sapiens
  chr5:140864512-140864563
  hyper
cctattggctgagcccgggagccgctgtctgccaatcgggtggtgaaaggc

SEQ ID NO: 231475 - DNA, 64 bp, Homo sapiens
  chr5:140871515-140871579
  hyper
acactcaaaaaaggccggggcctccttcgagcttccggtgaatttcgggcgatttccgcgggtg

SEQ ID NO: 231476 - DNA, 193 bp, Homo sapiens
  chr5:140892330-140892523
  hyper
tgcccgcggcggcccgtgttgtgttttgtgctgtgtccacgcgctaaggcgaccccctcccccgtactgacttctcctataagcgcttctcttcgcatagtcacgtagctcccaccccaccctcttcctgtgtctcacgcaagttttatactctaatatttatatggctttttttcttcgacaaaaaaataat

SEQ ID NO: 231477 - DNA, 102 bp, Homo sapiens; identical to SEQ ID NO: 200075
  chr5:140904508-140904610
  hyper

SEQ ID NO: 231478 - DNA, 68 bp, Homo sapiens
  chr5:141061849-141061917
  hyper
cgccccgcccggccggttccctccgcggggccccggccactccttgtgcaagcgcaggcctccaaagg

SEQ ID NO: 231479 - DNA, 1247 bp, Homo sapiens
  chr5:141255434-141256681
  hyper
cacccacctactcccgcgccccccaccccctacaaacacagctagacctccggcttgtcataaaaactttctgggcggccccttccctggcagctcccgagggttgacccagagcaggtgctagaagcctcgcggcgtcttcctgcacgaagcgacccaagcagccccagtccgcaccgccttggtcagcgggcgctcccagcacacacccagcgcgcggagcgactcctcccagaggacgccgagtgtgtgtgtgtgttgcggagattagggggtggcgggggggacggcggcagtttcttgggctctggcggccccacccccaccccggcagcgcccagcctccaggaacccaaggcaaggctagggcgcggcgtggtgagaacgcgcttcggctagtggggggagcccttgcgccccccgcacccaggccaccgcggggaatccctcctccccggcatctccggcctcggcctagggtcccccgcaagccggagccggcgcgagcggcgcagcgggcgccaggagggggcggggagggagccggcgccggaatcacaaagccgcgaacccggctaggcggggacattctcataaaaccgaccctctcgtggcgagcagagggggttttttgccctacgctcaatcctccaaggcctcagtgccgcccccagtctttcctggcagaagaaatagtagccgaccactgttggggaaactgaggccagaattctgacttacagagggtagctggggggaaggggtgcgagaccacctcgcctacaaattctgctcctatgcctgccgcgatctccgttctggctccagggcctgcccgcgcacacactggcctacagcggggaccaggcggagggggcgctcaggtgtgagacgaacccaggtgtgcgggacccaccaaggtgtgtgggacccaggtgtgctggagacccaggtggctcagaaaactcagctaaatggctggaagagggtcgcaatcaccgtcccaggctagcaccctctacaaaggaacctggggccccagagctccggggaggcgggatggcttggccagccaggtccagcttgttcccggaacaccagccggttcggcccgggagtgggggttggggaggcgccgactgggaagccggcaggccggcccagccttcccgctgtgccgatatttacaataataatgtcgcgattaacgtggcggggcgcttggggctcgccgaacgaccccggcg

SEQ ID NO: 231480 - DNA, 745 bp, Homo sapiens
  chr5:141257149-141257894
  hyper
gctctgtaaagccacgggttgtgtgtcggtgctgctgatcgtgcagacactgaagcggattctgagctggcgacggtgccccagtgggcgctggtgtgcgggaggtatgtctgtgtgcacatatgcagggatgtatgtatgtgtgtatatatgtccacggtctggccctctgggtgcccgcgagaagctggaagcggctgagtgagccgaggtagttgcccaacaagtgtgtatgtatgtgttgtggacaacggtccttgcttgctccgtcctccgggagacccccaccaaactgggggccgcgcgcttccccaaacccatcctccacgccgcgcgctcctggagtctccttatccccgtctctccgagcgcgcccaggtttgggacgcggggactagggttctgctcagcaccccctcccctccctcggcttctcgccgcggacctgggaggacggaatccctcagccgcatcccctgctatgggctcccagcagcccccacctcagccccctcgcgccgagctcgtgttgggcccccgcggcctcgctccgccgagcgcccctccctcagctcccgccggccatgaccgcttcgggccccaagccgctgctgcctccaccgccgccggatccttacccgcctccgggcagcgccggccgcccgccccgctgtccatgagccgccgccggccccggcctgggctgcggctccgcacggctggggctggagctgcagttcgggct

SEQ ID NO: 231481 - DNA, 175 bp, Homo sapiens
  chr5:141258623-141258798
  hyper
acaagcgtgaagacgaagtgctgctcctgagcttaggctattcgagggtcccctgatcacctgccctctgcacggcgtagtgctgcggccacacgtatttgccagtgacttacattatacagtcaccgggtccctgccccgcgaggccgcgcagtgtcacggcctgtgtcacacg

SEQ ID NO: 231482 - DNA, 543 bp, Homo sapiens
  chr5:141262787-141263330
  hyper
gcccccggggacccggtggccgccgctgaccccgtggcatgcggctctcaaaggccccattcatctctgggggctgaaggcgccattgtccccagcggggggtggtgtggggagtgaaggggtctggactcagaaggaaggaatgcgtctggagaagttgcccccggggctccagtctcaaggtccccaccagatctccatcgggaccctttcacgaccccgagccctttccccaggagctcccagcaaccttcgcgcttctccggagggtggggtctgccgcggcgcgggggcagcctcaccccacctcactgctggactccggagaaccatttctgggaccgggagctgtccagcgcctcgggtcctgacggaccgctgattcgcctaggtgccatcggacaagcgggtgctcagagccagctctggtggctcgggagctttcccccaaccaggctaagaccactaaaccacgcctggcccggatgagcttggatgcagctccgaacgtggggatccatcggtgctgagaactgacctagg

SEQ ID NO: 231483 - DNA, 54 bp, Homo sapiens
  chr5:141348500-141348554
  hyper
tgagcacagggctcgcagtaagtgggggtgacggtggtcgcgccggcagcgccg

SEQ ID NO: 231484 - DNA, 73 bp, Homo sapiens
  chr5:141703932-141704005
  hyper
gctgggagatacacggcaaagctggcaccgtgggcaccgagctgggaggtgggcgagccgcccagagcgaggg

SEQ ID NO: 231485 - DNA, 84 bp, Homo sapiens; identical to SEQ ID NO: 200083
  chr5:141705342-141705426
  hyper

SEQ ID NO: 231486 - DNA, 440 bp, Homo sapiens
  chr5:141931131-141931571
  hyper
ccccaaatataatttcctcccgcagctcattgcagccccgaggaaatcaccgggggagggctcgggagtgcggcgcggcagccccataatttccagggcccttctcctacactgacacgtaattgtcagattgttttatgagagcagcttcctgcccgcttcctgcctggcttccaaatgtgctcattcccgaggaagcctcacttctccttctcgcccttaatcgctcctttcctgcccgccccagcccccaggctgggcgatttcctaaatcactcggaattggcttccagcgccggcgccccgggtgggctcccggagcgcgcgggcctgtgacccggaggtcagagatgcctccgtcctgtttgatgtcttgccctgggggccttccctcgcccaccccctttcccctcccctccggagctgatttggctcctgaa

SEQ ID NO: 231487 - DNA, 163 bp, Homo sapiens
  chr5:142781702-142781865
  hyper
atctccccacctctctgccccgtttatctgaggcgataacgatctctaaacacgaggtatcgaatggagcccaatgaatttccatgccgcttttttgacagctgccttcaaacccgaaaccaaaacaatatttcctaaaacgaaaacgctccctcaagcgaca

SEQ ID NO: 231488 - DNA, 332 bp, Homo sapiens
  chr5:142783607-142783939
  hyper
gctacctccttcccgcccccgcccagctccgcggctccagacccactcgggagctcgctctgccccttggcggcaagcgccgccagtgcccctgcgggtgacagcgggcgggccacaagagccggggcgcctcccgcggctgagctgcgtgagtggcccgcgccgccgccgccgggccgagttgcgtgaagtgtgtcacttcgaaaggggctacggggttgcacggaaacggtgccgcagcgtctcggccgcgctcggggccgggcggcctgacacgccctctggggaggcttcagggaagggacgggatagcgggggtcggcgcatacgta

SEQ ID NO: 231489 - DNA, 355 bp, Homo sapiens
  chr5:142784119-142784474
  hyper
cggcggcagaaggaggcgccgcctgccaagttcaacccccacccctcccgcccaatgtgctcacactcgaaggaagttgcacgccaaatgcaaaacctccagcgagctggatttctttgcactttttttttattattatgattaaggaaagcagggggcggcaggcttaaaagcaagttgcaggcgaaatagtaagttgctggcgaaatatagccccccttccgaaactcctgacctcttcttccaccccggccagggcccgcgtccaagttcccggtgcaggccccacccccgaatcttgacatttgctgccctcgactctgtgcgttgctcaccctatcacgttcataggacc

SEQ ID NO: 231490 - DNA, 184 bp, Homo sapiens
  chr5:142785134-142785318
  hyper
taggctttcagcaagcctcttgtccggagacgatctacgggggccgcctccagaggattctggagccgccatcttggcaaaggaagagatactcgccacctcggaaaagaagagggaaccaaccgtatgccaacgtagaaccctcagccagaagaatttttatgaagggcgctgagcaactcca

SEQ ID NO: 231491 - DNA, 255 bp, Homo sapiens
  chr5:143550289-143550544
  hyper
agtatggagcttgcgcagtatctacccaacctgcggctggcccgtgccaaagaggaaagtgcttccggcagcctggttaggggtggaaccaggaaagcgcaggcgtagcaattgctgcttactcgtaggtaggaggaggagtttctcagacctaggtgatggaggaagactgggaggcgctaaaatgagacagacggagtcccctctcctgtccacaaactacaatgcctacaatgcctcggtgtcagcatttac

SEQ ID NO: 231492 - DNA, 279 bp, Homo sapiens
  chr5:143584759-143585038
  hyper
cgccccaagccccgcgcgcctggcaatcgcgtgcccaccgccggagcgcggcgtccccgtgcagtcctggcaacctgtcaccgaggaggacgtgactcggagctgcctccgctttctccaagccatattcctttaagatgatgtaatagtcatttccctggatggtttcttgcctgcactgctgaaacaacagcatccgaactgcactgggaactgtggaaccacccagctccgccgccagagaagccggagccccgggccccccgccggcatctctgc

SEQ ID NO: 231493 - DNA, 974 bp, Homo sapiens
  chr5:145214426-145215400
  hyper
ggaaagctccacacgtcggtcatctgcaactccacggagctcacgagctgggattcccggaggctcttcctaaaaggaaagcctcttctttcagctggggcaggtgtgaacgtgatgccaagcacggccccttttcccgctccctgtaaagggagtcttcgaggaaatccctctcgacccacacatccctgaagcaaagcccgcagctggaaagagacactggcggtgccagcttccgcgtggatgaaggagaggagagaggggcaagcagcggaggcagcgcgggatacggaaggtggaagcggggcggtacctttcggagaaagctggcgaccacctgctcgaaggggtacttgtacacctggtgcacatccaccgagacccccatccccgcgcgccgcgggccccgcgcaccggccacgcctccgcgagctcagagctgcccagggctccgcagaggcccggaggcgcccacactcggacagccacatgggcgtggcctttttcctccgcttttcaaactttcgaaactttattggccactcggagaaacgcgcagtcggccacgcccacgcccctactgccagagtccggggcctggggttacagagcgcgggaggcgctggagcgctcccagagcacccggggccccgcggtctccacgctggcggcgccagagcggccctggtgccctcccgcggccgcgcctgccgagaaaagcttctctgcctgggagccatcacgccccgccccaggaaacctggaccttgggcttatgcgtttatggtatcaccgcctggagtcacagaataagccgtggttggcagcacgggaaaaaagtattaataaggaaggcctggtgtgacaaaggccagcattactcatgccaccaggcagctgcctctgaggcttgggtttgggcctcgtgtaaggtaaagattgcctcgggaataagaaccgcgttttagtgcacc

SEQ ID NO: 231494 - DNA, 146 bp, Homo sapiens
  chr5:145316087-145316233
  hyper
gggctgggtaaggcgatcccttgaaatgagtaagactgagtggttaaagttttcaaagcggttggcagcagcggcgcttggaggaaaggaagccggttggagggcgcagcgcacccctgctgcgcggaggagggggctgagctgaa

SEQ ID NO: 231495 - DNA, 292 bp, Homo sapiens
  chr5:145583394-145583686
  hyper
agccgggctgggccggggccggcgaacgtgggcgttgggggctcgcgggggcgtgggggaggggaggtggcgtggggggcggcgctgaggggccgcggccgggaggtcccggcgacgccttccctgtagtactatcaccattgtggtgggggtgagggtgggagaggagcgctggggacggagaggcgccgtgaatatggggactgggggggcaggcaaggacagcgaaggcttttcaaacgcaaatatcggggtgctggaaggggtagcaggggccgtgagggaatttaaa

SEQ ID NO: 231496 - DNA, 247 bp, Homo sapiens
  chr5:145713642-145713889
  hyper
gtgccgagccctcacggacgctcggcctctggcccctgaatccctctgggcgtctcggatcctctgagccactttgcagacaatgcaaggcagcggccaacagacgagtcccgcagcagctgcgcaggcggcgagtacatgtgagaagtttgtgaaaggcgaccagagaaagggagaggaaggcaagtcaggcggctgcgaacacctggccaggcagccccgccagctgcctcgctgcgcgatggca

SEQ ID NO: 231497 - DNA, 461 bp, Homo sapiens
  chr5:145716881-145717342
  hyper
ttccatttaagagccgccgaaaccgaggctcagagggctttagcgaaagggttgcgcttggctctaggcacctgggctgagtctttttcccaccatcgcagggcgggaaccagcggagggggctggctcggatggggagaaaagcaactggagggcgccgaggggaagagggagcccggatctgtcagggcgtcctcttggactaagggatgttcccctaaaccacaccaccccacctcgttcagattctgggaaacccggcacgcacataccctgcacaataacaggcagggtgaggtctctaagccccgaagatcgctctctcagcggaggcagtggccctgacgagggggtacagctgcacgcgcggggtttctctccgaaccggagtgcagcgtagtcgaggtccaggattccccatccattattcacgatgtttactagagcggggcaagggagag

SEQ ID NO: 231498 - DNA, 65 bp, Homo sapiens
  chr5:145717844-145717909
  hyper
aaagaaaggcaagcgtggggaggaagccaccccggactgagaaggcagttactgcccctacctct

SEQ ID NO: 231499 - DNA, 202 bp, Homo sapiens
  chr5:145718089-145718291
  hyper
gcggcagccgggccgacggagtgtgtgtgtgtgtgtgtgtgtgtgtgtgtgtgtgtgtgtgtggtggagaggggaagttggagtagggtcaacttcctgccccagctcagcccagggctacccttttatccaggcagttcgagctgggacaggacggagaggttgggacttttggggtggcatgggggaagggaagtccacg

SEQ ID NO: 231500 - DNA, 1727 bp, Homo sapiens
  chr5:145718591-145720318
  hyper
agcagcgctcacttggagagcggcaagcaagctagacaagcctgattccatgtcacccgctgccaccctgccaggagcgcgaagatgatggccatgaactccaagcagcctttcggcatgcacccggtgctgcaagaacccaaattctccagtctgcactctggctccgaggccatgcgccgagtctgtctcccagccccgcaggtacgtagtggagcataattaccgctctaaggcacattttttgacaggcactagcttcatgtttttttcatgtcgcccagaacaatcgccgctgtctgaacccctctccttgtctcccccgcgttctctcccggcgcgctctctctctcattcatgtctctgatccacacgtctgttccagcagagccgctgcctccgtattaatttttatgacctgggctttgaggagaggcatctcggttgcttgaaaatgtgttttaatcctgtgttgacagtattccctactgaccgtgctgtgcgccttctcgcttgcagctgcagggtaatatatttggaagctttgatgagagcctgctggcacgcgccgaagctctggcggcggtggatatcgtctcccacggcaagaaccatccgttcaagcccgacgccacctaccataccatgagcagcgtgccctgcacgtccacttcgtccaccgtgcccatctcccacccagctgcgctcacctcacaccctcaccacgccgtgcaccagggcctcgaaggcgacctgctggagcacatctcgcccacgctgagtgtgagcggcctgggcgctccggaacactcggtgatgcccgcacagatccatccacaccacctgggcgccatgggccacctgcaccaggccatgggcatgagtcacccgcacaccgtggcccctcatagcgccatgcctgcatgcctcagcgacgtggagtcagacccgcgcgagctggaagccttcgccgagcgcttcaagcagcggcgcatcaagctgggggtgacccaggcggacgtgggcgcggctctggctaatctcaagatccccggcgtgggctcgctgagccaaagcaccatctgcaggttcgagtctctcactctctcgcacaacaacatgatcgctctcaagccggtgctccaggcctggttggaggaggccgaggccgcctaccgagagaagaacagcaagccagagctcttcaacggcagcgaacggaagcgcaaacgcacgtccatcgcggcgccggagaagcgttcactcgaggcctatttcgctatccagccacgtccttcatctgagaagatcgcggccatcgctgagaaactggaccttaaaaagaacgtggtgagagtctggttctgcaaccagagacagaaacagaaacgaatgaagtattcggctgtccactgattgcggcagggcgcagcgtcgggagccgggagagcctagtgctcatccctcccgggttcgggggatggttatcgggaactccaaggcgtttcctaggcaggttaggctctctcctccgaagccacagactttccccctttgtcccgcctggttgcctccggccttctctctctttcctttctattcccaccaaaaaaattttggcgctgggaaaatattgcagaagggcgggcctgagtgtacttgtgctgtccgtggtgctgaaatttgccctcgcgcaggggccgcacgacttcagagcaggagcccca

SEQ ID NO: 231501 - DNA, 36 bp, Homo sapiens
  chr5:145722186-145722222
  hyper
gggtttgccctccgcgcagtgcgacaccccctaccg

SEQ ID NO: 231502 - DNA, 368 bp, Homo sapiens
  chr5:145722453-145722821
  hyper
gcagaggagacaaccgtgagcgtcccgcgccgaagcgaagcgctccagaaggacgcgcttttgcgggctgcaaggtttcctgcaggtaagaagagccttcgcatgttcgggctctggagagaaccggaaatctgcctccatcctcttttcgaaaagttctctgccgttatttatttagtctttttttttcttttaattgacaactgcaaaagtttgggagacttttacggagaggatgagaggagctgcctcctgagcgcaaggtctgctccaagacggtccagtagcactaggtccagtctccgagccatgcctctgagcctagtcttcttcaggcgcctgagacggtgatgcgcaggagtattttc

SEQ ID NO: 231503 - DNA, 337 bp, Homo sapiens
  chr5:145724337-145724674
  hyper
ctttgcacactgtgcgtcccagctacgcaaggaacgaagtattctctccctgggagtgcctggtgcgaatacatagctcccactgagaagcttggccccggtcagcggctccaggagcccggaacctcctccctggcggaatcccgggcaccattcagccttttcgaaggctccagacttcgcgctgctcctcctcccgaggaggggcggggcgccagagggcaaaggagaagcaagggtcttggactcctcctccttcccagcgaacatcccttccccgccctgttcccactttttggccccggcgccagaatgtttgagccgaaggggcagaacg

SEQ ID NO: 231504 - DNA, 39 bp, Homo sapiens
  chr5:145725218-145725257
  hyper
gtggggaagcggaccgcctgggagtgaaggaggagcagg

SEQ ID NO: 231505 - DNA, 1868 bp, Homo sapiens
  chr5:146256762-146258630
  hyper
ttcccttcctgcccgcacagcactagtgcttatgtcagaacaagctgggagagagggagagacgacaatttcacctcttggcaaagctcagcttgctgaacccttttgctttctgctggctgttgattcagcagaaactactgctgcagaattcataatggtgatttttaaaggccccaccgatcgcgttgctcaccccacgtgtcagcctcattcgctgcccgccagagcactatttccccagccacctttttatttttgctaatgcacttccaaaaggaaagaggttcgcccgtctgcaaagggctttttggggttttgattgtctaagcaggtaacctggccggccggggagatgaatgggcaggaaatgaaaccttgccctccctgcagccactgagagacataacatcgtttcgctcagggaggggggaccaaggtcctactgggcccctcccttcttatctccccccaagacccctgcgaacatctcggggaaggggtcatctgccttcctggggtcatctttctgggcgagagccccaccctgaaaaagcctaatccctgagggccattttaactcccgtgggcgccgggtccacctgctgctgaacgccgagctcgcctcgcggagcccggatggatgcgaggtgcactggggctgccggggccagccgagcccccgccccagccctagggcccggaggagtctccgccactacgcgcccagctgcccaggaagcacagtgatccgcaacttgcgcccggccccaacggcggaatgcggcggggctggcgttaccttcggtcgcatagctgtggtcgcgcaggaaactgttgttgattttgcgggtatcaatgtcctcctccattgacagcaggcttacttgcgtgggaaccagaagccggcagacaagtatccatgatccctccccgcagccagtctcacaggagaggggggcaggggagccagtgggactgcaccatggtccgagcctgaggaggagacggggaggcggagagaaaaaaaataaaaacccggcaatggagctgtcacctcctccactcgggttctgcgaggctgcggcggctcctcccgcgcggtgcgctcactccagctccagttcccagcgaggatgctgcgcctgcctccgctgcctccgggtgccaagatacgccgtgccccgaggggtctggtcccgcccgcccgccccggaggcgctcacaagcgggtctggggagatgcccaacaggttcccctccttggcagccgctccaaaatgcaaaaaagatccctcctccccctgggagagcgggcagccgcgacaaaatggtgcctttctggacccgagctgcagtggcgagatggcagggacaggattcaggcttgcctggccggaatgagggtgctggtcccacgggagggcggctccggcaggcgggggtagggaagctggcggggagctgggcagggcgctgcagccggcgccagcgcactcaccctcacacccacacgcgcgcactcgcagctgctgctgctgctgctgctgctgctgctgcaggaggctggaggcggctggtgcattaaaggcgaggctcctcccaaccgcgtcagcagccccacgactctttcccagcagcagtggtggccgaggcagaggctgcggctgctctttgctgcagtggggcgcatgcagccgcgaatcggcacctgggcagcaagcgactagcttgcaggttcaggtggaacgcatagacgcgctcttccaacctcctcccctctcgcgccactcagctaagggccacgtctacgctagcacccagagcccctagctccctgcctttctccggacgcctgaacttgagaa

SEQ ID NO: 231506 - DNA, 599 bp, Homo sapiens
  chr5:146614040-146614639
  hyper
attacgatccacatcgcaggggagtgaggcttcccccgcgatatgaggagtaatagcaccgccctctccccctcaaccccccggcttttaggatccacatcgcaggggggtgaggcacccccggcgatatggagagtaatagcaccccccttctcccccccccccccccccggctattacgatccacatcgcagggggggtgaggcagttcccgtgatatggggcgtaatagtacccgctgtgcgtcctggtggctccggacccggcccaagcgcggcgggacctccatccgtagccctctcccccaacgtcgccctcccggggtccttgtctagtctcagcaggcggcaaacggaccccaggcgtctggcgctcacccaggagactgcccagcggtttctggagagagcgctaagcggagacgcccgctggcaagcagatcccgcctccttccctggccaaggagccgcccctccggggtagctgtgcgctgggcggcgctcggaccccttggcagccgcaggtgcctccccagcccagcccagctcagtccagcgcagcccagcccagcccagcccggcgctcgcagcctccgccgc

SEQ ID NO: 231507 - DNA, 682 bp, Homo sapiens
  chr5:146832504-146833186
  hyper
cccactgcagccacgttagctgtccagtcccataaacgatacattgaaacatgagtcggactgaacgcaggcaagaaggggacacggcgaggacaggtggtccagacaccctgccaccctcgcggcgcaggggtcagagccgtggggctggagctgggagaggggcgcggtcgggctgccaagtacccctggggaaaggtgtcatctctccaaacccagcacggccaaaaggatccttagacaaaaagcacacctcaacctggggcggcaaaaaccgacactccaggcggagcagtggtcctgggagagccgcgagccccgcgctcctggggaactaccggcggtgggaagggaggataaataatccaaagttctccgtgccactgtttgggtttcctctttgttttgttttccccaaaccccagggtcgctcagtctgtgtggcgccggctggactgaccgccgcgctccgccacccggaccccgggtctccgtccctccccggggaccaggccagagaagccggcgggatccgagccgaccccgcccgcagcgcagcggacagggagcgagcgaggagggagggagcagcggcgcccggactcaccgtgatccgcgggatgttcttcttgccttggtaggacatggtggcggtggtggctgcagcggctggctccctccc

SEQ ID NO: 231508 - DNA, 1020 bp, Homo sapiens
  chr5:146888840-146889860
  hyper
gatgctgcaagtggcgacacgcgcgaatccagggtctgggctaggaagtcgcgctacgctcagtggaggatgaccctttcctcctccttgtcccccagccccgtgcaaagtgagctggagaaagttgtgcccgggccatggcggccagggctggagaaaggaacgaaggcaaggagggaagtgacccggggcccccttaccttgtccttggggccgaggttctgcaacacctctttgccggtggcgctccggatctctaccccggcgggggcgggggaggcgggcgcgggctccctgctctcttcccggccttggcccctgcgcggggtgtccccctcgatcccgggccgactccccgatcctcggtcgctgccctggccgctccgaggagtcttcgcgccccgctgccccacgctgagggcatcgaaatccagcgtcttgctctcgaaggcgccctccacgttgcagaacatgccgccgtatttctgccgcgggacctggtccgtggtgcccggcctggccaggtacacgggcagatcgtcttcgtgggagctgtcccagcccctccggcccgaggccatggttcaagcacgaaagcggcccgcgggtttttcttccccagaggcggaaagggcagccgccggcagcgtgcgccgagccacagtgactgtggcgggaggaggcgcctgagccttcgcgccagaggcggcagtgctgctccgattcctgcttgtccctagcgagccagcgagccacacagccagctagcgcgcggagcaggggcccagagtagcgccgcgcttggctcactcgctggacctctcgcccggccgcacctcctcacgcacccccaaccctaacgtggcctcccgggctgacgcagcgtcggtgcccatcacaatcacaaaccaaacttggcgcgcgcgcacacgcacacacaggcgcacactgcccgctcgcgcaacagccttgcctcacacactttcgcgcaatttagacgtcttagaaatgttcacactc

SEQ ID NO: 231509 - DNA, 48 bp, Homo sapiens
  chr5:147763270-147763318
  hyper
agaccaaaccacacggtggagactggttccgacgtatcagactcagtg

SEQ ID NO: 231510 - DNA, 517 bp, Homo sapiens
  chr5:148033537-148034054
  hyper
ccgtcgtgctgccccgcccccgccgcgtccccaccggcacccgtgggctcctggggtcccgacccccggcgcacttgccgcacatacccgctgccagaggcgagggagcgaggtgccctggcagattcgagcggccacccccagccgctgagccgagcttctgctgccgccgctgccgctgcgctcccagccgctgcctgcgccctccctgccgccccctcgggtgcgggctccagcccccgcgctggggagccggcgagcgtgaggcgcgggccaggggctgcgggcgcaggaccccagccccggatcacctgggctcgccgcgcatcgtccttctccccaaccgagccggactccacgggctcaacagcccccagccccggtggtccccgctgccctgcccgctgccgcccccactgggcgccagggacagcgggggtgccgctctgccggcagggcgcacaggggagtgggcacagaggcgggctggagcgatctcacccgttccgggctggcc

SEQ ID NO: 231511 - DNA, 456 bp, Homo sapiens
  chr5:148520919-148521375
  hyper
aggacacaaggcctcgtccatctcacaaggcctcgtccatctcccatcacaccctagggcccaggcagaagcccggcggggcggggcctcggacacgcgccggtgcgtccagcaggtggcagcagcgagcggccgcgccccctgcgctgccaacccgcgagcccgcatcatggatgtcgagctcccctatttcgcattgctagccctggaattcgagaccccagacgaggaccaggattcatgaaatcagtcgcaggggccggggcaggggcctctggctcccgacactggccgagaggtgggttccggggcgggtcgctgctccttgaagccgggcggggacgcgctgcccccgccctgcctccctgtggtccacaccccctttgggctccggagccgctgggcaggaatagtccggggtgcgcgcgagcaggcgctgccaaccccacttctgcc

SEQ ID NO: 231512 - DNA, 65 bp, Homo sapiens
  chr5:148651853-148651918
  hyper
tcctcccacctcattccactctaaaggggaaaacaaggtgtacaggttcaactcccgaaacaccc

SEQ ID NO: 231513 - DNA, 61 bp, Homo sapiens
  chr5:148931073-148931134
  hyper
cccacgctccgagcgtcaccctgtcaccgcccagctgcgcatgagcgctgcaactcctgct

SEQ ID NO: 231514 - DNA, 335 bp, Homo sapiens
  chr5:149109659-149109994
  hyper
tgcgtgagctggtcgcggcgccagacacggcgcaggaaagtgggtgagcgacccccggctcccgcgggcgccgcgcggccccgcccccgcagctagcggccctgcggcagccgggggctcgagctccgccctccgcctcccgccggcctcactccctcctccctcctcccttgctcgctcgctggctccctccccccgggccggctcggcgttgactccgccgcacgctgcagccgcggctggaagatggcggggaacgactgcggcgcgctgctggacgaagagctctcctccttcttcctcaactatctcgctgacacgcaggtacggccggc

SEQ ID NO: 231515 - DNA, 476 bp, Homo sapiens
  chr5:149111288-149111764
  hyper
gcttgcaagctgactccttgcggtgaaacgcgacttggaagggacgccgcagccgagacgttcagctccgggcagcgacttcgggctggcggctgggacggcgtggcgtggcagggtgtcgccgagaggaagcccgccacgcgggaggcaggccgcccctggcccgctgcagacgccgctgcgtaggggagccgcggggccgcgtggtcggtggcgggcgcgctcgggtgggttcgcggcagaggccggaggggctagtggcgtgtgattgcgcttctcgagatcgaggggaatgtgtgatgagcgggttgcgcgcgcgggtgtgtgtgtgtgtgtgtgtgtgtgtgtgtgtgcacacgccgcgcgcgccgggcgcgtacctttacctctgacgaaactgcggtggagctcccgccgtcgtcgccgggctccgtcacacgccccgcgccggtgtctgcgccgaaggcaggtcccag

SEQ ID NO: 231516 - DNA, 254 bp, Homo sapiens
  chr5:149340038-149340292
  hyper
actctgggcagagcgcttccgcgcctctcctgctatttcaccctggccacaggctagccgccgaggccggtcatccgctctctccgcggaggagtcaacgccacggaagcagcggcggaacctctctaagaatccttccagcttgtgctcttctgtccagggcagccaatcgcgaggaggagagtagtcagagggcggcaccctccccggtctgggccgagttattggctggtggtagcgtcgctcgcccggca

SEQ ID NO: 231517 - DNA, 148 bp, Homo sapiens; identical to SEQ ID NO: 200105
  chr5:149379996-149380144
  hyper

SEQ ID NO: 231518 - DNA, 317 bp, Homo sapiens
  chr5:149381200-149381517
  hyper
cctctagagcccttcgtttttaaccttaaattgtcctgcctttttttgcattgctatactgctgcctcgagtctgataacaaacttgtactcaggcttagaacagggtaataaaacaaacaaaaccgtagggtgttgtcttcctgccctcagcccaaggtggctgtaatgagtgtttcctaacccgttttgcgcagggtgcttagtaccctatatgccattcattacagatgctctcctgcagttactgcccttctccacaaggctttcagccgcccagaagtcaattcagggcaaaaaagcgcagtccccacgtag

SEQ ID NO: 231519 - DNA, 530 bp, Homo sapiens
  chr5:149569480-149570010
  hyper
gagtcccagagagggcaggtcgcttgcccaaggtcacgcagaaagccgagggtttccgtcgcgaacccccctccccactcgctcagggctctccaatccgcagctctgcgtgcgggggcgcgcgcatccccccgccgtccgtccgtcagctgtctgtctgggtgtctatgcgggcgcagcagtgcacccttccccagcctcgggcgctgcgcagggacagacaaggcattcgcagcgccctgcccgcgctccacgcccgcagccgccagacggcagcgcctgcgtccgtgcccgccccagccggtgcgcgggagccgcgggggcaaaggcgcagtggccagcggaccatctctcgtgccctcgctctctgcgctccggggcagctgagccccggccacccgctctccaagatgaagaagctccagggagctcacctccgcaaggtagggcacgagggcgggggcgctgggggtgcacctggaggagggttggagagacccgcccccaacgaggcccctggggaaggtctg

SEQ ID NO: 231520 - DNA, 1047 bp, Homo sapiens
  chr5:149681825-149682872
  hyper
ctcgccagcctccccgggcccgtcggccacgaagctcggcttggcccagtcccaggacaggtagccgaagctgagcaggctgaccagggagaagccagtgagggtgtgcatcgccaagccggcccgcgcgtcccggcgcgccgggctcctggggcctcaccacctcgcgcgcccagggcgcaccaccggcccgccggctcggatgctgcgagggagttcagcgccccccggggacggtccagtgtctggtccgggactggctgccggacggctgggccggatctgctcggccgcagcggggcgctctggggaggtcaggcccgcgccgagctgcctcccgctgcctaagcgcaggccctgcgccgcctttgctccctcttccccagctcagcccggccagcctgagacgcggcgtggcagcttccaaaaagtgctctctaccatcctctgactcccctcttccttcttgccctggatttctcccgcctcctaatttctctctcctctgctttcccggcctctcgccccacccggagtccttaaaacagcccagctccctgcagggaggtgggcaggaccccagaggggaaggggagggaggcacaagttgggcgggtcgaggggacacggcgggagagaattcgaaaaagttgtaacatctgccgggccgggccgagccccaggtggaggggcgggacgcagagcagcggctccacctcccgggcgggaagccccggccctctcggcctgctggctccagcgcccgcccctgaccgggatggggaaaggagggagtggggctgcttggaattcgatggaacagctccagaatggctgggtcagacattcctcgatcatggagtcttagcctctctgagtgccagccctggaaggaaagcccatcatttcctagtccaaccgggtcattctacagatggagaaactgaggcccggagatgagcctcaacgcgtctaagtcacagaacaagtcagtggctatgtctctaaggctcaccgtggctgttggagtggcggctcccttcggtg

SEQ ID NO: 231521 - DNA, 103 bp, Homo sapiens
  chr5:149682902-149683005
  hyper
agcactttggcaagcccccgcggctgcaagtcaggaagcttggttgtagccttgccagctcccctctcctcaacccctccctcctcctcgttctgcagttccc

SEQ ID NO: 231522 - DNA, 107 bp, Homo sapiens; identical to SEQ ID NO: 200108
  chr5:149829576-149829683
  hyper

SEQ ID NO: 231523 - DNA, 443 bp, Homo sapiens
  chr5:150004274-150004717
  hyper
ccagcccggggtcccggagcagcccgctaggcggtggcggtggcggcggcgaggagggggcgtcgggcgcggagcctgggcctggcgcggggcgggggtggcggggacctcggggcggggcgcgctgacggacgcggccaggtgtgccgaggcggcggcgcccgggagctcggggaccgtgcgcagcggctggaggtgagtgaggggcgctggcctggcaggggtgcgggcaccgcgcgagcctcgccccttcccacctgcgctattcccggcgccgcccaggaggaggtggcacatctgggctccagtcctcgcacgcggggtgaccttggccaagtcgcttctacactttgggcctcagtttccccatctgtaggtggggggctggaggggtatcgaggctttcgagcagctgaggagcgggaggacgccctgacgccggg

SEQ ID NO: 231524 - DNA, 59 bp, Homo sapiens
  chr5:150051552-150051611
  hyper
cagaaggctagtccgcccccttccccaacacacacgcgcacgcgcgcactcccctcgcc

SEQ ID NO: 231525 - DNA, 129 bp, Homo sapiens
  chr5:150051900-150052029
  hyper
ggctatgcggagccgctgaagggcgtcccgccagagaagttcaaccacaccgccatctccaagggctaccgctgcccttggcaggagttcgtcagctaccgggactaccagagcgatggccgaagtcac

SEQ ID NO: 231526 - DNA, 44 bp, Homo sapiens
  chr5:150080673-150080717
  hyper
ggcggggcctttgcgtcatgacgtcgcccgctcttggaatttct

SEQ ID NO: 231527 - DNA, 717 bp, Homo sapiens
  chr5:150158135-150158852
  hyper
ccacggctacgcggcgagtgtgtggcaacgtggaaggggagcccgagacgccctggtctctcccttctctcgcaggttcctttctccccgaacgcagcccgcaggggacgctggaggaggagctgagctggagttgccggggccccgggaccgggcgttccgggggcggtccccagcagccgcgcattccagagccagcagcgcgtcctggccgctcctgcgctctcccgcctcccggggctcggaggagccggggcacgttccaggagctgcctagggctgaggttccaggcctgggggtcgcttccagctgccagatcccgtgcagtcctggggaccctgagaagcaccgagccatccctgacccaggaactttccgcagactcgccgccatctggggtgagtggggccaccgggggattgtttgtggggctctggcagagcggagctcttcggattcgcgacctacctctagtgcggcccctttccccgggctcccaacgttcttctttatgtccggtctctcctccccatttctcccttttcatcacttttgtatttcttgccctcaccccctcctttttctcctgctgtcagctcttaagttcgagcctcctagtgcacagaattttgggcctgggggaggcggagcttgggtgggcgaaccccagccccactcggagactggcttctctccgggtccgctgcccttgcctt

SEQ ID NO: 231528 - DNA, 670 bp, Homo sapiens
  chr5:150399980-150400650
  hyper
agatttgcttatgtcactgtcgccccgggacggggaggtggggagctgagggcaagtcgcgcccgcccctgaaatcccagccgcctagcgattggctgcaagggtctcggcttggccgcggattggtcacacccgagggcttgaaaggtggctgggagcgccggacacctcagacggacggtggccagggatcaggcagcggctcaggcgaccctgagtgtgcccccaccccgccatggcccggctgctgcaggcgtcctgcctgctttccctgctcctggccggcttcgtctcgcagagccggggacaagagaagtcgaaggtgagtgagcctccgggccgggggccgggagaaaaaacctagcccctcggtgtccagcgctcagtgcaatgcaccccttttcccaggctccccgccagatgggcaatccccaggtgcgagagacctcctgaaccccttttgccgccccctccgccgccgggaccccgcccccgaccgtcgtcgtctcgtagttccatctgttggagagccgagacctggtgcttcaggcgggcagaatgactaagggaggaaggtctctctccccgagctcgcactttctccccactgccacctcgagggtcgccttgctacatctatgtcacctccgtgcctgagctgctccccttc

SEQ ID NO: 231529 - DNA, 353 bp, Homo sapiens
  chr5:150536708-150537061
  hyper
ccctgaggtatgtacgaccggacgttcagctctctgcacgcaggcagccctcccccgacaccacacacaagccattttataagcagctggagggtccaacgctcttgctctcagtcttgggcctcagccacacccttctctgcgggtcctttgactggcgtccagctgaccccaaccccggaccttcaaagtctcttgagcccccccaaattaaggccggcaggaccagcccctggctcagctccggcgcccaggaccctcaaccagaccctctgcagcaacgggactccctcccctccccctagccagggcgccctccgcccgcgcctctccgccccgaccccagatttgct

SEQ ID NO: 231530 - DNA, 735 bp, Homo sapiens
  chr5:150603038-150603773
  hyper
ccccagggatgctgatactgcgagtctgtggaacactcttcgagcagccctgagattatcagcctttaacccccggggggaggaagccgaaggcccagagaggtcaagtcacttgtccatggccacacagcgaacagccccagaccgaaagcagagggcacctgccacagacacacgacatctccccacccgaggcagcgggaatcagctgcctttccctggcccgggtgccgtgtttgtaaactcggctgcttggtgcggctcgggccggggtaaagggcgcctcccagcagagcctccctcgtctctgagctggcctctccaggttctccgtccggtatcccgggccgaccagagagagcccggggcgccgagtcctctgcggcggagcgattccgcactcccctctcctctgaaagcaaacttctccgccggcgccctttacctttttcgggggtttgcagctgctcagcctgctgtgtctgcagcccatcctcctccgggggctcccggacgccgcttcccaactccggggcccccagaggagcctgcgatccgggccccgctgcccgctccgcgcccgccggctggggctgccggcgagaccctgaaactgaacctggaagcgctgtcttgagcctgagctggggcggccgcccgccgtaaatacccgaagagcggggcctcagtgtagcccgcagggccagcggcgccgccaccagaggcaggtgacca

SEQ ID NO: 231531 - DNA, 41 bp, Homo sapiens
  chr5:150826986-150827027
  hyper
ttcagttcctattcgcagtccccagcgcccaggaacatagt

SEQ ID NO: 231532 - DNA, 372 bp, Homo sapiens
  chr5:151066247-151066619
  hyper
aagcaacaggcagacaggaccgagggccatgctcttaaggggagccgtgatggagccgggaggagaggcgcatcctcagcagagcttccctcccttgcacacgagctgacggcgtgaacgggggtgtcggggttggtgcaactatagaagggaaaggctgggcgggggtcacacatacctcagtggcaggcaggcaggcggcaggcagagcgcgctctccgggcagtctgaaggaccgcgggaatgtggaggggtttagagacaggcaacaggaaaccactcagagctctgggctgggtctatctcccctccaccccgtggtccctcctcctcctgtctcctccttcccccggcctcctccttctcccatag

SEQ ID NO: 231533 - DNA, 87 bp, Homo sapiens
  chr5:151150831-151150918
  hyper
aacaacccgggaaactttactagttggttcgccaggtacaaacctatgcggaaaaggcggggtacaggcctcggaggccggacccaa

SEQ ID NO: 231534 - DNA, 227 bp, Homo sapiens
  chr5:151152045-151152272
  hyper
gattggagtcttgcggtccgcgcgtcgcagaagcgccttcggttttgcagagagcaaagagggagcagcgagtgcacggagtggtagtaacaaccaatgttctttccacgccctcactgtgtgtccggcactgtgcggagccacttttctgcctttcatttgattcttgcagtgagctggcgaggtgggtacggctatcctccttccttagcggcccaaggcacggg

SEQ ID NO: 231535 - DNA, 427 bp, Homo sapiens
  chr5:151304227-151304654
  hyper
ggggaacaggggcgcggagggagagccccaggggaaattggagcgagggggtcgtagataccacggacagcggcggctgcgaggcgtttcagcaccacggagagcgtccagacctgcttttcaggagcgcgaagagtattgctgtttgttaaactccagcgtgtctgttggctccctgcggcgctggggaggcacgtttgggggtgggtatatttccttttttttttttttttttttaaacccctgtttttctgtttaaacggccagctccctgcaaggaaaaaaatcttctgtggagatcagagcgctggcctcggaccgttggattgggcgagcatcttgggtaaagagaacagagctttatggctctgggccggcctgagggggttaggggcgaggggaaagcggttgacggcgctgccttcag

SEQ ID NO: 231536 - DNA, 406 bp, Homo sapiens
  chr5:152870100-152870506
  hyper
tgtgagtgtgagggggagagcgagagagagcaagggagggagagagaggcaggctgcgaggggagaggagagggagtgggggagccagcgctccagctagcatgaggacgggcttcttttcccgtgctcagttaatctggctgtcagttggtgttaacgctgcagtttaagtgttcggattccaagggaaacagacaaacctcacgaaaggaaggaagcaagcaagcaaggaaggaactgcaggaggaaaagaacaggcagaacagcgagaagaataaagggaaagggggggaaacaccaaatctatgattggacctgggcttctttttcgccaatgcaaaaaggaatatgcagcacatttttgccttcttctgcaccggtttcctaggcgcggtagtaggtgcca

SEQ ID NO: 231537 - DNA, 1092 bp, Homo sapiens
  chr5:153852463-153853555
  hyper
tgggcgtgggaggccgctggagtcaggcgtggggagagtgggggactatccagtgaccctctcaatgggcgccggctccgtctcggctcccgggttcagggactgcacgtttctgagaccgagtttagggctccaaggctctcttcccaaagagggtttggggccagcaggattgggttttctgaagaggcctggttatgccagacttggctttggcggccgctggcgggtctccctcagcaccccctcttctttccccggctataagaaagctagaccagggtgcgcattcttcccgtgcctaggatacttcacggtgctaaaaatagtcctgggagctgggacctgtgtatagccagaggtttgtgtgtgagcgaagttggagtcctgggttcgaatctagataagcttccctccgtgctgtggggcttagatcacctccctccctgagtctgtttctccatgcgcgccggaatttctaaacggactcccagaaagaaacggaaagaaagaaggtaaagaaaagaaaaacaaaacaacaagaaagaaactttgatttttctctctgctcctccccaagggccctggggcctcgggccgggtactgaggccgaggaaggggtgcgtcggacaggctcattaccgccaagtgttgccctagttaaatcgcgggcctgtttgatctggcggcgggtggcgagagggaaaaaagaaaaaagtaggggggcgagagtagagagagaagctcacacctcccccactgtttcctagcgcccataaaacaccttttattaactccttcgcgtccggaaaggcccgcgtggcctctcggcccctgctacggtgtttacagccaagactaatggggtcccatattcaccccgacgctgggacaaggcgcctggggcacgcctggtgccccacgaggccctgccccggagctgcctgaggtctcctttcttgttcccaagccgagcgctcaggctccaggtgcgcagagcgaaagttccaagacagcctcacgggtctcccctcctccttcgcagtgagcgccgcagaccctcaggcgctgcagagcgtgcgctccgtggg

SEQ ID NO: 231538 - DNA, 126 bp, Homo sapiens
  chr5:153854289-153854415
  hyper
gactaattcgtttccgtttttgttcttccccgttcccataagttacccccacctcccgttctagtctaaagagaactttgctcttgttcttgaaatacattctttatctgccggcttcccttgatt

SEQ ID NO: 231539 - DNA, 1638 bp, Homo sapiens
  chr5:153854935-153856573
  hyper
ttaattagagaagacggcgtcggggcggatcatatggagggacaagagagaaagagccagatagggaaatggagatagggctgaggttctaaattcgctccaaaagggtggaagagtgcgtctttgagcccttgggttcgacagtccctccttcttgcatgttgccgccaagggccgccctcggttgggctgggggtggatatatatatatttctctttctcttaatgtattaaaaaaaatcaaaggacattgcacgtgcgatccaagtgtgtggttgcagccgacgacctgccggcgctcagcagaagctccgcgggatgcgtagcaccagtcgccggagcccagagcctggcgttcgccgctgccttcctctcctcccggggcttcaggagtggctggcctggccaggtcctcggcgcgggcctcggctcactggtttaactccagcgcccagacttgctgcggccagccggtgcgtcctttaatcctcttctcgactgggcccagggcaggaggaaaaccttcgtgctgctgctgccaaaggacacacagaagaaaagaggcgggagagacaggttttaatttttctgctccgatcgcccggcatggggtaagatgaggaggaggggaaggtgtcgggagcagtaactgggagtctttaaataagtgacggatttctgtttgcgaaataggcaaacaggctcgtaaatttgcctttatgcgcggagttcctgggacccgggatgggctgggcagcttcgggaggtttggtaaggaaaatgttctgcgtctggtgaaactgacgcgcgttgatttggctttaggacacctaagggagatcccaggatattggaagggaggggtggaaatccacggttctcccgctctcgctgcaccccacacacttccgccagcctcccaacctggtttaaacatcagggcttggatgcaggcttggggccccctaagccggagctgggagcctcagatacggaggtaaaagagcggggagtcgagctggcctagcgtcctccttcccgctctttcagcaggaaccaagcggtgctacttgaaggaggcggcgacgcgtgggggccgggatccgcccaataacaacttctttcgaggcgccgcacctcgaaagaagccggcctgcaccatccccagtccggggcagccgtttagagactcgatgcctatttatctttccctcgtccctggatgagctttcgtcagtttaccacaggcccccgcaggttggataaaccaggtggggcgcttcagctggctccactccgctacggccttaagccccccaacctagagaaactgattggccagcctgaaaacccagcgctcagaagcccccagccccggacagccagaccgagtgccaggaagtgtcaccctaaccggagaggatcaagaaggccaagacgagactgcgctctccaaagctaaaagaagtggctcttatttacatgcaaagccactgaagtcgtcctcagaaccagtccatggggagaaccagaactggccctggactgagtagaagacccgatctgttttacctcacctccaccctggactcctcagataggtgcttttcctgccccgacccactctgggccctcagt

SEQ ID NO: 231540 - DNA, 198 bp, Homo sapiens
  chr5:153856937-153857135
  hyper
aacacagcctccttcgactacctgcatggcctgaggctgctcaccgctcctgcacccttggctggagcatgcaagccccaggactcaccagctcccttttccgcttgctctcacggccgccatccgccttcttgagttcagccttgaaggcctcgggatcgccagactgtgcatccttggccagcacgtccatcaggt

SEQ ID NO: 231541 - DNA, 78 bp, Homo sapiens
  chr5:153857855-153857933
  hyper
tggcaggggggcggggataaggaaaagggggagtggctatcccaggttttacgctcagcccgcgccactctagtccgc

SEQ ID NO: 231542 - DNA, 243 bp, Homo sapiens
  chr5:153858839-153859082
  hyper
acaccagcattcggcgttagacacacgcagaggggaccaagactgcacagcatccgcgaggctcgcacaggcaaacgcgacgtccggcatctctcacgcatcagcgcagaggcgcgactcggctgcacgaccctccgagatttcaccccgggggtagggccattccctgccagccggactctctccactgtgggctttccccaggctcgcgttggaatctgggaatcccggagtggtgacgct

SEQ ID NO: 231543 - DNA, 397 bp, Homo sapiens
  chr5:153859604-153860001
  hyper
ggaggtcctggtttcctgcccgaggcgggctggaaaccccccgctctccccggcgcctggcgccagcagcgctggggtagggcagagcgcggagccggaggcacgcggggagggagcgctgggggcccgctgctgcggcggctctgcggggtcccaagcctccctggcctggaggcattctagaaagagcgcaggtagagagtaattacgctgtggagagaaggacctcaacacacaatcctcaacacacgcccagtctttgtcctaatccaagtacaatctgcaacagtgcctctcagagcggcacactaggccctcagattatacattcacaggtacatgcacaagggctcacaaaaccttgccgccgtacacaaaagcccgtatcttcataaga

SEQ ID NO: 231544 - DNA, 637 bp, Homo sapiens
  chr5:153862032-153862669
  hyper
aacagtaggacagctgtacccgggcaatgcgaaggtccctcaagcctggacgttctgcagtggtggggtctcgctcttgccctagcccctctcctaccctcacccctatccgcgccccccggactggcaggcctctggaagcccaggccgcggcgcctaccgcaaaaccttctcccgccgcagtcccgtgaccttgacgccacgggcaatccccgcaccggaccccttatctaaatagggcagtaaatcaaggacctgtcagggcccgggtaattacaggaactccataaaaaggacccggccggccgcctgtttatattagcgcggtgtaaaatattctcgctgtcttggggaatcgcgtcgcgcagtaacgcgccataaatcagcccgcggaccatttaccccgcagcttgagcgcgcaaatcccttaaacatttctctgccatgtctgaagaggacctaggactttccaatctggcccagcctgctcccagggatgggggacagtcggggcagggaagagataggcacggagtagattgctcctgggagctccaaggttctgtttgcagacgggaaactagcccagagaggggaaggaactttcctaagggcacacggccgatgagtggcagac

SEQ ID NO: 231545 - DNA, 607 bp, Homo sapiens
  chr5:153863402-153864009
  hyper
tctgcttcgggacgcgttcaacctaaacagaacccggtctgattggaaaatgtatttatttgaaaaatcgtaactcacggttttggtgaaaacggcccccaaatttatgggatcgcttggggcgcagcgattgtaaatcaaaaggcactggacacctccctcccccatccccgaagcagctcggtcaggttctccagaacaccaggagtcctgtctcctcccggtccaccctgcggccctccgagaccctcccttctcccatccctcgcagtggttagttgcacactagcaggcaggtggattttactccggtttcttttacccagtcccgttgctttcagggcaatttcattctggtcagcttcacagcactcagctccaggccgcctgttaacgaagttttgctgtgcaccaggctgttttcggcatattgggagattttttttgttcctcacatgctggttagtttcctggtgctcggttgctccccgggtcgggtcgggccacttgtagccaatccctagaccactgatcattgcctgccgagctgtttcatgccaagaggcttatctcggctcattgtcacgaaggtcattctcactgcctg

SEQ ID NO: 231546 - DNA, 205 bp, Homo sapiens
  chr5:153900644-153900849
  hyper
gggcgctgagctcccggtatcctctaggtggcgcacaattctctggggaaaaggagaattccaggtgaactaattccacgggaagaagggttggtttgggaggggctaagccctgcctacgggctcctgtaggggaatcagctccccatccccctgctccctccagagcagcgcccagcattcaatcattcgctcgcatttattt

SEQ ID NO: 231547 - DNA, 413 bp, Homo sapiens
  chr5:153990827-153991240
  hyper
ataaaatagaacatttctagcgacacacacaggcacgccaatctcagtcacactcgccccaggcacagacactgtcactatgatttgccatccccgcctccccacgctggagagcagcgccctcacagaagggccgagccgcggacgggccacacacccgcgtgtacacacagtccgagaacgcacacacgtacacacacacatgcgcaaggcacggcctggccttcaggcacagagagcccatccggtttcccactcagctcccacaacttcccccacactttggtactaagggctcagctgggtccttttgaagccaccaagggagggagttgggaagggccccagtgacaaacagtggggagcaagaattttacgaacttaagggctgtaaatttcggccagcaaatccc

SEQ ID NO: 231548 - DNA, 315 bp, Homo sapiens
  chr5:154026798-154027113
  hyper
gtgaagtttaccctggctcccgcctgctgcaccgtcacctccggcccctcattacggaaatgaagaccactaaggagcatgagcgtcgtaaccgcccgcctggggttgacttctcttggggtgatcagccacgtgaccctagccacccgcctcctttacactacgccccaggatccccggcggcagagataaagagctggactttagactcagacgaccgcgctcttaaaccttagatgacctcatcccagccaggtgatctcgcaagctcccgacgctgtgctcagctcctgtctcctgcgcttgggtaagcgc

SEQ ID NO: 231549 - DNA, 147 bp, Homo sapiens
  chr5:154136122-154136269
  hyper
cctcttcccaccccgcccggcgctccccgttttggtagcgttgcgagcgtccccatgttgtaaatgtttaatgagcatatgtcacgggcaacccagtgcccggcgcggagtacatgctggccgcacggatgcggggattaaaagtta

SEQ ID NO: 231550 - DNA, 86 bp, Homo sapiens
  chr5:154237359-154237445
  hyper
ccacgggaggcgccgtcctctttgtaactcgagcagaccctggcgggccagttgctatggcaatgttcctcgctctgctcggtgag

SEQ ID NO: 231551 - DNA, 389 bp, Homo sapiens
  chr5:154317541-154317930
  hyper
gtccctggactctcgcctgcgcccgggcccacgcggacaaggaagacggaggtccgcgcggcgaagccaaagaggcccccgggcacggcatcgctgcagcgggcgcagtaccagttgggggagggcggcagcgtccgcggctcctgccccataactacaagccgtcagagacaagagaagctgccacagccgaccgctcgtagcctcacgccttaggtagggagcggggcggggtgaactccgagccccgccttctcgggcagtcgctacggtgcgcgtcgaggcccagccagcaccgcgcgttgcgttcccgctaccgccgggctgggaagggcgggaccacgcgtgctgcactggccctcagtacctagcccgcggtaggaggtccg

SEQ ID NO: 231552 - DNA, 2189 bp, Homo sapiens
  chr5:155107331-155109520
  hyper
cttgggagtctgttggttaacgggaaaagtgctttctctgagaggaaggcggggcaagccggaacaagctctcgctgggaatccgcacactccttctcccggtgtttcttaacccctttcttctcccgggagtggagagggggctcaaggatactagaaacctgtccccttggcggagacacgtagtcgcctctggccgccgcggccgactgatcttgcggagtggagctccccccaccccgcccgcgtttcgctggggctccctccgctctgcaaagggagcggggagctgggggagccttgcacaccagtcttcctggagctgcagacgaggagccccgcgccttcgggagcctctcggcggcttcccctctaacgcgcgactgtgcagcctctccccgccgcccccacccgcggctcgccctcgctccctccctccagccccgccagccggagcgcgcacaccgggactccggcacgtgggcgcgcgggaggtggcggccgctgctgccgctgctgccgctgccggagcccgaacccaagccccagctggagccggagtcggagccggcgagatcgccctccatgctgcgggagctgcggccgccttccgctcagcctctggtcccaggcgagcctggcgagccggcgaagcaccggcggggaggaggactagaacaggaggaggggcacggcggattgaagcgagctgggctgtgagcaagggacacccacagcctggagaaacagccccgctctcttgcgcgctgtctgctccagccgctactgggggctctaagcagcgcgatgctgcttcgcttcttctaggcggcggccggcggaggctttccgcagccgcttggccggcgccggcccctattccgttggcaagtcccttgtctatcccggagggcgcacccggacgctcgagccggagcgagcgcgaagtccgaagtccgcccccagagccgccaacttccctgtgagcccctctccccgccgcagcctgcgccagacctgggagcgatgcgcccccacccgggcggcgcgccctctgccaactcgccacccatgggatcgactgccctcagctgcccggcttggagtgcgtagccttcgccgcgtggcccaggagaggagcgagacaccaaggcgtttcgcggactccgcgcgcaccagtcggcttggtggccctgcgggatagcgtttatacccaggggtgagtaggccgctaatggaggccccctttacccccagctagcggcttgcatggacggcaaagagacgggagaaagttgggtctccttgcgcttaatctggcattggcagaggaatgcaacactgtttcctccaactcgattgccgcgggggtttccccagttccctccatctctaagccaaggagggagtccccttccgcttcctaaggagaaaaggggctccctagagcagatcgctgacttcctcaccaacgtgccatttggggcttttcagccgcccgcgcgttaagctagctcccagcataagcgcttagagatccgcagccgcctgggcgcgctaagagatcgtgggcagacctagcccttagggcagcctaagcgcgcttcactaaagaaaaaagactgttggtatattaaagaagtgtgtgtgtgagagagaaagagacagagaaagagacagagagacatgggtgggggcaccaggaaaggtagcccgagtaggaggtgctagtgaaatttatcttttgctgacggatccagcctccggaatgcccgattgtcttgatccgcggtgcggtgcgggttttaggggcgcacaatacagggtgtccagacagagtccaacaggtggcctgcgcgggcatcctgtggctaggcgcgggggaggggaacggctccctccccgagccccgggctgcctctgctgcttctaggggtgcatctgaacatggataaggaaatgcgctccctgctctcaggccctatttggggtgagtgtgtgaggcatccaaatgcctcctgtcggaaaacagcggcctcattgtgtgcccgattgaggtttcaacttgcaggcaactgagaggccattcagctgggcagcacggagttggctggtcctcggacttgagccatggccttccccacgatccctggcggcagtatcccagctcctccggctgggcggcgagc

SEQ ID NO: 231553 - DNA, 764 bp, Homo sapiens
  chr5:157001782-157002546
  hyper
agtcctgagaaacacggacatcacccggcatcttagctggaaacatcgagtcagaccccttcgcttcacagaaggggaaactgaggaccaaagaaggcggccgtcgggttggcgtggaaagagagccctggtttccagtgccaccgcggacctcaacccgtggcgtggccttgggcaagtcctttcccttttgtgggcctcggtttccccatctgtgaaatgggtgcgtttgacttggccttcagtagggctcctgccagctcggggatccgaagtgtgtggctgcagatacccagcgagccatcccctagccaaggctaccacagtctgccgcgggcattttatgtcctaccccaccagtgtggcaggcaccgagcctggtcccaggaagccgctcccaggccacacgggcagggcgctcgggatgctcggcgttggcgagtgcagcgggcggtagagagaaagacagagagagaggcggagcggacacgagggaccgtgagaaaacggaggaggataagccccgagaacggcggaaagagaagccaaaagcagaaaaacagaggaaggagaaggcgagaagggaaggctagccagtgagcggaccggctgttttctggctgcgccgggtttccccgacctctgccacctcccagggcgcagaacgtgggaacaaagcccgggctcccaggctggggacggcgggggcgcaggccccgcggagttgcgggaggcgcaggggtcgcggtcccagcgctccggac

SEQ ID NO: 231554 - DNA, 258 bp, Homo sapiens
  chr5:157002846-157003104
  hyper
cctccagccccgcgggcctccgccaggggatggaggaggggaggctccagcccggagggggctggagggaggggccggggaggagctggcgagactcgggggagcggggctggctcaggtgagggagaccgcggggaagggagaatccgagccccccaggaggagggatttgtggtggacgcggcctgtagagggtcggggactcgggcttctaggagttaaactggacccctctccgcacagcggcccgtttactgt

SEQ ID NO: 231555 - DNA, 708 bp, Homo sapiens
  chr5:157098032-157098740
  hyper
cggtgtcaagaccccgcaggagatggcggattcattcaggaagcagccgctccgggaagccttagccaagggtcttccggaaagacaccagtcttgatcctggagcctcaatccccgctgacccagcactttggtttccatagcaattgtctcgtcgcagaaaggaatcgcctgtgctgggtcttcagacctcagctccatgccgctgagcagccccaccctggctcaacccgttacccgccccgccagcaggccggggtcactgcagtccccacgtcgaagcggaaaaggtctgctcagctcaccgcaccccacttcttccagacccgtccgtcttcacagcaacgcgccgggtctcaccacggcggatgccgagggacaatattaccgcgtccgtggccgccggactctgcacgcatgtccaacagcccccgtccccttccccgcagccaatatgtgtctcccaggcaacgcgccgcgctcggttcagggctccgcccagggactcactccgcgtcagcgcgcgcccacctaggtgggctggcaaccagccaccagtttccaactctttctccaacagggaagccgcaatgacacagccgactaggccctcggtcacctgtgaccagggatcctccacgatcggcgggaccgccgcccaggcgaccaccagttccagcgccacctcgggttcgaactaccagcgcg

SEQ ID NO: 231556 - DNA, 207 bp, Homo sapiens
  chr5:157158249-157158456
  hyper
atttgccgcaggacgggaggaggaagaagcaagcgtggaaggtgctaacggaggaacctaaacctccatcctctttgcctgggaggttaagaactacagggagaggcgagagagactatgactgccctacggctagagtagccgcgaagagaacacttccggggcggggctatctggccctttcctttccgcgtgtagaatgtgggg

SEQ ID NO: 231557 - DNA, 217 bp, Homo sapiens
  chr5:157170399-157170616
  hyper
gccttcctccagacgcttcctgccagctcaagctaggatgcgatcccgagctcattcccggggaacccagagtattaacaaacaccctaagtgataatgatacagacggggaaactgcgctggagcaggtcaagcagcagtcgacagcgttaacctgtcagctatgggaggaggcggtgcgaggcgcgggctggtcggagccgcgtaccacgccccc

SEQ ID NO: 231558 - DNA, 64 bp, Homo sapiens; identical to SEQ ID NO: 200127
  chr5:157285888-157285952
  hyper

SEQ ID NO: 231559 - DNA, 226 bp, Homo sapiens
  chr5:158478418-158478644
  hyper
cctcccccccgctcccgcagccccccacccccccaccccgccgcccggcggctgacggctcccgctccacatgtgcgactcgtgtttcggctttcgctggcgacaaactggagccggggcctttccgcttaggaggaactcgctacgtgtcgctaacaacaacacaaacaccgccggcccggctcggtgctccgctgcccacagtgcgctcggcaccagggctgga

SEQ ID NO: 231560 - DNA, 108 bp, Homo sapiens; identical to SEQ ID NO: 200128
  chr5:158526600-158526708
  hyper

SEQ ID NO: 231561 - DNA, 434 bp, Homo sapiens
  chr5:158533459-158533893
  hyper
agcctgaactcacacgtggttttgtgtgcacgtgtgcgtatgaaattcagcaaaaaaaaaaaaaaaaaatccaaaaaaatctaggtctaggcagggtgcggaccgagggcccaagggcaggcgtgcagaccgctacgactttggctttagggagacgccttcggggcgcagggcccgcccgaagacgcgggttagcatacagctcagctccaggcaggcgatgcgggttcccaatgcgggcctacagattacgcggactgagctgggaacggtccctgctggacagttccgtgctcttaatccttcctcgcctacggtctctgattattgatgcttgccgtgtgtcctaaaagggaccgcttccggtttatttgcttatgtatttattatctttatcaacgttattttttggcagctgccgtgaagatgccaaa

SEQ ID NO: 231562 - DNA, 321 bp, Homo sapiens
  chr5:158634801-158635122
  hyper
catcatctcccaaaccgcaaagacagggagtctactctgaatacaaaggccatctttcaacttaaggaacagagagaggaaataaaactgctacctctgccatcggccgctcagcctgggtcacgactgcagcaccgacagctcattcttttgggcatgattcaagattcagtaaaactgcacactccgtattttaaaaaataaaaagacacacagtcctctccttccctttcagactagtttcctctttactgcagactgcgacgcaaggccatccactaatctttgatgcctgctcactgcacaggccccttcctctct

SEQ ID NO: 231563 - DNA, 365 bp, Homo sapiens
  chr5:158635542-158635907
  hyper
ttactataaaagggactgacggacgggatgcagagcaatgggcccccctcgaaaaatggactggcaggcccttccgcacccccaaacaacctcgcaccacctgaaagcggggagcttgagtttggggctgcgtagatcaaagcagggtaagacgaagggaaagagggaggggagcttggaagcaaagtgaacaaagaggcaaaagaggcaaagttggaaatggaaacgagaaagggagctggaaaggggccgctctggaagggtcttgaaaaaggcctagaaatgggatgctggggaggcaaagggggacagccccgaggaagggcatctcaggaatgtaagggagcgctccaggccctgggaag

SEQ ID NO: 231564 - DNA, 345 bp, Homo sapiens
  chr5:158689916-158690261
  hyper
tttaagcttcattcggaacatgacacagccacacgagtcctagccctgaatctcacgaagacctcagtacacctggaaaaggcagcacacccagttacgacactactagagacgtcacacgcctcagcacccatccgctcccagcccagaacgagcgcacgcgcagaacgagagagcggccacccagggatcggcgctatctgcacagcggttacagtctcggaaaggcctggcttcttcgtggctttgtggagatcccttacagcggccatttgattagcacccgaagagattcaaaggaagcagttgttccgtccccaacatatttccgtttcaaaccaccca

SEQ ID NO: 231565 - DNA, 166 bp, Homo sapiens
  chr5:158758339-158758505
  hyper
tgcacaggaatagcggaataaagatatctctcgtggtggaatttcaagttgctaagaggtatgcaaaggtgtacaccggtgtggacccccccatcccccgcccagtctgcacgtgaacaggaacatgtacctgcacgtataccaggtacacgcagacagatgcggg

SEQ ID NO: 231566 - DNA, 409 bp, Homo sapiens
  chr5:159200262-159200671
  hyper
gagcttcctgggcgcgctccgcagcgccctccgcccctagctcgcggggagggcgtcgcgcggctgttcagcggggcagcggcctagcggcgcggacctgggtctcctccctcgcaccgggccgagcgccgggctcgtctgcattgacgtctgcggcggcggcggcggcagcagccgggctctcgggagcctgggtgaattatgatgcacatccaccgcggctgctaaaaaaagggcagtgactcaccaccggccgcggaaacttccacgagcgccggccgcaaaaaggcgggggcgccaggccaagggcggctgcgcccggggcgcgcggcagcagccaggtgtgtctcgaaagcaaaacggcgaggaccgtggcgcggggtcgggcgggaaccggagagacctgggg

SEQ ID NO: 231567 - DNA, 75 bp, Homo sapiens
  chr5:159343739-159343814
  hyper
aggcaggagacgtgctgccgggctgggctgcccgggggagatgactcctcgccaggagggcgcctctgggaagaa

SEQ ID NO: 231568 - DNA, 427 bp, Homo sapiens
  chr5:159399023-159399450
  hyper
tcgggtgccagtgccgcggccgcggccgccgccgacgccgccgccgccgtcgcctgggcggctgcgcctacacctaccggccgtggacgcgcggcggctcgctggagcgctcgcagtcgcgcaaggactcgctggacgacagcggcagctgcctgagcggcagccagcggaccctgccctcggcctcgccgagcccgggctacctgggccgcggcgcgccaccgccagtcgagctgtgcgccttccccgagtggaaggcgcccggcgccctcctgagcctgcccgcgcctgagccccccggccgccgcggccgccacgactcgggcccgctcttcaccttcaagctcctgaccgagcccgagagccccgggaccgacggcggcgccagcaacggaggctgcgaggccgcggccgacgtggccaacgg

SEQ ID NO: 231569 - DNA, 234 bp, Homo sapiens
  chr5:159414352-159414586
  hyper
gtctccagcagagcgcagcaaagaagacgaagcctcctggggcctttcctcgccgcctggagcggggcatccttcctccttacgtgcagagactgggaagcagctctttagacactgcagtgaccgagcccgctccacgcccctttcccctgagcaggtgcttgacgtggggcaagctcggcgttgaggtggacccgcgcgccacccgctggccaacgcgcctaagcgacagga

SEQ ID NO: 231570 - DNA, 78 bp, Homo sapiens
  chr5:159545792-159545870
  hyper
ctgggggcgggcgcggtaccttttggacagatccatgaggaccccggagaagagcttctccccgaagcggaacgacac

SEQ ID NO: 231571 - DNA, 142 bp, Homo sapiens; identical to SEQ ID NO: 200131
  chr5:159546857-159546999
  hyper

SEQ ID NO: 231572 - DNA, 392 bp, Homo sapiens
  chr5:159615279-159615671
  hyper
tcctcagccacacgcgatcaaatgctgcttcagagctctaggaagctgggtgtgtcttctgtgctttgtaaaaaagaaacgaaaaaaacattagcaaatccccagcccaggtagccggctggctgagggcggactcttggaactgggcggtgggaggtgggggacgggggagggattggggggcccttgctccaaagccaaagagcgggaaacaggaactgcagggaggccactccgcaggcgcctcccctttcccgctggggagaggccgccgccgcgcggcgctcggcctgcaccgaccctccggggaccccgctaaacggaggagaccccaggcccggaggtgtcgcccctgggctgcgacccccgactttggccggcttctccctgcg

SEQ ID NO: 231573 - DNA, 1150 bp, Homo sapiens
  chr5:159738773-159739923
  hyper
agttcccacgcaggcgacctgagaacacgaagtcgagaccgaaggagactgtacccagtcttgagagtgacaagggcagggagggactgaccttctcgcgcagggtgcagtggacgtccgaggcgacgcgcccttcccaccacggctcatccatcatcgcgtacgcagcgccgctatccgaggctacccggctctcagggcgcaccctgcgtggacacgggcaacttcagcggccagagcgtaccccgggctccgacccccggtgtccctatcctctctcgcccctggccccgggccccggcgggcgccccctcctgcgccgctcagaggagctggaggtcgcctctggtccgcggaaggctgcggtgccccctcccctctgctcgccggacacggggcgatatggagctgtgcaacaacttgcagaatttttatcttcccttttgcaaaagttgcagagaaagttgtcaactccgctagctcgctcgaggctggggctctggcggcggccacaggctcgccgtccccaactcctcccccgccgcccagcctttgtcctgctcccacatcctgccctcgagccggggcgaaactcacgcatcctctctgggcgtggggggctgcgagcgccgggcccctcccagtgccgagccagccgtgccctctggtgcctgccggcggttggaccctcgtccgaggcgctccgcactcccgacggccgcctccgcagcccgactagcccccgccgtcgccgcgcccctgcgtgcgctcgggtcccgccgcggctcgcaggctcccggccgccgggggcctccctccctcgctgggggaattgggggccgggcctcgcgcatgcgctgccggcgcccccgcgccccgcggggcggggggctgggaattggagcctttctttgccagctctggctccgcttcctgcccgccctcctccctcgcttcggcggaaagcttctctctcaccttcgctgaggctagtggtagccttctgggcacccctccggcttgcgcagggagcaaagggaccgcggcgccacctgcgcgcaccacgcgtgaaacgtgcggacaggacgcccccagaaagttctgccttccgcgcgcactgctctagccatccttacgtcggttccacctg

SEQ ID NO: 231574 - DNA, 154 bp, Homo sapiens
  chr5:159797261-159797415
  hyper
gttactattgtaacgggtaaaccactgggcacagagcctggcacacagtaaggactcaaaacatgttaatttgtattataatacgaaggtagaagtcgagaggcaggaatgcaggagctgcccagcccgcaataaaggcgcgctggcagctctc

SEQ ID NO: 231575 - DNA, 540 bp, Homo sapiens
  chr5:159826808-159827348
  hyper
cgcggtctccgcccgcccgtctccaagcctgaggcgcaggcctatgggatgcacgggcttcttttaggcgcccgtttcaggctccagtcccactctccgctcagcctagggcccagcctctggccgtcggaaccagtagagacggcggttcctcgggtccaacccccgggcaggaatctgcggtgcgcctggagagagaagcatccgcaacaacctccgcctcagccaggcccgggttccatccgggttctccagggtgcttcccgcccgcaaactgggagaggcgtctcccacacgcaggcgcagtagcaaagggctgtgggatgggctggctggcttgagtattgagcatgcgcgctagcccttcccaattttttttttaagattgtgtacgtggaacaagaaatcgtttgtttattgtgtctgccagagaggatgaactgtacaatttcaggaatggaaggggctgtaaactccacatagttctttttaacatgcagagcacttaaacttttatattgtgtcgggctttgagcttgg

SEQ ID NO: 231576 - DNA, 704 bp, Homo sapiens
  chr5:160973449-160974153
  hyper
caataaggaagcaggcatagcgttttcagcatcggatccctactacatttccctgctcacagaggtatgcagacagaacccttcaaagtgagaacggaaaagagaaacgctgggcacacttacctctgcgcacagacagcggcgattattaaggggaaggaccaaatcccaaagtagccccttttccgcactctccacatccctttagtttttgatggaattgagggtttcactgaagagaggagatccaacttagtctgcccagtgcagtaattctaatgtgaggcgcatgcgcacggcgtaccaaaacatcaaaggggaagcggcggctgccggggaccgagcagatttccttgtttaaaaaaaaaaaaaaaaattaaaagggaaaaaggaaaaacatgtatatgtataatacatacatatttgaataatatagaaaagtcaccccacagcagcatccagaataaaatttttgttgttatcctttcgttaagacaaaataactacagcgtctggtaagtttcggtagttgcaagaggcagttttgcaccgagcgggttgtgggtttttggtgtgtgtgtgtgtccttttaaatatgcaaaaccagattagaaaattagaggagagcaggtgtggcgtgccagcggaagataggtgccggtaagcccacttctggtctcagccggacacggggcaaggagttt

SEQ ID NO: 231577 - DNA, 95 bp, Homo sapiens
  chr5:160974516-160974611
  hyper
gggtcctgttttctcgccgtgtgacgttcctgacccgctagtccgggttatttatagcaggaggggaggggggcgaggggagcagaaaggcaatg

SEQ ID NO: 231578 - DNA, 43 bp, Homo sapiens
  chr5:160974791-160974834
  hyper
ggtgggacgcgccccggccggtcccccagcgccccctccgctg

SEQ ID NO: 231579 - DNA, 43 bp, Homo sapiens
  chr5:160975194-160975237
  hyper
gtggccgccgggacccggaggaggcagcaagcttggggtgggg

SEQ ID NO: 231580 - DNA, 639 bp, Homo sapiens
  chr5:160975719-160976358
  hyper
ggattggacttcagagccagcgttcctaaccactgaactagacagcctacactccgaagtctcctgagtcagcgaccttgcccgctgccagcgctttgctgtggcgggtcaagctcctggcgcccgaggagcccgcggcggctgcgggtggagttgagcgcggaccgcacgagctagacccggccggtgtctgcggagaggaggggtcgccggcccgcagagttggcggcaggcggcggaagtagctccacaggcttgcgaccccggcagccctgggggctcctcagggtcctgttccgtgctgcactcttgacccacttaccttctgataacctttcccctcccccaccttggtcagagggtcatctgggggtagtttgtggggatgactccgggggaagtgtggaggcgggagggctttaaaaggggggaatccgacagctcctctgggatggatgataaacaggaaaagaaagccgagttccttcaccgaccaagggagtttctaggttaggaacaggtaaagcccagcaccatgaacatactgctgatctaccgcgcggcgctctatagactcccaggctcataggagcccatccaaagacgcgcgcttactcacacacacgcacacacacatac

SEQ ID NO: 231581 - DNA, 490 bp, Homo sapiens
  chr5:161274276-161274766
  hyper
ccattttcctaatccgagaatgatggagctcgaggcaaaggaatgattccggaaatggagatatgattctcaaacctagaaatgatcggagtgatttattagttaaatattcttcgtccaggaacccagcacaattcagaggtaacagcgcctgcgttttctccatgataacatagacaaacagttgcctccaaaggtaaaaacccggttccggagggtattcttgctgtcctctaagctacagaagaaggtggggtggaaagcgctcccaacctgagaaagtgcgaaagactctctaaatccagtagccaatttcctacctgccagaactctttcctaccatccgtcaccattcgtgactctgcaagacacggggacttagacatatgtgtgggagtgtgtgtgtgagggagagaggcgagacgagtgctctccccacacgtgtaaccctgcatctcccagtttcagagcttgcgttcattcatatgca

SEQ ID NO: 231582 - DNA, 771 bp, Homo sapiens
  chr5:161275109-161275880
  hyper
ggcatgaagtcaccgcctatttcacatccggtttgccctgggacgtattactactgtcttggtaaagagaaatcttttgttgtatagctgcagattggatattgggaagcaaatttgggtgtgaaatcttcagcaaaggagcacgcagagtccatgatggctcagaccaagtgagtgagaggcagagcgaggacgcccctctgctctggcgcgcccggactcggactcgcagactcgcgctggctccagtctctccacgattctctctcccagacttttccccggtcttaagagatcctgtgtccagagggggccttaggtaagtgcgactttggaccacgatacacagacagagctttgaacgtggcttttcctagctggagagacaggaatgttatagtcggggggggggggcggggggagacggggggagagagagagagagagaagaaggagagcgagcgagcgagcaagggagcgagcaggacaggagcctgatcccacagcaggtagaaacaacgaaatgtttttctttcagggtgaaaccgcagcaatataagagcattattattatttttttcccgctgtctttcttcttttcttctcctctttcttaggcatatttgaatgtattccgcagggtgggtggtggcatgttgttttggtcttttatttatttatttatttgcaagggggagctggggtgagttggggaggggcgtcgggggccatcatctaaagttaagacgctgggacggaaaacctgtctca

SEQ ID NO: 231583 - DNA, 357 bp, Homo sapiens
  chr5:162887185-162887542
  hyper
tggtgtgcgtgttcgtttttccctttgaatggccgtttacggcaccggcaggccccggatgaaagaactgaaatccagaaaagttcacatgcaacgaacaatgggacagaattggaaccagtgaagccggaactcactacaccgtcccctaagtgacgccaaaatgcactttctaacgtctccggagggaagtgcgcttgcgcaaatgctaggttacacttgagtaactccgggaatgactgggtgggtggggcggggaacagtaacggtctcctattggatggcagcctaaactcgcaggccagctaattggacgcaatcagaacccagcattctttcttcgtgttcctgtgcggg

SEQ ID NO: 231584 - DNA, 227 bp, Homo sapiens
  chr5:162930156-162930383
  hyper
aacttctcattgggtattttcgagactactacggggaatcagctaccagcttactgccatgtggagaactgcacgagattccgggattggaatcaaaatgctaatttaaaaggtcaagtgaagctgctcctcacgttttggcgtgcctgcgctctctgcaggcagaagcgaacaaagacccagcaagagaaggcagaggctaagacccatcccgtatctgctctcct

SEQ ID NO: 231585 - DNA, 883 bp, Homo sapiens
  chr5:162931122-162932005
  hyper
agaaaggtaagattacatcacgtgttgcgactagaaactttaaaccgaattcccagttaagagaaaaagtagtaagatgatcttggctgctcccccggccctcttcccgccctcttctttgttgtcccctgattatgcttgtttagcgctggggcagtcctcaaggattccctaaataaagccaaactaatgaacagtaatagcctgtgtttaaaaaaaaaaaaaatcggaacataagaaacctcaggctgtcttcgattactgttctagagaaactttatgtttacacgaataaggaaatgagtttttgttgggggttgaggaggaaggaaagtcatggtgttctgacgtggaaaacttctttaaaaggctgcttagtctttagtttgaaaataaaccaaaaaggtttaggagtcggggaaaggccctaggaaaatccagacagtggtcacgtttgtggacgacgtttagagcttgctatcctgggcacacaagaacccttggactgttcggtgcaaagttggcaaatcctacacggcctgtgccagggtttactttctgcatcaatttcacaggcgtccagcctggctgaggattttttgcggtttttaactggaagggaaataagtcggcatcagcacttagggctgcttaacttttaaaaggtggtagaacgcccagccttacacgctgctgcttaaattctcggtgctcaccaaggctgggctcgtgtggcccaatcctgcaatccccgaggcggtgtttcttaaagagtgggcttgattctggttaaacccattaagaagtcggaccccgggctcgtttcttgttctgtaattatgggtaaagtccaaggatctgcgttttgaagaggtacctaagt

SEQ ID NO: 231586 - DNA, 46 bp, Homo sapiens
  chr5:162932441-162932487
  hyper
ttcttttgtgtgtcgctttaagcatcggcgcgtgggctgggggcag

SEQ ID NO: 231587 - DNA, 1222 bp, Homo sapiens
  chr5:166405638-166406860
  hyper
cctcaggctaaccctagagccgaactgaactctgagccgcccggggttcgcgcgctcagttcctggtcttggaaacgcccagctggggttctctctgcagacaaaggggtgcacgtgtccctagcgcccctctttctcagccgtgagcccctccctggctgcgtaccccgcagccacagcagctgcagccccagcgccaccacccaaccccggcggcctgggccggtgcgcgctctcggggcccagggattggctcgcactccccattcagggaccgcgagggctagcgggcggcgcacggcgctctgtgtgtgtgtgtgtgtgtgtgtgtgtgtgtgtgtgtttgtgtgtgcgcgcgcgcgcgtgtgttgtgcggcgcgcgggcgagcgcgtgtgtgcgcgcgagagctcgcgtgcaggagtcactgggtgtgcgtgcgtgtgttatgggtttgattccagagcaggttgcacattggtcctgggtggctcgcaggctcaggtcgtgcttgggcgtcctcctcctaatcgtttccgaagtagcagcagcagcaccaccaccagcagcagcagcagcagcagcagcagcagcagcagcagcagccgccgcggcaacatcgagctcagcggcacagcaggcagaactgtgcagaagcgagcaccgtttggggagtccggggggcgggtaagagggaggagggggaaagcctgtcttggtctttgggattattttttttccccttctttccctctctctctctttcttgagggtgtgtgttgccccctcgaagtgaaggaattttgctccaaagcgagctgggaccgaagactctaggctaagttatctatgtagatggtgtcagggagcgaagctactgaccgagctgctggtaaatgtttttcacttcttactctttaatgcttaaggcttttttccccttttctttctttcttgtttcctttctgttgctcctcattctgcaatcgctcctgaatcagctgcagttctctttctctccttgcgtttgtgcagtttacaacttgtttcatggttttctatgtatttttttttcctccttcatcctcagatgaatgctggaacatttaaattcggcacttcgggaggtcatcattagttgcatgagtttcagggggggaggggaaagattgctagagcagactgttatttccctgcagaaggactgccggtttctctctaatg

SEQ ID NO: 231588 - DNA, 152 bp, Homo sapiens; identical to SEQ ID NO: 200142
  chr5:167000608-167000760
  hyper

SEQ ID NO: 231589 - DNA, 177 bp, Homo sapiens
  chr5:167000961-167001138
  hyper
ggtaaggattggagcgagctagagatgctgcacgctgctaacaagggaaggaagccttcagctgaggcaggtaagcgccgatcggagggtttgaccgagtggcttagttaaatctctgttttcaccgttttgtaattgagaaaggcatccgcagcagaagccgatttttcagtcggc

SEQ ID NO: 231590 - DNA, 141 bp, Homo sapiens
  chr5:167719188-167719329
  hyper
gctgggaggaggcgcgcgacttcgacggcaaggtctactacatagaccacacgaaccgcaccaccagctggatcgacccgcgggacaggtaggaccctggaaccctcctccgtgcccccacacccccgcctgggcccccac

SEQ ID NO: 231591 - DNA, 247 bp, Homo sapiens
  chr5:167913520-167913767
  hyper
tgagtgctccgcgcggctgctgcagcaggtttggacgcaggagaccggcgggaaggcctgaaagagatggagcaggctctgactcctgcccaagcggcttcgggggcgggacagctaggcgaggaccatcctggtcctctcagagtggagcggcacggtccctgtgggaacaggaagggttgagagaggaagcacccatcatttcaaagcccgtgtgactgtgattttcagcggaatggagggtccc

SEQ ID NO: 231592 - DNA, 347 bp, Homo sapiens
  chr5:167956136-167956483
  hyper
agcagagacgcccccgtccctgtggcccagggaagtgccagggatccctgggaaggcgggagatggggaaggggcagggtgagcgaagaggagcaggctgcgtctgcacgcgggctgggaagcggggcttccgggccgcagggtcgcggggacgggtgtgatgcaatcgcgccacagccgctgcgtcaaggggcggctccgggatgcgggcactgcggtagagcccgtcctgcccccgccgcccgccgcccgccgcccgcctccgctgctaaacccgcggacaaccgccgggacgaccacccagagccaccagagccccctgacacccgccccgaggcaccggtaac

SEQ ID NO: 231593 - DNA, 138 bp, Homo sapiens
  chr5:167956735-167956873
  hyper
gcggtggacagcggcggggcggcgtggccaagagcaagagccgccgcaggaagggcgccatggtggtgtcggtggagccgcaccggcacgagggcgtcttcatctaccgcggggcggaggacgcgctggtcacgctga

SEQ ID NO: 231594 - DNA, 88 bp, Homo sapiens
  chr5:168006688-168006776
  hyper
tagttctccggttcgtgaggccccgctctctggctgtagttgtgcaggtggactacaaagcccgagatgcatcgcggcccctcctccg

SEQ ID NO: 231595 - DNA, 1041 bp, Homo sapiens
  chr5:168727254-168728295
  hyper
gtcagcgggccctgcgtctggaaccctcacccctggagaggcactgctctttgcccatcgctgggggtttcgagacctctctttccagatctgaccaagcctacagacccccagctcggagagtgagggatcgtatccaggaagggatgagaatagagactgcatccagggaggccgaggggaaaggacggatctggcgcctggggccccctcggtgggacccaggtgggtggcccgcgtggggtggggcaggggtactcacaggcgctcagcgttgcgggggatgccccgaggaaccgcgcggaggcccagcccgtggcagtccacgctggcagcggagcaggtacacttggtggggcaggcgacggctggaggcccactcaggacgctcgccagcgccaaggccagcgccaggcgggcgcgcacggcggcgccgacccctgcccacccgggggccatggtgtgcagggccccgctcctggaggaggctgcctctgcggggcaagacgcgtggagcccgaggaggcgcgcggggagcgcgggcggcctggggagcgggcggcggagttagcgcggaggaggggcgagctcggtgctcaggcgcacggggcgcgggcggagcggggcgctccgggcggcggcggcggcagcaacagcagctccatcggcggggccggcgctgccccgctgcgcatcgctgggagtgcccaggtgcggagcgccccctggccccgctggcccgcgggccgggttggggacctggggcgagcgcaatggggcgtggcgcccggggaggtccggcttggggctgggctggggagcgcggcggctgcggctggggcacggggcggccgggtgagctggccggcgctcgctctctccattcagtgagcacggcagacaccggagacgcggggcccacccctccggcccccccccgaccaagaaacgccaactccgcctcccattggctgcgccgcgcgtcatgtcgactaagttgggaactttgctggagcgaccgagagcctggagggaggaggc

SEQ ID NO: 231596 - DNA, 44 bp, Homo sapiens
  chr5:168728508-168728552
  hyper
tcagagaagtgaagcgacttgctggaggtcgcacagctgctagg

SEQ ID NO: 231597 - DNA, 134 bp, Homo sapiens
  chr5:169010586-169010720
  hyper
ggagccacgtctgcgcctgcgcctgcgccaagcccacggcgcgccacttgcacatgcgcagtagctgtaggagggggtgggcgctccattgggcgtttctcttggtttttcctttccgcgcggcttgggcggac

SEQ ID NO: 231598 - DNA, 127 bp, Homo sapiens
  chr5:169063981-169064108
  hyper
ttcagtccctaggcacggcaatcaggaaactctctgcacttgcggtggtggtctggcgagccccaggtggggactggcctctgctccctcgcctggggaggagacaaagtgggagtggtccccaagt

SEQ ID NO: 231599 - DNA, 46 bp, Homo sapiens
  chr5:169064288-169064334
  hyper
tgacggcttccccacgggaggacgcgaggccccggcccagccatgg

SEQ ID NO: 231600 - DNA, 51 bp, Homo sapiens
  chr5:169064754-169064805
  hyper
gcctgcccaccatgcatacttccaccccctccaaagcgacacccatttgcc

SEQ ID NO: 231601 - DNA, 124 bp, Homo sapiens
  chr5:169930891-169931015
  hyper
gcagatgagggtgcgcaggggtgagggcgcagggctgggcgtcccccgcccccaccgtgcagccctcgcccccgccccgcccctccgtagttgcccgcccgccgccccctccgccgccccctcc

SEQ ID NO: 231602 - DNA, 434 bp, Homo sapiens
  chr5:170108015-170108449
  hyper
gttttctggctttgaatgaccgcctagcgcttgccggtgcgccagggtgctgtgaggatgtgggcagagggcgagtccgaagggctccagacactgggaatagtggtggtcgtgtgctcctccctgaaacttttgcactacctcggactgattgacttgtcagacggtaagcgaaccctggagcttccccgttttctgtgaatgtgtttttgtggcttcggttgctgtgacagtcgtttcgaaaatgcacggaaatgagggcggagacccgagagatttgaaaaagccgggctgaaacagcgtggtattggtccccgcctccccagtcgcgccccagtgctgcgctgtccgtcgtgctgaaatgtggtgcgcctggggagtgcgggagccaggaagttagggtctcctgctccggccctatgagcatgtgagtc

SEQ ID NO: 231603 - DNA, 107 bp, Homo sapiens
  chr5:170171586-170171693
  hyper
gagccgcgggtgtgagtctgaggcgcccccaggcccaccagcgtgtgagcggcaggtgctgttcgccatcagccgctagatggagccggcgcctcgccgaatgcgcc

SEQ ID NO: 231604 - DNA, 367 bp, Homo sapiens
  chr5:170289409-170289776
  hyper
gccggctttggcgcgcctcgcgcggctgccgagcggtggagcagccttcccgccttcccgccgcgtcgccggcgcggctctatcgtcagcctccctccacacagttgagccccagccggagcgggggcttgggatccaccgaaggagcggcggcagcggttggactttaattggccagaggagacaggggctgcgtctggggggagttgcgagggagggctacgcggccgcctcttcggaggaggaaacccgggccgggcgcgggcgcgggcgcggacgcgaggatcgcagaggctacgaagatgggacgcgtgcttgtatatcctcgggctgctctgacatccccgttcagttattcagcaaacat

SEQ ID NO: 231605 - DNA, 4807 bp, Homo sapiens
  chr5:170735177-170739984
  hyper
gactacttcgtgtgcggtcctgtccacggtgccctgggccgggtagacagtcactgaggcgcgagcagaacggggagtggttccagcgcccaaagtggactggagccgggaagggctcaccagtcgcgtttcccaaagaaatcccgcaatttgctctaggagctgcccgcgcctttgacattcaggaacccgaagtccctagacccgccgagccgcgagcgggttcccacgcgcgaccacagcccccttccatcctgcaacgaattacgagagtcaggtccccgctccccaccgggcgaccccgcgtccctagcccagccgcagctggcacgcgtgggcacctgcgagtcacgcctcggtccgcctggccggagccagggagtgtctccaaagtggccgcgaggccgcggccgaaacccgggcgggggcgaattctccccacgcgggtcggcgtcatccggggcgcggagaacgctacggtgctcccctcgccccgcgcgcaggcagcgcgaagcctgccccgggtagtgcgcccctttcgttcctccggcggcggtagcgtccaaggggcttctgcggattccgccgggtcgtcccggggttgcaactccattgtacctgaaaggatgcatttggtttggcttttgctcagatgaaaaaaaaaaaaaattggaagaaaacgaaaacccactcagcaaaagacaatttcacaagcggagcgctctacccacccagcgcggtgtctgggaagcggcccggcccggaggagcggggagcgtctgctaattgcagcttcgttagatttcgggtttgggaggctgtggttcgggctctaatatccgccgcccattatccctgctaataaatttgacctattgttcgtttgttaaaatgatgtcaccttggaacagtccctaagctcctatttccatgaattaggcctttattgaaagccgggagccaatgagaggagagaggcttgttgatcgcagccaatggctgcggcaggagaggaattagcagcggaaactccaggttcggttcaagaaagatgacacagagcctgtcgggcccgcgcactcttggcaaagtttcagtgcgacgagaggcgccgggcgctccatggccgcgccgtaacggggacccagccgcctccccgcccagcccagcccagcccttccgcccgcccaggatggaggcgcccgccagcgcgcagaccccgcacccgcacgagcccatcagcttcggcatcgaccagatccttaacagcccggaccaggacagcgcacccgccccgcggggccccgacggcgccagctacctgggagggccccccgggggccgtccgggcgccacatacccgtctctgcccgcctcctttgcgggcctcggcgcgcccttcgaggacgcgggatcttacagtgtgaacctgagcctagcgcccgcaggcgtgatccgggtgccggcgcacaggccgctgcccggggccgtgccaccgcctctgccaagcgcgctacccgccatgccctccgtgcccacggtctccagccttggcggtctcaatttcccctggatggagagcagccgccgcttcgtgaaagaccgcttcacaggtgagcagagctggcgaccaggctccaggcctccgccctctcggggccagaggcgccgcgccctgtgcgctccactcccggaaaccatttcagaggcccaagcgcggcggaggcctcggccccagggccccgggcagccgtggtggggagggtaatcggagagttgcaggaaaataagcccgtgcccgggggaagggacagggggcgagggggtctcccgaccggcttggtgtctctggaaacgcgcgcgaccagcgaaatagcggagctctccgtgtcccacggggcgccacggggtccgcatggggcctgaacggtggcggagccgggctgggcttcaggggccctcctgtgtctccgcagcggcggccgcactcacgcccttcaccgtgacccggcgcatcggccacccctaccagaaccggacgccgcccaagcgtaagaagccgcgcacgtccttttcccgggtgcagatctgcgagctggaaaagcgcttccatcgccagaagtacctggcctctgccgagagggcggcgctcgccaagtccctcaaaatgacggacgcgcaggtcaagacctggttccaaaaccggaggaccaagtggcggtgagagaggcctgacccggcccaccttacacctgcccttcacctgtcccgccccgagccgcagcctcgcactagccctattttaaggctatccactacccccgcccccctctgcctcccccaaacacacccccaccccgccttcgcagattgtacctcttcctttcacccttctcgctggcctgtgcttctctctccatcgtggtctcccacgccttggtttctcctccatccccatccccatctttcgtgagcccctccaactctctccccgtgttttgtacggtctcctgcgttcacttgatttcctctcacccacccccgccccaaacacacaggcacacacacacacacacacacgcgcacacacacgggcctctcgcactctccttctcctccttcttccagcccgccctctcggattttcaacaatcctcgtggacgccggtttcctctccccccatctccgcgtctccattccagccgcgtttttatccgatctctgttttgattcaacccgtaaacggcgaagcgatcgcgtctggaaaggggttcaagacaggccctgggcgaactggatgagactgacccagcccccgggcgtcgtgcgggtggtgcagagccagcctgctcacccgcggaccccagcgaccccggttcccgcagggccaagtcagttacacataggccctgcccttgctatctggcgaaaggaacaatctttattgttggtgaagccacaatacccgggcgtgcaggtgggcggcgggcagagtcccctcctggagaccctctggcacacaacaaaaacaaatgatcctaaccggctccctggatataagagcctcgggcgtaaagcgcgggctgggaggcagacgggttctgcgcctcgaggctcccggatggcctcggctcccgggagggccggggccccgccggcggccccgcggtgccgggtgcatgacggtactgtccctctccctcccccggtgcaggcggcagacggcggaggagcgggaggcggagcggcagcaggcgagccggctcatgctgcagctgcaacacgacgccttccaaaagagcctcaacgactccatccagcctgacccgctctgtctgcacaactcgtcactctttgctctgcagaatctgcagccctgggaggaggatagttccaaggttcccgctgtcacctccctggtgtgagcccaccagcgcgcaccgtcgccacggatcgccgcccccacccagccgggcgccccggaccccccaggcgggctgcgggggaaccggcgccgagaggggaaggggccgcctagcccgagtaggccccagggcgcggccacagactggcgggccgcggaagggggtagggcccgagctccgcgcggccgcacaatccgagcccccgccccgcgccccgtcccgccccaggcccgggcctgacaagaaagcgccttacgtttctccgccccccgcccgcaccccccgggccgggcgcctgtattatactttgtacttttgcccaaacgtgtaaataataaaaaagttttggcttttttctttagaaaccggccacctgcttcccccgcgggggccgctggaggaagggcagccgacccggccgctgggggaagtgccaggggcccggggcaccctgcgtttaggctgggtccactcttcttcttttccgttccttttatttaagtctttttatttaataaaaaagttagctatttcacttaacgccgcttttatttcgttttcgttccaataatgctcggcgacccccggccctgcgccccacccctgcggcggtagaagccgagcggcggcgcgcagggcgcgtccacttccgcaacgttcgtctgcattcgcctcggctgcaaccccggcccgggcccccgaggaggatgcgcggtgcaggtcagttggtgccggccacccgcagcctgggtgcgcacgggatggggactggacatgggaaaggtgctccaggcccgaaggccgcgggccagcgccggggcgggctggggagtgaaaggctgggcctgggcagatgcctaggccgtccccaggtcaaatccacctggggggtgggaggcagggtggcctcgaacttcttagagctcaagtcggaactcggagccccacttcaccccgcaactcgctttccgccctctttttcccgcggagcctcagagaggacctggctctggccagtctgcgcgcgctgtgggcaggctttgcgcgcagagccgctgcaaatcctcggtctccaaacgcctggggagcaaatgcagcgcacaaccctaggggccctctccttgtcgggtttgcgtgggaccccaggtggagcgtgacgtcatgtgacgtcaccgcagcccccgcggtgtcactgggctggagtgggcggggcgcccggaactcagaactctaagcgctggtgtggtagcgtcgtggccggggtccacccagctccaccgtggctcaagagctggaagtttcagaattgcgaggtttggagcggctgaccccttccagtcacatctaacacacaaagcccgtgaacacttcctctagttct

SEQ ID NO: 231606 - DNA, 617 bp, Homo sapiens
  chr5:170740464-170741081
  hyper
cactttcggggccgcgtcccagagcacccctcccactccacgagcacccccacccgcctcatcccactgcctccctcggagccggagccgtgcgccaccctgcaggttcccgtgctccgagccttcgttctatgcgggctgcgggactgtattcacctgcagggctggaggaaggggagggcgcctgagaaacaccttgaacccccagcgctcccgccgtcacctccacctccaagcccagctagcctgggatctgcgcctttcaggacataaagacacccagggagggactagggtgactcagaacttcgggtctcttccgtgagtgttttcctgaaatgcttttattttctccaataaaaagcctgatgaacgccgtcatcgggttgggaaaggttggcccttcggctgaggactagagggacccttgactttgctggcggagaagcgctttcctcagagacgggtgtcgcggtccagctcccttccgttccgttttattctgttgctccataataaggcctagcggggttttttttcttaattgtttttatttcaacgcgcttttggggaacagatggtcaggtggcgtttggttacatgaataagttctttag

SEQ ID NO: 231607 - DNA, 1320 bp, Homo sapiens
  chr5:170741501-170742821
  hyper
caacgtatcattcttataaggcctagtatttttgtttttcaaaattacttctgttgttttgccagggtgacactcaattctttgggcctctttggagacacacgcacgttgtttttttttctttctgttgggcgcctcgctttgcgcagaaggcctctggcccggaggcccgtccggggtaggcgtccaggcaggccgggggtggggggccggtctggcttcggccctcggggggcgcctggctttcccgcacctagtgccttcgcggcgtttggcgtcttccagcgctttgccctcacccagccttgcccagccagagacgggctacgggtcttttcctgttacagagctgagcccactcatgtggtgccaagtagcgactatctctcggccacctccacccagagcaatgtgggcgcccccagcgggtgggagcgattgccgagcggcgcaagggcgtttaacgcctaaccccctcctcctgggttgccaagccgctaggtcgccgtttccaacgtggctgcgcgggactgaagtccgacgactcctcgtcctcagtaggagacacacctcccactgcccccagccacgcgagctatgggcagaatcggggcaacggtaatatctggatggggcaggctcccctgaggctgtgcttaagaaaaaaggaatctggagtagcctgaggggccccacgagggggcctcctttgcgatcgtctcccagccttaggccaaggctacggaggcaggcggccgagtgttggcgcccagcccggccgaggactggatggaggacgagaagcagcctgcctctgggcgacagctgcggacgcagcctcgccgcctcgccgcctcagcctcggtcccagcgtctctaaagccgcgcccattttacagatgcagggcagggagacaagaggcatctccgggggccgagtagaatgatggcgcgggttctcccggcgccctgatttcgaggctgcgcccggggccctacatgcaggcggggaggcctgggccgaaggcgtctgcaaggaggggcgagtctgcccggtccgggcagggagtgaggccacagtcagttctccctaggaggccgcgcagcgggtagggtatgggactgggggacgcaacggggacctggccgaatcagagccctcagcagagaacgccgaaaactctggggccggccgctcgcttcccgctagtgggaatggtttccggtcatccgttcccagtccagccccgggtagggagctctgatttgcaatgcacagcacttgcgaggttcgaatgcccccgcaatttgcagatggaa

SEQ ID NO: 231608 - DNA, 977 bp, Homo sapiens
  chr5:170743121-170744098
  hyper
aaggaaaaaaagaaaaagaaagtaagcttcaaagaagctctgataatagttctgggtcgtgcagcggtggcggccccgcgctctcgcccctaaagcaagcgctctttgtactgggtggaggagctttgagtagtgagggtggagatgcagcttcggggtggcgcagccaccctgacactaggcccggggtcgcagtgggacagaagagtctgccgctctgacttgggctctgagttccaagggcgcccggcacttctagcctcccaggcttgcgcgctggcgcctttgccatccgtgccgaagtggggagacctagccgcgaccaccacgagcgcagcggtgacacccagaggtcccaccgggcccctgggcagggtaaccttagcctgtccgcttcggcagctttgcgaagagtggcgcgcagctagggctgaggctcttgcggacctgcggtcgaagcaggcggctgagccagttcgatcgccaaggcctgggctgccgacagtggtgcgcgctctgttccgccgcggccgggccaggcgctctggaatagcgatggggggacacggcctccaactttctgcagagaccatcgggcagctccgggcctaagcagcgacctcaccgaaggttcctgggaacctttgccaaaatcccagcctctgcctcggtccagctaaaccgtgtgtaaacaagtgcaccaaggccgcagagcggctggtgtggtgcaggcgcctgcgttctggagtagtgaaggttcctccacagggaaggcggttttccttccgtgaaattcgaaattcagccccccagttccaagcgcctgctccgttaatagcatctactctcagcgacgcccagacccaggctgtgcactgtcttggctcagacactggcaaagtcctcgagaaattgccttggtgatcggtgccttccctcgggccacccagccgccggtggcacggagtcttccgcgc

SEQ ID NO: 231609 - DNA, 105 bp, Homo sapiens
  chr5:170744958-170745063
  hyper
ctttaaaagcctccagacctcgcacagcccatgcgctggctgctaccggggatgtactggctttactatcaagcactgttggtcgatggatttatcccagctgtg

SEQ ID NO: 231610 - DNA, 236 bp, Homo sapiens
  chr5:170745324-170745560
  hyper
tgattatccagcatgcgaagctgccttgcatttgcatccactgttcaggtgctacagctggggcacttttgttcctgggacgtagtgagactaagaagaaggggaggggagagcagagagggaacgcaaccccggggaagacgccaagagagggtgctgggccggggtgaactttattaatgcctgccgtttccagctcgtttgttggagggggcgggcagggctcctctgggcag

SEQ ID NO: 231611 - DNA, 115 bp, Homo sapiens
  chr5:170814440-170814555
  hyper
gctcattcgcagccggctaacccgccatatcttacacagctaagggctgccgacgccattttgcagggtgggctgcgcagactcttggcgggaggccggcgcgcttgagcgggag

SEQ ID NO: 231612 - DNA, 1106 bp, Homo sapiens
  chr5:170845701-170846807
  hyper
tggggccctggttaaaggaacgaagctgcctagtatgcaaacggaggcaagtcttagtccggttttgggaggaggccggaagagggcctcagcgtggtcgctgaccagagtcctgctggctgctccccggcgtgcagccgtccgtgctggggttgcagtgacgtctcggggccgcttggtggtagccgtgtgtttccaaagctggctcgcctacgggagagtccagctgggatcccgtgaaccgaccccagagccccggagggggcgaggggtgggaaggagagatgcccgggagcccccttcgcagcggcagggacgtaagaagaggacgggggctcacttaagtgggtagccagtcaagagggtggctgggaaactccacgatcgcagggcgggtaaaagcgacccccattcagtggagccgccccggggctgggtttgacccgcccctctcggctctccactagagcgctggtgagtgagtgcgagtagcgaatgtgggcaggtgaggacgttccgtacctaactgcgttcttggggagcatcgcctgcccaatttgggcaacgtttgcgcggaggagcggtcactgcgctcgggcgcagagctccgacggcttccagcgctcaccagcttcagtctcgcgggtcctgcccctttggagctgccggtcccgtctccgagagtctgagcgcctcccctccaaccccgagccgccaggagaaggaggaggaggcagcgagaggccgcggcaggcaggcgagcaggcagggccgcctttgatgtgggctgggcgcacccaggcgagctgagcgcccgtccggccgcgccccgaggggggagcccccaggccccgcatcctcattgtgccggctcgggcccgggcccgcccccggccccccgccccctcgccgcccgcgcgtagaaaacgccccggccgccgccagtggtgggaggcggcgatgcgcacggccggagagacgcggaggaggagacatgagccggcgggcgcccagacggagcggccgtgacgctttcgcgctgcagccgcgcgccccgaccccggagcgctgacccctggccccacgcagctccgcgcccgggccgg

SEQ ID NO: 231613 - DNA, 580 bp, Homo sapiens
  chr5:170847120-170847700
  hyper
gcggcggaggcgcccggtcccggccgcgcggagcggacatgtgcaggctgggctaggagccgccgcctccctcccgcccagcgatgtattcagcgccctccgcctgcacttgcctgtaagcgcccgcgcgcggggctgcccaccttgcctggctgtctgtccgtatgcctgtgccctgtacctctgtctgcccgcccgtcggttcacctgactcttcgactgcgtgtctgtctgtccgtgcgcccccttcctcaggtcccactgaccgcttctccatctgtttcccgcaggtgtttacacttcctgctgctgtgcttccaggtacaggtacgtgggctcctgactttgacctcctcccgcccctgcctcgcggtacacgccgaccccccttccccggccgcgccccctccctgtgccccacccctcctgggcgctgagcccagtgcacctgttcccagggcgcggaagggcggctccgcgtgcgccctgcgccggcggggaaccggccaagggcaaggggctctgccgcggggcccgaggaggcgctggctgtcgcggccactgtcggcctcggctggga

SEQ ID NO: 231614 - DNA, 100 bp, Homo sapiens
  chr5:172068057-172068157
  hyper
cttcccggcccgggcgcgggagcggcgagggcgggaggcttggctgtgcttctcccgccgcctggtgcaaactttcaaaagatgcggcggccgcggcccc

SEQ ID NO: 231615 - DNA, 445 bp, Homo sapiens
  chr5:172068385-172068830
  hyper
gccaacgccgcgcccgacgcagcgatgggcaacacggtgcaccggaccctgccaggtacgccggggagccctgcccgggaggcgggcgccgggcttctctcctccgggggacccgctgggtgactctggagagctaccccacggcccttggagccctcggctcgcagcgggctggagtctccggtacctcccggacctcagctcggcgcgcgccccgcggctgggctttgcgccccgggagggcgggtaccgcgtcctggttaccttggggaccccagtcctcattctcccggctttggccagatgcgcaaaaagggccgctggggcgatgccgcgcgccccctcgcctttgttccagcccgagggcgctgatgagcaaactcaaggcgacctgggtgggggtgactggagccgggctcgccagggcttccgacggtcagaagcc

SEQ ID NO: 231616 - DNA, 161 bp, Homo sapiens; identical to SEQ ID NO: 200156
  chr5:172197154-172197315
  hyper

SEQ ID NO: 231617 - DNA, 795 bp, Homo sapiens
  chr5:172198699-172199494
  hyper
tcatcactaacaggcggggaaactgaggttccccaggcgaagcgactgacttgcccagaaccacactactggggtgggggcagcaaataggcgcctaagatgaagtttagagaaaaatgaacaactctgccgatagaaaagtcgtccctaccaagaccgactcgagcgagttggggcggagaggttcagggcaatgctttcctgtttcccagacttttctttaaggtggctttaaaatatctacatttgccatgaaagtgtgagcaagcaaactcccaccgggaaataatgctattcctagtcttgtggcccccggaagacttggagccaagggaggcaggtcagggggctgaaatcccggtgaggggtcgcaaggccccgcagtggattccagggtttggcgtttggaggggtgaggggcgacccgcagcgcgactcgacggcgccccccaggggccgcccgacacgtttctgtcaccttggctccagactgagcttctccatccctttctttattatacaaataggcagtatacacagtgagcgcccactaagcgctgggctgggggcctccaacccggaacagaagccggccacaaccctcgctccctgtcgtcgcggccgttataggccgaaagcaaaatccaatcccgggccattgtgggcggattgccaggacctggatcgcaacacttgggaagacccccgccccgcccagcgatctccgtgccctgagtcccagtgacggccccctggacagcggagcctgctgcagcgacgcgacgcgctgggtac

SEQ ID NO: 231618 - DNA, 275 bp, Homo sapiens; identical to SEQ ID NO: 200157
  chr5:172234232-172234507
  hyper

SEQ ID NO: 231619 - DNA, 107 bp, Homo sapiens
  chr5:172386425-172386532
  hyper
cacttccggccctgcgcactcagggtctgaggcagctagtagccgggtgagtggaggctggagttttctcggacagtgaactctaccgccccgtgagaccctgccct

SEQ ID NO: 231620 - DNA, 232 bp, Homo sapiens
  chr5:172410475-172410707
  hyper
agtgccaggcacacgggaattcagaatagtaagggacaactattgttaagttctctatgtctgttgcataagtagatgaggctgtagataactacactctttgtctaaaagggccaagttctcatcagaacactttgctgagccccgggtgaccgaatccctagctctggggtgagcgacatgcctccaaggagctgcagccaggagacagccaggcgaaggcggggctctg

SEQ ID NO: 231621 - DNA, 274 bp, Homo sapiens
  chr5:172483102-172483376
  hyper
ctcccatcctgggcgtgctgccgggtatcgcagacggcccacgcccacactgcagaggccggcaccgagcccccgctccgccctctcttcctggtttttcccggcaacccgcccctccggcgacacgtgacaggggtgcccggccggactcagcccctgattggccgggctgtggaacgcctcgcgattggcccgaggccggcgggcccccgcctccctcctcctcctcgccgcggcccacgtgaggggggcgagtcacgcgatttccgggaac

SEQ ID NO: 231622 - DNA, 297 bp, Homo sapiens
  chr5:172571552-172571849
  hyper
cggctccccaagacgtccacgtccggatctgtaaccaagagattgtcaaatttgacctggaggtgaaggcgcttattcaggtactgatcccgggacccctgccgggctccagcagccctaacccaagctctgctggtctgtgagcttggcagtgtcactcccgaactttccccacttggtttcccagaccacaggctccgccccatggtcggctacccccccggtccccatttggttgtgtcccggtgactgctggccttgatcctttttccgggtgccgccggatctcccatcccc

SEQ ID NO: 231623 - DNA, 801 bp, Homo sapiens
  chr5:172655933-172656734
  hyper
ccgcgtgatgtttccgagtcagcggtgaaacctgcggcttccgcgcgtcctttaaaaatacaggtatttagatacacaccgtggcgtcgacttaaggtgaaatctaaacaaaatgaaaggacgggagctattctgatttggccgaacctgtgcctgcgggctgggaatgacccaaggaaacgaagggacggcggagccagtgcggcgggggccgggtgggaggcggtggcctcgtgctggggacccccagccccggctcgcctttgccgggaaccaccaagctaatttttttccctttcttttttaaataaacctaccttccttcccccattttttccttttaatatcgctgtttatctccattttttttaactgcggcgtgttcttgttcgattttaaaaaatactaaaaataaaatgagtcccctaggtgcctccctggcgccctaggcatggagagctcatgcctgcgccaccctcatctccgctggctttgccacctcggaggcgccccacacttctcctttgttttgcttttctctgagccggttgagttttcttaccctgaatgcgtcgtttatacaattagcaactgaacacagaacaaatatcaccgatataattggggtgggggtcgccatgtaaacacggggtgttgttactttaggatacttctgaccctgtcccggcctgagtcctcgctccctgactcagcatccacgcaggaaagcctcgccccagccaggcaagggcagtccctgccggctccttgagttctgccgtctacagcttgccccatcat

SEQ ID NO: 231624 - DNA, 35 bp, Homo sapiens
  chr5:172659536-172659571
  hyper
ggatcggtcagggtcgcgccacgcgggtcccttcc

SEQ ID NO: 231625 - DNA, 101 bp, Homo sapiens
  chr5:172659751-172659852
  hyper
gctgcaggccgcgccgccgtaacccggataggcggggtaggcgttataaccgtagggattgaggcccacgccgtaggcaggcgcgtagggcgccgagtccc

SEQ ID NO: 231626 - DNA, 282 bp, Homo sapiens
  chr5:172660152-172660434
  hyper
gctccgcgttgtccgcctctgtcttctccagctccaccgccttctgcagcgcgcacagctctgagggggaacagagaggcagagagacgcttggtaagagcggcttgacctacggagcgcggccgcacagtaatggtaagggatcctcgtggaggccactgtgtcctgcctggagcgcccagctggctgcggctcactctgccaagtgcactgggagccaccgacacgtctcactcagcatttgtagaaagtcaggctggctcaaggcgctggagaacaaaa

SEQ ID NO: 231627 - DNA, 260 bp, Homo sapiens
  chr5:172660809-172661069
  hyper
tcagttctagccgccgtgcccgcccgaatttgttcccaggcctctgctcctcaacaaacctatgaattctctcccggctggcagcggcccttcgcccagcgcttcgcccagcgcctgcggcctcccgggaatcgcccgggctcctgccttgggctggggggtctcccagaaggcccctttctgcagcggggccggcctccctccccgatcctgggatggcctgcgggatgatcccgcactcatctcgtccactcccttgt

SEQ ID NO: 231628 - DNA, 512 bp, Homo sapiens
  chr5:172661473-172661985
  hyper
ccaggagcagagccgaagccgcccggggctttgttaggccggggggaaacgttttttggtctcttgcttctgatcctttcaatccggcatttcctctgaacctccgattggacgcggggcgcgggagcctggcgacaacaccaggcatcttacattctgaaccccccgccgcagcccagccctcggcccaagggcgcgtgtctcctcctcctggccctgagtttcttggggacgaaagcgacccaggaggggagaagggggcctgtgtttcctcctcacctttcttttcggctctagggtccttggctgggtcggggtcgctgtaggcacgtggatagaaggcgggggcggcgggaaaggcagacgcacacttggccggtgaaggcgcgcggcccagctctgcgcgcagctctgggaggcccggcgcagccgcctcgggcccagcgtaggcctctggcttgaaggcggccagcatgcaggaggagggcgccagggtcgcctccaggcgggca

SEQ ID NO: 231629 - DNA, 1025 bp, Homo sapiens
  chr5:172663579-172664604
  hyper
gcgttggcttctcacggccctagctggtacagggaaccgcgggcgggaagctgggcgggacgcgtggacttgctgagaatggggatgtggagggcttggctctttgcggagtgcgggttggcaagaggcgcttggagtagaataaaggcggcgcagggccaaaaactacctaaagacacagctcccgcaggcgcgcccaaggtgcggaggaaacgctccatgtatggggacaaaatagtgtctgtccagaacgtacatcttgggtgctcaaacccgacagtgtgccgtctgagacgccgacgcaagtgaagtcaagcattggcctgatgttgggacttttcctgtccctcatcaaagccacactcccaggacctggggcctccatgctggggagagaggtgagccccgcagggcagcccaggaggcgcgcaacgccctgaccccggcttctaggcgccagccgtcagtaacaggcctgggctgccacgccgaaatcacgcctcgagtttctgagccagggactactgggggtctggaattgttagtctagtctgtggaggatgccttttcttaaatgtggggcgttcaaggcccaggaaacctcgtccccccacctcttcacctcccaacccaaattctccttggacggagctgcatgtcagcggccttgcggcccttcctcgcctggacttttggccacgttaccgttatggctgtaaattaacctagcttgggggcccgccttgcctttgaagattgttttcgagcgcgggcgggggggggtgtcgttggagaggatgcctatcgccgaggcggtgacgtctggcaaacgagccacatccgattcaattaaatgtctcgctgaaaagagctcggaacgagggtcctgggagcgctgttaagtgaatctgctggccaggcggctcgcgatgacagtttgaaagattagtgtgagcggacgcctgaaatattaccgtttaatgggggacatcgaggctacatccgggatccctgtttttagtaag

SEQ ID NO: 231630 - DNA, 196 bp, Homo sapiens
  chr5:172666054-172666250
  hyper
ctcacggatctcgtcacggatcctcttattccgactgcaggcctgaggagaatgaggttcagagacgtggagtaagttgctcagggtcacacagatgggaaaggacagtgtcagggtgttaggattcgaacacacagctgactgcacagctgagactgttttcttttattacacgtcgctgcgcccaagaccgtac

SEQ ID NO: 231631 - DNA, 911 bp, Homo sapiens
  chr5:172670864-172671775
  hyper
ttccggtgtcctttcgcgttaatttcgtcctcttttcttctctgggctggggctggtggctgccacatcccaccccttctgccccgacggctgcaaaccgcttcagccaaaacgggcggagaggcggagagaatcgagacgctggaatcagttcctcggagtcccgtcgctggaggtcacagctgggaaaatcaggtgacattcgagtcagatggacaacgactcagatacagtgaagaggaaaatggttgtcctggggctggttcgcgcctgcccggcgggtgtgaagcccggggaaccgcgactttggaagaaccttcggcttggcggttcaggtttgggaaaagagagctggcgaactgccgcctgtttttgtgcccgcgcgggggaccagccgggccgacggcagcgctgcgggtgggttgggtcgtcggccgccgctccccggagaggtgaagagtcgcacctaccaccgggcagcctccgcggctctggccgaaaccccggctggccgcagctccgggagcccccagccctgtgctgctgcggccggctcagtgctgaattgatgctggaaacggctggccagcgggcctagggtcgccgcctttccctcctcgcctcttccttccttccgggtcgtgccctccaacctgctgtgcgttaccgcagccaagtttccaccgcccggcggagcgcattgtgaacagcagctgacaaattgttgtgttgcacacacacaccaaaaaaacccattcagtctcgtataattcggcgcaagcggtgtctgtggagagcctcccgggggcatggcacgggggacccggaggccaacaagctgcgcgataccggagcaaagtcgggatcagcagccgcctttcgcggagggcgttctgcgctccaagcaaatt

SEQ ID NO: 231632 - DNA, 760 bp, Homo sapiens
  chr5:172672263-172673023
  hyper
gggattacaggcgtgagccatggcgcccggcctgatgtgctttaaattcgctaaaacgacacgggtacacacaggcgccctaagtgcacagtcactttctctgtgtgtgcgtgttttacgcgcatacggtgaaaaaaaactttccaagggcacagaagaccatactgtgggtgcccctcgccgcccccagcgtccctgccgcactctggagctgctctgggaacacacacgtttgtgcactctaagcgtcagtgtgtttttgctttccccgcgccgaattgtgcgtcgcctgtgcagaccctccgttgtgtggccttgtgtctttaggcagggaacatcttttgtctctccgcaagaagctttcctccaggaaagataaagtaatcgatagggtcttttaaatagctccgcgtttcctgtcgggagaggagtatcagcgcgcgcaccaaatctgctctggtatgtcaccttatctctcgtccccgctgttgtccccaaacgccgcctgtcaaaggagacgccacccgcattaggacctagactggggcccttccgctcggggtcaggcgcagcgccctcggcttgggccccgccgcccctttaggggtccgggagggtggagagaaggggcgggagccaggatgagggtgcggggggcctagaacccgaggctggtaggagagcaaactctcaaacgcgctgaaaccggcccatctgggagaaatattagggcgcatgtctctcccggagggcttccttt

SEQ ID NO: 231633 - DNA, 321 bp, Homo sapiens
  chr5:172710794-172711115
  hyper
gtttgaaggtgccccatgggcgggcgcggacgtgtggttgctccagtgtttcctagagcactctcagccacgcccccgccaccccagcggcgctgcaggaaccagcccgccgccagcgcgaaggtgagaccgggcgccacgtgcttacccggcggcctccggaaccagccctgcccgccggctgtgcgcggatgcctgcagacgccgagctgctgcccccgtgtggcctggtgcgggggctcctcctgctcactgggggcgcgtcccggtaaaccagaacctcagcccatcaactcactcgtggggttactgaggaggaga

SEQ ID NO: 231634 - DNA, 133 bp, Homo sapiens; identical to SEQ ID NO: 200167
  chr5:172721006-172721139
  hyper

SEQ ID NO: 231635 - DNA, 1768 bp, Homo sapiens
  chr5:172754109-172755877
  hyper
tccgtaagaccccacgcgccgccggggcaggaccgcacagggccgccattcactcacttggggcgtccctaatgggcactcgtgcattccagctcgtgcggtgagcgcacgcacgccgccgctgccgcgttcacacggccccccaaagtcgggggaggggtcgtggagcgaaggagctgtaggcagattttctttctctttccgagctgggaaaagggccagccccgtgccctgcacgcctggctctgctttgcagcttgccggtgagccaagagccggtagagcagaggaggcgcacggttcgggtcgtgtcaccatttcttggcttgctgacctggccaggagctggggatggcggcagcaccgcggaggtacgctttgcgctgccctcacgctcccttccgaaagcagtgcccccagggggaaagttcgcaatgccatttgtctcgccggcaaagttctgggatgtcgggcatcttttgaggagggggaagacgcggcacccttactgaggccggcaggccaggaagagaagttctccgggcgcagggcgcagcccagctccggggaccctctgggcctcccgcgtgccggccgggatgaagcgcgctttgcaccggacccgggattcgggggcgggggctggcgctggcagcgtcagacgctgcttcatttcccctcgaccctggggaggacagcaacaagtcctgccccagccatttcatcaccctgctagcacgtgcagattccgggccctcggagcccggcgcggacctcgccttgcctcgcgcttccctttgcacgtcccgtgccatcccaagagtttgcgtggccctgggtgggcgcctggctcccggcgaaacgcctggggcgcgccgcgtgggtgcacggtgtcctctcccagtagctcccggctgcgggggcacatgcacttacctgtattctgcagggacaggcggcctttctgctgggagctcctgtcttggggaccctcgggtgggttggtggcgtcggtcccccgcgccgggtcaaaggtggccaacaccaaagccagggtcatgaactggcccagccgctcggcacacatggttcttggtattaacctcccgtcgggagacctggatcctttgtgctcccctcttcctcctcctcctcttcctccttcgccgcttcccctcctcctcccactcttcctttttgctcgccttttccctcctcctcgcggccgcggctcggatagaggttacccagcgccctcccgtagctctccggagagcatgtgaccaggccgttagcagcgccgcgagtgcccggcaatggcagggatggtgcctcaaatatccctggaagctctggtgtcacttgaatgaaggagtcgagcaggtgttgtcccggcggctggaccaatccgagaccccggcccttttgacaacacggccgggaggcggggcctgcgctcaactactacaggaggaagccgagcgccgctgggagcgccggacaaagttgccgacctggcggcggccacgcgtttgcgtgcgtgtgtatgagtgtgtgtgagcgcggccggagatgcgtgcgcgtgtgcgggtgctccagggcaatggtcgaaaggactgtacaatataagagcgaatccaagctccagttgctgttaaagggggacggtgtgctctgggacagtgtccctggggcccctggctcgcgtcacacccacatcgggttgggaaagtttcctctttccgccgtttggaattcagtgagattc

SEQ ID NO: 231636 - DNA, 971 bp, Homo sapiens
  chr5:172756195-172757166
  hyper
aaggcagccctgagtcagcccgccgcggagcatcgcgtgcccggaggccagagcttgaaaggcaactttacgcgtctccaaacacactcctgcattttctcaaagcgctgctcgccaccccgctccgggttcccttttactctccagtcatccgatggaagtggtgagaacaaaaacaaagacaaaaaagctaaatccggggaagttatctccatctcctcccttttcttgttcggccccctccccaagaaccgccgggtcgggatagcccccggctactttctcacccggcccgtggagggaaggagaaagttgggcgccgcttggagcgcctcttcccctgctgtgtgtgtacgtgtgcacgctcacgtctcccccgcgccggggccggggacaggaactgctctcggtcccgtcaccccacggcgcagctcggggggctcgcagggctgggggagggcggggacacgagcgccgcgcccaagcgccccagggcacgcacccggcgttggcgcgcactcgcccctccccccgtccccaccctcctcctggagaacaggtgagccccggtaccagctctcgatcccccacccccgccccgcgccccgcccgcgccctctgcggtaatgcgcctgggaagtttcatcacccactgcccaggcgacgcggccctgggtctccgcggcggggcgcactgcccgcctggttggggccgccatgtgacacggctgggggagggggcgaggagacacgcgggcaggtcatcttttggccggcgcttgacttccaaagctttcctttcccgtgtcccggctgcacgcgggagtggggaaggcggaggcggggggccaggatggccacggctggccgcagctatccggcgtgtcgagctctcctgagtcggaaggaaggagaggagggggtggggagggcgtcttcagagtgggcttcccctgcgctggagcgccagg

SEQ ID NO: 231637 - DNA, 72 bp, Homo sapiens; identical to SEQ ID NO: 200169
  chr5:173043700-173043772
  hyper

SEQ ID NO: 231638 - DNA, 360 bp, Homo sapiens
  chr5:173314918-173315278
  hyper
cttctcattcatccgcggtttcacgggccgccacttcgatctccaacaccttgaccgtatgccttcgtgagcgaggaatccgttctccttgacacgtccctattgctcctcctgcaaagcccagttagggaagagaaatatcaaaggagtcccttgcccacacaaaagatggcgacctgctgcgctcactctgggtgggggaagcgggttccaggcgccgggcctcactaggcgaggcgcagacggaagaggcgtctctggaggtaacttttcgaccttcctgggagtagctctgaagcgagggggcgtggcctcgcctgagttctaacagatgattggtcttccggcaggtaggtgggg

SEQ ID NO: 231639 - DNA, 192 bp, Homo sapiens; identical to SEQ ID NO: 200170
  chr5:173345561-173345753
  hyper

SEQ ID NO: 231640 - DNA, 545 bp, Homo sapiens
  chr5:173738804-173739349
  hyper
tgcgctgcactggacgctgggaagactttcaccgcagagcgggggctgctggaggggcgggtgggctgcggcccggcggcggcggatgcctgtctctgccgaagccgaaggaaggctgcgtgggcagatcttccagctaggcccagagggacggccgacattcaacccgccagtcaaaggagggaagggctggcggcaggagcagctcaggaggcagacccgggcgcgcgggggcgcgggggctcgggggcctgtgagggatccccggacgggcagctgcggggtgcgggccgggctgcaccgcgacaaaggcggcccagcggcggcatcggaggacgcacgctgccccctggtggccaggccgctccccgcaaacgcgagctcctttgttttgcggtcccggcttctgcggcccaggcttgctggagagagtctgaagccccggcttccagagcgggtggccacgatgccagggccgcgcagggaacctggtgagccgagggtcgagtcccagccctgcagctcgctggcggcaagggccggct

SEQ ID NO: 231641 - DNA, 512 bp, Homo sapiens
  chr5:174115356-174115868
  hyper
gaagggatgccctaccctcccgaaagaaataaaaatgtgatcactctcggcaccgtagtctctgatgagaacatttaatcaattagcattgccgttgccaaaacttgcttcccaccgagcccaaaagccgccggcggcacatcccagcggcctccctcctcccgggctgggattcgcctctgcaagaaacgtcatgttttctctcccagacatcgttccgggagccccagatgtaaaatcagaggtctcttatctggcattattgatctctgtgctaataaaatgtcagtccccaagggaaaacttaaaaaaagaatcgtgctgtcatctctgttcctgcggggacaggcacccatttgtcggctcacttcattgctccgtcggccgggctactatttcagggctccctggaagagtaagtccctgaaatgggcagggacacgctttctatttcccctttcacaggggctctctggaattcaaggatgaacgaatgggaagaaatcaacagg

SEQ ID NO: 231642 - DNA, 1079 bp, Homo sapiens
  chr5:174119516-174120595
  hyper
tcctcctgtgcagacgaggaaactgagtcacacgagaggaagcaattgctgatagttcacagttgccacgccctcctcatgcctttacagacatcccaggcctttgatcaaactagggagaggttagaagaaaggcgagacgggcctcagaagaatttggatctgttgaaaaaggattttaggacaagaacgaaacaagacgcgttttcatgggaacgcaaacccagtaacttctcagagccagggcttcgcagagaaactgcatcaaaaggaaaagagtctggtcccaacctttatttctcccaaggcatgaaactcctgatttcaaaccacttctctttgcctctgaaagaaaacaagaaaaagatggggctgtgtagttcttccaacagtgaaaaaaagaaagaaaagagagaagaagaaaactgtttcgggtttcgaaacagaaagggcctccttcccctttatcgataattttgaaagggtcgctgtaagacactgactaatgacacgtgacctttggattctccacgaggcagcaggcgcgggccccgagcccagcggggacccctctgccagttaggggtcactctctccattcaacgctttattagccccctcaagtctcagggcgaagtcctgctgctttgagacgtttacagctttgattgaggaaagctattcagggctggggcgaggatctgtttgttttcaggaggaagcctctgtgagcctgccccctcccccctgtgtttccagagttgctggagagataaaagccatacctccttttgaccttcattggacagtaggagccccgactcagcgtggaataataaaggcatatcatgctgcataaattatcccgtgattgacgctctttcttccagctctgacttaaaggggggtgtcgggggctggggcagggaatggggaggggttcggtttatttactcaagcacctactgtgtgctgctgatggggaacttcctaggcaagtcattgtcgcatttcatccctacaaacagtcccaggaggtaaatattatttatccctgtgatgtgcgtgaggaaatggca

SEQ ID NO: 231643 - DNA, 32 bp, Homo sapiens
  chr5:174147150-174147182
  hyper
acccagcaaggtgacggcggaaaacggtgaga

SEQ ID NO: 231644 - DNA, 1102 bp, Homo sapiens
  chr5:174147429-174148531
  hyper
tctctgcgcctggacgacttcatctgtggaatggggagaaagctcaggctttagggggccttcagtaatctgcatcgtgcttttggcaaaagctccttctctccagccccggctcaaacccgggctcggtcctgactccggaccttagggggcgggaacaggagaacaggaaagaacaagcttgggcttgcagagcttcgcaagcaagacgtttgtacccccaaaacctccagctgtgaccctgaatatctatctacccgacttcctgggctgtgtaactcggaaagtgatctctctagacaccagaggaccgaaccttccccattctcactctgcaacaagccagtaagaaaaatgagctcagagacgagtagccttttgcccgaagtcacacagccaatgttttggggggtgggtgagcggtgttgtggaattcctggcggatgttggcgcccgcgggtctgcctgcttctgatacccgggctcggtagaataggccgctaacgagctcccattaggaggaattgtcactcctctgggagcgagcttgtcccattagggcgaattgtcattcctcctggagcgaggttgtcccggctccgcgcaggctgagtgctggggccgagagcaattaacgcggctccggcgcgggcagccgcctctgccccgggcagcgggggcggggcagggcgggggcggggcgcccggcgcggctggagccggtcacccggcgcagccccttcccccggagcccgcctttcatctccccgcgcctggcgcctgcccgaagcccaggcccgtctacagcccccttcgctgcccctcccccgcccccttctagccgctggggttacaaactagccttcggccctcggggttacaaacgctgcgttctgcgcgcagtgctccacagtttgcaaggagtgttttctccttgggactcgcagcgcgcgtacgcggttgcttcaagaaggggcctggcgggtgtaacgcgccccggggagcgcgggaaggtgcagggttgaggatctacgctcagaggcctcagccgcgcgggagggattcctgtgtctcccacttctacctgcgcgaccttgggcag

SEQ ID NO: 231645 - DNA, 217 bp, Homo sapiens
  chr5:174149051-174149268
  hyper
tttggagataaaaaaaaaaacgctggctggaggaagcaatttagagtgcccaaggtcactccgccaggaaaaggtgaataaaacgttctgaaaacgcagccaaagttggataaaatgcagacttggggctttccataaagggctagcgttgtgttgcggttccagccctttcccagcagaagtgagcccctttcccgatttgtctccacctcagcag

SEQ ID NO: 231646 - DNA, 2091 bp, Homo sapiens
  chr5:174150698-174152789
  hyper
ccccattaccctccgaggcaaacactggcattcaaacacgcacgacaaacacaggctcaaacaaactcatgaatgcacacttgcactgtcttgagaaaaaggtcggatccggatcgcgctcagaaaggaggttcaggagacaagtacagagatttcaactttctaaaagtgcgctggatttgctttctagtgagagagatggggacaactgatttaaattcttcactccgaaccatttgggagagaggcactcctgaccacttctcgggctccttccggcccctcttttccaggggaaagagttgtaataataacagtgggcgcttttgagcgctggctagtggcgagttactcttctaagtgcatacatttctttcacagggatactggcctgtgagtttcagcaccgactttctggaactgtaaagtaagccaattttgacgcatagtaggggcttcgtaaatgtttctgcaatgctgtttgcgaatcttgaacttattctggcggtagagggagagtgggatgggcgcagggtcccttttaaagaagggtcaaaagagagaagaaatgggactcggcgaacttccgctttaaataatcgctcttaattaggtctcgggcttttcagtttcggcgtgattataacccttcagggatcgcctaataacaactctgctgactgctcctgtaattaactcctaatttatttcaaacaggaaaaaaaaaaaaaaaaaaaaaaaggagggggggcagccccttcgggaagagccaatcaggggcgagcgtctctggcgtcagcgccaggcccggcgcggattggcggcgcgcgtctcccacttcccctcggaggaaaggctcagctcccagcgcgcccctcccgtctccgcagcaaaaaagtttgagtcgccgctgccgggttgccagcggagtcgcgcgtcgggagctacgtagggcagagaagtcatggcttctccgtccaaaggcaatgacttgttttcgcccgacgaggagggcccagcagtggtggccggaccaggcccggggcctgggggcgccgagggggccgcggaggagcgccgcgtcaaggtctccagcctgcccttcagcgtggaggcgctcatgtccgacaagaagccgcccaaggaggcgtccccgctgccggccgaaagcgcctcggccggggccaccctgcggccactgctgctgtcggggcacggcgctcgggaagcgcacagccccgggccgctggtgaagcccttcgagaccgcctcggtcaagtcggaaaattcagaagatggagcggcgtggatgcaggaacccggccgatattcgccgccgccaagtgagtgcgcgccggggcaggagtaggaggtagcgcggggtactggagggagcggggggcgggtgttccagggctgagggtaccgagacccttctgcgtgcgctacactcccgggaaagcaagcccagggcctctggactcctgggtgcccggggcgttcggcgcgcccagtgcgccgtccgcatccaagacaccctctgggtaataaccgcgctgtgtgtgtctgagactccctcgacatacagattgttttttcaagagcgaaccccagctgggtttacggggtcgctcggtggtccgtttctacagccctcggccctgcgctctggccacttggcttgtttttgtttcactgttccccggagtctctgcctggggagtgaaggagttggatccatgttcagtgagcacttggatgtaccaggaacgagacaggttcaaaactcaaccctgagagttgtgcccccattttaaagatgagctaactgggcttagccagacattgaggagaaaccattttctttcgtgagtcccgcgggtgtcgaagccggatcccacgaagggatggtggcaccagggatggtggcatcagagtctggtgcggggaggaaatgtctctctgtggtctccgcagccagcacctccccggcaaggttctgagcttcgccgggagcgggctggggccagaagcgcacgggctcttcttggctcacagtaataattaaccgcattccagcagggcttgaga

SEQ ID NO: 231647 - DNA, 44 bp, Homo sapiens
  chr5:174158416-174158460
  hyper
aaggagatggactccgagcaaacactcttcggtttgaagtggga

SEQ ID NO: 231648 - DNA, 1135 bp, Homo sapiens
  chr5:174158666-174159801
  hyper
cagatgggaggctccggtgactcggaacagaggcagaaaggatgcgaggacttcttgctgcgtaaacagcgcggcgggcagattggcacctggcacctaccaggactggcgcttcgtcccgcgtttccattgtgcccgcacgcactttgaaagtgggcgccggaaactccgtttttcttatggggccggggtcgggcaacgtggttcagaggtttcacaagctccagcacagaagtgatccaaaccgaggggtcggctcgaagtcggaggctgattttgtcttgctcagtcgctccgccggagctgagccgctggaacgacccaaacctacctgaaagcgcgtctctgcagtcccgctggacttctccggctcgaactcctaatctcagcccggaatccagccatattcatttaaggattgcgttttccaaaggccaaagcctttcccggtttcgtcatcagccgccaggttgggtccctaattagcctgtccaccgagcttccttcccggcgccgcttggaccccgcagccccgggcgatctcagcccgggtggggaatccggagacgccggctccgggttaagactctgctcgtccccaggaggacggggtcgcgatccagagtgcgatccggagaaaagggctgcatcttgcgtggctggcgggttagactggaatccgtctggggaactgcgcaccatccccatcgctccagacgccgaaacaaaacctgaggctcggagaggggaaaaagagttgttcaggctcgaacatacgcatcccagcctcataggtggatggggttaccgagctgagaaccaagccggaggtccgcgaagccgggccgcccccttgctctgggcctcccttcaagcctgcagtctggggatgggttccgagtcaccgcggtccgggcctcggtcaggcttggtcgggcacacagggcgtttcagaggccagattgacaacctgtggcggcaaaaggactctccctcaccagggacccgcgaaggcgcgcattgcaagatgttagcgtgcgggctttagatatccttgcgtccgatgccagaagcctggcacgcaaatttacccacccttccatactttcagtgctttgttcgaaacttttcaaga

SEQ ID NO: 231649 - DNA, 603 bp, Homo sapiens
  chr5:174162402-174163005
  hyper
cgccaggagcggtgcgcccagcgcagggggctcctagtcacctcgacccttccggcgcccttccctccttagctgcacctggcaagccagcaagggagtgacccttgcgcaggaagggggcgcgtcacccggtttccccatagaaccgtgggcgtcgcaggcgagaagggaagcgtccaggcgctcggccccttccgccccgcccgctgccggccgcccgtttgatgtcgcgggcccggcaggaatgcggccgggttatcaatcacccagctggatcccgaaggtctctgcctaatcacatttaattgctcgtggaggcccactctcgccccgggccggccgccgcgctcaattactccccaaatacctgccatcaataaatacgcactgacaccggcccggcccgctccaccggcacggaagatcgcagccgaccaggcgccctcctccctgccccttgtcccccatcattaaacttacacctcgacgcccaaagaagcaagccgagcagataataacagccccctgtaactgagcgcttcccaagtgccagacactgttgctcggcgatttacaccaatcaactcacgggtgctagtgagt

SEQ ID NO: 231650 - DNA, 787 bp, Homo sapiens
  chr5:174178090-174178877
  hyper
tcctgcccccttccgaatcacagactccccgcagtcagagatggcgaagcctccaccgggtcacctcggccggcccccgggctcccccgaccccgccctggcagcgccccccgccgcgagctcccggggcggaggagccggctcggctttgattagcaacacttgcgggggccgcggcgcaccctgacagcccggcagctccgcgccaaaatggatgggtctcgggcggcgagggcacggatacaaatgcgccgccgcgttctcaggtacacaaatgcggcctcgggcgggcgctggttcccaggcgcacggaggcggcggccccttcaactcggggcgcgggcgggagcggaacccgcgttaattactgtacgtttccactgtaaagagtgtcagccggggagcggggccgccgcgcctgcccggccccggcgcacaaaagcttcatatattctgaatgaaggcgaatcgcagcctcggcctccttgaaaagagccgtgagggagacttaattctctccctttcagctgtgctcagactgtgaaatccacacaatcgcgcccttctctttaaagggagggagaagaggggccgcggccgcgcgccccgccatcagctgcgcgcacagagggagagttcactccggggacaagggcggcgcgaccggcccggggctcttgggcggccgcgtttcccctcccaccggctgcagcccccttctcccgcggcactttccggcgtcttttgtggggcgagtcctggcgagggtgtccgccgtcaggtgcac

SEQ ID NO: 231651 - DNA, 65 bp, Homo sapiens
  chr5:174220996-174221061
  hyper
agggactataaaagagaagtttgaggctcgtggggtgggggacgggggcacgtggaggcagataa

SEQ ID NO: 231652 - DNA, 41 bp, Homo sapiens
  chr5:174870822-174870863
  hyper
ttcggctcccggtgcgcaaaaatcgccggggtgcgtttggg

SEQ ID NO: 231653 - DNA, 873 bp, Homo sapiens
  chr5:174871084-174871957
  hyper
acagagcagggccccgcgcctccccgcaggcactgcccgcgacctctcaggagcctgtggcaatgcgaggcagcgagccgagctggcaccagcaagcgcacaggccggcggggttcccgcggggcacagcccaccccgcccgcgcgtcccctcccctgccctgggggcggtcctcgcttgacaggcagagttgcgggcgacagccgcacgtggtccccctggatggttctgcgggcgaggtgggcggaggacgccccggtgagtgcttgccctccctggttacctcgccagtctccggatccccgcgcagcacgcgcagggcccgcgaggcaaatccaatgtcagaacctcaagtaagcttgagtcccctgaaagcaaagctcagccccgacatccagcgcctcttggggtcaacccctagccggacccaaagccctaagcgagcgggagcaccccccattccccgcacaccaactcctagaacggccggcggacgtccgacctgcgttgtctccaagtgtcccctaactagggttggagatgcccgtgggcgcctgtactcaccgctcgcagggagggcgcggcgcagctgggatccgggccagcgcgcgccgctgcgccccgaggggactcactccttccccgcccaggtggcgggcgcgtcccggctgcggtcaacgccggactccagccggtgccccgcacctcccgagcgccccaaccccagcgccgcgcgctccgtgtgcccggggcgccctctgccggcggctgcgacttcccgagcgcccgctgtgccctcgcgggcaccaacctcactcacaagggttccagcgaccgccagggacccgcgccccgactcgctcttcccggtcc

SEQ ID NO: 231654 - DNA, 41 bp, Homo sapiens
  chr5:175084696-175084737
  hyper
tctgcacaggtggcggttgcccggtcaagggcgggctcaca

SEQ ID NO: 231655 - DNA, 82 bp, Homo sapiens
  chr5:175085637-175085719
  hyper
gctgctggggaggaggcttctatgtctcaggaaaccagaacgacctgccttcatcccgctgggctgccgcccgctgccggat

SEQ ID NO: 231656 - DNA, 228 bp, Homo sapiens; identical to SEQ ID NO: 200182
  chr5:175200304-175200532
  hyper

SEQ ID NO: 231657 - DNA, 1412 bp, Homo sapiens
  chr5:175223589-175225001
  hyper
gggctctgtgccctgcagctcggcaggcattcgaggcggacagaaacggggcttggcgccccccgcgtgcacgtgtgctagcccaggcaggagggagcgcctcggcggaggagtcaaggaagagggggagggagaaacgcgccagaacctcggcccgggcgccctcgtcggccgcggaggagctgcagcctccaacaggttcgtagaacgcgcgctcgctccctgtggctgagccgccctcctccgcgggagcggttggcggagagaccccggccacaggccccgcgctcgagagcttcctagaggcggcttcctccggcctctccccctccctggagctctcagccgccggcggctcttccggggcgaggcagagggcgcctcgggcttctcgctccagcaccatctcggggacagctcccgcgccgcaccgggtccctatcgggtcagcactgcagcggcggacagcggcggccgggcgggctcctccgcaccctccgccctggttccgcgcggctgctaaggaccgtccctcgcccccgcgggccgctcccaacgctagcaccgcggcggcggacagctctctccggcggcaccgcgaaccgcgaacaaagccgcgggtctggggcccccagcgcgcctaggggtggcgtgaggccgcatcgatcgggggatttcagcttctcccagagaggtgtcaccggcgagctaggcgggggcctagcacagccgcgcgtctccggcttgggtccgccgcccgccgaggcctggccgtgcaatggcggggcccagctaagagtgggcaagaggtagaggggaaacaggcacagaacggtcccggctccgctaggcgggctgggcctaggctgaggtcccggcggggaggaaggagtgcgccgccccgtcttccctccagacccccaccccatcccagctcagaatcgcggacttccaagagccctgcacagaagcccgcggctggcagctgcaatcactgactccggctgtccccggaacatccctagaaagtgtgaggctgagtttccgtagggggagggggctgagaagccgcggggaagcctcacgaacgggacagctccaggctccctctctccctcactccccgggttccgcccccacctccagagaaatcccagacggcagagaaggcaggggggagggggcgacccagacagcaggttgcgaactcggcttagacctgggaggttgcaattagcaagaaaaaaggttgagggcgtctgtgaagccgggaggttcccaaacagggaagccagttccgcggcaggaaagcatacgtggaagagaaaccttttctctgagagctgaggctgggagggccctcggatcacgtgacactctagatcactgattgtctccgcggaagacaaggc

SEQ ID NO: 231658 - DNA, 411 bp, Homo sapiens
  chr5:175298495-175298906
  hyper
tttcccatctggaaggggagcggtagaacgtcagggcccggctgaggggcgtgattggagggcgccttcggcagccgcccgcggcagaagccgcggctccagctcgcctggcggaattgcacgcggcggcgggagctggaatagcagaaggaaccacctcgtggagtcgggccggagccctgcagtggctcagacggttgcagggaccgccaggtcggtgctggccgagggccgggagggcggagctgggctgtgggcaacagggtcccggctctcgcctcgaggccttggggcagctcgggaagctggggagcacggctttcggggggacagctccccaaggctgcctgggcaccggatggggactgagaggcggtaaaggggacactcccgggtgcgctctccgtggtg

SEQ ID NO: 231659 - DNA, 98 bp, Homo sapiens
  chr5:175299806-175299904
  hyper
tagcccagacttgaatcataaaaacagaaaaacggccataaggacaaccactgcaggttacccgagtcagcctgtcagatggcggggcccagtcccga

SEQ ID NO: 231660 - DNA, 53 bp, Homo sapiens
  chr5:175300264-175300317
  hyper
acacacacacacaccctgcacacacgcacgcactcacacgatgtctaagtcca

SEQ ID NO: 231661 - DNA, 32 bp, Homo sapiens
  chr5:175788708-175788740
  hyper
gccattgtgagagcggcggcgatttcgaaggt

SEQ ID NO: 231662 - DNA, 154 bp, Homo sapiens
  chr5:175792314-175792468
  hyper
cacagcctctccttcctccaccctgcacctggcagggggaccggaggtccccgcgcgccggccagcgccccaccacccacgccgccgggtcccgggcggcctgccgtgacagcggcagtgcattgtggggcttgtagtgcgggactgggtctgg

SEQ ID NO: 231663 - DNA, 378 bp, Homo sapiens
  chr5:175875017-175875395
  hyper
gttagagagcagccgaaatcagccgaatgccattcgggatgctccggagcttctcgaggcacattcgggccctctcggctctgcaagactgcactggaatcttaggtctcctttcgtcgcctaatcttagcagatcctttcgtcgcctaaatggtaagagcgacttgtaccgacagtccctcggcaatttccggaagtgttcgggataggcccgagcgtggcgccctctggcggcggccagaggtggcggggggcggggggaggttagtgggccagcgcgcgcagacgcagttgcgcgccggcggccgttcagaccggatgtggttgtggctgaggtcagttccggcgggtgacggtgcggacgggtcaggagcgtag

SEQ ID NO: 231664 - DNA, 246 bp, Homo sapiens; identical to SEQ ID NO: 200184
  chr5:175969792-175970038
  hyper

SEQ ID NO: 231665 - DNA, 434 bp, Homo sapiens
  chr5:176023872-176024306
  hyper
cggaacaggccgggcggacgcttggcggcgccatctgggggcgcggtgcgcaccgagcccgaacggccggggccggcacgggcggcgggcggcggcgcgggcgccccttggcggccgtgctcctcgatctgtcgctccagatgcttctggatggccatgcccagcacctccacctccatggcggcgccgtatacctcccacgtcatgcccttctcgtcccagctcacgtctcgcacgggctcagccggctccgggggcgctacagcggccgccagcgctgagccgggccgcacccgcacttcggggaaggcgggcggcgcggcggcttgaggtgtcatgggcccagtggccacggagcgcgtctcggcggcgcccagcgacacctgcaggcccgcatctcggcgcgagggcgggctgggcgcgcgcggcgccgc

SEQ ID NO: 231666 - DNA, 93 bp, Homo sapiens
  chr5:176038451-176038544
  hyper
atccgtgggactggcgtctccaggcagcacgccaggcaaggagaaaacctcagcgtgtcggaccggtttcagaaccacggacagcaccacacc

SEQ ID NO: 231667 - DNA, 316 bp, Homo sapiens
  chr5:176046196-176046512
  hyper
gggtcttgcgcaggcgagtttgggggcctctgcggcatagccacgccaagagccagtccgggtgggggcggggcctctgcgggacggggcggggcctcggtgcaagcgcggagagagggcctctgcggcaagagggcaggggcggggcctcgcgcagggactgcctatgccaataaaggcagcgcatggggggcggtgcctctgcgcggagccagcagtatctccgcccccatctttctcactctgaggcggtgttgggggccccctagtgctgatcctgatccgctcaaggctcccgggcggcatcccagacctc

SEQ ID NO: 231668 - DNA, 47 bp, Homo sapiens
  chr5:176074452-176074499
  hyper
ggtccctgaggggcgggcggggcccgaccggcgctctgtgtggccga

SEQ ID NO: 231669 - DNA, 44 bp, Homo sapiens; identical to SEQ ID NO: 200187
  chr5:176074862-176074906
  hyper

SEQ ID NO: 231670 - DNA, 368 bp, Homo sapiens
  chr5:176107132-176107500
  hyper
cccgccccgcaccccgtaccccgcagcctgtccgtccatccgccccgcttcacttcgctgtcccctgtcggggttcgagtcgcagcctccagcctcaacccgcacctcccgccctgcagctcaactctcgcctccgctgcaatttattactggaggccgcagaaccagcggcgtggagtgcgcctcccgggagccgccgctgtcggagaaaggcacccacccgcctgggccggctcccgggcgcggggcggtgtctcagggaggcgtctcagccgagctgcagggcgaggggagcgagccgggtcccgggggaaggcatccggtcagggcctcgcccacccggatggctcctgcgccacggggcctga

SEQ ID NO: 231671 - DNA, 167 bp, Homo sapiens
  chr5:176170552-176170719
  hyper
tccctgcagaccgcgagcggagcccccgcacccccggggctggcccctggcctcccgccccagcccggccggcggcccctccctgctccgctgtccgccttgggtacagaagcggcgagtggcccctttccaggaggcctgtttaccagcacgacaacggcaaatta

SEQ ID NO: 231672 - DNA, 980 bp, Homo sapiens
  chr5:176236414-176237394
  hyper
ttatcgaccggccccgtaggcgtttgagtttgcgaccctgccctcaccctgctcattcccctcccgacccagactaggaccctctctttttccgatcactccccccaggcacaccgcacgcggctgtcatttcctttctccttcaaggcagccctctgtttattttaacccgattagggaatgggggtggggcacaggagactccagcagcggtcactgctggaggctccaggagacgacgtgacttgaccaaggtcacagagctggaaggtgaagtcgcctggaccctacccccggtctccctagctgccaaagcccagctcgttcctttacacccacgtcgcgggcgccgtgcgctctcggggctcaaacaccgcgcgcccagtcgggtgtgctgcgcctgaaggttgttttccttcggcgaacggcgccgaggggttagggaaaccttgggtcatggtgtgaggcgcgcccctggaatccaccagcctgcgaggctgggactgcgggtgtccccgagtctggcctgccagctctggtggccagggcacctctgcgcgcgggccagggccccggggctctcccgcagtcccctaaccaagccgcgggctggcagcgtaccgcggcgcccggacgaccccggagcgcggccgcgaggaaagggcgggggagaggactgcagcggaacctgcccggggcacccctgccctgggcggctctccgcaggctggcgccgcgccggggtcgccgcagccccgggcccctcccgggccacctgtgcgcagactggcgggcccgcgagagcccggatccggagcaccgatccactccgggtttcagactcctgcccctgtccctggagaccccgcggggcggtgggaggcctccacgcccaccaccccaagcccctccctgggggagcctcaggcatcgcccagagggattcccggtgctgggggtggcccgcgcgcgctgcgcgg

SEQ ID NO: 231673 - DNA, 187 bp, Homo sapiens
  chr5:176239885-176240072
  hyper
caggctggccctgccgtgacccgggctcctcccgcgctgccttttgcctccgttgcaacagcctccggtgaaaaatgtgtctgtgagccgctgagggagggatggccagcgggcagcagggggcgccgggggccagcgcgactgactgcagccgcttgctccccaggccacgcgcccaccctctgtt

SEQ ID NO: 231674 - DNA, 91 bp, Homo sapiens
  chr5:176245002-176245093
  hyper
ctggctgagcgctcggctgccgccccgggagcgggcgtccagcctccgggcaccgccgcgcggccgcctccgccccgcctccgtgctgtag

SEQ ID NO: 231675 - DNA, 74 bp, Homo sapiens
  chr5:176264796-176264870
  hyper
cgctccacagatagcggtcctggacgtggcacgctttcagcaccgtggacagccccaggcgctccacagaggct

SEQ ID NO: 231676 - DNA, 45 bp, Homo sapiens
  chr5:176433877-176433922
  hyper
ctcgcaccttgcgcggtctcagttgcttgcgctttgggggaaagc

SEQ ID NO: 231677 - DNA, 330 bp, Homo sapiens
  chr5:176449527-176449857
  hyper
gctgcggaatcagcgacaggtttccgaatccacggcacacgctctgaggtaccagaggtagcaaagcaaaataagcgcggggtcccgcacggcagcgcgggtgcagcgcccaaacctcgcgagatttgttggctgggccaagtaccacccaccaaatctcgcgatacctaggcgcctgagaggctctctaccggtgagggtttgcggggaagatggagtatcccgcgccggccacggtgcaggccgcggacggcggagcggccgggccttacagcagctcggagttgctggagggccaggagccggacggggtgcgctttgaccgcgaga

SEQ ID NO: 231678 - DNA, 90 bp, Homo sapiens
  chr5:176559896-176559986
  hyper
ctgcccgcggcacccgggacgatccagcctctgcctcgcgggcgtcgagcctgagacaggagggagccctggggctgcacaggcttggct

SEQ ID NO: 231679 - DNA, 294 bp, Homo sapiens; identical to SEQ ID NO: 200189
  chr5:176738658-176738952
  hyper

SEQ ID NO: 231680 - DNA, 394 bp, Homo sapiens
  chr5:176739158-176739552
  hyper
gccggctcattggcgtctttgatctcagcttccagccccgtgctagtgactagcccccaacatagcacggcgctctgggggcctggtggtcccctgaaagcgccgggcccagccgctgcacgtgggtgccgcgggggcggggcctccggccgccgctcgcccattcgcacatggcttctcaaggatcgctgttgtcatcctcggggcggggtcggggagcctctgatgccctattggctggcgctctgccccgccctctcccgccgctgatccacacgttcgggcgggaaaagaagcaggtttcaaatttgaaaacccaagcgatggggcggggttgagaggggagctgggcctcaatgcgcaggcgccggcggaggggcggcggacccggctc

SEQ ID NO: 231681 - DNA, 93 bp, Homo sapiens
  chr5:176784982-176785075
  hyper
tggtgggcagcccccgcggcggggacccctgatcggcagcggcatgccagggaagcccaagcacctgggcgtccccaacgggcgcatggtgag

SEQ ID NO: 231682 - DNA, 210 bp, Homo sapiens
  chr5:176853271-176853481
  hyper
ccacaccttcaggcgacgacccaatcaaaatgcagtacttgagatgacggacgtcttcttcacccaatcacatattcggcctcctgggcgtgccccagagtacccacctccattgtcccggctgagggctcggccctaattggcagtttggtatcctacgaaagcctagaaattcgaacctaggggctgaaccccgccctcagaccaacc

SEQ ID NO: 231683 - DNA, 191 bp, Homo sapiens
  chr5:176873632-176873823
  hyper
cgggctggagaaccgggtctcggcgccgcaggtgggtgaccgtcctccccctccttccctccgggggcagcctcctcgcggcgtgtggctgggggtgcggggccctctgccggctgccgcgcgcgcgcacgccgggctcagcacccgccgtgtacgcgcccgtgcgcgcgccccgcgcctccagcccagcg

SEQ ID NO: 231684 - DNA, 124 bp, Homo sapiens
  chr5:176882534-176882658
  hyper
ggaagtgggcgggcgttggagggctcgctgcttaccctcagggcttccatccgcagcctccgggagaacacgggcggcggcgggctcgggttcgggctagggctggggcgcgggcggcccctgg

SEQ ID NO: 231685 - DNA, 267 bp, Homo sapiens
  chr5:176943952-176944219
  hyper
ctgcacgcatgcgcgccacggcgaaaccccgcctcatccttgcgtgagacccaatccgatgtgaagaggcgaacgacggcgcgtaggaacgacctcggagttccggatcgcgcagagggacaaatttgttccggagatactatcgcacggcgaggcatggacgctttcatgggtggttacgcgacagttgccaggaccgagggcgaaaccggctgcaaggcattgtgggacattggaggacttggaatatgcgctagaaggctcaat

SEQ ID NO: 231686 - DNA, 126 bp, Homo sapiens
  chr5:176944482-176944608
  hyper
cactggtggggcacgcatcagatacggatggcagtggttttgaagtgggaggccctgtataaatgtaaacggttattactgtaaatgctctaacagagctgcctggggggcgcttccagggaagcg

SEQ ID NO: 231687 - DNA, 50 bp, Homo sapiens; identical to SEQ ID NO: 200191
  chr5:177019030-177019080
  hyper

SEQ ID NO: 231688 - DNA, 800 bp, Homo sapiens
  chr5:177411423-177412223
  hyper
gacccaagagagctcgtcccacgacggagcaggtccctttgcatcccgcggggccgccaggtgcaattttcgctgggccgacggcgcggagatgggccagagtccggccatccagaagtgcctggagcgcacagcaaggccctgccctcggctccgtgaaggtgagggggtaaagtcggcccggagtccccgggggtgcaggaggggccccgcgggttccagcagaccctcgacggaacgttccaggcaggcgagatctcgcacagaatctgcccttttaaaggctcggctttgtcctcgttaaacttgcgtctggcaacgcgaccgctgcggctcccgagcaagattagagggtttccgctcgcaggggcgcgcccggggaccgcgcctccccgcctggtctcggcgccccggcccaggggtcttcagtggtgaggggcgcccagatcgctgcatcccctggagctctgcgcccggccgagccactcagagctcccgccccgcacacccacttcgagctccaagtccttccttttctatactccaagttggatcctgctgggaaggaagggcccttcctgagagaccagggattgcgatttcccagcacaaagtcgaattcatgacttcagcttcaacggggctgcattctccccttggcaggaatgggatggagcgagggtgaagctgctggaaagacactcgttttatttttttaatcgtaaacggggcaacttccaactctgccagttttaagcttctagagtatctcctcggcggagcgcggtggctcacgcctg

SEQ ID NO: 231689 - DNA, 565 bp, Homo sapiens
  chr5:177540465-177541030
  hyper
cccgccccccacatccgggggccggggccgggctgtgggcttgccgcgcgccggtgagtcaggccgggttttccctccgcctttggggcaggcgatcgagcgccgcggagcgcgtccctccctcgccaatccggctccggcgccggcgcccgcccgcgttttcccggcgcctgccgctccgccgctccgacccggcacgcagtcccggcccgagccgacgccttgcaggagggttcaaatccgcgcgggggagctgcgacgcgcaagggctgcggagccgcgggccggcgagcgcgtcgccaccatggtaagtggggcgcgcgaggggctggggacccgggctggactcggggggtggggaggggtggggcgggtcgccaaggtcttgttttcgggcgtccttggcaaagctgctgtcccgctggccgaggctcccgtctgagagatgggcgggggtggcaaggtgcggcgtgcgcccaggtgtcccctgctcccggtcaccgaggcaccggatcggggaccgaccccgatgctccgctggaggggcaggcggcaggctaccttg

SEQ ID NO: 231690 - DNA, 99 bp, Homo sapiens
  chr5:177543581-177543680
  hyper
ctgctggacgtgaccgtctgcaccgtgtcctctaacatgggctctctgtgctgctgggtggggctgacatgtggcacaccgtggcgtgtgtggttgtat

SEQ ID NO: 231691 - DNA, 59 bp, Homo sapiens
  chr5:177558239-177558298
  hyper
gtcggccctgggccgggagctggagtcccagactcataggtcccggcccagcccccgaa

SEQ ID NO: 231692 - DNA, 257 bp, Homo sapiens
  chr5:177580326-177580583
  hyper
ggtattgtcgtaccggtattgtaccaaagggactttaccgactgcttgattggcttctgtatatggggctaggtcagagttaacctttttactgcgcgcctactaagtagagatttctccgttaacgtttagaaatgcaaaatccagaggaaggaaggttcttaccctttttctcctttgttgacaaatttctgaacctctttcaccccgcgccgaatctgcttctgcttcaccgctgcaacgacagaagagtcggt

SEQ ID NO: 231693 - DNA, 195 bp, Homo sapiens
  chr5:177591086-177591281
  hyper
ggtccagggggctcgggatggataataagggtccctacctcatcaggctgttgggagagccaagtgcatgtacggtaagtgcggccgcagctggaaccgggagacctacggtggaaatgggaatggagatctgtgagttgtggcagaaaggcctccacctcccactgaggcgtgacgggcggggaaagcaggtgg

SEQ ID NO: 231694 - DNA, 130 bp, Homo sapiens
  chr5:177631399-177631529
  hyper
gcgcgcgccgtggcggccaatgggacgctgaagctaggttgagtgacggacttgagcagccaatgagtgtgcagtttgttgcgatgtggcacccggctccggcattataaagggcgccacgagtcggcat

SEQ ID NO: 231695 - DNA, 311 bp, Homo sapiens
  chr5:177706982-177707293
  hyper
ctggatgtgtttcctgctaccgtatcccaaatgccgaagcgcctcgtacataacgagaacacagtaaatacccgctgaatggatcaacaacggtgaagggaacgattctctgaatgaacgtccatcctgctggctctcgtgcccggccagggaacactagagggcgcgcttgacctgccgaaggctgcctccagccctggcggactcttgcgctggactcccgccctcgggccacagcctgggcgatcagccaggacgctggccattgaggatgcaggcccaaaaggggcgccttcagcctcacaggcttc

SEQ ID NO: 231696 - DNA, 1529 bp, Homo sapiens
  chr5:178016441-178017970
  hyper
ctgaggctttcctccgccgtgaccaccgcctctccaggtgtaccagcgttggttaggaacagtaggtgctactggtcacagtcaccagatacttcccacgagcctcatctttatccccgactctggccgccggcgggaagcggcgtgtccgagcgcacaccccgtggagactgaccctaggtctgttactccaaagtccctggtctctccttcccctttctcgcggccgcctgcctggcacgggaccctgaggccggagcggagaccgcaaaaccccttggggccggcaccccctgcctccgccttggcgcagacgtgcccatctctgggacggccccgagcgcacgcagccggcgggcgaccctcctcccagagacctgcacgctgcccccggctcccagcgtaccgccaccctcaacccgacacacccaagtccgccccagccacgcgccaagacgctcacctcccgcagcaggcgctccaggtgcggctcggcccaggcgtccagggcgcctggcggccccgcgcgccgcagcagctcccgctcctcctcgagcgccgccacccggccctgcagcgcggccgcctggacacccagcagcaggcaggcagccgccgagcccacggagagcagcaggcacagcgcgctcaccgcccgggacccggccgtcgtcgccgagcgccctccgccgccgccgcccgccgcattgcccttccccgcgtcgccgccgccaccggcgcgctcgcctgggcccatggcgcgttcgtcgcgcgtggactctccgagggggcggtgctgctggggcagaggctgggtgcgagaggagcaggcgggacagcccgaggcacgaggtccgccgggcgcgggggttagcctccgggtagcagcggatcgccgcgcacgcccccttcgccgcagccagctcctccacagcggccactttgggcagtttcctctatgcaaatagaccctgccagaaaaggagcagggacccacccaggggaggagcggccgggctggccccgcgcggcgagggggcgggggcgaggaaggagcgagctcctcggagccacccgtcggcgccgggctgatcccacgcgcagcgcgcacctctgccctcacctagcccgggcgccggcacccgcccccgcacgcacctctgaggcttccccagcccaagcccgcactgtggaccccagaggtcggaggggagcccggcgacaccgcgccccttctgcagcccacccctggctggagcacccaccactcgtgccttagcacattcctctaaacttgtgaattacctttctgacacttgtaaaagttcaaaacttcaaatcctgcaaaaaactgagtgggtctgtcctcggtggtggattagcgccgcttcgtggcggaaagcgacctctgcgcactcacatttagagaggcagggtcgagattgcgccaaacagaaatacgccccttagaatcttctcacgagttcttagctgccggacttcggtgcgggaaacaaaaatggtaagac

SEQ ID NO: 231697 - DNA, 233 bp, Homo sapiens
  chr5:178054094-178054327
  hyper
gcgaacgcgcctgcgtgacagaaccttgcgcgctcccgccgctccacctaagggcggggctccacgtgacgtaagagcggggctcgagcctccacactgcggctgcgcggcccaagcatttccacccccccccccccgcccacccggtcccggggcctctaggccgggagggtgtttacgttctctacgggctcgggtggaaccgggaaggaacgcccgtgtcccgccctcag

SEQ ID NO: 231698 - DNA, 102 bp, Homo sapiens
  chr5:178287036-178287138
  hyper
agacgtcggaggagccgggtcacgaggctggagcttcctgcttgcagagtgcggcggggaggcgcggcccgggaacgcgggatcctggggaggtgagcggca

SEQ ID NO: 231699 - DNA, 676 bp, Homo sapiens
  chr5:178322844-178323520
  hyper
ctcgcacacgccgacggcctggccgcactgcagccccgcagccttgtgggaaatgtagtctggcgctccgggctgtaagcgccggtcgcggctgtgtcggtcgccgctgctcccgctcctgctgggagagggtgagtgcggggccggtggcgggggcgcgcgccatccgtgagtcttgtaggcccccgcaggaggagctccggattgcggggcgaggccccagcttcctgagggttgaggggcgggcccgcagcagatgggccgggggtgcggcctcactgcgcctgtggagcgccgggcctccggctccaggtgcgctccctcttccccaggagctggcggcgggagcacgctggcagctgagtgtccttcggcgctgtcctgggcaggcgccgaggtggaatcacagccccggagcagcggggatgggggctcgaacaagggccacgccggccaccacgggtcagggaggggcccaaggttccaagagtcgctcggacccgggttcctccctggctttccccagccgcgcgcagctttgtcccgggacacgctgcgaccgtggagcgaacctaacccgcggacatcccggggattctgggccagaggctgggtctccctgtgcagcatctgccctttgtgtaaaccgggtctccggacccgccctctggatctc

SEQ ID NO: 231700 - DNA, 769 bp, Homo sapiens
  chr5:178367636-178368405
  hyper
ccgcaccgcacacgcgttagtggctgtggcgtcgccaccccagcacacgctggcccgcccgcagtgccaggctggaagtgtcgggcgcttgccaggccaaggggcaattctgttgccttccaggccttttcggcgcggtcccagtcaggaacgcgccctgtcgcctcccactccgtcttccggaccctcccgatcctctctcgtcagcgatcgggcgtcgctcccctggactaacctcccttgccccatcttcagcttttcgctgatctgcatcttcctgcgccttagtgcaaggcagagacctggttctaaagcgaacggaacggaaccgattctgtaagttgcaatgagcgcgctgaggtcggcgtggaggggtctctgggaaaggtagtttccgcgcctaaagcgccggggccgggccctgttcccgcaggcgcaaggcagcactgtctccgccgattgtccctctgggaagtggagtctggccggcggaactgcagcagccctgagacttgtgggaattcggcccaagggttcccagggcaacgcgcaagcgcagttcggctcccggctgcagactccagctcattgtgttctgactgcgatgtggcgcttgcgatctctcgccgccggcagaggctcctcgaagagcgacacggggctgaccaggcacggtggtcaaagccgcagagggagagcgggagcggtcgtgaggtcgtctggggagaagggcggaggcaaagccgaggaggtgcgggttgtggtccat

SEQ ID NO: 231701 - DNA, 80 bp, Homo sapiens
  chr5:178450491-178450571
  hyper
cgaataatcagcagcggctagtcttccagatttaaaaattcatactcacttttccgtcttactatttttgtcattctaat

SEQ ID NO: 231702 - DNA, 706 bp, Homo sapiens
  chr5:178487108-178487814
  hyper
atgaatctaatttccggttttgttttttcaaactactccgcttgcttaacaagtgcgcgggctgtaggcagcacggccagcagctggagacctcctgcctcgtgtgcggcgtgcgtactccctcgcactgcagcccctccgcgcactgtcgcctttgagagctctcgttggcggaggcggttcctctcccggagttcgcagcgcgcaccgcggcgtcccctgggaagtgtagtcggcgtggggccggaggcatgccgggagtggtagttctcccgcggttggcggggtttcggggacagctcgcggcctttcgggggttctcctggcttgggccatccaggcttggctaggattgccggcctggggttgaggcgctcgcagtggtctcttccgggccggggtggatccgggcctctccagcgagtgggcggcgtgcagcctcgtctgggcttctgggaccagccctacgcggctcgggccccttggccactgggtcccggggcgccgtccgcgagcggcctggactgccggagacccgcgggagggagcgcctcgccaggtgagctgggtgcgccgggccgctggggtggggatgccagccttttgtcgttgttcattctgcgattttcttctgtgcattttcttctgagtaacggaaataataaaagcaatagctgatgcccgccgagagcgctcgggtgccagg

SEQ ID NO: 231703 - DNA, 290 bp, Homo sapiens
  chr5:178770441-178770731
  hyper
tacacacacatacacggacccacccccggatgcaagccagagacctgttcaggcaggcaaaagagagaggcgcacgctcctgcctgctgagccttttggagacccgggcgctccccatgcataaatggccccctgctcagaccagtcaaaacaacctgctttccagccaagcccttcagttggagcacgaggctcactaaagcacgggaagggcgcggaaagtcctcagcgcaggccttgccctcccaagggactcccaggtaacccttttccaaaacccaggcgagagc

SEQ ID NO: 231704 - DNA, 55 bp, Homo sapiens
  chr5:178772471-178772526
  hyper
aggggcgggcgggggagcgcggagggaaggcggggagagggaaggagcgagcgag

SEQ ID NO: 231705 - DNA, 381 bp, Homo sapiens
  chr5:178957527-178957908
  hyper
gcctcttccccggacgcccggtctgtctgaggtcgccgggtctgtggacgcggatccgaatcggagcttccgagggtgatctgagatccaaagtcaggagtcttctgcatcctgccctttgtcagcgctggtcctcatttcacctgcccagggccttcaggaggggcgacactctccggctgcgggcggcccagcgctcgcccccctcggccccacgtactcttcctgcctcgcccccatcgccctcctccggcttcccgcgcctcccggggctctgcgcttgcgtccagggcgccctctccggggacaatgggcgggtgcttcgcaggctgcagtcagggccgacttcacccggcgaggacagggcgaggcgctgggccc

SEQ ID NO: 231706 - DNA, 168 bp, Homo sapiens
  chr5:178977222-178977390
  hyper
tacagaaaaatgacgaagtggaaaatatagaccatgaaatgaaaatttaaaagaggaaatggtgtcacaaagacaacgacggccagggaaccccgtgaagcgccgggcagggtgcacaactgtcctcggagaaagttcaagaggaacttccccgcgaacaggtcctgc

SEQ ID NO: 231707 - DNA, 166 bp, Homo sapiens
  chr5:179050812-179050978
  hyper
gcggattattacacgcttgggttttgggctcagcacccccacccataaacccgccgggctttttgttgcgcctgcgccttcccgcgaatattgaacttcggagtcctagcggtttataattatttcatgcgcatgcgtcttccttgaaaccgttctctagccttac

SEQ ID NO: 231708 - DNA, 48 bp, Homo sapiens
  chr5:179233842-179233890
  hyper
cagatatcaggggcgcgggacactggcggcctcgcctccgcggcaggg

SEQ ID NO: 231709 - DNA, 566 bp, Homo sapiens
  chr5:179243856-179244422
  hyper
tgcccccgggtctccggccacccggtgacggagggagggagaggctggcgagggggcggcgccttaggtcccagcgcgacccgcctctcagcccctcccgccggctacagccgcgcgggacggggcagggacctcgagaacaccggggacttgcgggccggtggccccgggcaggccacttctgacgcgggtgcgaggccttccgcgggcgtgcacggttgggccggagccgcgccgggggccgggacacgcctggggtcagcgctggcgtcgccgctcgggtggggtgggccgggttcgggtccagtctcctccccacgggcggcccgcgccccgtcttccagtgacccccacatcccttgcgccccgagctggaacttcggcaggttctgccccgggccgcgcgcgctttctggggaccagggctgtggttcctgctccgcgtcgtgcctttagacaccgccgggcgttcgtcctccatccctccccccttttccccactccgcggttgacgagggccgcccccaagtggccatgtcccccggcatggacgacccctcagtgcc

SEQ ID NO: 231710 - DNA, 555 bp, Homo sapiens
  chr5:179245837-179246392
  hyper
ctgggcatgcacgccgggccctggagggtgggaaggggccagtggacgcggggagcctgcggggtgggactgcatcgggaaaggggaaggagtcagaggcgagaagggggagagtgtctgtctggctccagccgctgcacgctcttcctgctcaggggactcacggtgaccccggagccactccccagcccagcctccaggtaagaggtcactgagatgggtggcagcaggggccggggatccccctattacgacagcggtcatgggacgctgactcactgccggccagaccacctgacctccgcggcgggaggagagggccctgccagggggttcccgccgcgccttgtttacctccgggaggcctcggcctcgcgtgggggcagggcggccgctggggccgcaaggcgtgcggggaagggccagagccgggtgtccaccccagcttcccaaagactccctcttctgtgcttccttctcccctccccgccccccccccagtctcttcacatgcccctagcccccgcggaaacttcccgcgatcccaaacgggcc

SEQ ID NO: 231711 - DNA, 947 bp, Homo sapiens
  chr5:179498405-179499352
  hyper
ctacgcgggatgcagcgaccaccgcccgccgcccccgggccggcactcacctccgtggaggggcagcggcgccagcacctggccgcggacctcggccttgggggagtcaagcccgtagcgcccgcggtcgatgcgaaacgtgagcggggcgccgcggccgggctcctgcaccgtcacgttgatgagcgccgtgtagtactcctggctcgcgttgtctgcccgtgccggccacaggctgcaggtcagcagggcgagcgcggcgagccgggcagggcccgcccgccccgcgcagctcatcgtccctccggcagccgccgctgctcgcggaccgggctccggggccggcgcctagaggcggggcgggcgcggcccgggcggcggcgggagcgcgcgcgcgcggcctgcgcggggccgagcccgagcgcggccctcctggacgccgcggccccgccgctcgccgccctcacgtccactgcccgcctgtggggacgcgcccatgggccctcggcgagggcggcgtctcaggtcgcacgcgggcgtctcttcggggtcccaggagggttgtagaagcgtgccccctccatccccccgggtcggtcccaccgaatgggaggcgcctcgcaaggacgcggcgggggaggggaagggcggcacgggaggaagcgccccgaggagggtcagcggaacacaaagtccctctcgcgcggctgccgcctgaggcgcgtgtccgccgccgccccgcccccccgctggtctagcggcaacgcgcaggcctaaggcgcagtcccgccccgagcgcatgcgtgccagggcctgtccgctcccgcccgcctgcacgagggcccgggcagccgggtcagccgctggtgctggttgtttctctgtcaggcgtgatagccgcagggcgtggagcccgggagatttgcgaggacgtatggaaatgtgtg

SEQ ID NO: 231712 - DNA, 582 bp, Homo sapiens
  chr5:179779443-179780025
  hyper
gcagatgtgcgctccgggccgcggccgccctccccacggtcccgcagccacgcgggacagcgcgggagcgccgcgggaatcggacgcccggccccgctccccgccccggactccctctcgtggcttcgggccgaggttcgggcagtgactgcctcttccccgcgcaaagaggcggtaacgcggcagcgacccttctagggaccagacgttcctttggggtcgcgaggaggacgcgcaggccctgcctgaggcactgacgcagcgggggcgaccgggcgggctgcggggacggcggggcggggtcgcctctcctctcctcggtgggcgcggcgggctgagtcgggatgggcgccccgcactcgggatgcgccggcctgcgcgtggccgcctttgtgggcgactgggagacgtggaggagagcgacctcggtcggcatggggtggggacccctctgttacggggtccaggccggaccggaccaggtccctcccctccgtggggaccgggcctcggtccccctcactgtgtccgagaccaggagtcgggttgggcatcccccacccacacctccgagacggccac

SEQ ID NO: 231713 - DNA, 161 bp, Homo sapiens
  chr5:179780325-179780486
  hyper
gggctccagctcccgtccgctcggcctccagcccttataacccggagccctccgagagggcggggaagggggcggggaaggggcggggcttcccccgcccgcctgctcccattggcccccggttgtcgtgacaacgacgggacccggcccccaggagccag

SEQ ID NO: 231714 - DNA, 162 bp, Homo sapiens
  chr5:179781266-179781428
  hyper
cccaacgtttgcgcactttgaagtttttttttttcttaaaaaaatcctgaaattctaaacggatcctcctcagtcgtgtaaaaaaaaaaagatttttacatctcgtctagagcatttttctaacataatccctccctagtttcaccgcgactctgcaagccc

SEQ ID NO: 231715 - DNA, 190 bp, Homo sapiens
  chr5:179867481-179867671
  hyper
ggaggaaggggatggagggtcgcattaaacaacacctcaaggcagcccagatcgggagggagggtccctctgcaggacagaaaccagctcgtgccgcaagccaaccgcgagaagggaagagggggcgctctaggttacaagagaattaagaagcacaacacccagatacgtgtggcctgtgtttggattc

SEQ ID NO: 231716 - DNA, 735 bp, Homo sapiens
  chr5:180017079-180017814
  hyper
ggatgagaaaataccaggctcgagctgctcttaaccacgtttattgagaggggccgggggaaggggatggacggtcctccccgcggcggggttttcagccctcgcgggtgggcagcgtcttgtcctcaggtgtagatgctccagtctcggctcagccaaacactgtcagggccccctggaaagcagaagccgagcttgagtgcccccagccctgccaccaagaactcaggcgggggcgcggcagcggccggctctgtggggagcgggagcggggcggttccgctggcgtctccgggggacgcgcacccgcgcggggccatctccgccttccccgcccctgcagctcggatgcgccccacccagttcccacccggagacccgggcttctcccagggacagggcttggaggggcaggacgggaaacagccctgacgtagggccgggacacctctggtgcagttttgaggctggccgggaagggatgcccgcgcaggaagggcacccggggtgcccactttaccagcagggccttcagggccttcacggcccccacggcctggggacccagctcagccacacacttctgggagccctctatgaggtggttcacggggatgcccaggctgctcagcaggagcttcagcgggttgagggtgccgagggggttggccagggtcccggccccggcctccgccgccgactccagcgcagcgacaggctgggccacaggcttgg

SEQ ID NO: 231717 - DNA, 56 bp, Homo sapiens
  chr5:180017994-180018050
  hyper
ccccgggacacaggcgggtctggggaggcggccccgccaggagacgctgcagggtc

SEQ ID NO: 231718 - DNA, 186 bp, Homo sapiens
  chr5:180100729-180100915
  hyper
cgttgtcctcgcagcgttaaggcgagtctgggacaggaccccggcaccccctccggatctgtggcatcctccaggactccggcgcaggacgcgctccaggagccgctccttcagggcctccggtgcgcgcagtccgggcgccggacgagctcctttatcagaaagggcagccgcagagcccgcgtg

SEQ ID NO: 231719 - DNA, 62 bp, Homo sapiens; identical to SEQ ID NO: 200210
  chr5:180230099-180230161
  hyper

SEQ ID NO: 231720 - DNA, 53 bp, Homo sapiens
  chr5:180234903-180234956
  hyper
acgtagagcaacatcgatgttattgtttcctgtgtacacggccctggatactt

SEQ ID NO: 231721 - DNA, 576 bp, Homo sapiens
  chr5:180257865-180258441
  hyper
aggttagagggaaggcgcagggagggagagacggcgggtgggggttgaacaaagtggagattcacaaaagcagactagggcgggcgacgtgatcagatgacctgtgcgggcggcagcctcctgccctcctccccttcgtgcgccggctggagcgaagagttcttttgacagccgtgagcttccccgccaggaacttactggggctgcatcaccctagaaacgtggctttgggctgtggaaacgctgcctctgtggaagtctctcctcgcgggggtggacgggtcgctgcgcgcccagcgttcttctgcggttctcacagcccgccgccgccgccgcctcggggacctttgcggggaggcctcaggtcagcgccgcccttgcgatggcgggagagcagagcggccccagggcctctgagctccggccccggcacgtcccgccctctcctccgcttgcgggagccggggcgcctcggagggaaaccttccggacacaggccgggagaagaggggccgtggcgccatcgcgcagcttcctggtttcggccatgtttttttttttttgagacggagtttc

SEQ ID NO: 231722 - DNA, 480 bp, Homo sapiens
  chr5:180258501-180258981
  hyper
cccgggttgaagggactctccggcctcaggccgcggtgttcttgtaaattagaaccggcctatgcgccaagcgcgggtctcgcggctgcggagagaggcccagcagggggcggggacgccgggaggcggggcctggccgagctgcgcacacccgggtggttctggctacgggtacccggacctgcccaacgaccgttctccattcccgacctccgcaccctacccggtccgcagggcaccttcctcctctctctcaggcacgtcctcgacctcagttgccacgtgcacatgctggtgccttccaggtcggtctttctccaccagactccacctggaactttcttccttttcgtcctgtgctggcctaacccctgctcggcctcggccctcagctgccggctctaacaaagcctctgtctttcccagacccctgtgaccaggtcaggctctgctccctgcgttcctctctccttgcttccc

SEQ ID NO: 231723 - DNA, 92 bp, Homo sapiens
  chr5:180480325-180480417
  hyper
cgggcggcggggcggggaggggcaccggccggtgctgaaccccggggccgcggaggcgcctccccccaggacgcggcgcgggaaggcggcct

SEQ ID NO: 231724 - DNA, 44 bp, Homo sapiens
  chr5:180480597-180480641
  hyper
cgcgaggtgtcagggcggccaccggggaacggggatcggtgacc

SEQ ID NO: 231725 - DNA, 189 bp, Homo sapiens
  chr5:180480941-180481130
  hyper
ggcttaacgtttccgccgagctaatagatttgggaggctccgaccctgattttcacactagcaggagggagggcgctgggtcaccctcctatgcagaagggcagccaagggtgcgcacttccccatcccctgcctggagcctcacttccagcccagcctgggcccgcagaccaccgcgggtgggagtgc

SEQ ID NO: 231726 - DNA, 103 bp, Homo sapiens
  chr5:180531199-180531302
  hyper
cccttatgctaccgcgtcgggcatgaaaacttccttttctttcttctccttctttccttccttttgagacagggtcttgctctgtctccgccgctggagtgca

SEQ ID NO: 231727 - DNA, 92 bp, Homo sapiens
  chr5:180594971-180595063
  hyper
cctgggaagcacagtgcgaccctccccttacccctgcccgggcagtccccctactccccacctctactgccccctgccggtgtctcaaaaaa

SEQ ID NO: 231728 - DNA, 164 bp, Homo sapiens
  chr5:180600256-180600420
  hyper
aaatggtgccagcgcgcccctgctgttcaacccccgtgcctactgttgctgccacatcctctctcaagactcccgtgtccacttatgccaccacattgcacatgaaaacttccttttcttgtttctttcttttctctctttcgagacaagatcttgctctgtcg

SEQ ID NO: 231729 - DNA, 180 bp, Homo sapiens
  chr5:180600480-180600660
  hyper
agccgtcctcccgcctcagccttccaggtgctgaaacgtgctttttttgtgtgttcatgctcattaacaaagctcaaagggacgcatggaggaagctctgaattatgatgagaaataaaataccgccctgtgtggtggctcattgtgatggcacaggtatcccatgcaggtttccgtagt

SEQ ID NO: 231730 - DNA, 272 bp, Homo sapiens
  chr5:180614836-180615108
  hyper
gccccacacatactcgagatgcggggttccatttggcagcgtgccgctgtccagtggatgagctctgtgccgagcttgtccacagcaagtaaaactggattgagttcacaggtgcgggtggttgggaatggaaagcaaaagcgtagatgccctcttctctttgtgccgctgtgaccaccaggtggacatactagtgggatcttctaggttagtctccagtgtaataagagcgtgtaatgagataataaccgcttcggggccgcgcgcggtgg

SEQ ID NO: 231731 - DNA, 658 bp, Homo sapiens
  chr5:180630961-180631619
  hyper
aaggagagactggggactgccgcccgagcctccccgccccgccctcacccctgcacacaccctcgctgaggctcagcgagaaaatagcaaagaaagggcccccagaatcgacagcgttggcacagtcagacggctctaggtgcgcggcttaacccgggagccccctccctggacatcttggcgaggtcctctcactcagttccacgaggtggggactttgagcagagcccgcttcggggaaagagataagagtgggggcagcggctgcgtggctgtgccggagacttcccgcgggcagagagctgcggagacgcagaccaggctagaggctccgaacagacaggaagaacatcgccaagtccgtgggggacgtcgcgcaggcggcccagtatctggcccagagggaaacgcagtgggggtggggtgggggtattggtgatgttgggggtgacagagaaccgcgctcagcccgggaaccagcgctgggcttcctggaatggagaaagaagggaggggctcacccgggcctcctgatcgacaggctgttctctgcaccccgtgcgcgggagcgcgggaccaagtcagggggtcccggggacccacggggtgggtgggggctgcgctcaccttggcctcctgcaccgcctcgtccagcggc

SEQ ID NO: 231732 - DNA, 707 bp, Homo sapiens
  chr5:180632776-180633483
  hyper
cacacacacacaaacctcagcgctctcttgtcccccagctgtctccacagccccgcagcagagctgcctgtgttatccgcttccacaccctctctcctcgctcactctggaggccacttggatcaagctttcgcccgcaccctcctcagaaaccgcccttgccaatgtcaccgggaacttcagcaattctcacccaaaggcgaagacctcgcctcacctcatctgcccccggatgctccctccttcccgacttcccttctcagggccttccaggacccagtgtccccgatcttcttgctgttcctgaaccccgtggcctctgcgctggctgttccccttgcgtggacctcttttctcccaccacctgcatgctccctcccacctcattcaggtcttgtttcaaacgtctctgcccacgaagcccgccccgaacgcgcacactgtgtaaagtcgtctcttagcgcgctcccttctcagggccggctctgtgcccgcactctatctcctctggaatgtcagctttcagatggactgtactaggtttgttcacggctgaatcctgtttttagagcagttcttggcaagctcagtaaggttttcttggattaaacttggttcgaaattcaaaagaggagccgcagttcacggtggaaagtaggcccatcgcctgtgtcccagtcctttcttcctcccgagcaatcaacttt

SEQ ID NO: 231733 - DNA, 684 bp, Homo sapiens
  chr5:180644000-180644684
  hyper
tcgacctagggtagtaactggaactgcaggtatgcaccaccacgctcggctaattaaaaaaatatatatattttttcctagagatggggcggggggcgggggcgggggcggaggggacagtctcactatgttgcctaggctggtctcgaactcttaagcccggtttccgagtcgctggggctacagtagcgcgctgacacgcccgacccttgctttgccacttagatgttgcatttattcgactttcacgtcgggcagaggtgctgggaaagaggcggctggcccctgcgtaagtgtgcgggtgcggtgtgagaaagctggaagcctgttttctaggcggggaagcagcctgcgctgccggggccgcatcatggcacgtgggtttccccgggcttactctcctgccagtagcgctgtcctagggatcccgcccacccctccggcttcttctctgaagcctttgcagcattttccctgagattgctgaagaggcccctggggatcgggctcccaactcacccgccgcgtcccacggcccgaagccgacgagctgcaagtgaggatgggtgcagagggaggccgacggtcacgccttggagaggctgatggtcctcttgaccgccctccaccgccactgcgaacccaaaagccgtgtcagtgctgcaggcccgcccgaagtggcgc

SEQ ID NO: 231734 - DNA, 512 bp, Homo sapiens
  chr5:180670801-180671313
  hyper
gcggcggcgagagcgtgtgtcgctgcagcgacgaggatggcactggatggcttagagaaactagcaccacaacctctcctgccgccgccttgcagtgaaagagagagagaaaagccccccgccggaaccggaaatacccgctcgaccatgcaaaatggcgagccccatgatacatttctgctcaagatggcggcgccatgtaatgcaaaaggcagagggaaattgcaaggcatcacagtcccgtcttccgtacaacaaaatctgactgcactttacaaatacactctgaaacaagcacattcaagtgtttaaaaaggcttctcagggatgatgtagagcgagaagcgaaagaggtgaagtgtacggcacattcccatgaggaccgccgggctgcttccccgcccctatgtggcatagctcgagctccgcctgttccacttggtgcggggagggttgacggggcaaccccaggggagcttaattttcatttcactatcgtgggtaacgatggg

SEQ ID NO: 231735 - DNA, 419 bp, Homo sapiens
  chr6:391098-391517
  hyper
taagcatgtcagacacgcagagacagtatttgaatcaagcttaatagctcaagggagctgggccatttcctattttctttttagtgagtgcgatgttctctaaacaccgcggagaggcagggttcccggtgatggccttgccgagggtgctcccgcaacctccacctccagttctctttggaccattcctccgtcttccgttacacgctctgcaaagcgaagtccccttcgcaccagattcccgctactacacgccccccatttcccgccctggccacatcgctgcagtttagtgattgactggcctcctgaggtcctggcgcaaaggcgagattcgcatttcgcacctcgcccttcgcgggaaacggccccagtgacagtccccgaagcggcgcgcgcccggctggaggtgcgctctc

SEQ ID NO: 231736 - DNA, 50 bp, Homo sapiens
  chr6:391817-391867
  hyper
tggagtcgggcaggaggaggggtgtgaggctgataccagagaggacccgg

SEQ ID NO: 231737 - DNA, 53 bp, Homo sapiens
  chr6:393787-393840
  hyper
tcgtctctcaccgcgtctctgtttctcttttcgctgcttttctctctgagtct

SEQ ID NO: 231738 - DNA, 368 bp, Homo sapiens
  chr6:710654-711022
  hyper
tgtttgcgtgctgacggggactggcttttcttcttcttcttgtagtttgaaatggaaacgctgcactgctgagaaaataccacggaaatagaacccactgcattccaggaaaataaataagcaaggccacccaaattttcaatgagtgctcctgcagaatgcaggaaatggcaggagatccgtccgaggcaccccaggccgggtcgtgggtagagagcagggacgagggctgggaggggacgcaggcacagggtgagggtggcccgtctccagggagaactgcgcgctcacaggcggggccggcttcccgcatcagcccggccgggctgcaggttctgagcgagggggcggccgtgcctcactctggg

SEQ ID NO: 231739 - DNA, 210 bp, Homo sapiens
  chr6:711262-711472
  hyper
gggaagccactggccacgagggagcgaggcgcacgggtgtcttccctccccagagtgagtgtcagggaggaagccaggtcttccagggcgctgacaaggcagggccgggctccttccctccgttgtgtttctctgaaatgttcgaatcactggtgtgacgggagcacttaaagccgaaaaaggaaagacgaaagcaaaggattcttcagg

SEQ ID NO: 231740 - DNA, 3192 bp, Homo sapiens
  chr6:1311048-1314240
  hyper
ggtgagctcccacctactagcggctccgtcgctttttgtgcaacaaaggcaggaaaaaggaggaaactcggcgtggcagggcagcgggctggaagtgcaccttcccggggccgaggcgcccgctccctggactaatgacgccgcgtggggatcacgccccgggcgccctggggtgaggaacggtcccccctttcgagattgtccgacactggtgccagtgaggtcacagcaaaagtcccaaaggaatattggaaagaaatggccgtgaaccggtttgttcttgcccccgcccccgggaacacgccctctccgtcgttcctgttgactgtcagatcccgggaaccaagcggcggagctcggcggcatctgaggcttccgcagggacacaagtgcaggcacagcccagcaccctgcgccagacacagccgccccaggggaagaggaggacgctgctgtcctcccgcaggagtcaccagccaggtaaagaaaaaggtaaagtaagacaaagaaaagtgaaagtcggagcccatttagtgagcaagagtaaaggtcatccaaaaaggcgcatacaatttcaagcccaggagtgcattcattaaaacaagaggaaaagacaagatggtccttgaaaggagctcataggaaggggcacagcacaaggctcccgaaagaggtcactgcaagtgtcctgcgcaatttctgttcagcacctctgcagtgacgacaggggtttgctttcgtaagcagcatcgttttcactactacagaagcacatacgccgcgtgcagcttaggcccgagcaaagtccctgctcccctagacccagtcccttcaggtgtccccctaggggaactgtggcgtgtccccccaaccaggcgcactcgcctaaactgcgtccccgaactccagggcgcagggagccctcgcgggctgcccggggctggggcccacacctgaacggaggagccggctggcggagcggccccgcgcgcgcacacacgcacactcacagacacgcgcaaacccacagcggcgcgcgcgctccccattggcgggaggaggaaggcggggccggccgacccaaaacaaacaacctgcgccagcgactttgccgccgcgctgcagtgtggcctccgcctggtgcgcgcccgttggggagctggggaactggggagccgccaccacctcggccacctcgttcccccaccccttgccgtccgcgctcaggccccgcccccgcggagccgccgcagggttatattgggccggcccgaaggtggaggcgagacgcagccgcggcaggccagcggggagatgctgccccggaggctgggagcgggaaggcggctgcgggcgcagcggcctcggggactcgcctccgcgggtgctcaaggctgaaggcgccggaccttcccccacggtggcacgcacatcatccggcaccatttccgtgccccgaagacgcccgcgcgggacctgggaccgccagtgaagaacccctcctgggctctttaacgagcagcagatgcgcatgctgcttctctccggcaggaaagccttctaagcccggcgtgctcgggcacccgagggtggaaccgcggcccctgcacacactcaccccaaagtctcaacgtcgaaccgaaggcgacacccacccaactcctccctctccgccccatagtccacccaacacttgcagcccctccagagaaaaagcccagcggaagaggactccggaaaagtgactatctcggaagaccagggtagagctcccgggagaaaaaggcgaagatccccggccccggatcgccatccccttccctggcaccagcttctctaggctgcgcgaaggaagagggtacgacgccggggagggactgggtgcgcgggcatgaagttggaggtgttcgtccctcgcgcggcccacggggacaagcagggcagtgacctggagggcgcgggcggcagcgacgcgccgtccccgctgtcggcggcgggagacgactccctgggctcagatggggactgcgcggccaacagcccggccgcgggcggcggcgccagagatacgcagggcgacggcgaacagagtgcgggaggcgggccgggcgcggaggaggcgatcccggcagcagctgctgcagcggtggtggcggagggcgcggaggccggggcggcggggccaggcgcgggcggcgcggggagcggcgagggtgcacgcagcaagccatatacgcggcggcccaagcccccctactcgtacatcgcgctcatcgccatggccatccgcgactcggcgggcgggcgcttgacgctggcggagatcaacgagtacctcatgggcaagttcccctttttccgcggcagctacacgggctggcgcaactccgtgcgccacaacctttcgctcaacgactgcttcgtcaaggtgctgcgcgacccctcgcggccctggggcaaggacaactactggatgctcaaccccaacagcgagtacaccttcgccgacggggtcttccgccgccgccgcaagcgcctcagccaccgcgcgccggtccccgcgcccgggctgcggcccgaggaggccccgggcctccccgccgccccgccgcccgcgcccgccgccccggcctcgccccgcatgcgctcgcccgcccgccaggaggagcgcgccagccccgcgggcaagttctccagctccttcgccatcgacagcatcctgcgcaagcccttccgcagccgccgcctcagggacacggcccccgggacgacgcttcagtggggcgccgcgccctgcccgccgctgcccgcgttccccgcgctcctccccgcggcgccctgcagggccctgctgccgctctgcgcgtacggcgcgggcgagccggcgcggctgggcgcgcgcgaggccgaggtgccaccgaccgcgccgcccctcctgcttgcacctctcccggcggcggcccccgccaagccactccgaggcccggcggccggcggcgcgcacctgtactgccccctgcggctgcccgcagccctgcaggcggcctcagtccgccgccctggcccgcacctgccgtacccggtggagacgctcctagcctgagtagcgccgcggggcccgggaacgccgagtgcgcgccgtcggggaggcgggaacgcgggcccgcgcgcggactttgcactttgaatcca

SEQ ID NO: 231741 - DNA, 459 bp, Homo sapiens
  chr6:1316703-1317162
  hyper
tcacactgggcgggcggggcgggggcattggagggtcctgggctgtcgcctcctccctgtccctccttcacacacccagccccggggagtttcggtttctcagtgctgggtcggaggcagcccaggaggaaaggcgacggcacagctcccgttttctcaatgaaggcagaaagctgcacagctgcttttagttcaggcgaagctggaattccgcggagccgcacctggcggcaggcacgccggccttcggaggggccgctcggtgcggctgcaggaccctgcactcaggcagcagcctcgcggtggcggtgggacctctcgagcccaacagctccttccagcatctgcccagaaaactgccttcctcgcaggcgcgggaggagggttcggggctcactgtgcccaggcccccaggcctggccgcgcccaagtggccccccgcgccgagggcagggctcg

SEQ ID NO: 231742 - DNA, 1067 bp, Homo sapiens
  chr6:1378224-1379291
  hyper
cttcaccctcctgcgggaaaatgcaaagtccatcaccaatagtcggtctaccgcagagaagtctgcaaatcccaggggcctggaactctaaaaaggccattcaagcctcaggtggactccacgtttctccatttccctgcccttccgcttttctttccttaacaagcttcttataacatttgcgtttgatgaggttcaagaggtcacttcccctccctctccgccctcctcgctcggcggagcggccgcgtccggacccctttctgaaggccgtccaagcccgcggtgcccggcggcggctgcgctgcctgaggtttcgcgcctcgcgcccggcggccgccgctgccggggccggtctcgcccacggtgaggtcagcctgcccttccctgccctgtgccgcctcgcgagtcctggagaggcccgcgccggcctcgaagcaaaagacgaccgccgaaacgcgaccgtttaccgcctgctttttccaagcaaaatttggagacaagtcccacccggggaagaacctggctaagggtcggacatggaagagaagacgctaaaacagaaattgcctccctgctttccacctgcagcttctagacgccgccctcggtgccacccctcgcggaaggcgttctcccacaccggggtcgccactgcgcccagctgcagaaagcactccgcacccccagcaattcggggcatggagccggcgggggtggcgcggccggggcctggagaagcagcgctgagtccgacaccgcccaccaggcccctcttggagaactagacaggcgacagcactcaggaccccggctgcggccggcgccgcggcagccacgcgctccagcccgcgtgcacctgcttcgctccgccgcgctcccggcttaagccggcggctccggggtcctgccccgacttttcgtactttctccctgctccgtgcctaactcaattcttaaccaaatcctgaaagcacaggagtttggttggggctgggacaggcgcagggacccaattctccccaagctctgcgggccacggccgaaaccaccccggggaaagccgt

SEQ ID NO: 231743 - DNA, 159 bp, Homo sapiens
  chr6:1379471-1379630
  hyper
caaaaaaccgaggtgcagaaacaaagtaacttgttccagatcacgtaggtggtaagtgcagggtattctggagcaggagggagggtggaaagcacagaaaaaaaaaaatgaactgggaaaagcgttgacgtgcttagtatttcatactgcaggttccac

SEQ ID NO: 231744 - DNA, 101 bp, Homo sapiens
  chr6:1379990-1380091
  hyper
agaagactcctcgaatgcagaccggctgtctgtggctggacccccagtgctgcaaaggaatctgatatacctggaggaaccaacctcgaggtccaaccaag

SEQ ID NO: 231745 - DNA, 1402 bp, Homo sapiens
  chr6:1381771-1383173
  hyper
tctccaagggcgggcgggtgggatgatttgttgatttgcttgttttccaccaaaccgcagggcacctccaggagctccgggacaacttacaaatgaagacacagagcccccgtcccttgcttcagagaaccaaataacggaactgaatgatcgtttcttcagcaaagcctaaagacgcttgcgtcccgcggagaggtgcccacgcgcgactcggctgccccctcttcttgcgggtccgggtagggtagggcgggaacgcgggacgtgccctaagcgggccagccgagcgcgagacaggcgatgctgcagaagcctgcccgcctgcgggtcacacaccggccggcctcggctgcaggggttgcggggccacgggtcgcggggcgccgggagccgcgagcaggtgacggccgcgccgggcagccccgcgggccgcgattcccgagagcctggcgccaccccgcggaagccggaggaactgcggcttcttcccgctcccgcgcggaggggagagggaggcgcagcgcggaggggagagggaggcgcagcgcggaggggagagggaggcgcagcgcggaggggagagggaggcgcagcccgcaccgcgcaatcccggggctctggcgggagggaaggtgacttgcgtgggacgactccaagaggccaggcccggccttcgcagttcacccacgaggataccgcgaccaagccaccaaagcactctctggccaggccgagaccccttttcccccgggccccaagagaaaaaagcactttctcctaaaacacgaactccccgcggaggggcccggggctgcctggcacggggcagggtgtgcggctgccgtgcgggcgcgggccagagtcacgtggaggcaggcggagagggcgagggggcccccgtaaatcatcctgagggatttttggcccaagtccctgtttccgaaaggttgcgggacggctttgacgttgattatgtagctgttctcttttcaagtgcgcgcccctccccaccgcagcccgtctggtgtgcgaggattgtgtttgaaagggaggaagcatccttgaagtggtgggtgatggattgtctaaacccttctgggacgttctgggtgggggttttcgaggcagctcatcaataaagacccccctggagagaaggggcggctggagaccagcccccgccgcgcagccccgaggccccaggcctggaacacagtcctcggtgtggggcacagggcgtgaggggaggatgagctccccctgagcagatggagatttctccttgcctgggccgtttgacccccaaagccttgcagactggccgcgtgggtgccatggggcgatttcttgggaaaggagggcagcagaaaggcccgtgggctctcagcgccttggagtcagg

SEQ ID NO: 231746 - DNA, 1263 bp, Homo sapiens
  chr6:1383377-1384640
  hyper
aagggtcacctggctcaagccgaccccaggtctgacgggcggagagcctcgagggccacgccccaggccagtggtgtcctctgaggccgcaaagccgactggcttctggaggagcagcagcctcggcctcagcctcggctgggaaaagacgcagtcggggccctccgtgctccaaacttgaactactctgggtccccacgaggaggaggctgccctggggtcagaaactccgacggaaatgaaggggagggggcgtaggttccctggcacagctcggcctggagaggcagcctgggggcccaaactcatctagggcgcgcccggagcttccccggcctctcttggcccatcgcgaacgagctcccctccccgactgggtcggcctcgggcgcctttcgccttcgcaggccgccggggttccgcggagggcttgtgtccctccctcccgccgccgcagcccgcccgaaggtcaggccgcatccggggcccggggcctttggccaggctgcggggaggggtggggttggggggctccccaaagcagcttctcggaggcggcgtcggggcgccctgaggtccctagtcggcctctgggcgccgagcacgttttatttatccccacagaggatgctggaggacaaaagaaatatttggacgtcagagctgatttatatttttggaagagctacgtttccttttctgaagagaagcgagcgcgccccatatcctgagctcggcggggaggacgagaggggagttttgatgcgccaggaagttcatctatcgcccaggcgctcaggacccggcgccccgccgagttcgccgccctcggaaatatttatttatttgggggaagggagggcagcggggaggagaccagccagacgggagaagaaagccctgcccgggctgggttgggacctccagggcgcttccccgcgcggccgcagccggccagcctctggtctcggttggagggcatcgcaggcgcggcctggcgacctccgggcgcctttggctggtgtcttccgtagccctcggcgcgcaccctcccgcgtgcagtgcccggagtgacctcttcaggccccgcgggcgcctcctgggtgggccccgcggcccctccaaccctgcccagcgtgtgtgcgcggcctagccatctttctccccagcctgggaaggcgggcgggaggaggggatccgaggccgggggccgcggagcaaaaggcacgcggacccctaaacgacccccgagcgttgccacag

SEQ ID NO: 231747 - DNA, 47 bp, Homo sapiens
  chr6:1385119-1385166
  hyper
caaggttttggtctcgcaaccgaggggacccgcgcccggcaatttgg

SEQ ID NO: 231748 - DNA, 222 bp, Homo sapiens
  chr6:1388651-1388873
  hyper
ctcctatccctggtcggactacatttccctgcacgtgtaatccaataactaactgtcgggtctcattggaagtgattgctcccgagggcacatctctctcagagcctgactcttacttagggaggaattagccacaactggggagaagtgttctcggacaggagttagctgagacctggcacagttttgggtgggcaatgttaagacggaggatgtaaacct

SEQ ID NO: 231749 - DNA, 1561 bp, Homo sapiens
  chr6:1389131-1390692
  hyper
caaagttccgaaaacgtccacgatcgccagcggcccgcaaccctgcggcggcccccagtcgccctaacaattgtcggggagcctgcaggccctgccagaaagagagaggattggcacgttacctttgggcgtctggcaccccggcgtgtggctgagggcggcaaagtctaaacgaagttgacagatggagtcagtatcggccctggggagggcggccagggaggctccgagcagccgcacccgcagcagcaccactcggcccggcgggccaggaggaggaagggggcgcggaggggcggggctgggtcctgggatgggacgcggggcttgctgcggggggcaaacagaaagaatatttcatgaagtcagaggtggtcgagttttgcgaggggtgggggtcgtccccctggcagaaccggagtgagtctgtgatccctcaattggaaagagggtgagtgagggaaaggggaggaggccgcgagaggaatgaagagcgaggagaccctggagagcggggagcgagataagagagggaggcggccgccaggtcgggagggggaggagtgagcgcggcggcgcggagcgaggagggggcagggcggggtggggggggagggagggagggagggagcgaggagggcggccggggagggcgagggagggaggaagtccgagagacagagcgaggagcgctcctgaagggagacgtcgggctcgtccccggggtccaggccgcggtcccactcgcgggcgcagtcgcccggcgccggccgctcggccccgcggcctgggaggccgttgcgcaaggcagggcccgcggctcggggagggatgcgccgggcgttgcctcccgcccgccgccgccgccgccgccagaagccccagaggagctgagggaggcgacgccgaagcgctggcccggagtggccacggctgcagcccgggcggcgggctagggcgctcgcagggcttctgggccgaccccgctccggcgcctccgcttcccgcccggggcccgccctcgcggcccggcctcgctcccgggtcccagatgaccaccgagggcgggccgccgccggccccgctccgccgcgcgtgcagcccggtccccggcgcgctccaggccgccctgatgagcccgccgcccgccgccgccgccgccgccgccgccgccccggagaccacctcctcctcctcgtcgtcgtcctccgcctcctgcgcctcgtcctcgtcctcctccaattcggccagcgccccctcggctgcctgcaagagcgcgggcggcggcggcgcgggcgccgggagcgggggcgccaagaaggcgagctcggggctgcggcggcccgagaagccgccctactcgtacatcgcgctcatcgtcatggccatccagagctcgcccagcaagcgcctgacgctcagcgagatctaccagttcctgcaggcgcgcttccccttcttccgcggcgcctaccagggctggaagaactcggtgcgccacaatctctcgctcaacgagtgcttcatcaagctgcctaagggcctcgggcggcccggcaag

SEQ ID NO: 231750 - DNA, 76 bp, Homo sapiens
  chr6:1391172-1391248
  hyper
tcgccctacacgagccctgcggcgcactggagctcgcctggcgcctcgccttacctcaagcagccgcctgccctga

SEQ ID NO: 231751 - DNA, 39 bp, Homo sapiens
  chr6:1391428-1391467
  hyper
cccacaaacagggaccccgaagctaggaggtctgagggc

SEQ ID NO: 231752 - DNA, 87 bp, Homo sapiens; identical to SEQ ID NO: 200230
  chr6:1439168-1439255
  hyper

SEQ ID NO: 231753 - DNA, 236 bp, Homo sapiens
  chr6:1524268-1524504
  hyper
cgaggggtctggtgcggaccagcccccgagccacagagtgcggggcccgagctccggaagcccagcctgggccgcgacggccccaattccagcaacgctagagggcgcccgtgccaagcgcccgctcccggcaagccgcgtgctcccgggtggccgcaaccgcgggccgagggggcggagtcatggaaacacgtgccacggcctggatgaacctgcagggccgaacgctcagtgaa

SEQ ID NO: 231754 - DNA, 105 bp, Homo sapiens
  chr6:1605531-1605636
  hyper
cctgcagtcctccgacggccggctcccgccgcaccgcgcaccctggctccggcagactctggggcctggggactcgcccaccctgcgcggcgcgccccccacatg

SEQ ID NO: 231755 - DNA, 481 bp, Homo sapiens
  chr6:1610183-1610664
  hyper
taagcggctggcgcgcgagagaccgagaaaaggtgacgcggggcccgggcaggcggccggcgcgcggccccccccccccccgccctggttatttggccgccttcgccggcagctcagggcagagtctcctggaaggcgcaggcagtgtggcgagaagggcgcctgcttgttctttctttttgtctgctttcccccgtttgcgcctggaagctgcgccgcgagttcctgcaaggcggtctgccgcggccgggcccggccttctcccctcgcagcgaccccgcctcgcggccgcgcgggccccgaggtagcccgaggcgccggaggagccagccccagcgagcgccgggagaggcggcagcgcagccggacgcacagcgcagcgggccggcaccagctcggccgggcccggactcggactcggcggccggcgcggcgcggcccggcccgagcgagggtggggggcggcgggcggcgcggggcg

SEQ ID NO: 231756 - DNA, 183 bp, Homo sapiens
  chr6:1612303-1612486
  hyper
acgtccggagctttcgtctacgactgtagcaagttttgacacaccctcaaagccgaactaaatcgaaccccaaagcaggaaaagctaaaggaacccatcaaggcaaaatcgaaactaaaaaaaaaaaatccaattaaaaaaaacccctgagaatattcaccacaccagcgaacagaatatccc

SEQ ID NO: 231757 - DNA, 904 bp, Homo sapiens
  chr6:1614120-1615024
  hyper
ttcagtcaaaaactgctctacgtggcctgtgattcgctcggtcccctcccccagggtcgtaacctaatcgccgggaagatcgcagcggcgctggcgcgggtgtctcctcggggcaggcgggctgggggtggcctcacggccccgtttaaatctcgctgggctgtcgcggcgctaggtcccggggctgcctccagcttcctcgggttacagcctctttcggggcgggggaaggggagggggtgacggtagagactccaccgccagtctccaggagtttggtgtgatcgctccactttggggagcccggcgaggagctgggatttgcggacaaagggcccgcggccggagctggggtgtcgaggcccggaaggggagctgcagcaggtgactcacggccctgtccccacgggcgggctggcccagcccgaggcggagcagctcggccgccggagacggtaccgttctcgacgtgtccggtcggactctgtggagtagggggtggcgggtggagacccgcgcggcccacgcctggctttccggctggggcgtttctcgcaggcccggtcccttccgagtcgcgcccgccccgacgccggcctcctggacgccgctcgcgacggcaacgctctccagctaatgagctgtaattacccgcggcggcgcggggcccggcttcggtttgcgtttggagctccttcctccccacacccccctccccagattagccccggcctccgcggcctcctcctgaaattagtcgttggagaaaagcgagtcaaagggagacccctgttagtttcgctgggttcctcgcgggctgggtcggggtgccgggaagcgcgcgctgagggagggtggcaggcgcgcggtgccggggacggggacggggcggggggcgccgagc

SEQ ID NO: 231758 - DNA, 329 bp, Homo sapiens
  chr6:1619899-1620228
  hyper
ccccgcgttccccgcgcccggcgctgccggggaaaagtggcacaacaggaaagcctcgccagagggcccttcccagtcggcttcctcgccataaaaagccagactccagccgaggtcctgaccccttccaaatatacgttcccttgcccgcggcccgccactcccgcccgggcctcgggctgtgcagcttcctcctaggcctgcccgggcccatgcctcccccgaagcggcgggagtcggtgcagcctcaacttctactgcgtgtcccaggtcgccaaccagctttgctcgcgtgccgttggcccggaggctgccgcgccagtctctgc

SEQ ID NO: 231759 - DNA, 1072 bp, Homo sapiens
  chr6:1624705-1625777
  hyper
catcgaaagcgacccggggcttccagttcagcttctgtttcgctttggtgcagtcgccctgcagaaagtcctagggaagaagagggggagacgaagcaggcgtgggtcgtgggggtgggggcagcaggtcccgagccccgggaactcccaccgttccgctccctctgggcgcacaaggctccgggtttccctgctttcggtccctgctgtgcgcgttcagttgcggctctcggcgccgtaaatcactaggtcgcggttaagaatgtgctgtgcggacccgtgaggaccgtgaccgcgatccacccccagctacctccacacctcttctccccaaggcgtcccttgggctcttaatgctttttttttttttttttttttttttttataacatgaagttgtcagggacgctcctatgagaactgtttggaattgctgcacttctctggctaggagggaagtgagtaaatcaccaggcgcccctcccagctgcccgtgtccctgcgccgctcagctcctgccgcagggctggccgcgccaagcgcgcgtcctacccaaagccaccagccccgcggggaagggactcgggctgtggggcgcgaggccccaggactcggggacccctctacctcggcggcagcgtgcgaccctctttctaacgcggccgtggatgtttcttcccgggccgcagccaagcgcggttcttcctgggcggtggctttgggcttttcgtacccacagtcaagtcagttcacgtcgcctcccgcacacacgcgttcataaaacgaaactggagtttcacgaagcaattcttaggcttagcgtccaggaacgctgtagacggtctattctattctacccctattctactcggttcgattctgttcctaagaaaatgccgatctcgacccacttgtacttccacgagcggagctgcagccagcagctctgcaggaccccgcactgcccgccaccgtcccctctggcagtgccttcctcctcccgctttccccaactgctccactcgaggaaacaagggcatttcatctccatcgacttaagaggcttccctgga

SEQ ID NO: 231760 - DNA, 44 bp, Homo sapiens
  chr6:2246048-2246092
  hyper
tcgcctggctggccgtggggggcctggacgcagtggcctcccga

SEQ ID NO: 231761 - DNA, 168 bp, Homo sapiens
  chr6:2764960-2765128
  hyper
ttacacagcggcccgcgagaagcatctcttggctcgaagcgcgctgtaggtgaaccgcccttgacttaaacgccaacacatctaaaagggggcgagggacgctttattttcatttccctgaccactactgaggtgagcatttctttcactcgcgtacttgtttgtatt

SEQ ID NO: 231762 - DNA, 885 bp, Homo sapiens
  chr6:2841489-2842374
  hyper
ccactagcccatctcgatctccactctcagagccctgatttcccccgaggacaggcaaagaagaaccgtgctggctgctcggcatgtaagcacaaagctgatttctccttgttgtgaaatcgtctctagaatcgcacggggttcctcctctctctccctgcagctgcagataggagccgcggcctggccctgggctgcctggaaaccgtcacaaacagctctgggaggaagggaattcagggagaagggacaacattctgatctcaggtttcagtcttgccttccgcctgcatctgtcgtcctccctccctccctccctcgcgggctggcccggcctgtacccaggcgggggcgggggatcagaggtcgtctgtctccgtcggggcgcccggaagggatgggggcgcgaagctggcggggagggcgagcgcagggagctgcgggtctgaggggcctgagcctggggggtggggggtgccgggctggaagctgagcgagggagcctggcctctccccgcgcccgcccccgcgccaccgctccgaggcccggccttacccgacaggccgccgaggcacgctccgggctccgagctgggtgcgaggtcaggaaggaggcaccgagggccgctgctcttatagcaggcggaagcgtcacccgggccagcagccgcgggcggggcggcggcccttcccggtgactgcgtaggagtccgagctcccgaggtcgcctaagtgcaagcagaagtgagcgtggcttccgggcagcgccctcctcaggggcgcggcttctttctcagttcaaagcctttccccgaatctctggcaaggacctgaaaagctttttcttactaaggtgtgaatgactgagacgacatattgtgacac

SEQ ID NO: 231763 - DNA, 681 bp, Homo sapiens
  chr6:2903032-2903713
  hyper
tgagccactgcgcccggccgagactggtgactgtaaaggacagtgaagaagcaggacagacgtcatcctgcggatcccagagcagagaagagcagtgagaacacagggccggcaggtggggaggaggctgcaggggagggcttcggccagggaagggcagcgaggagacatccgggagggaggcgtccgcggtggctgtgggccgccaaggcggagaccggctgccgctcccaggcaccccccagagaccgttgctgaccccaccgagaaggcaccgcctccccggggctcttggctgagcgacctctcctgtcctccggtcccatcactcggtggcagccggtggacctgaagctcgccactcccgtcccctaccccagccgtgcgcggggacgccctcacctgccacctagtccagcgctgccgccgtctccgtgccgcgctccgagcctggacgccgacccccgaggcgcaggacccggccctgctgctgcgctcgccgcggactcccgctagggcctctgcaggcaccgcttttataccgcagggtcgggcgcctcccacgctttctgcgtttaggcggagcctggcgggaccagcgggggcgccgcgcgtggtggccgaggtcagagctgggagcagggtcaggtcagggtccccccagtccgccccgcccggggc

SEQ ID NO: 231764 - DNA, 205 bp, Homo sapiens
  chr6:3118559-3118764
  hyper
gcctgcctagagccggagccccgcccactccggagtcccgcctggacgccgacgcagcgagggcgctatggctggcggcctcgcctcctggaaaggccatggtcgctgaggcgacgagcgagggcggggcagcgccgacggggacactcatcccgggagccagagccagcaccgagaggggacggtctacgcgggtgccggcggt

SEQ ID NO: 231765 - DNA, 560 bp, Homo sapiens
  chr6:3227011-3227571
  hyper
gaagctttaaagggcgtcgtgacccgggcacagccgcggggcttgtattttgcaggttcagaaagttgaaactgggcgtttcccaggcaaacagctgccgctcgcggggggaggtaggggtcgagggggtaaggaccagccaaagccgggcagtggcggagcttggcgcactggtcgcagccccaggctgcggcaggaggcgagggcacagggactgcagcccgccaggagcgggtgggcggggaaagaggaacgcaaaggagctaaaggaccgcggttttagattcaaagcacgtcctgagaccgcaagacaatcgctctcctcccctcccccggcagctcgactccggttcaagcgagtacaattaatcctcctggtgtcccagcccctcgcgcggagcgccgcgcacagcctcgcggacacaccctcgtcttctccaggcacgcgtgcctgccaagcagccagcgcggagggaggccgagggggtgacggggactccaaatgagttacagcagaaagaaagagaggtgccccctccgtccgcgaaagtcacctccta

SEQ ID NO: 231766 - DNA, 1107 bp, Homo sapiens
  chr6:3228111-3229218
  hyper
atggtgggggcgtgcgcattgtctggggctgtggtgggggtctgggtatggggatatgggggaacagtgaagaaaaggagggtgagagggcggcgaggcgagggccaccagcgcgtcctgaccggggtgggggcagagctggcaccggatgggaacgatggaggactggagcatgtggagaagccgtcaggtgctccagtgccggcaggtgggagggctgaggtggcacaggctgctccgccacctcggactgcggctcctactcggccactggccagagtccctccagccaactgcccctggtgagaccaccgtctttttcctcaaccctggaggccagcgactgcccaggcggcgctccgtctcacagaggcctgggggaggacaggtggccccagaaggaagtcgtgcttgatggcaaccgggacacctgcggcccatgaacaccagcgcggcctccgcccccgccccagcgtgggcctgctttctcctttgtctgtcttgggctggtagctcctctcactgcgccgcagcatctaggggtgaagcgacctcggagcccctcagccctgcccgaccctctccgggagtgcataacgcccctgctggtacccaggagccctctgccccgggggttgacttttgttgctcgctagtgatggagtgggagtggccggtggcgctgcactgaccgtccggagggcagaaagagggtggggtcccgggggcggggctgtcggcggaacaaagggctctcagaaacgtgggatacgctgtgtaacccagtatttaaaaccacacgacaggcgccccacccccccaccccgccctcggattcagttcatctattgtcaagtaagagggtgggttccaagggtggcccaagcccgagtaacaaactttcttatcttccatcgcggcgacctggaggtccgaggcttcgtgctgcggttgaagggtggggaatacgactaaaaactgcagcccagcgcgcgcgagacgacccaagacccacgcgcactcgcacgagcgcgtgcacagacttggagcacagaccctcccttcagatccgcagtctctaggtactgaggcaggaactggtctctt

SEQ ID NO: 231767 - DNA, 927 bp, Homo sapiens
  chr6:3229278-3230205
  hyper
agagagagactaatcctgcgtgcgtttgagggcgggaggggaaagggtgtcagaaacgttcactgcacaacctgttccctgcaattcgatgactgaagcgcgccgccccacacttcggaagggccgttggcgaggtgacgtgacctctttcatcccctggcgagaaaggccgaatgacccgggcgcacgcggcggagctcagcctgcagctgttgagcgagaccctcccagaactatcagcaagctgtcatcgcctccctttcccgctgtggggtggagggtggggggttcaagtcgattccaatgtacaaagagaagtagcgagaacaaaagcccaggcgcccccaaacatccagggcgcccagactggagctcgccggccggtattccagacccggccggcgtgcccgggtgagggtggggtctaccgagaggcagagagcagcggagggtctgtccacatgccctgctctcccggtaccaaggtctcggggcctgacctccgagtttctaatccagatcctgcagatgccgaaacgtcgagggctagcaattcccaaggtcatacagcaagttgaggacagggctcggactggaatctcgtcttttgggcacaccagacctcagggaaagtgaccgcatctcggccaaaagggctgtggcaggtgtcagcctcgaggtggcggctctggtgggaccaagctgcgccggaaggaacagagctagggcggcacccgcgcggcgagtgtagacacactcggagcggtcaccccctcgctgcgagctcccaggagcaaccctgatgctcagcgctggggggtggggttgggggccgctcagctccatgctgagtaacttgagctggccgcctgcctccttcatctaaccaattcatttctcagcttctgtttccgagccaaatctcca

SEQ ID NO: 231768 - DNA, 717 bp, Homo sapiens
  chr6:3231615-3232332
  hyper
ccggcggagctgcccggcactgtttagtcgcaggggctgcggggtggcagcctcagagccctgtccttccgcagccgtgggccccgcagggaccagccaagcagggcaaccaaaagctggaaccagcagcgaaaaccccgagcccacgaacgcagcgcagtgcgggaacacttgccctttgttcctcagtaaggccgggtgttttcgcatccccggaggttgtgaatttgagttataatggcctcggtcgggactgagagagccgagcttccacgagagagctttgcctgctttgtcctacaaatcggcggagggagtagcatcctggcttttctagggcgccatttccctgctacaggcaatctcccctcccccacgctgtcaatgatttgtgggattcttaggcaggcggggcaggccgagcccagggaatgcacgctgagtcctagacacagagccaggccgggtggaaaacaaaaagagaagaagtgattatgaaataataagacggaccgtgtgccccttgcaaggtgcggcctgcgaaatcaacagacttataaataaggtctggtggaagcgcaggagcgcacgcgggaggctatggcgggggaacctctgtgagttccgcggcggaggctagaacatcgctgtggctgcgggaccctcacccggcgctgaaaaccctccacatcagctcctgctcggaaatgtctccgc

SEQ ID NO: 231769 - DNA, 763 bp, Homo sapiens
  chr6:3455898-3456661
  hyper
cgctttccatccgcgtactgggacaggagtttgggtgcaaactagtaaaggctatggtgctccctttacacccaagtaaaggcatgtggtttgggggacggaaggagattaagccaatgcggaatgccctacacacactctagcaccaccactttggggacttcggttctcccgctggctcgggcttggacctcggtctgcagggagagggttggagggactgggcggctgcggcccttaccttgctgaccacgttctggacgaggccggcgcggatgccgtagtcccatgcgcggcagtcacagttggaggcgttgtcccccttgtccggaggggatggcaggggtggtgtgtcgcctccgtccgcgccgctgctgttgctccggttgcccgcagcctcccagggggcagtggcgaagggggtggtggggaggctggtccagttgcccatgtccccgccccggcctgtggtggtgacccctgccagctcggtgcctttgccggccccgcggcaccagaagttgggctggtccaggaggaacgagtccgagaactggctgaagccgatgaacagcgccgggatccaggtgagcagcacgagggtcttctgatagcccccgcccaggcccccgaggaagggcagcaccgacccgtcatagtccagcaacaagaggctcggggccgcagccgcggagcagcagctcgggtgcgggccgcctccaggatgcagtgggggcagcggctggatctccgcgccgccgcc

SEQ ID NO: 231770 - DNA, 628 bp, Homo sapiens
  chr6:4135155-4135783
  hyper
taccacttcaaggccaccaccgtgtttcggttttgttccctatgcacagattcgtgcgggttcccgggaccccagggaggtgcagcgtgcttcttagccgttactctgtacccggccatttcactttatagcatacgtgttctccaagaagcagagtgttaagtccacacgagtgataacggcttgcgtttacctcgcttttagcaagcgacgctttgcaccccagaagcagcccggctgggaagtgcaggcccgggtgctcagctggggcggctcacccgcccggagtccggccccaggaggatgggagcgtgcgcggaggcaggcggagaccttggggactgctgacagggaaccatagccctgacctcccgacgcgcccatcctgaccactccgggcccagcggtgcaggagggcgcgcgtgaggtcgtcactttttagcactacctcaccggaaaaccagcaaagcaaaatcctgttgccacctagacaatagggaaggagggtcttccaacggcggcgaccttcgcctggacagcggtatcctgcgggcgaccatgggccgaacggccgggactccaagcttacctcggacacgaacgccgcgccagtctccaagccaagtac

SEQ ID NO: 231771 - DNA, 221 bp, Homo sapiens
  chr6:4775127-4775348
  hyper
caaacggtggggaccgcaggtagaagcaccgcttaaggggaacggcgattcgactcgcagtgacttaagggttggcgtggtgcttgttcctgggcgtggggaggacaggaaaccgcggggtctgtgagacgccccgtggttgttgaaacgctgttggggggcacaaacgaatagggctttaggaagaaaactggtgggaggagccttgtggctccaaggta

SEQ ID NO: 231772 - DNA, 76 bp, Homo sapiens
  chr6:4775528-4775604
  hyper
cggctgtctgggggagttgggtcaggaagccccttctttcgccaccgatggggcacgtccagggcccggcaggtgt

SEQ ID NO: 231773 - DNA, 122 bp, Homo sapiens
  chr6:5004398-5004520
  hyper
tcttaggagcccacgcagccgctctttggtggatgtctgaagctgtaaattcactgtcccagtggctgggaacctggctcttgccttttcaacgccacttttcctccgtccccgccatccct

SEQ ID NO: 231774 - DNA, 972 bp, Homo sapiens
  chr6:5084676-5085648
  hyper
ggtggtgcgtgccgcgtgggcgccggccccacggggccccctctccgccctccctgcgggatcccggggcgcggactcgcgggcgcgtcgggcgggacagggggaggggcgggacgtgctcccgggcctggcgcgaatggcctccggccgctctcggctgcgggccatggccgctccccggcgcgtccccacacggtccccgccccagtctggccgcagcccaccccgcgccgccactgggcagatgggggcggcggctcctgcctcccggctttcggaagagcagagcggagcgcgcctgaccgagtcaggcttccgagtgggattggaacccggggcgccctgaagtttggggaaagcaggagcagaagggaagggatgcgctccccgctctccggcggcgcggaatgggcctccttccagcctctgcgtaggcaagatttccccagttgcgcgctgcaccggggactccccagcccgtgaggcagccaagaggagagcgctcagtgaccctctgggggcagagccgtcaggccaagttcatgggcaggaagactttgtgcacgtgggggtctctgaaggttgagcgcgagctctgcacccccacttcgaggcactcaagaagcggaacagacgcgagccccgccgggggtgcgggtgagggctgcagggagcccgcgaacgacagaaagtcgccccccgcattccaccggagcactcgggaacacggcttccaggtgtcccagcggccgcgcctccccgcccccggccctcccccgtcgcgggcaggttcaaccgggaggcggcgtggccccggagccggccccaggcccgcatcctcctcccacttcgccctgggcagccgcagctaaaagccggaggctccaaagtggaactacgttgtcttgtcgagcctggggcgactcgcctcggggagggcgagcctgaactgcagccctgcgctccttccac

SEQ ID NO: 231775 - DNA, 610 bp, Homo sapiens
  chr6:5851316-5851926
  hyper
aaaacattaacagcgggggacattcctctgctgaccccaaagttcagcaggtgcgggagagggaggggcggactcttctgtctgcacagggcttggggaggcatctcctcctcggggctcgcagacagggcttctcgtgccaacgctgcacctcggggcgtgttctcccacccatctgtgctcaggcatcccttccctctcctctggattttgtttaggcctatttgcaatttcttaaaaaaaaaaaaaaatctaataaatagttggagcctgaaagagagctggccaatgaaacgccgcgttggggcattaccgcatcggtgaggccgcccattggctggcgtgccctgaggcgatggctgcgtttccccggcaccgccccgcgccggtgcccacgcgtcccgggcttcaggggagcacctgggaagcgctgggggtcgcgtgcccttggccggaggcctggtcacccgcaggccctgccatcctcggcttggccgctgctgcccgcgcgcctgtggcggagcgagcctgcctccagggcagcctcaccgcctggatcctgggcaggagacctcccaggtaataaccgtgatcacggtgttgatgctca

SEQ ID NO: 231776 - DNA, 1890 bp, Homo sapiens
  chr6:5996185-5998075
  hyper
cggcaaattatagccgaagacggcgcgataataatctaaacaatcaccacaagaagaaacgttctctaacgctccagttgcggaagcctgcgtttccaagactcgcggccctgcgttcccagggatatctccgtgctcacgtgagcgtggtcctcggcttgggacagacaagggagccccagacaggacgataaggtttggagattcccagggcgatctgggactccgtggcgtgggggcttggaagcgcgtggaggggctgagagaggggagagggcgcccttcctctagggcggccccgtctgggaagcagttggaacagcagtaggagccaggggttcctagagaagaaccctgttaggagagcagaccagcccgcgctcccagtccccgccccctcgccccttctgccccgcccttagcctgcctcttcctagatcttccaggacattgatttccgagtaggaagcccgcgctgctaggggaggggcgtcctctgtgggtcgtgggggggtttcccttctctccacagtcggagcagaagggcgcctgccttttattttgacaagcaatgggcttagttgtgagcacttgtttgcccccaatatgtagaggaaaagatactgataggaggcggcgtgctacgatggcaaaaatggagaagaccctccctctttatcctggttctcctccttgttaaatagattcgtatttaagataggcacagacattctaatttgaattccaggggttgaactccagttagaatcatcctatttatacgcagaccgaaaataaccattgaaacgaaaccaacaaaatgcaactattttccaaaaccccgagcgtttgctggtgggtgaccaccccgcgcaggtagcgcggatctgctttggttttgactgagaacccgggttttgactgagacctccgtcgggaggaggggactgggtgggagttagcgggcgaaacgattccccggagtggccccgagcggcgcgtgcgtgaacgcgcggccgtaatatatgctgccattaagaatccgtgcagcttccagcgctccgggcgcagggacgcatgtgttgctggaattcaatccgtggggggaatgcagattgggctgcgactcactgggtttgatttatgaactgttacactagcaattgtttacacattgcatttcagagcccgggcccaccctccccgcagcgggcggcgggcttcgtgcgggaacctgctgcagcccccttggtctctctccatcctcctcccttcccccgtcccccccccccggggcccccgcagcttcctcccacagccaccttctccaagaaatcagatttcgatttctctgaacccagagacctgcatgcagttctttctcccccgcctactccaggcctgcagtccccggacccgggtcgcctctgcccatttactccggaatgtttacttctctttaaggccatgcggggcctataaataggagaggtggaatcagccccactgccagatcaatagggcccgtctcctcgccatttcagctgagctgtcttattaattatgaaaggattcacctgatccctgccagggaacacagcctctcggcccctctgctggagcccttaatggcggttccttcgcaagctgcctctggccaccgcacaggaagaggcgaatcgtggttaggccgagcctgcgaggatcgtggttagggctccggcccgcctgaggcgggggcagacggccggccactggcattgtctgcctgtgcgagcaagcccagttcctctaaatctcaaacagaaagaatctctgctttgtaattaatttaaaaacaactttcattttctcttttttaaggaagcacggtttcggggaagtggccaa

SEQ ID NO: 231777 - DNA, 321 bp, Homo sapiens
  chr6:6000060-6000381
  hyper
ttctgttccccacttcctcttcctccttcccacaacctgcctggatcctccttgctctccacagttcccggctcagattcggcctggagactcctgcctgcctctcttctccccggggtcggtgagtgttagtggccgagcacctggggccggcctcgtagccttcatctgctcttgcgaatccaagtgtcccaggcctgcgcgttgggtccctcctgtttctccctccccagtcttttccgtgggcttgggccccatggggcttcctccccacagctttcaggatgtagcgccagcctccaaggccggaactgcggggaa

SEQ ID NO: 231778 - DNA, 1954 bp, Homo sapiens
  chr6:6003416-6005370
  hyper
ccgagtgagaccctcggatgcaccctctcccgccccgctggaaagagggcagcctggacgtcctgagacctggcgcggatgatgagtggtctggagaggagaaggccagaggccgggcggggtcacggatgagtctgcctgggtcacctccgcaaaggccaaatccacgaacctcgggcctctttctctcctcctcccctgtccgccactcggctccccagacacccttaacaacccacccgcccgccaaaaagcccgcctacactccggacggcagcggggagaggctgttcttctccaggtgccagccctgctgctgaaagtgagctcgccgcggcccggggctcctggccccagctcaggactccctgcagagagcaggcagggataaaagctgagcggcgggaggaggaggaggaggaggaaacacaggccgcacgaaggtccaagccccaagcccccaagcccccggcctctggacggccaaaccccgaggcgcgggactggaaggacaggtaccaggctgcgggcgcgcggctgtggccatctctttccgccctgaggccgacgaacccggctggaagctgagtgcctagcggcccaaagcagcccgggcgccgggagggcgccagagaagcacagcgttagggcggggaagaaagggtgaatctcagaatcgaaatccgcactggcgcccacgaccctgggcgccggcctggtcctcggcagctttctggcggctgcgcttgtgtgtgaatgtgtcccgggaggaccggacacctcaatcccccggcccccaacgcgggcgcctgtccgcgagcgccgggccagacgccgaagaggaaggtgaccgaacccgtagcagcttccgagagcgtacccgtttgcaaattgctgcaggaagagcgaggcgggccttgcgctttttaatccggaacgggaagcactggggaagggaccgaggttaacttcgacctccgctggggcagatacgtaaaccttctcaaacctccgagttcaccttacagcgaacattaaatacccttgcgactacaatactaacaaatcgaacactgacgtaaaatcttaagaataaacgaatctttgttctgatagagctcgttcaaaatggaaatacactccacacatcttcctctataacgcatgtcacaaatacagctttgcagagaagaaacgaaataaaataaagtccaatctccccgtccacgtctctccccaccccttgcctacacccccaaaactcagtggcgaaagaagcccctaaaatgcattgacattttttaaggggaattggggctcgccgggggcgggagcgctcttgtcacgttatcttcccaggcgctgctggagaagaccctgcacaccgcgcatgtgtgagtgtgtgctgtgtaaaataagtcgtgaacatttctgtcttttaaaactgtgactccttggactctagccttctctgggaggccgggaggctgcgcgcgggacggattttgcaggcgcacgcgtcccagcaggtcgcagcccgtgggtccctcgctgtccttcctgaaccccgcttaggcgagactctagcgggtgaccctggctccttccctgtcctctctgccgtccccttcttgtgcggtttccatccgttcattcattcgttcgacctctcattcattccgaacttcctcctgctgcgtcttctttcgtgttcaccacactcttctacctccccgcccctcccaacccccacttttcttgccaaatgtcaatgatttgggacagctcccagccgtgaattaataaagaccgaggttctgttgcaggaaagggcagacattagggaacaaatacgttcaatttcaattccacagtcaacaaatagtcatttttggaccgaggttaatgtgttcaaaacgcgtccctcaggcacgaccaccgtcttttttttccc

SEQ ID NO: 231779 - DNA, 1686 bp, Homo sapiens
  chr6:6006712-6008398
  hyper
cacacatttcctggcgaacatttggaatctatagctttaggaaaaaccgatctgggacgcgctagtccccaggaactgatgcccccaccctcgggggattgccggcttctccgcaccctggggcggccgcggacccgctagtccccctccgcgcctcgggccggggcaggctgcctcccgcctccagcctccagccgggctgagcggccacttacctatttgcaccgcgaggatcagtgaaatatatctgccgttcaacttaagtcccatcctacgtttagtcaaaccatttgcgaccgcagacctttaaatagttagtttagagaacgcgggggaaagccaaaaaataggcattgccaacaagttccgggagcgacagagactttatgcactgggaaggcagagggaggagagaaagagagggagcgaggaagagacagaaagagagagagagagagaaagagagagagagagagaggctgaggggggggggagagctgggaatggttcactccattagaagggggcggaggaagtacagcctcacgcccacgagcaggcctgacgtgggggatgacacggaatgattttttttttaatatagacaccttggtagagaatcgccatttatagtcatcagaagctggaattaatcagatatctccaattaatgtgcgatctgaacgaaattttgcctcccgggggtgagcactttcctattctagcggtcacccctgcctcttcctcgttccgggggccccccagccccgccgcctccctgcgcagaacaggggctccccctcccttccccgccaggagctggggagtcctggcgcgcccactcgattgtttcaacctgctccccctcctccatcagcaccacagagaatccagcccgctctctacgatgcaggggggtttaaaggagcgggagagggaaaaacagctaagctagctcgattaattcgaaagcgctcctcggccgcccgccccctgcgcttgcctaccctctttttctccaacccagcagctgagctctgggcgcagcctggagcgcgtgagcacgcagcccggccccccgcacgagcacacacacacacacacacacacacacacacaaacgcgcgcgcgcacgcccgccagccgcgccgagcgcccccatgcccgcccgcacacaaggcacgcgagcgcgcgcacacgcccaggccccgggggtttggtttgcacacgtggggccccagaaataaacaccgaatgtcctctgaattttacccacctgcgatgccccagcgggccaaaggccgcttcaagggacacagcgacacctgttttagggggcgagtagggcaccggggaaggagcctctgataagacagttttcggatactagtgatttaccaaccaactctcagcgctttaggaaatttccaaggcaagcgctggtgtgcggacttctttctaatcttgatgcgcctcttgggcttatttgttgggctacacacacacgtacccacacgcacacacgtacatcacgtacgcacacgcacacccggacccacacacacctgcactgtcttttgatgctcaggcacagaccctgtgtaggtgtagcctaccctgcaacaaaatacttctgcagctggctttgtgctaggtgcaagctgctatcgacgacagcttgagtca

SEQ ID NO: 231780 - DNA, 565 bp, Homo sapiens
  chr6:6008843-6009408
  hyper
gtgtctgcaatgtgcggcccctaactcacgtcccgcgggagcctcagactcccatgcagccttcctggccctgggggcggagtcatgtctccccgcccctggttatgtcaccggcctgcgggcggggcggttgggggctcgccttccggtgtccaggggcacggtggcggccccgggtgtttcctttccccgagctcggaggctccgggaagaaccgaaaacgtgggcggacaaggggtggggcgggggctggtggcgagaggggggcgtttctcggaccctcccccgacgtcttccaatggcagggcgggaggctttccgaggggcggggcctcaggggggttgccacgcggcccggcccacggctccgcccctcgctcggggttccgcgtggggccggcccagctttcccggaccaggccaccagctgcgggcccccaacctcgctcagactcgtgcagagcccaggcttgggagtggcttaaggttttttgccctcaacgtccttgccttcctcctgcttatccacctgggatcttcacagcatcattttctgggatcctct

SEQ ID NO: 231781 - DNA, 31 bp, Homo sapiens
  chr6:6547065-6547096
  hyper
agccgagccgcaggtttctagaggcctctac

SEQ ID NO: 231782 - DNA, 43 bp, Homo sapiens
  chr6:6547276-6547319
  hyper
ctttaaataaccaccgatgacttgcctacgggccacgcagatg

SEQ ID NO: 231783 - DNA, 111 bp, Homo sapiens; identical to SEQ ID NO: 200258
  chr6:7389807-7389918
  hyper

SEQ ID NO: 231784 - DNA, 206 bp, Homo sapiens
  chr6:7390149-7390355
  hyper
aaggcctttggatcggccgtgggtacatccgtctgagccgttcctttccatcgcagagcggcggcctccggcggcgctctccagtcatggactaccggcggcttctcatgagccgggtggtccccgggcaattcgacgacgcggactcctctgacaggtaggcggccgtacagtgccctggctctgggtacggctctctccttgac

SEQ ID NO: 231785 - DNA, 123 bp, Homo sapiens
  chr6:7541428-7541551
  hyper
gcgtggtaggtagcgtttccagtgatcaacaaaagtaaatatttgaccagtaagtctccaatcgagaggcccctccattccagctatttccgcccggggaccgaggaaatcctcaaaagccgg

SEQ ID NO: 231786 - DNA, 1672 bp, Homo sapiens
  chr6:7541791-7543463
  hyper
cgcaccccaccctgggaagaaaccggccaggtgtggcctaggcgcccagtgccagcggggaggagactcgctccgccgccgaccaacaccaacacccagctccgacgcagctcctctgcgcccttgccgccctccgagccacagctttcctcccgctcctgcccccggcccgtcgccgtctccgcgctcgcagcggcctcgggagggcccaggtagcgagcagcgacctcgcgagccttccgcactcccgcccggttccccggccgtccgcctatccttggccccctccgctttctccgcgccggcccgcctcgcttatgcctcggcgctgagccgctctcccgattgcccgccgacatgagctgcaacggaggctcccacccgcggatcaacactctgggccgcatgatccgcgccgagtctggcccggacctgcgctacgaggtgaccagcggcggcgggggcaccagcaggatgtactattctcggcgcggcgtgatcaccgaccagaactcggacggctactggtgggtacctgcccggagagcgcgggctgcggggctcgcgggacagggagggaccgtcctcctctggacgactgggagactcgggtcccgaaggtggaaaggtttttttgccccaggtcccgaaagaacttcccggccgcgctgggagcaggaccgggtgtcctgacgcgtgcggggacaggttggcccctgtcctgcgaacagggactcggtcgtacctttctcccctcccgcgagcccgggcgggtggtcagagggggcgtcgggcccgcgcggggctgtcccctgcctgctggacacggctgcagccgcctttgtcccagcccgcgaatgggaggtcaggcgaggtggggctgcgaccacaaaacccaacctctccaaccgtaatcaaagtaaaagaggaaaggagcggggccccggtcctgtctggtggccgagtggtgctcggggctccgcagtctctaccggctcacccccaatccccagtaaccccgagaccacgactgcaacgactcctggactcctcggccacccaaggacgtttgtatcaaggctgcgcgtcccggcggcgcggggtcctgtcccgaggaggcgcttcggcttcccctgtccgggaaacgaaacttccccgccggggcggctgccgggcccgggtctcgaagttcggccgggacgtgcctgttaccttcggtcgtccgcgccgcagcccccgcgggcgagcgcacctggggccctgcctctgagccttttgtttcctcctttttaaaaacaccggatgaaagaccccagtgtgccttggatcgcagagcgccggccgcatgtctgctttgatccagaatgtgtgggcaggggagtgggggggtgggagaggacgacgctgggggcccgccctggcctaggcgccccgggaagaccccccggtgagagggtcagcttctccggatcccagcggaaacagaccgagggcgtcatttgggtgggtggggaagagatcctgtccctgctttgaccgggtctcgggagctggactctagatgcccacgtgagccgtgcgcgttttgcagcccgccccacctccccgccccctgctagttgttcccacgtcgggcttttgggaaagaggccctgagcgccgggacgttatt

SEQ ID NO: 231787 - DNA, 238 bp, Homo sapiens
  chr6:7590298-7590536
  hyper
cagagcaaatgcacgcaagagctgagaaaagattggaaaacgcctctcaaaataacagtcccgcccttcccgggactcttccctataggctgttcaagtcacgtggcgactgtggccccgcccacagctcccagaggcctgcgcgtgcggtctgcagttcggccgcttcctcttggcgggtgggctgcagctatggagggcgagcctccacctgtggaggagcggcggcggctgcagg

SEQ ID NO: 231788 - DNA, 828 bp, Homo sapiens
  chr6:7726046-7726874
  hyper
taaaagagaaagcttcagatcggggtattggtcagatcattcttactagcgatgacctcttcgcctttggcacctcgcggctcttcgcatgcctccaagaattcccgggtcttgaaacctacgcgcggcggaggcgacgcctctcgggagagggagggtgaaagaaggggcggggctatttaaatagcccgcgagcttcgcgtccccattggctgccagcctgtcggttaccgcggggcggggagtcccggggctggagtgaggtacctgagccgggcgcgcagcagaaagcccacgttggccgctgcggggagcgcggcgtggagaggcgggagaccgaattccggcgccgccgccgcggccgctgctcggtgcactagcccccttccttcccatcctttctgcgagcgggtttgctgggcagccgggcgaccgccgaacggaaagcaagatcctcgccgcctccgcttgaggaggcgtgcggcgcgcggagattttgagtgggagcgacggtgcccgagagctcaggggcgcggagttcgtgagcgagaaggaagttaaacctcgcggaatagactggcatttcgggacgccttgtcgccgcagcctgggccctgcaacggggtaaacttcatggtggccctgcgatctggggaggggcgtgcgccacggtgatgccgggcatctcccgcagctcgtgagcggccccgctccccgctgccccgggtcccactcagtcgccagggagagcgcggggcagcgcacgtgtgcggccagcgaggcccagagtgaccgcgccgcgactcgcaggagccagggcgcaggctg

SEQ ID NO: 231789 - DNA, 1054 bp, Homo sapiens
  chr6:7728074-7729128
  hyper
gaggcggctggccggccgggccgcggggctccgggagcgctgtccccagcgggcgtgtatttgcggactccctgagcacgttccgcgctttttttcacttctgcccagctctggccaggttaactcaactgcagcaggagagtccagcccgagtgtggccatcctgggaagagggctcttcagtacgattttcccctctaaactgccgccttttgccccctaacttggagtgcagttttcccaccgagacttttagggaatccgacagcggctgggaactttgaaaacttggcatgagtatgtttagaggtatccacggcactaggggaggttgcagagggaagtcccaaaaggaccgcggaaggcgctcggatcccggccgggcggggctcgcttctgtttggggcgggatgaaagctcaactggggtaatccatcctgtgccccggctcacatgcccttggccattgtccccaaaggctgaacctttgatcaatgcagcccaagctgcacgggcagagaaagggtgcggggtaggggccggggttgggcgctgagctcctctgaaccggttgccaggcaacagaatggaaattcacgggcggctaaatggagctccgccacaaatgttctgtggcaaacccggacccagtcacatcgccctttctcccccctcccaccccactgagttttctcatctgtaaatgagaagggtgcagagaagactcttttcttcggagtcagtgcctccggtttgcactgcttttcattcataagctgacttagtttagcgcagacataggatggagggacgcgctgtcagcggacagatcatgggtgcactggctacgcccgggatggttgcagctgcgcggcggggtggggcttcacgggcctccttcccatgtgagacggtggttgtgcccaggccctgaagtgggtgagcagacactcgccaaaggagcacacgggtctcccagccacgtcaaagacgctcatcttttaacggcattacttactggaatgattcccgcgtagactatctgggtgatttc

SEQ ID NO: 231790 - DNA, 86 bp, Homo sapiens
  chr6:8064729-8064815
  hyper
tctacccagcgggcggttccggaaaggcgcctgccgtgtagtcaggctgtgaactggcagaagctcttgccgccatgctggatcag

SEQ ID NO: 231791 - DNA, 823 bp, Homo sapiens
  chr6:10381544-10382367
  hyper
tgtgccctagagggcgctgggccccgcgcgctttcctggctgtccccgccggctttccaccctccccaaagcccaggtgcccaccgtgggtcgctgcggcctttccccttcttggccaaatccgattacttcgcagcctgcagatggcatcgccggctaagggcagcctgcggcaggtccccgagcctgagcactcctcctatctggggcctgagaggacgctctgggctttttcccaggcccagggtgcgcggcctgctagcgcctttcgaggcacagtcccaagataggctcttgtccttcgacgcccccttggcacaagcgcactggcgccctccgctcaacccaccttgcctttggggcgggcttcaaccctgggaagacaggcctgggggaagcgagaggagaggcccgaatagaggttccggctcaatctttcccagacggaggcctggtgtttccagctcagttgcatcttccagccgcgggctcctggcccaaacagaatgtgtttgctttcacaccgggacggcaagcggagtccgcctcagtgagcagcgagctgcgcagtccggacgggtgtcgcccccagagactcgccagccgcccccagacactcgccagccgtccccatctctaatccaccgtccaggcccgggccctgggaagaccccggggacgcgctggagcccctgaagggggtcagggggaacaatgcccgaaaagggagcctccccgaccgccagtccaaaggaaccggggatgtggcagcgattgcgaggggcctaggttagggacacgctcttctcgctgggtcccaagc

SEQ ID NO: 231792 - DNA, 481 bp, Homo sapiens
  chr6:10382717-10383198
  hyper
catcttattaagggagacttcgaaggcctgttagcaggtgactgcggcaggggcaggggcgcatcagctgtccggcttggaccggcgtgggcgtgggctgggggcttttccgatttgctgagtcagccgcgggcgccgcgggctttggtgtttccagcccaagcgactgtgcttcgctgactggtgtgtcaacttggtagtgtaattattgttttgttttctaatatgtaattactctttgtcgttgctattatgaatccaccgagcttgactcttgagcagcaagatggattcaagtttgaagttaggatttgatgcgtggggaaaactggcttctccccatgcgtaggacactataggggcccacgcgtgtcttccccgcagcccagcaagaaagggggcgccgggggtgccctggcggataacaggcggtcacgcctgatccccgcataacagatccactctccgtgtggctacgagc

SEQ ID NO: 231793 - DNA, 610 bp, Homo sapiens
  chr6:10383570-10384180
  hyper
gtacaggcctcccccgcccgacggagcgtcccctcgcacctccccagagttgcctaactcctaggccctgaaagtgccagaacaaaggccgactcccccggcgcctccctcggggactgagcaccctgggccctgctgacgaagcaaaccccagactcagctcagctacccacgctcccagccacgtcgcgggtggatattcccgcctgggctgggcaccgcggaatcagcaccgcctgctgcgcaggccccgcccagaggctgcaccacccaggccctgcccgccgccctctgcagcctaggcggggtgtgtggcgtcgcggtcagccttaccgagggacacgccgccccgggccgggacggggtggggctgtgggggatcctgggccgaggaaagcgatccattttctctaaccgtttgctccagagctgtcaggttagcgtggcctcctcggccgcccagagaagaatgtgttaaaattctttgcacgggagcctttcccagcccaaatataccacactgtggcgttcctcgtgccgaccgtgggtctctaacctagccaccttctcccgttgaaatatgcacatcgctattcaataatttagacaa

SEQ ID NO: 231794 - DNA, 804 bp, Homo sapiens
  chr6:10384945-10385749
  hyper
aagggggaaggagggggagccgtggcgggcgctacgtctgcgagctgattactccccgtctgaaagcggctccatttcccgcacggtgggtaagtcctttatcgggggaagccccggcctcgcccgcagccattcctcgcctcgaggcgcgcgccgggccggggcgcgggagccgctccgcgactccgtaatgacccgggttcgccgcagctgcgccctgaccctttgtgatggcgccgatagcgctcggatgaaattatgtccttctccgggtgtgaaattaccatgtttattaattgagccagacattagctttaccttttctttttaagccgtgaaaatttgcgattcagggcaaatgattctccgacagacgctgggctccacatcccacccctcccagcccgcgccccctccggtcctcgcgctccccggccgccacgtcccgggcagttcaggaaagcttgctaggtttccacgccggaaagcccaaggagaaggagccagcaggcctctgagcgtgtgagcgcgtgtgcgtgtcagcgcgtacatgggggtgttttcctcttcgggaagtgttatcaaacagtaatagctaccctcgactccgaatcacagcattccccccagaattcctgatcagtaaaacccaaatcgttttcaagacaaaggagcatcaatcagcgacaaagacagatttaacgtattaaatctttattaaagtgaagtcattcttattgaaatgatgtattgggtgtgcagaaagattggatttttttttttttttttttttgacaatgtgta

SEQ ID NO: 231795 - DNA, 402 bp, Homo sapiens
  chr6:10385779-10386181
  hyper
gcgtcttgccctgattgttctgggctgggattggattactgggactgcccagggtcccgcgccaggaaacaccaccttggactacagggaagagactgatctccctcctcctgccggcccccacgttgatttcccgagaaacaagcgtgtcccaggtcttctcaaaaacttccctccttggtctccgcattagggaaactgaggtactgctggcatggctgtccatacgtttgctaaatcagctactccagaggcctagagaagggagggaacgccctgggttttccagaacaagacacagatctctccgtagcctaaagaaagtccttgcgccccaggtctgaaagccaaggggagcctgtgtttgctcccagcggggtcgccggccgtctccacaaccct

SEQ ID NO: 231796 - DNA, 1584 bp, Homo sapiens
  chr6:10390064-10391648
  hyper
gcttttttgttgttcgtttgcgctcgcgctcgctctcgctctctctctgcatccccctcaccccctttctcggagactgaactaagtgaaaagttgtttcaataatcgcagctctctgctccgccagggccgagggaggcgggcggaacacggagggtgttttgttaaatgctcccgtcgttcgcaggggctgggacttgataaaaggagacagttttctgaaaagatttgattgaaatggcgtgtgccagggctgatgggagccagcgagggacaaagcgccgagaatccatggacactcgagcaattatgcctccacgctgaaggtggattagcgcgctggaaagaagcatatgtttggcccggggcgacacttccccccggctgagcttagagaatgggagcgcggagagcggctggacccggaatatcaactatctgcgaagcccccccttctagcccaactccgccagcctccccgcccccgccggggaaaagtcggagtgcatttttacaaagatgagaggagaagagagggctaggggaggagcgggcagggaggggagtaggtgcctagaggtgcaaatggccctgggatcccccaggagcggccctccaggctctcctctctggcgatcccgagggcgcgtccgtccttgggtgtggaaacccagagggggtcaaataaatgctcccctatggaatttcccactgctaaggtagttcggtccaggatgcccgctcaacgcgtattggaaggtcagccgaattgttgcaatgaaacaaggttttaatgactaaagatgcaagtgcctaaaaggttgcgttgggcaggaggcgcttggagggcagcgcgggttcccagccattccttgggtccaggtcgaggaaggcctcgggagacgagtcccacagtgagatatttgatgaaatgggtcggggctggaaagctcggacaggccgcatgggagagaaagggtgcgggtgcggcagtcggatccccacgcagctctatctgcttagacacccgggcgagggatgctttgggagtttggagccagaaagtttcccagaccctgcctccagtcattaattaaagcgcccttcccgtggaaaaaaaaaaggcccttaaaactctgacctggagcctcccggctcttcctcactgcacccgcaagcgcgctaagggagacgggaggcacaagcaagtcccaaacctttctctgggttttactgcagtttaattgggtctatcctggacgcgagtgccggtggccgctgcccaggccgtccacatttccctccctggctgtccttcgagcccctaccagtccttcctctccctgccgcccaagcccaggcaagactcgaaccgcccgtcccacacaatctctaccatccccccacccccacgcccaacgccagacagtccaaatcaagtagcgaatagctcctaatacaaaggggtgcatggcaggatattttcggggaattcaaatagggcagcgccctgccagcgggtggggtcctgggtggggcaggtgggacccagtgagggggtgcgcaccgcgctgcctcctccca

SEQ ID NO: 231797 - DNA, 160 bp, Homo sapiens
  chr6:10392115-10392275
  hyper
ccttcagttgagggcgtgtgtttaggtttgttactggaatttaaaggacgcgatctttattgccatagaaaaatcacgtgcagcaaaagcatagcatgggttgggtcactttttaaagctcccgccctgctgatgaaaatattcccgcccccttaaatgg

SEQ ID NO: 231798 - DNA, 146 bp, Homo sapiens
  chr6:10395822-10395968
  hyper
taaaaaacaattgccgcgttgcgttctgagaatacactttccatttgaattcttttttaaacccaccattgttatgaattctctggcttcggaaaatagaattcagactccaccaactcgcgttcgtttgtcgagattgattttac

SEQ ID NO: 231799 - DNA, 3895 bp, Homo sapiens
  chr6:10409934-10413829
  hyper
cattgttctggggtagaactcgcaactactttgtgtggttcctcaaaacgtccctcactctccgcctccgaataaaatgtttttataaggaaatactagggagaacccgggcccaccgactgtatgttccaggtatcctttctggggtaggtaagtagggggctgtgttccctcccgcgctggttgcgcggcctcttaccgggacctcctcgatggcgtgaggtaaggagtggatcgagaggtctccgagtcctgagctgagcgcgtgtgggccgtgcaggaggtcctcgtgccgcctgtagtccctgcgaggatccaggcccgacagctggtgaggcagcccccggtgcgtgtgcaggagcccagactcctggctctgcctctggccgggccagcctgggtgctgcggctgcggctgggcgtgcagggggttcaggctgtaggggtcgttgacgtgggagtaaggatcttgcgactgggggtagataggctggtagggtggggggaagtatgggggctggaagtcggcattgggggtgtgggacagcggcggggcgctcgtgtagggagattgacctacagtgcccagctggggcaaccgtgccgtcccgttgctggtgccgtcgtgacggtcctagaagagagcgagaggaaaggtaaagaacaaggaatcaggcgtcgagctacaactatccacacaaaatccacttgacaagtctgcgtgggaaatcgcccgttcccgttggctggccgccgggaaaaaatcagctctaagttcttttcaggaaataccctcaagtgaaacagaccgaacaacgcagagaaactgtatatggagggggcacaagagactatttaggggtttctttcaaagagaggaaaagatagaaaagggtctcctggaacacagcccattaaactgcagcgtgaaatctctcttaagcaaaattaaaattcctcctaaatactaaacagcagaagcggccttttcttttcccccgatttgaacctgtctgccactgcgttattgtttattctcttccatttatttggagagaaaaaaatcataaacgttcaaagactgttaccgtttcatgactacttaaatagaaacatatttcgcagaggggctgtaacaaaaacacacgtttaaattaccagcttaaagaaggttttaactgcaggatcggggtctgtctttttcgcttcctctgttaggagcctttttctcgacagagtcgatttatggtttggatagggaaagggggacgtcaagtcaaggtttaaaatagaaagattcagccttattgggtttaaaagagagaggtgcaccccggggctgtggccccccccccccgccccttccaccccagccccaaagggcagaagaaacgcctgactttaggtttctctattgcaattcccttgcaaaacaagcgaagagagttgattccagagaccgcgaaccctcggcggttcggccgcaggtcccgagggtagggggcacaccgcgctgcacttttcctgcagacagtttaagcatcaaatgttgagaacatctcggggacaagtgaagactcaaggaaatcaagatgaacgtggggagaaacacgccttgggaagccgcggcgaggtaggtctgcgtgctcggagaggtcgagcgggggctggggtagggggtaatgcactcgatttagggatggaaaagagcgagagaaaggcggaaggtggggtgggggatgcaaatggagagggtgtcctgaaggaaagctgggcgtgaaacccgaggtttcgggcagctccacggcaccaggtttccagaatccaattcctaaagaaacagcaacgggggtggggatgggactcaccatggctgaaaaactgtgaactaacatctgcgaagagtctggggtaacgagtcagggtggaaaaaaacaagcaagcctggagcgcccggctgccccgccgcccgagcgcgccccacacaaaaggcgccgagagccccgcgccacccaggactccagtcacggcgccgacgctccccggagcgcgggagcccggctcggatccatccgaacttgaaccaccgattcgcgcggcgccttcagctggtcgaacccacggtctctatcctgccgcgactggttatgattcaaagttctttaaaaatgaaaaaccccaaaaaaggaaaaaggaaaaagtatgtgtgagtgtgtgggtgcgtgcgtgttccttaatccgtgtctccccctcttttcttagcggcggcttcgcttgagcttctaataaccgcgctgggcagcgttcctggagcctcctaatagcagatattcatgactattaatattacacgaatacttaataagggaagaatgcctggaaatcgagcgtgaagcggagaggcaactcgcgccggagccggctctcaatgcagtccattgacgggagtctcagtgtagcaaatcggagtggggagagggagcgcgagagacaaaaagcgagcgagagagggagcgggcgagcgcgcggggggccgcggcgcggcgtctggcgaatcacagggaaggggcaacattttaaaaggttgcagggcatgcaaaagtgaaagagaaagaggcagagagggagaccgaaggagagagcgcagagagggagaatgtgtctgcgtgcgtgtgtgagaaagaaagtgtgggcgagggagaggagccccgggtggggagaggggagggagggaaggagggagagcccgagaggaggaagggagggaaagagggagggaggaagggagggagggagggggagggggcccagccggagcgcacggagggggaggccgcgggggagggggaaggggagaggaagcgagcgaggacaatcagacctaaaaggctggggcagacctcgggatgcagcgggggtcgtgcgtagcgggtaggagctgcttgggaccgcgtccgggcgctcgtggggctctcggcgcggcaggcgcttcccggccctgtctggccgcgggctccgccgcttcgcagccgagtctgggactcgggactcggctgcccgctgctgcgcggctcctccatgacccggcgccctgcccgggaccggcccgctcgctgcactggtcctctcctcggcctcctcttgagctttcctcggacaggggcaccgtgcgctccccggccaccgtcgctctgccctcggctctctggggccggggattccggatcgggagccgggatgcgggccggggcgcgcacagacgctaggcggcccagcccgggcgccgctggcaccggctcgcggctcccggcaaaaacccgtccgactggctgggccactcccgcctgacgcccccccagatgacacgactagctctcccggcgtgctgcctttgccagtctacccgccaggttgtcagaacaagcggcacctcgcctcctgcgtgtccctacagagccccggcacaatcagactgccccaagccagctccgaaacccgaaatccccgctccggcgcttgcccaccacggccaaagttgtggaaacagctttgactttattctcctctctctctcatctttttttgcctcgcttacacacgcattcacacttgcccccacaggatccctctaggggtgcaagttcatcccccacctagccacccaccccatccagtcggcacctagagccgcacggaggttcggaccccgcccgccgagggcgcccacacctggagctgggtttcggcctctgcgaaagtgaaatgcccaagcctccggccaaagcccagaccagtacagtatgaattgtcctatgagactgaggggttcggcttcattcctacctgcccgcaaagctcgcccccagcctcgaaaacaaagcgactggtctgacgt

SEQ ID NO: 231800 - DNA, 101 bp, Homo sapiens
  chr6:10414479-10414580
  hyper
acccccgtggggtgcgtcgatcctgtagctcagagggagaagctacttagaacttcgtgaagcacagaggatctggagcgagccccgcagctgggatcagt

SEQ ID NO: 231801 - DNA, 1611 bp, Homo sapiens
  chr6:10414934-10416545
  hyper
aaggggagtaaagtgggacacgagcttcaaagtagggaaaccaaagaagggagcatccacgtcctctctctgcagcttctcccccgcgttcttcgggcgaatccgagggacgggcgctgcgctggggaaagtttgtcccacccgcgtttcgcagctggttgcaaggagaggaggaggagagggagggtcaagctcggagcctgtgaccgcacggatgatcgagccggcgtcgcgcttacctcgcagtcctcgtacttgatattatccgtcaatttccaaagcattttcatggatcggcgtgaacggatatgcccctctcggtctcgcacccaagtggagctactctctgggtgagcgcaaagtgctggctgccggcggtgagcgcaggaggaggaggaggagggagaggaggtggaggaggagaaggaggagggagaggaggagggcaaggaggaggaggaggaagaggagggcgaggaggaggaggagggcgaggagaagggcgaggaggaggagagaagggaaagagctcccgtgtgcgctcggagatctccctctaatggtagaaacttttcccttttccagctctttaccaacagcctaatcgcctcattagcatatcaacaatagtccaattgctcgccagtaccacaatctgccgccggccgctccgacacaggtataaaggcctctctacgccgcgaacttgcttctagagcgcactccagcctgcgaactgataaaaccttcctcgagctccgccgcgaggccctgccccaacaccccctctcttaccccaattccgccacattccccttcctttctttctccgcttccttttctccagagatgccttctgcaaagcccggcactgctcaaggtccaagcgccacgcctggggcccagcttctagcacttctcccttaaccctgctaccacgatccgagctgcccttttggccccgtgcaattttattagaaatcattatccctttcgcaattaaacataaccaccaaaccaagaccggcgaagtcactccaggattttttcccaacaagggatcgcctccgctcgaggcagccaccccctcgggccgcagcgccttgggagttttattggctttgagctttcccccaggttggagattctgccaagcggctccggtggctctgctggggtttgcaatcccttaattgcagcgtgtaaaataaaagttgtaccctgaagaggttacttgacagctccaggggttaaacaatttttctcctgtttgtgtgaagctagggccaactgacagttcaaattggtgttcaggctaaggtttcctgggtgcaacgtggacacgaatacagaactcctatggaactgcacacccgcttctgaagttgagcctaaaaacagacgtgtgtgtgcctgcaagtctagataccgtctcgtgcgtgcatcaaaataaatcaccgggaaccgacttttagctgtgttaatctgctctagttttcccaagattcccctttttaattaaagcagggagagttccttcatgatttggtgatgctactaacgcgggcgtgctcgcgaggcagagcccggctgccgcggaacctggaggcc

SEQ ID NO: 231802 - DNA, 872 bp, Homo sapiens
  chr6:10417194-10418066
  hyper
ttggcgccgccctccgtccagaaaatggtcgactttccagggctagaccctgcagggctgtcccagcctgtcgccagtgcagtggtttgaagtcaggatctgggctgccaggagcaccgacaccctcccagcagcggccatagcctgagcaggccaaaccctaggcctgagagcatgggtttttacactccgtagacgtcgccgcggtgtgcttaagggaactccaagtttcgctttcttgccctctgcgggcttggaaaggccgccctccatcctctgccaccccatttcaacccccgtttccacctccccgctgccccgcgcccaacagatctccggctccgcacccgctggggctgctaaactgttgttgtattcccgccgagggcgccattgaggtgcagattgggacctgccggctctggactgccgcccccggtgtaggcgctgatgaaaggcccgggcgagcgccagggtcgcctctggagccagccgagctgcatttatgccagcgtcattaccacgctaagtcgcttcattgcatgtcaatgctccggcggggccagaaccccgggacagcagcgccaggcctggggttggaggtcggagatccaggcctgacgtggggggcataaaaagggcgtcgcggggaagagggagtatttgtgtgagagacagagtcacaaagagaaagagacagtgaggggccagaacgactctcttttctccgattgtcaatgcccagtgggagccgggagcccaacaggcccagcccatcagattcggcccctccgggccccaaatccgctcgccccacccgagatccaggcctccagccacttgcctaactgtgagcccgcaagagccaggcc

SEQ ID NO: 231803 - DNA, 169 bp, Homo sapiens
  chr6:10418727-10418896
  hyper
gatgatgaaatcggcgacaggcagagccttttaccgccaccatcctggccagagccgctctgtttcccgaagggaaagtgtctggaagttggaaggagagagctggacaaatgcttccttggccagggtcggaatccggggctcaggaaggacaggagccaagccttgg

SEQ ID NO: 231804 - DNA, 1457 bp, Homo sapiens
  chr6:10418926-10420383
  hyper
ccaagttccacaggcgttggttttggcaaattcaccacccccctgcctcctcacccaccattctcacactccctcatccgtagcccaggcggcaaaaacccatttcaggaagtggagtgagttgctagctaaacttcgggcaaactttgtatctcctacagaaacacgctgcctccgcgacccagccatctggacccctttccattcttcacacatcctagatctcccgaaatctgggggtaccaagagagacaggtgcaccagaacctgtccaacactcaaccctggggtctagggcgaggccgcaggcgcagcaggctgaaaaccttcaccgccgcgcaccacaaccccaggccttctccctccccccttccgaattagtcatcctcccaagtttctacttgaggtgggaggggggtgggggaaacggccacagcacaaaccacaagtgacccaccaggccacctgtggagcgtgcgccggacttccccggcgccgggccccgcgggctgcgcgctttgcgcccagcaccgcagtcgctgcctgcgcccgtttttcctgtcttcgctgtctcctgggagctctcctgggcgctgccaggcgcgcctcacctacgactcccctgccctgggccacggcgcttcctctcctcctccccgctccggccccctcccctactccacccctgcccacctcaaccccagccaaggcaaaccccccgtacctgccagtcccccattttggcaagtatggacatcgcggctctgcgctcctggcgactggtccccgccgggcatgggctggagggctcggtcgggccagctccctggaatcgcttaggcaaatcctccttttttacctgctcaccaacatctcacctggtcataaagagctgggttgctacctgccgacgcatgcgcgctggcccaggaattcactccgccagctgcagtcccagcgccgcacagagctgacctgggaagtgatggatttatagccgcggcaatcttgccatcagctccagcttttcccaacagccccaacccgctttcccggtcagtccctggcccgggaaccgaagctgactgactgctggatgtgctgggtgcgatgcgagtgtgagtgtgttttcgcactccagtggtggggcatcgacaagctcgacccatggctagcctcccctcggaactttcgaactgggggagtctccactcccgggtgggggtcgggggttggggaagggctagactgctagaagcgtccagaccccatgatccccgcgcacctggacacagtggggacaggtcgccgtccccgcctccccacccgcccacgaggtgcagggcacggctggccttagcggatctgactctgccaaccccggggccacttcagcgttagattccacatgaaactgttgctcaataggtgaagacgttcatgattctgtgtcactt

SEQ ID NO: 231805 - DNA, 423 bp, Homo sapiens
  chr6:10420682-10421105
  hyper
gaagtgatttcaccgctgcttctaattagaggggagctttaaaagaagccacgggatttggggctcccggagccgcacctggccaggagggaggtgagggtgaggagattggcctcgggccacactctcccagagacggtgccagtcccattccgcggctatgagatcgaattgtcctgggtctaggcctgggacgcctgggccaggcccagttaccctcccgggctgctgtcgccgggacttggagacgaacaaagaaccagttttaaatcgtcttctctgacatgtcaggcaaatatgtgtaaaaggtcagctccacgctgtggagcagagacctgtcccccaggcaccaaaacctcccctttctaaccgtgcccgagagcctccgacccctgggccctgtccaggcggctttgcacctct

SEQ ID NO: 231806 - DNA, 1356 bp, Homo sapiens
  chr6:10421351-10422707
  hyper
cttccctggctttttccagacggtggaaatagggcggtgactaacttttcagagtggaagacacgcacgaagggcgcacctgcagctctccgggattcaggcgggggtcgctgtgctctcttaaaagtgagcggcggtttcagcctgccaccgcttcgcctcgccagctcggaggaaactctggctggaggcgacctcgggcccagccggacgggccgggccgagcctaggaggggctggcagacgtgtcccagggccagggtggggcgtagggagcgccgtctccaccctcagtacttttggggtgggggacctgagcgtgcggagagcgggaggcagagctgagagcggggttaagcgcgaagctaaggcgccgcatagggttgggtgggaatggacagggtgagctggaagcgaagcaccccagccaggccttaggagagaggaccgtcggcatctgtgcacatcctagcgggcggatgatgtgggagagaggcggagggaggtgaaatgcgggagctagaatttagctttgcagtgaggtcacttggggtctgcattcagctccgatatatacatgtaggggctgtgtgatcctggggaagttaccgaccttgtctgaactcctgtttcctggtttgtaaagtggctaattggtgggaattcaataggagaatgtgcgcaaaacgcttagcacagcgcctggccaacaatgcgctctcaagaaaggctgctgagccttgtccaggacggtctacaccgccccacgtccaagatgagttcacagcgcccaagacctgttcaatttaagatgatgtaaactgcattgcccttcttagacacgcagcagccaggagctggtcatctgcacctcccgcgatttcctcctcagaaccccagtcctgccagatttgcgtccttccctggctcctcaaacacctgctgcaccgctcagagcctttccccaccccgacctcctccgcagctccgcaccagcgagactgcgccccgtggcacctcgggggtgccacgattggcgggggatgggggatgcctcccagcttcatccgctctccgggttccagacaaccattccggagagccagctgctctcagtgcgggcaggcccaaggccactaactgcacttggcgacccacctccgttcccaagaggcctcggaaagtgcggcctcgggtctcttttgaaacagagacccgcggcaccccgcttctccccctgggataggagagggagagccgcgggagttccgcagccactcctggcgctgccaccacgaagcaggttcactagctaacagggcctgggacactgagccgtgtcgcaaacttttctgt

SEQ ID NO: 231807 - DNA, 968 bp, Homo sapiens
  chr6:10423451-10424419
  hyper
ctgtggctttccagaatgcacgctttcaactgacagcagtgggtacaggcccgaggtgtgcagcaagctgggaagcccagaggccgagaagctaaagatgccctggagactggaggagcgcatcaccggtcagtgcgccccctccaggagcggcctcccggccctctcggccttaggcgacaggtgcagcagctgtctctactgcccgctgtgccagggcggctgccgagcactggtgcggaaccactatcggaacgagtttgcacttctgtttacaaagcaatcctgccatcaaaagaggaacaaaatcaccacttatcacaccctgtcataaagtaatctgccctggagggaaacccttgtggagaactgctgtgtgtgtgtgtgtgtgtgtgtgtgtgtgtgtgtgtgtgtgttgggggaggggggatggaggaaagggggattctcccaactcttctgcagagtaaatcgctggaacgcgtggtgtcccaaccggcctggaaagaccgagagtaccatgagctgtgaagctggggtgtgacagggatgcccgtccagggctggcaagagtgcagaatggctctcttggatctttggaataggcacatctgcagaccccgctccaatgtttactttcctagcgccttcgaagatactcccaagggcccccaaaatagatcagcaaaaagtgttgggggtggggggagtgaaaaagccagttcttgaagactgtaaggtcccctttcgcatctcagcatctggagtgtgcagggaattcctgaccagtggttttgctccctccaatcccttgcctcccccctcccatgttatgcacttgttcttggagagatggacgttaaagaagcgtcaagcagttctcactgcaaataaatggtgcagaaataagagagagaggatgaaagcctaggaagttataagtgatcctgacccgacccagccaccag

SEQ ID NO: 231808 - DNA, 1426 bp, Homo sapiens
  chr6:10425538-10426964
  hyper
taaacgtctcaaaccgctctgcattcgaattagccaacttaagaacaagtccaacagcactgctaagcaagagcctaataactcagcgtttcgcgacatctcttggcggcgttgaccgtttgcccgggacactggtttagaagcacggcatagggtgtctctacatcttagaaatcaagacagcctctaggttagaataaagtttactctggactgggcataactccactccacctctgcgattcttcttctcgtttcccgtcttctgtcttttctttcctcccttcccaactcctagcgcgctactttaacgtctcagtctcgttcgctaagcccatgcgcctgggacttgttctttgaatctcaagtccgaaaagccaggaatcctcgatcatggacttcctcctgctaaattagagggagtgaaatttcgctctcctctccatcctacttccccatcccaaactcgctagattaagttcgctgaccaggcgcgcacccaatggcagcaccctctccaacattttccccaccagagaggcaagtgtcctacatttgtacgtaaaggtccctgagtggctaggtggagaggctcggatgtcttttcctggagcgggcctcggggagctgcagcagccccagcctcaggcaccacagccaagcgagcgcgccttgggctcgctgctctgcacgcagctggaggtctgggccgctgaccctctggccacgtagtcaacccgaggatgtgtgccccggggctcggccttgcctcgggtgagaaggctagtcaccattcagggtgcaggtgtcatggcctggaaatggcaatatctgagcaaacaggtgggcgtcgcttcccggcggtgcggtggccgctggctcgcagcgcgctccagctttcggcgccgccgccgcccctttgctctgcggactcagccagttcccgggtggcccagctgggtggctccgaggcctgcccccttgggctgcggcgggaggcggggactgcagtgccgagtgtagggcgccccagccgggctggcggttcacgctgcgctcgggcctctgccgggagggcgccctggcgccaaacccgggcgggcaggggggtggagagccgattgagtttattcccattcagaatttagaggctggtggagacagagagtctcctaaatggatgcaagtctcctgaaagtctgggccggaagcctcgaaactttctgccacgcaaagccccagctagtctccagggctcggtcctggttccctttgtgcaggcccggaagtgtccgcccggttttcccactgcctggaggggcccagggtcgcggatagactcggacaaggctccgtttactttcagtttgtcttagttgactaatggcgggactggttgtaatgcgtgctctgagattttctccag

SEQ ID NO: 231809 - DNA, 180 bp, Homo sapiens
  chr6:10529013-10529193
  hyper
agggaacagccagacgagagcttcagccatcacgaggatgatttcggaacctggagaaaatgtaagttaaatatatctacactctgatcctatctcaagagagagatattttactcatttcctggttgtgaatgatgggctcttggaagcactgtctttttagcgcgtctcttatctctg

SEQ ID NO: 231810 - DNA, 362 bp, Homo sapiens
  chr6:10694859-10695221
  hyper
cctcctgatgtcacggaaatgaagggcttcgcagaggatgtcccgcccgctcccttcagacgggcgtagctggcaccttcctgagatatgcctgcttgcccccgatttttttctccttgcagtgagaacctcctcatgtggcatctttacttattctcttcttggaaaatccatgtgacctccccgcgcttaaagtgtttccacgttacaggcgacttaaaggcagccctggagcctgacgtataattcgagcgccgatgcagaaaggagtcaggtgtttttttttttttttttttggtttccggttctgtcacctccaggctgagccgggctggcggaagaggcacgtgcgctgctgaatg

SEQ ID NO: 231811 - DNA, 110 bp, Homo sapiens; identical to SEQ ID NO: 200281
  chr6:10723051-10723161
  hyper

SEQ ID NO: 231812 - DNA, 166 bp, Homo sapiens
  chr6:10882205-10882371
  hyper
gttatggacccgggcggggccttgtccttggccgcggtgctgaacgttctccacccgaacggcagcatcgacctctggcagctgccccctcctttataaagatatacctccggggggctccgccctgtctcgcctacctcgctagcgcccacgctccaggggccgg

SEQ ID NO: 231813 - DNA, 649 bp, Homo sapiens
  chr6:10886953-10887602
  hyper
tggctttttaaggcggggcaaaaacttggaacagctaccacaaagcgaacgcctatctgtttggaatttcgcaaataaggaacgtttaaatgacgtagttcacatcctttgagtgctggctttctcttaaagggtgagtgcgtgcgcccaggtggtttggcctgtgtgcgctagttacttgcacgcgcttcttgagtctcaaaacacagagctctagtaaacttcagggggcggattcgtcaattacagttgcggaagaagactcgactcgaagagcggtccgccaccagggctctttcggcagcgcccccagcgggcggggctcttgggcggggaagcaggagagggccgaccgagcgcaacaaagctgagcggcgcgtcgcttcaggaacgaagaagcctcgttatgcaagcggtgagtgacccccgaagggcccggaccttctgtccacagtgctagggcgcgcgagggcgcggggtccctggggctcaggttctgccgccttgaggtgttcgctcagagaccgggtgctgggcatagtcccccgccacctccttgggtttgctcggagtgtattggcagcctgcggggagaccaggcagaatagaaacctcggatccctagctaaatagcgctcagggaaagggg

SEQ ID NO: 231814 - DNA, 221 bp, Homo sapiens
  chr6:11232919-11233140
  hyper
gaggcaggctgatcgcggacctcatttgcatgccgccccgccattggctagtgggacaaggtaatgctcaggccctgcccacccctaattctgaaaaactgacaaagaacttgtaatgtgatcgcttctttttgctttatcagacggtggaaaataaaacagaaagtggggaaccgtcctgaaccttactctgtcctcccgcccccgccaaaaaagaagac

SEQ ID NO: 231815 - DNA, 116 bp, Homo sapiens; identical to SEQ ID NO: 200283
  chr6:11537480-11537596
  hyper

SEQ ID NO: 231816 - DNA, 661 bp, Homo sapiens
  chr6:11537920-11538581
  hyper
gaggcgcgcgcgtgcgcgtgcacgagtggcccgccggcggctgcgggtggagggggcggttcctcgagtgtcggcgacccgagggcgggcaggcgggcggcaggtgccgccgcagcctctggctggtcccgcgtctccgtcctccggcggcgatgagctgggccctgtcgggggctgcacctgccggctgcccatcagcaccggcctcctggcgtgacctcggcctcctcgcgtgtccagtccccgcggcgcggcgctgcccctgagagggagcggcggcggcctcctccgccccgagtcctcgctcgggggccgcgcgaggacggcgcccggccccctcccctccttcctccgtccgccgtcctcaatgtctccccggcggggagggggctgcctgggagacacgctgagcggcccccccacggaggccctccggctgcagcagcagcagcgcccggcccggcgtcccgcagcctccaccagcggcggcggcctggaggagccgcgcacccgccgccgccccccgagcctcgcagccgccgccgccgcccggcacccgaggagagggcggcgggcgcccctcggggaagatgaaggcggaggggggcgaccactccatgatcaacctgtcggtgcagcaggtcctgagcctctgggccca

SEQ ID NO: 231817 - DNA, 520 bp, Homo sapiens
  chr6:12749938-12750458
  hyper
accggcggcccatccggagagtgcgctccaagagcgacacgccgtacctcgcagaggccaggatctcctttaacctgggggcaggtaagaacgcccctggcgccgcgcccccgcccccgccctgctccctccctccccggctgttgagcccccgcccctcccgggcgtcctccccgccgccccccgcagtcgggcgctcagcactcgcgctctttgtgtctccggtgcgcagagggcgtgtgtgcgagctacggggtgggggagggcggcgcgtgcagccccacatccgcccgagtcccacgcgggcttccccggcacggggaggaggaagtgctgtcagtgaccacagtgatcccgggaataacccggagcccgggccgcgcgcccatgcgcaggctgcgggcgcggggtctggcgaggctccccgggcgaggttggctggcgcggctactacggggtggaacttgttggtgacattcagactctgttggctttgacgggttgacgccgccgctgcggt

SEQ ID NO: 231818 - DNA, 976 bp, Homo sapiens
  chr6:13013495-13014471
  hyper
aatctccttcgggtcggagaatttctatgggaggtgaaaacatcaattatgttgtaacaggttgtctgctccagtgaaagtcaagggctacgggttggacccgccggagagggtaatttgctgtggccctggaggggagcttgcacccgaggtttcccagtgcagcgctttccgtgtgaaacattttgctttcattcggcagctttaggcgtgaagaaaagggggagggggttggcgttccgccctggagctcttgagagtgaaggtagcttcaaacccagcaggctctcagtagctggtgctgagatttccggaggggtggggctgccagaggaggatgtgcacgtgagaccccgagagaggtgggagtggagcttctcaggtaggacccaggagcgccctgcctaccccctcctccggcttcgggatccggattggctggggcagcgaggtcggcgaggtcaagaccctttcggcgccctccccgacccgccccgccgcggcggtgcttatatagagcggccggcgcgggcggggcgggggcatgctggcgaggccgaggggcgcgagtggcagcgcgcgggggccggagcagcgcccggccccgggcgcccgggggccggatggcggagcccacgcgctcagcgaagccggggaggtttgcgctccgttcgccgcgctgcagggagggcgcggtgccaggcgcgagcgccgagaaacccaaaaagaaagctttttatttgctgaggatgaagcccctgaaggagcccgcccccaacaacaacaacaacgtgtcctttgtgatccactgtcaactaggcaaggagatcaaacacatttgcagcaactgcagtcggggggaggacgcccgggacggtgagtgccggggcccgtcggggcggcggcggcgagcgcgggaggcggggaggtggctcgggctgtctcagtttgggggcaccgccggcgtctgtcgcct

SEQ ID NO: 231819 - DNA, 149 bp, Homo sapiens
  chr6:13328435-13328584
  hyper
tctcctgcccatgcgcgtccacctgatgggaaaagtaaaaacaccctggtccaagaccccaggtcccattctctctatgatggatgcttcacctctagtagtgcaaacacacccgggttgagactaagtggtccgggagaagcagagga

SEQ ID NO: 231820 - DNA, 152 bp, Homo sapiens
  chr6:13488242-13488394
  hyper
gataataataacctcggctcccggagcgtttcttgcgtgctgagcatcatactaacgcctttccaggtattgtcccttttagtcctcgcagcaacctaaggttattgtaaacccattttaccagtgatgtgaatgagccgcaatgaaggcta

SEQ ID NO: 231821 - DNA, 104 bp, Homo sapiens
  chr6:13488574-13488678
  hyper
tcttggcgggctcccatctgcctcccacctcccccgcccctaggcccatgcccgcccccgcgtagacgctgtggtgtgtacggccgcagcggggcagggggtct

SEQ ID NO: 231822 - DNA, 90 bp, Homo sapiens
  chr6:13614827-13614917
  hyper
ctctagggaccggcgaagccattctttcaggagatatgctcagcatttgccacgggccagctgctgttccaggtcgtgggttagggcccg

SEQ ID NO: 231823 - DNA, 66 bp, Homo sapiens; identical to SEQ ID NO: 200286
  chr6:13615519-13615585
  hyper

SEQ ID NO: 231824 - DNA, 609 bp, Homo sapiens
  chr6:13924915-13925524
  hyper
ttggccctgggctcgctccgctttagccttcccctctcgctggggagaaacaggcggtttgtgagggagactgagagaggggcgtgtttgtggtggtggcggcccatcgggggtccttgtcctctccgaatacccggactgctgaggggaagggccgggggggccccggcggttgccatggtgacgcagggtcggcggctcagcgccgtagagacaaagccgcccgcccgccagcccgctagctcctcgcgcgagctcctcctccacgggaacctccctcccctcccaggcgccgccgcagccggagcggctcccgggccctgggccgccgccggccaggtaaggcgatcgcgcccgcggccggggaggggtcggcgggacgccgggcctccccaacgctggggcagcagccagccccgcagtcctggacggcgccgggccgcccaagcgcgccgaggagagggggcggcaaacttcgggccgagcggcgccggggcccgcgcgcggagtctccctccgggcaccacgggggccgccgtcctggcaccaacttgaggggctgtgcggcggagggcggctgcggagcgcccgcgcgggctgcacctgctc

SEQ ID NO: 231825 - DNA, 150 bp, Homo sapiens
  chr6:14117386-14117536
  hyper
ataatttaaacaggacggtactgactgataacctcccggggaaggcagggagccaagtactacagacttgtatgtttccatggaaatctaacgcgcctttgattatcacagattctggagaagagtgaggacttgggttcaccagtgcgt

SEQ ID NO: 231826 - DNA, 343 bp, Homo sapiens
  chr6:15663120-15663463
  hyper
tctcctcaggcctcgggctgctgctgcctctgtcgccccctgggtcccacgccgccaaccccgcgctgtcaccgcgcgccccgcactcccactaccggccccgcccccggtctggtcctcgccgccgcgccgcaaccccagccccttccgcgttcccgccccgcgcgcgccaggctcgcgcagccgcagtggactgcgccgggctcgggctgcggaaaaggggcgggtcttcccccgaccgagagggccagtagctcctcggctcattcctatcccgcaccaggccttctcgtttttttttttttttctttaaaatggaagcggcatcgtgaaaggatgattt

SEQ ID NO: 231827 - DNA, 227 bp, Homo sapiens
  chr6:16129890-16130117
  hyper
atccaccccccagcgccccatcatccccccaacccagcactttcccggaagaaggcggctccgcacacctgccgcaggtatgtgcgtgatgccgcctgtcgggtccccgcggcgcctggcagtgccacccgcgtgccaggatgggatggagtggctcgaagcagtctcgggccccaggggttcttggcagacaagccgggcccttgtctcacgctgcttctcaggct

SEQ ID NO: 231828 - DNA, 153 bp, Homo sapiens
  chr6:16238456-16238609
  hyper
gcctgagcgacagtgagactgtctcaaaaaaaaaaaaaaaaaagtaaaagctctcagggagcgacttttcccttggataaggcagccacacgctaagtcccctctccatcggggaccctggggacaaacagaacggtgcgcatttccctcccc

SEQ ID NO: 231829 - DNA, 382 bp, Homo sapiens
  chr6:16238856-16239238
  hyper
cccgcgccgccccgcgcaggcgcccccgccccgccgtcgccgccgccgcagccaggagccgctgcaccatgccccgcatagatgcggacctcaagctcgacttcaaggatgtcctgctccgacctaagcggagcagcctcaagagccgagccgaggtgggggacgttcggaagtcgcagtggggtgggatttttttttccgggtggcgcggggcaagtgggtggaagggggtggcaccgggttaccctgcctgctttggtgtttgagactggggcgctgcgcccccgttcccgcgccccagcacctgccaggacgtgaggtgtctttaagggcggtgatacgggggcccatgaaattctctacacgtcggtcccgttgggtg

SEQ ID NO: 231830 - DNA, 252 bp, Homo sapiens
  chr6:16761654-16761906
  hyper
aacaggtcctgtacggctccgccactgtagtagaaatgatgtctgcggtatactctgctctctcctcctcctcctcctcctcctcctccccctcctcccgctcccctcccctccctcctccctccgcccgcccgccctccctccctccctcgcgctctctcgcgctcgctcgctcgctcgctccagtatgtaaatgtgtaatagaagccaaatatggagcagttggctgccgccgccgcagctcaaggatcc

SEQ ID NO: 231831 - DNA, 152 bp, Homo sapiens; identical to SEQ ID NO: 200291
  chr6:16763513-16763665
  hyper

SEQ ID NO: 231832 - DNA, 721 bp, Homo sapiens
  chr6:17101829-17102550
  hyper
tgttggtttctgttcgtgcgaccgtctttctgaggtcgcttttgtgccactgccttctggtgctgtcggggccgcctccacaccgtcctccggccctcaacagccgtctctgcgactggacacctgcctcgcatgccacacgatcaccttcactacagacagtgtctaaaaacaaggatgtggtccaggcaccaggggtaggggcgtgtcacacacaccgtgtcttacaaagaggaaaaataagaggttcccgcaagatgcttgcgactctggtacttttcaaagtaacgcagccaggcagcgggctttcccccggcccctcgctctggatagggctgccatttgcatcctagctgtgatttagacacctccaaccttctagttttcagttacaagagtcccatctccgcccaggtcccaggtctgcatgacgtaatttattgtggcaaccattcctggcgactgcccagaaactcagtgcgtcctgcccggggtttaagcgcgggaagtgggagaggcgggtggcgcccgagcgcagtagcaggggcgtagggcgcagggcgcaggagcgcgggaccaccggcgccggagcgcggcagggagcgctcgcgggggcgcacagcagccaagcccgcggaggaggagcgcgcgcgcgcagcatgggctgtggaccttcccaacctgctgaagaccggagacgtgtacgcgcgcccaagaaggg

SEQ ID NO: 231833 - DNA, 816 bp, Homo sapiens
  chr6:17281596-17282412
  hyper
tccagggccgctggcgacttcggaagccgcgcgcccggcgctctcggccgcccccggccgctcgcccccgccgcgccgccgccctcgcccccgggctcgcccttggcccccggcggccgcgaaagggtgcgggagacgcggagccggaggaggaggcgcagccgctgcccgagccgcagccgcagccggagcccgagccgcggggcgggtgcgaagatgcacacgacccagaaggacacgacgtacaccaagatcttcgtcggggggctgccctaccacaccaccgacgccagcctgcgcaagtacttcgaggtcttcggcgagatcgaggaggcggtggtcatcaccgaccggcagacgggcaagtcccggggctatggatttgtaagttgcacggactgggggtgacggggagggacggagtggcggctgaccccggggatcgggagcttggagtgaggggctcggcgtgacccgtgaggagccccgcgggtagagcggcgctgccccttcgctccggggtgaactgaaactttgctaggggagagggtcggcgccagcctcgcggggttcggagaagacccagcgctgtgcgaggtcgggggccgggcagggcagagcaggggtgaaaggagagacctgtaatgacggcgggatttggggtgcggagggttgcgagggaggggccgcaaccctgaacaattgcattcccgggctggatgccggttgttaagcgcgctgttgctttgtaaaaatgcgtgtgttctggtgttttggctggggcagggaggggacaccccacgaggtctggggctg

SEQ ID NO: 231834 - DNA, 838 bp, Homo sapiens
  chr6:17393745-17394583
  hyper
ttccactccccacccgcgtggctttgctctccctctcccccctcagctcgtctgtatttggagctccggaagctgccggcgactctcccctggagcagcgtgactgacaccggctcctattcagctgggaggagggagaggggaggagaaggggagggccgcgggaggagggtacgagtggccgaccacggatttgcattgccgaggacgggaccccagggcagcgaagcaggtaatcctgcagcggtcggggcccggcgaggcggggaggggtcggggtgcaggtgcggggggcgcctggcggcgggcgctggcaagttgagcccgatgggtggggtagggaagcggccgggacgctgcggctgtggcagcagcgcgaggggaataaaggcggcgcgggcgcgggggccggggcgcggcgacccgggcgcggggcgcgggcgcgggcggactcccatctgggtcagcggagcggcgcgccctgcccccgcctccccagctccggcgtcctggccgctcggaaggcggggtgcgggcaggagctgcccggggttggcgggcggccgcggcctccccaccccagcgccgccgcccgcccggccgctctaactttggggggtctcgtccaccgggctgtgagtcttccaggggggtgggggtgggagtcattgcgccggctctgaccagagccacctcgatcagaaagtgctggaaagaaacagacctggcttcccctctgcagaacctgacttgaggcgatgagtcacttctaaaaaatgcagaggcaactgagactgggggaacggctcggaaaaacggcacccgccgctggctctct

SEQ ID NO: 231835 - DNA, 100 bp, Homo sapiens
  chr6:17706854-17706954
  hyper
ccggccgcctctgcggacccccgcctctgtgtgtgtcacggtctctatggagatctcccgcagaggacagcacgaacagttccccgcggtgctgaggcct

SEQ ID NO: 231836 - DNA, 201 bp, Homo sapiens; identical to SEQ ID NO: 200299
  chr6:17987165-17987366
  hyper

SEQ ID NO: 231837 - DNA, 190 bp, Homo sapiens
  chr6:17988449-17988639
  hyper
gtgaatccaccaccgaaacagtgtatgtttgtaaatagtgctctcccttcctttcccggcctctcttgtctcgggagggatgtcaagtgggctgggagggccattaactcttacataagaatttaatagcaatggattctgtcatcctgccaaatgcagacctcgctgccagggcggaactgggcgaatc

SEQ ID NO: 231838 - DNA, 57 bp, Homo sapiens
  chr6:18122951-18123008
  hyper
ggcctctgcactgcgatctgctgccccttggtgggcacgcgcggcactgtttcctga

SEQ ID NO: 231839 - DNA, 79 bp, Homo sapiens
  chr6:18263922-18264001
  hyper
aagcagataaattgtgcacacattctcgctgaaaatcactccgacttcacgcctctaaacaccaaaagagcaagaaaac

SEQ ID NO: 231840 - DNA, 57 bp, Homo sapiens
  chr6:18277378-18277435
  hyper
ggttttctgaagttgcccagcgcctagaatttcaaggaccgcattcgctgcctcctt

SEQ ID NO: 231841 - DNA, 187 bp, Homo sapiens
  chr6:18387299-18387486
  hyper
gagaggtagcaggcgcttaaggccaagaggtgagctgtccctgtctgggcagaagaagtgcgctaggggcagctgcctgcaccccctgctctgaattcctgcaacagcggtcccaggagaacaagagacaggtcctgacaagcagtagagtcggtgcagcgcgcccgggttcggatagggttaaggc

SEQ ID NO: 231842 - DNA, 856 bp, Homo sapiens
  chr6:19691576-19692432
  hyper
cactcttccagcagcggtcatttaagaaaaaaaaaaattgataataatgtggaactccctccaaaattagcctacaccgtgatataaattggttttctttgtgatctaaaattgactcgcagttgactagttagaaaatagttgctgaaaagccggggccttggagctttcggatcctgcccgcctttcatcatgtaaacaaacgcatcagatttaaagctttcccataattgttatgctaaccttggagcgcaacctctccatttgcatttgaaggagctaaatattaggcaggaaagaaagtgctctttttgaaagcctgagaaaatgtccccgctcggggctgctccgccatctgggccgcgggctgggcgcgcggctcccgcccccagctccttggcagaggcgccggaggaaggggcgccgcgaagggccgtcatcttgttggaaaagaatgcagaaatgcccccctaaggctgaatgagcaccacttccacactcagggcgggggaggccgggggacgtgggagcggcgcgccaggagcgaggcgtccctggtgacagcgcgtcccgagggctctcccttttcccagagcgcataccaaaggcagactcctttgcaggctccacgagccccattcgcggtggaaaggggcgttccagactgcagggtgaggggctccggtgtgtgtgtggtgtgtgtggtgtgtgtgtgtacgcgcgcgcacgcccttaaggaaaaatccatcttttataagtgctgtggcccacttttaactggatctcgtggagtactcagatacagccggtatagtgaaggctaatagcatcagcacactttcgcgcattaatcttg

SEQ ID NO: 231843 - DNA, 621 bp, Homo sapiens
  chr6:19804681-19805302
  hyper
gggccgaacccaaccgccagaatgtctgccgagcctagcatgggatgctgcccagcaaaacagcacccagggagagggcgactgaggaagacagcctgcaagcgcgcttcagaaaggactgggaccagagccctagaaaactacagcgagtggattccctggcaggggaaacccgcgagagcctgggaaaaaaaaaaaaacgagagggagagaaaaaaactcacccgggcgccctgaagcccagcgcaagcaagcgagtgagcgcgcaggctggctgggctgctccagctggaagtcattgtgcgggctggcgtctgcgttgtcagggcgaccgcccggccggcgccagcggagcgggggaggcgggctccgtgaatgggtgacgtcacgcagccggcgccaggcagtctgggcggccgagccaatgaatcagctgtccgggggaggcagcgcagcgcggcgcgcgggagctgggtgcaggaatgcgcctggagccgcgcggcccgggagggcgcgagacgtctccgcccgcctggtcgccccgcggcggccagaggtcccagcgtcccaggctcggccattccggtgccccccacgcccagtctgcggctgtgcccgcgt

SEQ ID NO: 231844 - DNA, 2669 bp, Homo sapiens
  chr6:19836899-19839568
  hyper
agcattttttaaaaagaaaacggaaaggctacacattccattccatcattatggtttcggcaaatgtgaaaaggcgaataatgaaacggaggagggaaatatagaacagaatgaacgtgccttcttgaacagcgcgtctttcttaaggcactggaatcccacggatggagtgatgggtggcggagggtccctgggcgccgtgctattaggagtggcagggtatccgcgagcagggcccaggcgctccctcagcagcctagtcgggataaggggggcggtggagagtgaattccggccgcacattcccgcagttcttcgcaggaacttcgctctctcttttcccctcccttgggcacacatcagcctggcccgactcccactcagctctcttttctcagaaccccgacccacagcgttgacggaatggagtgcccttcccattggcccgagcgtcattccccgaggtggcactgcccgcctgattggctggccactccagaccccccgcccactcctccactcgggtagccggactccccgccccccagcaccgcccggagcccccgccctcgcctctccctccgcgcccccgcccgcgcgcccagcgggctccgctcggctcgcgctgcgacccggcccgcgcgctggtcccgcccccggggcgcacggctctataaatacagctgcgcggcgggccgggcgagagcgtagtggaggaggcgcggttgtgagtagtaccgggagtggggtgatcccgggctaggggagcgcggcggccgcgatcgggcttagtcggagctccgaagggagtgactaggacacccgggtgggctacttttcttccggtgcttttgctttttttttcctttgggctcgggctgagtgtcgcccactgagcaaagattccctcgtaaaacccagagcgaccctcccgtcaattgttgggctcgggagtgtcgcggtgccccgagcgcgccgggcgcggaggcaaagggagcggagccggccgcggacggggcccggagcttgcctgcctccctcgctcgccccagcgggttcgctcgcgtagagcgcagggcgcgcgcgatgaaggcggtgagcccggtgcgcccctcgggccgcaaggcgccgtcgggctgcggcggcggggagctggcgctgcgctgcctggccgagcacggccacagcctgggtggctccgcagccgcggcggcggcggcggcggcagcgcgctgtaaggcggccgaggcggcggccgacgagccggcgctgtgcctgcagtgcgatatgaacgactgctatagccgcctgcggaggctggtgcccaccatcccgcccaacaagaaagtcagcaaagtggagatcctgcagcacgttatcgactacatcctggacctgcagctggcgctggagacgcacccggccctgctgaggcagccaccaccgcccgcgccgccacaccacccggccgggacctgtccagccgcgccgccgcggaccccgctcactgcgctcaacaccgacccggtgagaggccgggcgccggccgtgggcggacgccgcgggggatgggaggttggtggcgtggtggcgggacgcgggcgctcaccgtcctccgggcaggggcgggccaggaatgacagccccctccccctgctcctccgggctcccccgggccgccagcagccggccgggctcggcgagcgcgggtccgggagaacgcgcagggcgggactcggggctgtgggcgccctgggctgtcaagtcccgcctgagcccggaggggcccccccggctacaggctggggtgggggcgtcggcgcgccagcctgatttccgaggacaatccaggaccgtgtcgagcgcgttgtttgcgcctgctaacctttcccttggtgttcggttgctgttccaggccggcgcggtgaacaagcagggcgacagcattctgtgccgctgagccgcgctgtccaggtgagcgcgcatttcccgtctcgggtggccggtcaccagagacgcccgtccccgagggcttccggggccaggcaccgcggtgttctttgcccccagcgtttctgagagcaaactcccaaggaagtaaatcccctctctccctgccacctaagtagcaagtaaacccgtacttagccttagaactcgaggttcagtctcggtggagacgggtcagcccttgtccccgccgtccccgtgttttttctggtggtcagcgggctcttctgccttccctagttcccgagggagggcaccctcgtgggcatgggagctgccccggtgtcctcccgtgcagtctgtcacccacaaagggggacgcgggcagggcgccggagtgggtcccctctccgggcttcccgagggccgcagctgcctgctcggcgcctggcccggccgcgggcgggtgttgtctgacctggtggtttgttttgggttgttgatcaagcatgtcttgagtttggtcggtggcgccagttagtctgcagcgagaaggttcacacaccccctctattcattcctcttccacaggtgtgcggccgcctgagcccgagccaggagcactagagagggagggggaagagcagaagttagagaaaaaaagccaccggaggaaaggaaaaaacatcggccaacctagaaacgttttcattcgtcat

SEQ ID NO: 231845 - DNA, 431 bp, Homo sapiens
  chr6:20211953-20212384
  hyper
gtctacagattcatcgcgcttgttttttaagtagggtcatctaaattaaaaacaataacgacttgaggacactgatgaaagaaacactggtttcatgtatcagactacttcagaacttgattacaggaaacgaggcaatcccaaacttaaagaaaaaaaagttcagtagaacttgccgcgcaggctgtaccaatattttttcacacttacaaggagaaaaacactaacaccaactcaagaagggaaaacacacacacacacacacacacacacacacacacaaaaaccaactgtctagtgtgtggctgtaaaatacgccatggaggcggagggacggtggctaacactttcgcccgccccgtgcacgcgatcgctggggagctggggtcgctgcgctcccggcctgcagttacctggtccagcgggatgcc

SEQ ID NO: 231846 - DNA, 122 bp, Homo sapiens
  chr6:20212984-20213106
  hyper
acccagcgggcgccttccactagagagcaccacccaccccgccccaccctgttttggtttcgccgccgcagtcgaagcggctgagtggctgcgtttccctttcaagccgtagagggttcctc

SEQ ID NO: 231847 - DNA, 324 bp, Homo sapiens; identical to SEQ ID NO: 200307
  chr6:20401055-20401379
  hyper

SEQ ID NO: 231848 - DNA, 459 bp, Homo sapiens
  chr6:20401709-20402168
  hyper
tgagtctgcggggcgcggagtccctgcccaggtcagtagcgccggcccggcgggcgggcggggacaggggcggagcctaggccaggcgtggtcttccgtgggagagaaggaaattctttgccccaccccctaaaaactgctcttctgccagccaatcaaggaggcctatgcaaatagggtccctgtcgccccggtaaccatgatgcacggcagccaatggaaaccagcaagtcgcggccctgctccatgattgggactgaagtaaggaggtagcggcccaatgggctgtgggaacggtcctcggcgggttgaggggcggggatatgcaaatatggtttgaaaagccggcgggaaatccgagtttcgcgggaggaccttggcgcgtaaaccgtatcccttcattcattgtcagcagcagcttcctggagccatttttcagctgccggccgcagcacccgg

SEQ ID NO: 231849 - DNA, 188 bp, Homo sapiens
  chr6:20534532-20534720
  hyper
atttctaggaacccgaggactcagggttgttattttagttcttggaatcaaaggaacttgaagcgtagtcattcctaaactaagttaaaccagaactagcgctttcagcaatgatgtaatttgatctcttcgggccaccgtcgctgagcatgcgcaaataaacgtggcgggacgtatgtgtcatggcg

SEQ ID NO: 231850 - DNA, 482 bp, Homo sapiens
  chr6:21595891-21596373
  hyper
cgcacgcgtcctcctcggcctcgtcccactcctcctcttcctcctcctcgggctcctcgtcctccgacgacgagttcgaagacgacctgctcgacctgaaccccagctcaaactttgagagcatgtccctgggcagcttcagttcgtcgtcggcgctcgaccgggacctggattttaacttcgagcccggctccggctcgcacttcgagttcccggactactgcacgcccgaggtgagcgagatgatctcgggagactggctcgagtccagcatctccaacctggttttcacctactgaagggcgcgcaggcagggagaagggccggggggggtaggagaggagaaaaaaaaagtgaaaaaaagaaacgaaaaggacagacgaagagtttaaagagaaaagggaaaaaagaaagaaaaagtaagcagggctggcttcgcccgcgttctcgtcgtcggatcaaggagcgcggcggcgttttgg

SEQ ID NO: 231851 - DNA, 2313 bp, Homo sapiens
  chr6:21664626-21666939
  hyper
gaacgggacgcgcaggaacccggcccgacgggcgcggctcacacccgtgctcttcctgcgctctcggcctcactttgcggccagagccgcggccctgcgcgtggccggcggccgcttctttatctccgaccccactgcccagtactgtacgcgtccagactaaagaaacatcattcgcttaaggggctgggaaaagcgcgtgctccgctcgccctggcaccgcgggtcgcccagctcgcagactgggacgggcggtgcaagaggtggtgctccctgtccaggaggggacgcggaagagggcatctctggtcccgggatgcgattgtcccggtttctccttctggcccactcgccgcgcgcacgaactctaggggaagttggttgtaaagtttccgagagcggcgtgggctggtgcgagtgaagcgcggggcgggggaggcgaggacagaagctctcctcgcggcgtctttgttctgctctggaggagagaccttggcaaggagtcgccgggcgggtgcagggacctaccgccaccacattccggacccagcgggagccctcctcttaatgcccctccccccgcaagccaacccaggacatagcccccaggtccccaaggttccgtctacctcatccttctacccccaaacttcaccaacccgaaaggattccaagtctgggatggggagaaaggaaagagggtggaggcaaaggtgcgcgacgggctggataccaactggagggtgggtgttcgcattgaaatgtttttttcttttgccctagaaattgcttccccatgcgggcccctactctctcccatttcccccacctccctgctttctttttcttcaattctagtggatctagaaggaaaacgagtgctgctctgagtcactcagcgagctaatgctatggcccgaagttgggatcagggtcgaggggtgggggaccatgtggatggggtcccaattctggaggttgagaatgactggaagggacctggggaagggtcgggagctgttcctggtccgagacacctgatttgtcccggacaaggcagtgggggaggggaaggaaagaggggatgctcggctgggacgtgtcgcggcagggggtggaggatgaggaggcggcctgggaccccgagtcagatctttggggtgagcacgaggacgtggtgtagggaagaggacgagtgagcagcgcctggctgtagggtcagagggcgcctggtcatcctgagagccttgccttcgcagtttgagattaggggaagttcggggcctgagaaggtgggcgcgatgctggagctgggaattcttcctcggagcccctggaccgagttgcgctgcgcctgcagcaacaggtagccccgagggatgggcggaggccccggccgaacccggagctggcctttgtcctgccaattagagggctctccagagggacagcgtgggtgggggtaggtggggaagggcgggagaggagtttcctaacacttggagcccctttgagttgttctgtgtattgggtggaggagggtgaatccgagaggagggaggagggtgaatccgagaggaggaaggaggatgaagagcctagcctgcgccccacctctgattgtgtaagcgcctttatctagggttgaccccctaccctttgcattttgtctcttgggatgacgaaaaatggacagaaactcgacgcccaagtgaatgtttcacattgattggcagggaaagtgcaaacaaagaggtgcatctccgggaaacaatgattttggagatcccctgcccaccaccccagacttgtgcgcggtgcggagggggccagggctggcatctcccggggaaagtttcgagcctggcagtgggaggagaccgtctgggcagagttgtgatgaactggggaccgagcagccccagctcgcctcggaggttcccgagccgggcgggagatgcggggagagggagggggcggggagggaggggagggagagaggaagaaggggtgagagggagaaacctgccgccgctcgccgcctctttgtctgctccgggacttggaacaaaagggggaactctgatgaactctctttcctcccctctcccccggacgccggggtatctccctctcgcaactttgccgccccgactttctctgctgtcaggccgggaaaaagtgtccgaacgcctcgtggactgcagcgggggaaatgtcccttaaaagtgcgacgaagtggggaagaaggtgagtggggactgttgtcttgtttacctctctcccctcaactcgccccgctccccgcccttc

SEQ ID NO: 231852 - DNA, 289 bp, Homo sapiens
  chr6:24360082-24360371
  hyper
ctggcggcgaagctcgggtgcgcatcacgtgaagacagcaggcagcgcgcaagcggggccctggttggggaggcgggcccaggaggtgccctccgccgtagtacctaccgacactcgcgtgctggagaggggaggggagctcgggcgccggccgcgcgggggcggggcggtgcggctcgggtggcacagtggtgaactctgcggcggctgcgcgccgctcacgctgttcctccagctgctgttacctctgcgggcctctctcacccaaggggaacggagttgttatttc

SEQ ID NO: 231853 - DNA, 97 bp, Homo sapiens
  chr6:24403048-24403145
  hyper
gtaggcaagcaaacgtctattggctgtggacttaacaggctcgcccacaggtaccttccgagcatgcgtggggaagtagcacgcaggcgcggcacgc

SEQ ID NO: 231854 - DNA, 262 bp, Homo sapiens
  chr6:24403465-24403727
  hyper
tactgcccttccccggcaacagccttgggacgctggtcttgcagtgaccttagactgctgccccagccgtccggcgcggcgcgcctgttgctccgcgccctccgcaggcctcggcctcccgcgtgtcctgtgagcttgcacaggcccgcgggccgagctgcgtcccactcgctcagaatgcgaccttgctatgtgcgctgtgccctgccggggtcccagcggccaaccctctgccttctcctccaccgcccttgctgcagat

SEQ ID NO: 231855 - DNA, 207 bp, Homo sapiens
  chr6:24494665-24494872
  hyper
gcggggtcacacttcgacccctcagagaacgatcgctcccaatcaatactacgtgctcaggagctacaactgaagaagcgtgatcacggccttggcatttagggcaggcaccagcgcatctatggaccgcgcacaaattccggggatgccgaatttgggggatgctaaggggagagagtgggtctctagcagcgattgggggctcag

SEQ ID NO: 231856 - DNA, 203 bp, Homo sapiens
  chr6:24667302-24667505
  hyper
tcagtgagcaaatcgcggaccaccggggctgccagctcgcctgactcccggcctcttgcgctcctaggggcggagaagggtgcgggctcttcgccctttgtgtcctccttctttcactaacttctggactttccagctcttccgaagttcgttcttgcgcaaagcccaaaggctggaaaaccgtccacgatgaccagcatgac

SEQ ID NO: 231857 - DNA, 265 bp, Homo sapiens
  chr6:24721642-24721907
  hyper
gcgagggtaggggcggagcaaagaaggaaaaggaaagtgtgtgttggagattggaagattcttatttcgattcttataattagttagtcctgggggtcggccccgcggtatcctgcggcaacaaacctagaactcaattcgacacctggaatttaaacggcgtgcgggagcagatgtctcatgttagtgctacttgcctctgtccccaccccgccacgtgcgcaggcagggagggcggtcctcaagcttcgaacaaggtcaaaga

SEQ ID NO: 231858 - DNA, 890 bp, Homo sapiens
  chr6:24910934-24911824
  hyper
tgcttagcattcaacgctcattcaagtcgaggacacccctccccacacagacctcaccgcgttgtacgcaaaatcagaagcaaaaaaggagaaatgaaaaggtgaacctacctaacgacgacggctccttgtcatgtcaggggcacactcagggttctctggcatataaaagcctccgcaccaatgcaatgcccggagctgcccgcacctccggctttgcagacagcctgagctggctcacttgggtgaaggggaccccgggaggaagtcgggtggacgcgagctgtccccagcgccggctgccctgccgcgtccgctcgcagcagctgcggcgcgcggggtgaagttgcggggctggcgggcgcgagggtggcggagcgcggagctagagcggcggagcgggcggaggggcgggagccgtgaggagggggaggcgcggcgcgggggccggcggcgtcacttgtgctgggaggggagggcgggtggagacagctgcttgacagctacttcagcccaactccaggaggctgcgcttcggtgcctgcttccagctgatcgccggcacgccaggctcctttgcaagagctggcgcggcagctttggagtgacccgtggaatcgcgccggggagcgagcccggtggatccagcgcgctggagggagagggcagaggaaaggagccgaggcaaggaaaggccctttcagctaaccttttgggatctttcatacaagctgggctgtgcattgaaaaaaatgaggcggtggtgtatggggtgggggcggtgtgagggtgaggttggctgcccacggcaagggttgtgctggaaagccccgctgaagagggctgctttgtagggcactctctctaccggggctgctttggacacagct

SEQ ID NO: 231859 - DNA, 213 bp, Homo sapiens
  chr6:25278942-25279155
  hyper
agatagcgaactgcggctgcagagcaccagctgaacgcacacacacaagtgtcttctcacggtatgattagtgttcacaggtttcgtctagctcatcagaaatgaagaatagcgatgatgaagtgacatgtcaccgggagggttgaaaaagaaaaagtgcgtaagagggtcccaaaaagaaccagcttccgtgtagacgggtctgcagaatct

SEQ ID NO: 231860 - DNA, 167 bp, Homo sapiens
  chr6:25280013-25280180
  hyper
cagggcaaccatgaccgaggagagctctgacgttcccagggagttgataggtaagattcacgcggttgttggttttccaccttcctctgcgtactcctcacctctctctcccttcccacctctgctttcccgcaggtctcgagaagtcttggcgccccttagggcag

SEQ ID NO: 231861 - DNA, 503 bp, Homo sapiens
  chr6:25652226-25652729
  hyper
agtttggaaagtgagtcaaacgtaagagggatgtcttctccgagtctgagaagcaagttaaagggcaaaagcagtgagccgtggacgcctggagacagtttctttcttcctgaattccccaaagcgcagagacagacaggatctgccaggacagcgcgcagggcggggcggggacaggcgcgccaggagcggggcgggcttccagccgctggttttgctgagggctgagggacggctcagcgacgccacggccagcagcgctcgcgtcctccccagcaacagttactcaaagctaatcagatagcgaaagaagcaggagagcaagtcaagaaatacggtgaaggagtccttcccaaagttgtctaggtccttccgcgccggtgcctggtcttcgtcgtcaacaccatggacagctcccgggaaccgactctggggcgcttggacgccgctggcttctggcaggtctggcagcgctttgatgcggatggtgagtagaacaagcc

SEQ ID NO: 231862 - DNA, 700 bp, Homo sapiens
  chr6:26020588-26021288
  hyper
atcagagtgtgtaacgtcatatttagcgtcttctatcatccaatcactgcactttacacactataaatagagcagctcatgggcgtatttgcgctagtgttgggtgttccgctgtgctgtttttccgtcatggctcgcactaagcaaactgctcggaagtctactggtggcaaggcgccacgcaaacagttggccactaaggcagcccgcaaaagcgctccggccaccggcggcgtgaaaaagccccaccgctaccggccgggcaccgtggctctgcgcgagatccgccgttatcagaagtccactgaactgcttattcgtaaactacctttccagcgcctggtgcgcgagattgcgcaggactttaaaacagacctgcgtttccagagctccgctgtgatggctctgcaggaggcgtgcgaggcctacttggtagggctatttgaggacactaacctgtgcgccatccacgccaagcgcgtcactatcatgcccaaggacatccagctcgcccgccgcatccgcggagagagggcgtgattactgtggtctctctgacggtccaagcaaaggctcttttcagagccaccaccttttcaagtaaagtagctgtaagaaaccaatttaagacaaaagggaatgcattgggagcacttttcgttttaatgctactgaaggcttcaaaaccaatcgatttcgg

SEQ ID NO: 231863 - DNA, 760 bp, Homo sapiens
  chr6:26021528-26022288
  hyper
ctaatgtactccagtctgggcgacagagagattcggttaaaaaaaaagttcgacttaaaataattctggagtcagaatgggtttacatttaattcttaacccagttcctcaaagcctgtagctctgttaagaaaataaaggccattggtcaagcctgcttggtcccaccctcatctccccaccctcccccaatcgctgctcccgccatttcctggggcttggaggaggggttaaaggagcggactgtaggcgtcacatttcccgcctgcgcgcttttcagtctcagtgtccgctggaggtgggggcaggggtaacgtagatatataaagatcggtttcctattctctcacttgctcttggttcacttcttgggaagtcatgtctggacgtggtaagggcgggaagggtttgggtaaggggggtgccaagcgccaccgcaaggtgttgcgtgacaacatccagggcatcaccaagccggccatccggcgtctggcccggcgtggcggtgtgaagcggatctctggtctgatctacgaggagactcgcggggtgctcaaggtgtttttggagaacgtgatccgtgacgctgtcacctatacggagcacgccaagcgcaagacagtcactgccatggacgtggtctacgcgcttaagcgccagggacgcaccctttatggctttggcggttaaggttgctgatttctccacagcttgcatttctgaaccaaaggcccttttcagggccgcccaactaaacaaa

SEQ ID NO: 231864 - DNA, 400 bp, Homo sapiens
  chr6:26027158-26027558
  hyper
gacgaaaagattaaccgccgaagccgtacagagtgcgtccttgacgcttgagcgcgtaaaccacatccatggcagtgacagtcttgcgcttggcgtgctccgtgtaggtcacggcgtcccggatcacgttctccagaaacaccttgagaacgccacgagtctcctcataaatcaaaccggaaattcgcttaaccccaccacgcctagcaaggcgccgaatggccggtttggtgatgccttggatgttatcccgcagcacttttcggtgacgcttggcacctcccttacccaaacctttaccgcctttgccgcgaccagacatgtctaaccagctgacaacaaaaaccaggtacgcgaaaagaaagcaagccacgagcatttatacacgaacatcggacct

SEQ ID NO: 231865 - DNA, 936 bp, Homo sapiens; identical to SEQ ID NO: 200318
  chr6:26031787-26032723
  hyper

SEQ ID NO: 231866 - DNA, 35 bp, Homo sapiens; identical to SEQ ID NO: 200319
  chr6:26032843-26032878
  hyper

SEQ ID NO: 231867 - DNA, 825 bp, Homo sapiens
  chr6:26033434-26034259
  hyper
gttttcttaggcagcagcaccgcctgaatattaggcaaaacgccaccctgcgcgatggtcacacgccccaagagtttattaagctcctcgtcattgcggatggccaattgcaggtggcgcgggatgatgcgggtcttcttgttgtcgcgggccgcattgcccgccagctccaggatctcggcggtcaggtactcaagcaccgccgcgagatacaccggcgcgccagccccgacgcgctcggagtagttgcctttgcggagcaggcggtgcactcggcccacaggaaactgcaaacctgcacgagaagaccgagtcttagccttggcgcgagctttaccgccttgtttgccgcgaccagacataactacttctgataagggaaaatcgccacaagaaaatgtaatgaaactacattagaacgcaaggcagagaagtatttatactgactggaggtaggctgtgaggaattctcccattggctaatgtcaaatacccaatgggaaatcagaatctgcatccttcatttgcatgtaatccttccgtctggtgtaaggtttatgtttgacccaatccccagtctggcttgacgagccttcgacttgaatactaataataattggccgaattaggattttgtcaaaataccttttttaagcatgagtggaggttttgttctggttattttgactttcagccgctcgtgcttttcccggattgtgactcatgtttttggaaaggagtggactccgaccaatttctaaatagatatttaagaggtccttcaaatcgggcgcagtggctcatgcccgtaataccagcactttg

SEQ ID NO: 231868 - DNA, 795 bp, Homo sapiens
  chr6:26045208-26046003
  hyper
taagcgttatttcccgacatgagtctgaacgtttctggtggtttagtgagtgttcaccagcattgataacttgcgagactgtcaggaatgcagaatttcaagtcccactcaaacttactgaatcggaatttacattttaaaaatccttagataccttgttatacactctgttctttgggactggatgaactagaattttagacaatttgtcgctgcagataactgaaacgaaaaggacaggatgggcggtggggcaactcatccaataagattgtctagtaatgaaccaatcagtctggtcactcttcagccaatgattttatcgcgcgggacttttgaaatattacaggaccaatcagaatgtttctcactatatttaaaggccacttgctctcagttcactacacttttgtgtgtgctctcattgcaaatggctcgtacgaagcaaacagctcgcaagtctaccggcggcaaagctccgcgcaagcagcttgctactaaagcagcccgtaagagcgctccggccaccggtggcgtgaagaaacctcatcgctaccgcccgggcaccgtggccttgcgcgaaatccgtcgctaccagaagtccaccgagctgctgatccggaagctgccgttccagcgcctggtgcgagaaatcgcccaggacttcaaaaccgacctgcgtttccagagctctgcggtgatggcgctgcaggaggcttgtgaggcctacctggtgggactcttcgaagacaccaatctgtgcgctattcacgctaaacgcgtcaccatcatgcc

SEQ ID NO: 231869 - DNA, 231 bp, Homo sapiens
  chr6:26056526-26056757
  hyper
tgagctctgacaccgggggaccagacgccttacgaggcgtacccccagcctttttggccgccttcttctttacaggggccttctccgcaggaggcgcggcagcgggagcggcaggagcagtctcggacatgttgagaatcaaaaactcgggtacaagtggcaaagcgccgatgaagcagcgcctgggcagggccgctgtatatatagagcgcaggcgcgctctgattggtg

SEQ ID NO: 231870 - DNA, 695 bp, Homo sapiens
  chr6:26087586-26088281
  hyper
gtgacttctggagccatccccgtttccccgccccccaaaagaagcggagatttaacggggacgtgcggccagagctggggaaatgggcccgcgagccaggccggcgcttctcctcctgatgcttttgcagaccgcggtcctgcaggggcgcttgctgcgtgagtccgagggctgcgggcgaactaggggcgcggcgggggtggaaaaatcgaaactagctttttctttgcgcttgggagtttgctaactttggaggacctgctcaaccctatccgcaagcccctctccctactttctgcgtccagaccccgtgagggagtgcctaccactgaactgcagataggggtccctcgccccaggacctgccccctcccccggctgtcccggctctgcggagtgacttttggaaccgcccactcccttcccccaactagaatgcttttaaataaatctcgtagttcctcacttgagctgagctaagcctggggctccttgaacctggaactcgggtttatttccaatgtcagctgtgcagttttttccccagtcatctccaaacaggaagttcttccctgagtgcttgccgagaaggctgagcaaacccacagcaggatccgcacggggtttccacctcagaacgaatgcgttgggcggtgggggcgcgaaagagtggcgttggggatctgaattcttca

SEQ ID NO: 231871 - DNA, 247 bp, Homo sapiens
  chr6:26104171-26104418
  hyper
aatcatgtctggtcgcggcaaaggcggaaaaggcttggggaagggtggtgctaagcgccatcgtaaggtgctccgggataacatccagggcattacaaaaccggctattcgccgtttggctcggcgcggtggcgtcaagcgcatttccggtcttatctatgaggagactcgaggtgtgcttaaggttttcttagagaacgttattcgagacgccgtcacctatacggagcacgccaagcgcaaaact

SEQ ID NO: 231872 - DNA, 44 bp, Homo sapiens
  chr6:26123722-26123766
  hyper
ttaggtgttaagacgcttacttggaatgtttacttggagctggt

SEQ ID NO: 231873 - DNA, 44 bp, Homo sapiens
  chr6:26123886-26123930
  hyper
cgccaggcgggaagcctcgcccgcgatgcgctcaaatatgtcgt

SEQ ID NO: 231874 - DNA, 180 bp, Homo sapiens; identical to SEQ ID NO: 200322
  chr6:26125817-26125997
  hyper

SEQ ID NO: 231875 - DNA, 328 bp, Homo sapiens; identical to SEQ ID NO: 200323
  chr6:26126237-26126565
  hyper

SEQ ID NO: 231876 - DNA, 154 bp, Homo sapiens; identical to SEQ ID NO: 200324
  chr6:26156348-26156502
  hyper

SEQ ID NO: 231877 - DNA, 521 bp, Homo sapiens
  chr6:26171886-26172407
  hyper
tgatgctgctggtccggagaccactttggagagttttactttaaaggaaatgaaactgccctaaaatgctaatactaaatagccacacaaagccggaaaaaagcaaagaatttcaaaccgaagatgagaggtcctgaaaaataacagcggtcatcctactcccggtgcggctatgcggccatgaaaaggagtcttggggccggtcgtgcccctccacgcaggctccctcatagggtcatcccatcaaccctcgccaaaaacgccggccccctcatagggccgtccggccacgcccctccgtgccctaaccacagagccacacgttacgccgccgccccgttacgcccatccggctcccgcatagggcgtcacgtacgtttaacgtcggcccggcgcgcgcgtccgggaggttgcccgtaggccgctaactggtggttcccagtccccgccgactcggcctctttcttctgcggccaccagatcgcgggatatcggagacttcgaacaatccgctggagtcc

SEQ ID NO: 231878 - DNA, 401 bp, Homo sapiens
  chr6:26172707-26173108
  hyper
gtctcaaaacaaaaaaaacggaggatcgaaaattttgaagactgagagcaaggcaacaatcttcccttgacctttttgctcctctcacaagggtttttcagacggctgaaaccaacgaaaagagtgaggaagcaggcagaaaatttcagctttagtctctcagcatcctcctgctttcttctcggggagctggcacttcccccttctctagtagctgtaaatacgcctcccaactccaaggagacctttcttgcatctcccttactgttctcacgcctgtagggctcttcgtgtgaggattcagtgtatgtatgtatgtatatgaatgtgtgcgaataattatttcctaattgagtttttttttaaaaaaatcatcttccggtacacgcagtgccgtactc

SEQ ID NO: 231879 - DNA, 197 bp, Homo sapiens
  chr6:26183884-26184081
  hyper
gcatgcagacttcacgacaaaataacgaatcagagttggagaaactaaatcttcatttacataacattgtctacaaattccgaggatcaggagatgtagatttcattttctttcctaactgcagaacagcaaagatagcatgcctgagccagcgaaatccgctcccgccccgaagaagggctccaagaaggccgtga

SEQ ID NO: 231880 - DNA, 436 bp, Homo sapiens
  chr6:26188699-26189135
  hyper
aggcacaagaatcgtttgaacccgggaggcggagactgcagattgccgagatcgcgccattgattactccagcatgggcgacacagcaagagtgaaaataaactttaatacactatcctcaccggccagtaagatatgaagccaaggcgtaataagaccatttaacttgaaaaccggagctactaaacacgtgaaactacacttttagcagtgactactactctttctcctgagtggataggtggccctgaaaagggccgttggttttgcggtagtgtactgtagaggtaagctcagccgccgaagccataaagagtgcgtccctggcgcttgagcgcgtacaccacgtccatggctgtgactgtcttgcgtttggcgtgttccgtgtaggtgacagcatcgcggattacattttccaggaaaactttcagcactc

SEQ ID NO: 231881 - DNA, 542 bp, Homo sapiens
  chr6:26197326-26197868
  hyper
tcgcgcagagccaccgtgccgggccggtaacggtggggcttcttcacgccgccggtggctggagcgctctttcgagcagccttggtggccagctgcttgcgtggcgctttcccacccgtggacttgcgagcagtctgcttggtacgagccattgcgaacttctaaaccctgctaaatgacgaaaaaacgaaagtctagcctttcgtacccgtatatataaagacacccctgttctgattggacaaggcagcctttcccctgcagctcgattggtggagacgcccactccctgacagaacatctcctgcatgtagaccaaatattaaaactttcctccgtccatctttaactgctggtgttttcaaccctttcccctctgtgccatgtttctagcttttatttaaaacgtactttggttttccttggcaaaattgtgtctagctactaggatgacgtgtcttaatttttttttaaatgttggcgctgaaactggctttgatcaacgttttaaaaagacgcgcgctagttgtgattggccaagt

SEQ ID NO: 231882 - DNA, 144 bp, Homo sapiens
  chr6:26198468-26198612
  hyper
taacagctttgcaatcctaacgagccgctgcattgatcgatttaaattacatgtgacataaagtctctttgcattttaattagtttgcttttttgggtttttgtttgttttgagacagtctcgctctgtcgccgaaactggagt

SEQ ID NO: 231883 - DNA, 236 bp, Homo sapiens
  chr6:26198852-26199088
  hyper
ccccgccaatttgcttatgtatttttatggcatctttaaaatggacggttagtttcacgattcagtgttaagaacacccacttataaatggaaaaattattaaagaaaactgcaaaatagctatttacacagaaaatgtgagcccttttaaggaatacatgggtggctctgaaaagagcctttgttaagactgcttccttaaaaagccaatataagagttctcgttttacttgccc

SEQ ID NO: 231884 - DNA, 1470 bp, Homo sapiens
  chr6:26204318-26205788
  hyper
cgtgtttttctcttcgggaggaaaatccttttggtcagatttcccttggcttggtggtggagagggtgagatcttgcagttttcaaacacttcctaagggggttccgtccccaagagagcaagcagcagaaatgccagaggaaccgtgcctatggggacaaagctgaactcctcatggaaggagattactgcagttccggtcttgtgagccaaagctcctgttcaatcgtcctagagcatcccaagcagcaaatgattttaaacatgttaatgtatttaatctcatttagttgttaaaatatgcctaaatttcctctttgggaacgcaagacttgcagagatgactccatggagagcggactctgccggcgggaactggagtcgttggtgacgtcatcccagtctgatctgtgaagggtagggccagcaggcagcaccaaagttcccgtatgcgcgttttcagtcttcatttaggtccgaattcccggcatataagaatactaccgtcgcttgtttttcagatttttgcggctattttcgttggtgtgttggtcatgtctggtcgcggcaaaggcggaaagggactgggtaaaggaggcgctaagcgtcaccgtaaggtcctgcgagataacatccagggcattaccaagcctgccatccggcgccttgctcgtcgcgggggtgtcaagcgcatttctggtctcatctacgaggagactcgcggggttctgaaggtgtttctggaaaacgtgattcgtgatgctgtgacttacacggagcacgccaaacgcaagacagtgacagcgatggatgtggtctacgcgctgaagagacagggacgcactctttacggcttcggcggctaatgctaccgcttaaacgactcagcatctcgacttcccaaatcaaaggcccttttcagggccgcccacagttttccgcaaaagagctcatgacttgttagacgattggttggtctctttataagttaattgttcctgtcaacaggtacgtatatttttcagccgttttttttttttcgttccaaattacatttggggtttcggcatacgattttttaggctacgatccttttatgtttattgtagtagggccttagattgcactgaaaaggctagggtaatagtgtctgtttaccttaccacttttattttgagtacctaaaaatgcatggttttcgacataagtgggaaaaccgcaagacactgcgtaaccgctcaaaatggcggagagcgaagaacaaagccggtgcctggcaatgggccggacccgcgaattagcgcaaccaatcatcttcctggaaaggagtgtgggccttaaattctagcggcctgttttctattacttaacctaacgaccgagtttaggtgtgtagaagttcctggggtagataagctcacgcaaggagaggttgcaagcattcatttcggaattctattaagccaaccc

SEQ ID NO: 231885 - DNA, 70 bp, Homo sapiens; identical to SEQ ID NO: 200334
  chr6:26205992-26206062
  hyper

SEQ ID NO: 231886 - DNA, 275 bp, Homo sapiens
  chr6:26215856-26216131
  hyper
ccaggctggaattgcactagcgtattcacatgttcctgcagtctctagcccgagagtttaagctatcctaccacctcagcctaccgagtaaatgatagtacagacgcaagccgtcacacctggttagcttcatttttttgcagagacgagttctatgttgcccaggcaaatctgttaactcctgagctgaagaaagcctcatgcatcgacctcccaaagtgctaggattacaggatcttgccaacacagaacaggagtatctcctgatcaatttt

SEQ ID NO: 231887 - DNA, 300 bp, Homo sapiens
  chr6:26216371-26216671
  hyper
ttacaaaatcggaaaaattattccctagaaaacggtgaaattcaatattaaagctctttatgtgagacttgagtggctctgaaaagagcctttgagttttaaagcacctaagcacacatttacttggagcttgtatacttggtgacagccttggtaccttcggacactgcgtgcttggccagctctccgggaagcagcagacgcacggcggtctggatctccctggaggtaatggtcgagcgcttgttgtagtgggccagacgggaagcctcgcctgcgatgcgttcgaagatgtcgtta

SEQ ID NO: 231888 - DNA, 1114 bp, Homo sapiens
  chr6:26216791-26217905
  hyper
ccatccttcttctgcgccttggtcacagccttcttggaacccttcttcggagcaggagctgacttagctggttcaggcatgctgtcagaaaacaataacagcagtgagaatgaacgcacttaaataaaagctcgtgtctagagtctctccttttataggcctttcatgcaaataaagaattcaaaatatccagctctgattgggcaatgtgttagtgacgcatacatgtaaaatagccttcaccttatttcctttctaattggttggctcgtcaaagaacaattttaaccaatcaaattgcgcctttcacaattctaccgatgactataactagcttcttattcctccatcgagcccattctttttctttattcagtggattgttagttcttctgctgttaggaagccactatgtctggacgtggaaagcaaggcggcaaagctcgggcaaaagctaaaacgcgttcttccagggccggtcttcagtttccagttggccgtgtgcaccgcctcctccgcaaaggcaactactccgaacgagtcggggccggcgctccagtgtacctggcagcggtgctggaatatctgacggccgagatcttagagctagctggcaacgcggctcgcgacaataagaagacccgcatcatcccgcgccacctgcagctagccatccgcaacgacgaggagctaaataagcttctaggtcgcgtgaccatcgcgcagggcggtgtcctgcccaacatccaggccgtattgctgcctaagaagacggagagccaccataaggccaagggcaagtgaaatgattactagtcaaatccgtcagtgatcccgagtcccagaaaccaaaggctcttttcagagccacccaccttttctgtaaagtgctggaatacacatacgatgcctgaaatctcaatgttcactgtcctaatttttaacgaacgcttctgacgttactggtcagttctttattgaaatccttgctcacatttcatgcactaatttatcttactggtgtttctttgcagtaaaaatgcgtttataaaggtatacaagaatagaaaccgaggttgtgacaccaaggtttcactgcgttattttgtgtata

SEQ ID NO: 231889 - DNA, 506 bp, Homo sapiens
  chr6:26223780-26224286
  hyper
gagattgaaacgcacgacaatgtgtaatttcagtcaagacttgcccacgagtcctaagataattcaaatttgcaaaatagacactaacttgaaaggtgcaattgtatcaatcctgtggttagcagaattttgatgaatgccctaaaatagggcaggtttaacagaattcagggaatgagcaggaatgcacaaagcatcctttgtctcctctccactccagcttgcagacatccgcgggcatttgcgggcagtgataaatttggtttagccgtttcccctccctggaggacgggggctccagcatattcatgatgtcaatcgccttggactacatgccagcgtcattgcgaacctgctacactttacaaaatagctttccaatgagaaagaaaacctactgggaaagaaaaacaaaaagaaactagaccttgcaacgggcacgcacgcgcactatccctctctgaaatatttatagtacgcttacacaaacgcgaacttgtaaatca

SEQ ID NO: 231890 - DNA, 163 bp, Homo sapiens
  chr6:26224588-26224751
  hyper
cctcagctctctcccgcagggatccggagaaactgcgccattgttgtcttacagagaaacaaccttctaacactctcttcgccgccatctttttcaagattttaaattgaaaatactttttttgacggctcttgccattatgtctggacgttttaatttcaac

SEQ ID NO: 231891 - DNA, 1628 bp, Homo sapiens
  chr6:26233855-26235483
  hyper
gagccacctcgtcacgcagtgcagcccccacactatttacaaatacagtacctgagggccgatatcccaaagctaaggcttatcaaaggcctgcgaaaagacagacaccgggcaccaccagcagttggccattctcaacgaccagctgcacaagatcgtgggccggaagcaccttgggcatgccacgtactgctcacaaccaggacgggatgtgctcaggaagtcacctcaacgctaaagtaaactaaagcatttacaccacatccctgtgtcagaaataaaattttttcagggccacttttaagcgccgcgctttaacagaaatcggccggccaatcacacaccaccgcgggaatttgaagaaaaagtaggacctggtggctcaagtagccttagctatccggtgactgtggctgagactgagacggaaggatccttgcgcccaggctgctgggagctgttaataactgacccccaaccagcacgactaggatagaccgtggccgcacaacaccgcagcacccgcacccctctccaccccactcccccctccaaaaagcttcagctcttttgactgagacctgtgggtggctctgaaaagagccgtttaaaattttcaaaggggaacgtcccgccagtttcactttttcttcggagctgccttctttgcctttgtaaccttcggcttccccgacttaggcttggccgccttgggcttaggggctttggccttagctggactcttggcagctttttttggctgaggtgttttcacctttttcgcactcttggccactttcttggtcccagcagcggttgctggcttctttaccttcttaggagtctttttgatgcttttcttcggggtagcggcgccagccaccttcttgggcttcttggctgccccagcaggcttcctaggcttggctgcgccagcctttttggccttgggtttgccttccccggaagccgctttcttgttgagtttgaaggagccagaagcaccggtacctttggtctgcaccagagtacctttgctcaccaagctcttgaggccaagcttgatacggctgttgtttttttctacatcgtagccagcagccgcaagcgctttcttaagcgcggccagagaaacgccgctgcgctccttagaagctgccactgccttggtgataagctcagatactgggggtccggatgctttgcgtttcccagcagttgcgcctgccttcttcgcctttttcttcacaggtgttttttctgcgggtgcaggaatggtaggagcaagtggagcagtctccgacatgtttttgtcttcccagaaaagacaataagtaatctcaaactgtcagaacagcatgtcctctacgagggaggctgagggtttatatagagagacgctgagtgatgattggttccttgctccatgcgcggcgctgctggaaaaggactcctcgtatctaccgcgctgctgtgtttgttgccccttaaaaaagagtaaaaatataagaaatctgggcatgaaataattagagacttgggggaaactgatccgagagagttcgggcttcattcctgcctttgtttctatgcatagttttaaaaccggcatcttgaaacttttctta

SEQ ID NO: 231892 - DNA, 531 bp, Homo sapiens
  chr6:26240634-26241165
  hyper
ttgttgtttgtcttcgatcatgtctggtagaggcaaaggtggtaaaggtttaggaaagggaggcgccaagcgccatcgcaaagtgctgcgtgacaacatacagggcatcacgaagcccgccatccgtcgcttggcccgacgcggcggcgtgaaacgcatttcgggcctcatttatgaggagacccgcggtgttcttaaggtgttcctggagaatgtgatacgggacgccgtaacctacacggagcacgccaagcgtaagacagtcactgcaatggatgttgtctacgcgctcaagcgccagggacgcactctgtacggctttggtggctgagcctcaccccggctttttatttaacagctcacccataaaaggcccttttcagggccacctccttcgtcacacgaagggctgtaactgatgacgacttgggtttcgttttgtaaatttgggattctaactgagttaaaccgagccgtttttagcgatcttcctaagatggcggatgtgctaaggagaaagggaaggcgaaa

SEQ ID NO: 231893 - DNA, 49 bp, Homo sapiens
  chr6:26241345-26241394
  hyper
tttgagatggagttgctcttgtccaggctgtagtgcaatgacgcaatct

SEQ ID NO: 231894 - DNA, 211 bp, Homo sapiens
  chr6:26249927-26250138
  hyper
gttgttttgagacagggtttcgctgtcacccatggaggagtggagtggcgcgatctcggcttacttcaacggctgcctcccaggtccaagcgattctccttcctcagcccccgatatagctgggactgcaggagggcgccaccacacccgtatttttgttttttggttttgtacttttagtgaagacgggttttcactatgttaggcagac

SEQ ID NO: 231895 - DNA, 991 bp, Homo sapiens
  chr6:26250198-26251189
  hyper
gggattacaaggcgtgagccgccactatcggccattttgaagacaatggccaagacacaaaagcctagtttagaagagccaccggccctgcccccatcccctaaccctccaccctccttgttttaggagacattactccctagtgctacggcgctttcaactgaaattgttggtggctctgaaaagagcctttggtttaagttggcgcacaccctcagtacaacttatgccctctctccgcgaatgcggcgagcgagctggatgtccttgggcatgatagtcactcgcttggcgtggatagcacacaggttggtgtcctcaaagagccccaccaggtaagcctcgcaggcctcctgcagcgccatcacagccgagctctggaagcgcaggtcggtcttgaagtcctgcgcgatctcacgtaccagacgctggaatggtagcttgcgaatcagtagctcagtcgatttctgatagcggcggatttcacggagggcgacagtaccaggcctgtagcggtggggcttcttcacgccaccggtggctggcgcgcttttgcgagccgccttagtggccagctgcttgcgcggggctttgccgccagtggacttacgagctgtttgcttcgtgcgtgccataggaatgggtttcaagcaatggtcacaactgaacaaacagttgttcttactcctatttataaaggcaaagtccttctgattggtccgaatcttccagtttcgcgccctgaattatgtagtgtgataggacttgtgatcagctactaggtctcattttagaaaatcttaacctatctaaatgcttttttcccctagttccttacattttattatgttttatgtgcctacctgtattacgtaccttcattgattttattttaatcagtttgtttgggattatgtttgacagacggaaatgaacgttctgcagttccggagcgattcaaaaataccgcgtttgagagtgattggtccag

SEQ ID NO: 231896 - DNA, 453 bp, Homo sapiens
  chr6:26251501-26251954
  hyper
gataattttaaatccggaagctgcaatttggtaggaaactagaaacataatatccgtctttgtttctgtttaaattctcacctaaggagacagaacttataggtagatgttactggcaaggcattagtttttctaatgttttgaatgaaaaactacgttttttcccccgggaggtgtagaaaaggatttagggtaggtttcgcataaatatccaatcaaaaagtagacttgaatttaacttttttattggctgatttggtccaatcagggattgagaatgattaagcacctatttgcataaaagacctacaaaaacggccagctgtgctgttgagccttcactttggggtgtattcttactcctttatcttgttgcaatgcctgatccagctaagtccgctcccgccccgaagaagggctccaagaaggcggtgaccaaggcgcagaagaagg

SEQ ID NO: 231897 - DNA, 120 bp, Homo sapiens
  chr6:26252074-26252194
  hyper
ttgtcaacgatatcttcgagcgcatcgccggcgaggcttcccgcctggctcattacaacaagcgttcgaccatcacctccagggagatccagacagccgtgcgcctgctgctgcctgggg

SEQ ID NO: 231898 - DNA, 32 bp, Homo sapiens
  chr6:26252254-26252286
  hyper
aataaatggacgcatgttcaaacccaaaggct

SEQ ID NO: 231899 - DNA, 2061 bp, Homo sapiens
  chr6:26271212-26273273
  hyper
ccccacgaatgcggcgagcgagctgaatgtccttgggcatgatagtcactcgcttagcatggatggcacacaggttggtatcctcaaagagccccaccaagtaggcctcgcaggcctcctgcagggccatcaccgcggaactctgaaagcgcagatctgtcttgaagtcctgagcgatttctcgcaccaggcgttggaaaggcaacttgcggatcagcagctcagtcgacttctgatagcggcgaatctcgcgcagagccacggtgccgggacggtagcgatgaggtttcttcacgccgccggtggccggcgcgcttttccgagccgccttagtggccagctgcttgcgcggcgctttgccaccggtggacttgcgtgcagtctgcttggtgcgggccatctcagactacctgaaagaaaaactcagccacttggcagagtggaaactgcccttatatatactcagaaacattctaattggccttgttgattttcaaaagacccgcgcaacaaaaccattggctgaagagtccaacgatgtgattggtgaattactggaaaatctgattggatgaatcacttcatttttgaatcctctcttctcggttagtctgcgatccaagaacgttaacttcttaaagttctaattctgcgcttctcaagctgtagtccgtaaacgactactttaagacttggaagacgctaattctcattcagtagatgtgttgtggggccagattcggaggaccacgttttgagaagtttatcttgtgccgttttcttgagtcacctggactgctgctagctggaaacctttgaccattataaggcaggattcctgggtgatgtacctgggaaatcacgagccaagaagtcaccgacatacaacagtgagcaacaaatgttaactgaattctattttgtcccaaatggtgttttgcttcggttgagaatttttaaggcacaggctaattttaggttttccaacgactcttatcatttacttttcgttgggtcctattgatgatattccaggataccacccccactagcctcttctgcaggataacttgaacactgcagtggccctgtccatctaaactttacaaggttttgtaaacgttactgaacttgcttcttcccgactacattaaagcacttacttgagatattaaacattttctcattagtcctgtttgcctagtcagtcacttgtatagacagggcaacagcacggcctgaatattgggcaggacaccgccctgcgcgatagtaactttgcccaacagcttgttgagcttctcgtcgtggatggcgagctgcaggcgtcggggggtgacgcgggtcttcttgtctcgggccgcgttgcccgccaactccaggatcttggcggtcaggtactccagcaccgcctccaggtacaccggcgcaccggcccggacccgcttggcgtagttgcccttgcggaggaggcggtgcactcggcccacagaaaactggagaccagccctggaagagtgcgttttagccttggcgcgagctttgctgccctgcattccacatccagacgcagtgaagtatttaaatacttgtttagaagaaggaaagtgattgattctagtaaaacgcaagagctaaactcttataatctatattcggcaaagtagactgtgctatctcctgaacacagatttcagccaatcgaaaagcaggtgtttaaaaaaatttaaaaaaaaaaaaaaaaaaaaaaccacttctgacttacatacttatagttgaaaggtcaaattatgcaaggttgagcttctgggagagccgatgagatttaggagttcagaaatggcctatcatatattcagacactaaaagaaccaatgagaaaccgaaactcagccagcctcatttgcatatacacgaggtaaataatgagggcgtttgggctcaccagcattttcctgtggtcatttgacggtatcacttcggctgcgaacatgcctgaaccagctaagtcagctcccgccccgaagaagggctccaagaaggcggtgaccaaggcacaga

SEQ ID NO: 231900 - DNA, 240 bp, Homo sapiens
  chr6:26273513-26273753
  hyper
ccggggagctggccaaacacgcggtgtcggagggcaccaaggcggtcaccaagtacaccagctccaagtaaactagttacctgggtaaaagcgctaacgacccaaaggctcttctaagagccacccatgttgtcatttaaagatctgtaattttccagacttggcattggcaaggtaaaatggctaagcaacacatgggatagtaagggtttactgaaacatccaagttcggccgggcgc

SEQ ID NO: 231901 - DNA, 225 bp, Homo sapiens
  chr6:26286645-26286870
  hyper
caaagaagtaggcaactgctcgtaggttttttcttaaattacgaggtagtctgaacgcatctcctgtaagtagttaagagtactgtgagaccgtgtgcctggcagaacagcagagtggcgcagcggaagcgtgctgggcccataacccagaggtcgatggatcgaaaccatcctctgctaggtcctttttttttctccccccccgtctattttcctgaggatccc

SEQ ID NO: 231902 - DNA, 753 bp, Homo sapiens
  chr6:26313149-26313902
  hyper
ggtctccaaacctacgaaactggctgaaagctctccacacctaattagtaggattacagatattgaagcctacaaatgcgcatttccaccaggataccttgtggattcttacacgggtcaggtccgctgacgtttagcacgcctactttaaaacctcttttctgtagggtcctagtcttcaagtaaaatatatgcggccatatagcagaggatggtttcgatccatcgacctctgggttatgggcccagcacgcttccgctgcgccactctgctgtctcgacagtccgctccgccactctgctgtttcaacattactcttgtcaagtatgtattagaggctacaattttcggcatcttcctaattttaaatgatttgttgtcgtttgccaaattatcctggagaatgagaagtgcacactggccatccatatggggctgcacgccacttccaaacaccagcggtttagaattcttcctcgataaattcgaatcagctgaggttgaagttctctaaaacggaagcatgtttcgagttatgggaaaacaaagtgcaggctaattggcataatttataaaggtgaaattataaatgcttgggcaaatttcagccattcctggataccggagggagtcgttattacttccaaacattttttacttgagattttcatcgaaaatgttcacaggaaaaaaaaaattacagttgcagcgaggaggcaacagaacctagaactccgcgcggcaggtgagaa

SEQ ID NO: 231903 - DNA, 120 bp, Homo sapiens
  chr6:26322183-26322303
  hyper
acaggttgttgtcttcaaaaaggccaaccagataggcctcacttgcaaagcaactatagctgctctctggaagcgcagatctgttttaaaagtcctgagcaatttctcgcaccagacgct

SEQ ID NO: 231904 - DNA, 300 bp, Homo sapiens
  chr6:26322363-26322663
  hyper
gtgccacagtaccaggcctgtaacgatgaggtttcttcacccctccagtagtgggagcactcttgcgagaggcttttgtagccagttgcttcccgggtgctttgccaccggtcgatttgccggtcgatttgcgggcagtcggctttctacgagccgtggtatagagacctccttacttaccccgcttctcctttggctggagctcggcgagcgagaggcggcgctgggctggcgttggagagcgacggcaggacggctgcggctacgaacacaattgcagtattttttttttttgacaga

SEQ ID NO: 231905 - DNA, 78 bp, Homo sapiens; identical to SEQ ID NO: 200347
  chr6:26322843-26322921
  hyper

SEQ ID NO: 231906 - DNA, 188 bp, Homo sapiens
  chr6:26327801-26327989
  hyper
aggtttttggtatctgtagtcgtggccgagtggttaaggcgatggactagaaatccattggggtctccccgcgcaggttcgaatcctgccgactacggcagtgggtttttgcatcttcaagcaggtttcatccgaccgatcgatatttcacgtgtaaaaaggctttcgatcttttacaagttaacatc

SEQ ID NO: 231907 - DNA, 175 bp, Homo sapiens
  chr6:26328289-26328464
  hyper
tatattcatgtataggaggacgcggtaatcccaaaacgtttttttctataggtataacgcctgtcttcgttcgtcagagggccagtggcgcaatggataacgcgtctgactacggatcagaagattccaggttcgactcctggctggctcgttcgactttagtggaaactttgag

SEQ ID NO: 231908 - DNA, 165 bp, Homo sapiens
  chr6:26330501-26330666
  hyper
ggaaaaacaaatccacaaaacgctccctagcagaggatggtttcgatccatcgacctctgggttatgggcccagcacgcttccgctgcgccactctgctacgcgagtcacaggtcccagagttaatagtcaccttttttctagcgtgtcaagtttccaaatctca

SEQ ID NO: 231909 - DNA, 934 bp, Homo sapiens
  chr6:26331613-26332547
  hyper
gtaatatgtaatgtactccccgccatacagttatctgagccagcgagctaaaaactgttgaccccgacgtgatttgaacacgcaaccttctgatctggagtcagacgcgctaccgttgcgccacgaggtctccgggacacctacgttttatttacctgtcaatctgattcatgaaaataatttcggtactggtgaagaccaggcagctattaacagatacaaaatagtgcctagctgcttccctctcggtaaaattgctgtccgcccaatcactgattttctctgcctctgaattgcttcattttcacctgttcttgtttatatttcattccgtttcttacctagttttccctgtatattccaaatatagacgtcttgggagtttcgttgtttttatctttatagaaatacattctgttgaaggtcagtcgctttggaatggggttgtagagaggaggtagcgaagagggaataatgaggatccttcctctcccaactcctcattaaggaactctgatcaaggtgagttttaaattcgtttccaaagttcactgcaggtcacaaccagtgtttccgttaacgaattcacgcgggggctggcaggttgtttgtgctgcatcttttctgagagataacggcgcctccctgtagcctccgttctcagctgatgagagagttgatttcacaccccgataattcttcaaaatcagatcgctggacctgaaactgaccctaaaaagaacaagaaatcctgtcatcaggagtaagtgggttattctggcactgtgctttgtttggctggttaaagaacctgccttgggtaaccagagatcggagttttctaaagtcagcggggtttgtctggggaccccgaatttacatacagacgatctccgcaaatagtgcaggggccgctttgaactcttaggaaaag

SEQ ID NO: 231910 - DNA, 118 bp, Homo sapiens; identical to SEQ ID NO: 200351
  chr6:26383468-26383586
  hyper

SEQ ID NO: 231911 - DNA, 141 bp, Homo sapiens; identical to SEQ ID NO: 200352
  chr6:26458199-26458340
  hyper

SEQ ID NO: 231912 - DNA, 450 bp, Homo sapiens
  chr6:26501790-26502240
  hyper
cgtctgatcccgctcgtttttcggcagctccctttgacgtgattggacccccggagcccatcctggccgttgtgggtgaggacgccgagctgccctgtcgcctgtctccgaacgcgagcgccgagcacttggagctacgctggttccgaaagaaggtttcgccggccgtgctggtgcatagggacgggcgcgagcaggaagccgagcagatgcccgagtaccgcgggcgggcgacgctggtccaggacggcatcgccaaggggcgcgtggccttgaggatccgtggcgtcagagtctctgacgacggggagtacacgtgctttttcagggaggatggaagctacgaagaagccctggtgcatctgaaggtggctggtgagtagacgggttttgactttctccgacgactcccctgctgtatacactttcgtatggatcagttactttgga

SEQ ID NO: 231913 - DNA, 142 bp, Homo sapiens
  chr6:26521258-26521400
  hyper
gttcgcggagaggcggcttaccttttaacccaggaatgcccatatcttgagaaaaagaacaacaagggggtgggcgggggtggggacatggggtaggggggcggctggtggatggggaactaatagcgtttagacaagagac

SEQ ID NO: 231914 - DNA, 80 bp, Homo sapiens; identical to SEQ ID NO: 200354
  chr6:26521682-26521762
  hyper

SEQ ID NO: 231915 - DNA, 284 bp, Homo sapiens
  chr6:26522005-26522289
  hyper
aggccctccggccccgggtcggcgggtgagctagggggcgccccgggacaggccgcgccctctgccctgcagataccggaggcctctgctgtggctgcccactggctgggcccaggccttgaagcggtggcgaacgtctcttccctaccctacctcggtgactgatggcggcggcggcctctcccagtccggaccctgccggccgtcgggtctcccggcccaagcctgccgggcctggacgaaacccccgccgagcagcctggacgcagcgcctttgggtggcg

SEQ ID NO: 231916 - DNA, 374 bp, Homo sapiens
  chr6:26550762-26551136
  hyper
tcaacatggcctggaagagccgtactctggatacccgagggcgcggccccagcgccgcgacgccccgcccctctggctgctccgctctgggatgcacttccgacgccctctaggcttgggagttccgcgcctctcggtgtcgcctggggggcgtgctccggttggcgcactgattcccagttgggtaggggaggcttgactgagctcccacccggaatttcaccttagacctttaaagaccttgctccggcctcccgcgccagcgctaacacctagtcctctttagtggagttccggcggaaggggatggcgggcacccgacggtggtctcctcccagatggcgaatttccgcggcttcttcatcttttagctc

SEQ ID NO: 231917 - DNA, 46 bp, Homo sapiens
  chr6:26555172-26555218
  hyper
gcgcttgtcaaaaacgaaacttactgggcctcgcctccagagactt

SEQ ID NO: 231918 - DNA, 78 bp, Homo sapiens
  chr6:26555482-26555560
  hyper
aataaatgctcaggcggctcgttggtctaggggtatgattctcgcttagggtgcgagaggtcccgggttcaaatcccg

SEQ ID NO: 231919 - DNA, 652 bp, Homo sapiens
  chr6:26577245-26577897
  hyper
aaacccagaaacttccaggacgcacattattttggggattctagagaacgcagaactacgtgtctaaaaaggacagcgttccgtgtccttcgatagctcagttggtagagcggaggactgtaggctcattaagcaaggtatccttaggtcgctggttcgaatccggctcggaggacggtagttttgacctaccaagctaataattccagacaatacggtctttacaaaaaataaggatccaggcaaaaaaaatgtattagatagctctttatgctcaaacatgcacaagtaaaccatttttggttacatgagtaaaaaattttaggaataaactagaaatgtggtagcttcaccgaagggcacctgcgtagatgaaaagcagcgtttccaggaagtctgaggcttcactttttccttgtgaaatttgtacctcgcaacactcttcacctccactccctccctgagtctcctgctggctggctcttggtttctcgatgccattcttatttccggctactgatcgtcaaatgcagtttttattcccacttcccctctccatccccgacccgagctgacgttcgaccagcaaaccacagccaacgcccgcaacacagttcagttaagaaggcgcgtgggaggtgtggggaatgac

SEQ ID NO: 231920 - DNA, 384 bp, Homo sapiens
  chr6:26987782-26988166
  hyper
aaccagcgcagcagcgggacgctagcccgcccacacggcggccacttgaaggtcctccagggaacacctgaggcagtgggagcgtctgccctttcctaagtctccttggaaagaagtattcgctttcgtttccgcaaacaaagcatgctccgcgctttcaggaccggtggctcccgtggagaccgcagcggaacccagtccgccttcgcacgcgtccgggggagaagcggccccaggactaagggcgcgcgcccgaggaaccggtgctgtgacgaccagagcaaacacgccggatgttcctgtgtaggctgtgtaaggagtgaccggaagtagaaactgggtgctccagtggcgcaatcggttagcgcgcggtacttatatggc

SEQ ID NO: 231921 - DNA, 423 bp, Homo sapiens
  chr6:27059533-27059956
  hyper
aggggtatgattctcgcttcgggtgtgagaggtcccgggttcaaatcccggacgagcccacttcattttcgcccaataaggtttaaggatatttaaagtatttccccaaatagtcatacccaaaaatatgtactttcaccacatcaacagtagaattgtctaagcaggcgagtactgaatccggacttcttctaagggcagacaccggaatgttgatgcggctgcagctgcgctctcccacctctgtctgtctcttctcaaaccccgaaaggaagaccgtgggcagctcgtgcgcgcgtgcgtgtgcgtgtttaaccgagtgctggaggggaaacgtgagttgcagtcaaccggttatcttcctcttataggaaggaggattttaatttacacttttaactccagcttcggtgattactctct

SEQ ID NO: 231922 - DNA, 618 bp, Homo sapiens
  chr6:27064587-27065205
  hyper
tttagcctgtgattgatttgcgtgggcttctgaagagaaaccgactccggtgtgaacggttttgggaacctcggtctcctgctggctcccaggtgcgctatccgacgcagcgagacgcggtgagcctacagaagggctgaccaggctcacctgacgccccaggtcgacagcaaaccccgtgcgccccgttggcccggtcacgcccgcagcctgctcaggcgcctcctgcctcgggaccaggaagcggaagaaagggagagaccggcccggcaattacgtttctatcatgtcttgaacatttgtgtgagtcccacgaaagctaagcccgtttattccccctcgaagcgtttccactcagttcttgatcattcatgtgaaaacgagccatctccacgtctcccaaacgtcttcaaaccgtttcctaagtcttgtaaggccgcctgtgggttcctattacaaactctgaaataaaatactcgggaaacgtgggttatcaagacgaggtggccgagtggttaaggcgatggactgctaatccattgtgctctgcacgcgtgggttcgaatcccaccctcgtcgggggaggtcttttaatacgaagaggaggaaacaacaccc

SEQ ID NO: 231923 - DNA, 260 bp, Homo sapiens
  chr6:27094882-27095142
  hyper
tcgaaatcataaaacgaaacaaagttttggctacattagcctatccgttattgccataagatggcgacagcccttctcaactcataaaactaaacaaagttttagctacattatcccatccattatcgccacaagatggcgatagcgcttctcaactcgcctgcgggacggaggcagggtgcggcccggagaactcctccctgttccaacagcagctctccagcccgcagcgcttcctgacgttccgttagttcagtctc

SEQ ID NO: 231924 - DNA, 396 bp, Homo sapiens
  chr6:27099525-27099921
  hyper
ccttctcaaaaaaaaaaaaactgattatgttgccataaagggtccctttaaaaaaaaaaacgctctatccaacgaaaactaattagaaataaatctccttcccgaaagcgataaaatactaaagaatgagaaactgacagtttactgagtttgtaaggaaggccaaataaaggcggggtttggattcctttggcgcacccaagccgaccgtggacttcctggatacaacaaccaatcaggatgcagaggaagggcgggcgttgcccgggcaaattcaaactgacaaccgctgcaacttggcactgttccaaatcactaaccgacgggggaccgacgagtattttaattggtttctaacgtattttaattggtttcgaacttataatagaaaatttc

SEQ ID NO: 231925 - DNA, 43 bp, Homo sapiens; identical to SEQ ID NO: 200362
  chr6:27100142-27100185
  hyper

SEQ ID NO: 231926 - DNA, 1002 bp, Homo sapiens
  chr6:27100305-27101307
  hyper
gcgatgcgctcgaaaatgtcgttcacaaacgaattcatgatgcccatggccttggacgaaatgccggtgtcagggtggacctgcttcagaaccttgtacacatagatggaatagctctccttgcggctgcgcttgcgcttcttgccgtctttcttctgcgccttagtcaccgccttcttggagccctttttcggggcgggagcagacttcgctggctctggcatagcactgtgtagctataaagcgccaacgaaaaggaaaaacagcgtgagcagggtatgacaaggcgcttttatatagaatcgcttatgcaaataaggtgaagagttgaagtcttgtgtctgattggtagttattcagggtaacgtcagaggtcaggtctgcccaatcaggattcgcaaatccagaagacgcactactattggttgaaattaaactgcagccctaaccaacaacacgtcttctttttcgcgcccaatagtgtttataaaaagcgccgcctttcccgttcactttgtggttgctcgtagtgagttgcgctcgctatgtctggacgtggcaagcagggaggcaaagcccgcgctaaggccaagactcgctcttctagggccggtctccagttccccgtgggccgagtgcaccgcctgctccgcaaaggcaactatgccgagcgggtcggggccggcgcgccggtgtatctggcagcggtgctggagtacctgaccgccgagatcctggaactggcgggcaacgcggcccgcgacaacaagaagacccgcatcatcccgcgtcatctccaactggccatccgcaacgacgaggagctcaacaagctgctgggcaaagtcaccatcgcacagggcggtgtcctgcccaacattcaggccgtgctactgcccaaaaagactgagagccaccacaaggcgaagggcaagtaactatctgtactagtttgtggcagctcaagtaaaatcgagtccaaaccaacggctcttttcaggg

SEQ ID NO: 231927 - DNA, 118 bp, Homo sapiens
  chr6:27101539-27101657
  hyper
ccacagagcaccagtggcttcgtgagttcttgaagcactttggcccaaaagagttatcgcccgggctagaatttagcagacagctgttccacgcgggccagggcggcatgaagaagtc

SEQ ID NO: 231928 - DNA, 245 bp, Homo sapiens
  chr6:27125326-27125571
  hyper
tgaggtgcgagcgccgccggacatttcctgacggctcaggtgggcaggctgagtgcgcgagcgcctcactggcttctcataggtacctgggtcaggacgaagccacatagttcctcgtgatgagaaactcacttctggcacctgtcgagatgccagattccatgccaagcccccgaagattctgactagtttggcaaaaaatgggatctggcaggtccacttcaaagcagcgccctcttcctttt

SEQ ID NO: 231929 - DNA, 245 bp, Homo sapiens; identical to SEQ ID NO: 200368
  chr6:27125798-27126043
  hyper

SEQ ID NO: 231930 - DNA, 456 bp, Homo sapiens
  chr6:27173595-27174051
  hyper
agaaatccagattccgaaagtaagtaacaaccatgcccgtggcccggttcctttctcttacactcttccaaggaccccttttagacctagaggaaaccccgcagaagtgacagggagagggggaaagctcttttacagtggcgaaaccacgtggctgcgagagcttctcagggagagctcctgttttcaaagtctggcaaatttatcagtttgatttttcttaaacatttatatttttatggagtagaaaatctaccaaacgagtaaagaatgtttccgcctggtttcaaaccggggacctttcgcgtgtgaggcgaacgtgataaccactccactacggaaacaactgtgggaaagggttacccacatcccccccgcccccatccccaccccgccgcttaactaagagggctttgcctgaagggcctggactgccttatacgtctgtttagaaaa

SEQ ID NO: 231931 - DNA, 43 bp, Homo sapiens
  chr6:27205311-27205354
  hyper
actgcggcaaaatcggagagagaaggtgagaaccctcgtggcc

SEQ ID NO: 231932 - DNA, 330 bp, Homo sapiens
  chr6:27205802-27206132
  hyper
gagacccgggggacgatctgggagcagaagctggtcgttctgagttttccatccaaatggtttgcttatgaaattgactcaccacgcggaatggctggtggatttggatcgcggcatgaggaatccgctccataatggaaggaagaaaatctccggcagctatgcctcgcgggttcataaggactggagagttactccttctctctggccccctcaaaacgcccggtggtatgtctgttgctccactacgcgttattataattaactgcttgtgttactctttgtgctgtcttgctcttcattctcctggtacctcgggtgcccgcacag

SEQ ID NO: 231933 - DNA, 31 bp, Homo sapiens
  chr6:27206486-27206517
  hyper
tcttcctgtccgggcgcggctacggttcctg

SEQ ID NO: 231934 - DNA, 850 bp, Homo sapiens
  chr6:27218586-27219436
  hyper
tcctgcgactcctccgggtgggctggggggagggaactcggactccagggccccagtctcagataataggaataccctcccaccacgcccctaccttcctcccgcgcccaaagaattttgcacaagctgtcctcacaagagcccgagattacacagcgagtaagtgacacagaggcagaaagatatgcgattccaacccctcagcccgcaggctgacggcgtctcctcccttagttcccccatctcattttcgcgtcggtcgcctcctccgccccggtgcgggccgtgctggatttctccgagtataatgacgtaaggatggcgggcagcaggtgcgggacggggaggggtcccagcgggcggagtcccttgacacttccggataccttcctctgcggtccgcccacaggtggtatcccgaagcctaatgagcaccgcgatcggcgggtccctggaggtaggaggtggggcctagtccgagggggactgggagggaaaagaggcctcggatgccagggaagaggaggccagagaagggcgaaacctgcaacgtggcggggtctaaggaaggtcggagctcgggggaatacgcaggttttggaagaaggcgggagctgacgaagaggaggggcaccaggaaaagaggcgctccccagagagggcggggtttgggcagggacaatcctatccggaggtgaggctcaaggtggggcggggccacaatggaggacggggcctgcagggaagacccgagaaggagggctgcgaggcaggggattgggggcgggggcctgggggcgggggcctgggccaagagctaggtctgcaccctctgagtcccgctagggga

SEQ ID NO: 231935 - DNA, 196 bp, Homo sapiens
  chr6:27228181-27228377
  hyper
acctgccgggcgagcgtctccaagagtgaaaaggaatccgcaccccgcgcgagggagccgggtcctgtgaactctgcggtggcttcgtggttgcttccctgatccattcgctgcagtctcagagttggagcagcttggcgtttactcccgggcctttcccggatgggagaaggaacctgcgcgggaacttgaattt

SEQ ID NO: 231936 - DNA, 38 bp, Homo sapiens
  chr6:27228698-27228736
  hyper
ctcgtcccgccggccggttagctcggttgcttagagtg

SEQ ID NO: 231937 - DNA, 188 bp, Homo sapiens
  chr6:27242892-27243080
  hyper
ccgacgatttgcatcgttaattatccgtagcccttcgctggctgaaaaccgacgagtttctgcagaactgccataaaaaactactggggaaaatacgtggccagtacggggatcgaacccgcgaccttggcgttattagcaccacgctctaaccaactgagctaaccagccgacgctgggtgcagctc

SEQ ID NO: 231938 - DNA, 458 bp, Homo sapiens
  chr6:27247648-27248106
  hyper
tttcggcaaagtctcggcctcgccttgaccctccaggaaaaatgttcctgagcggaaagatcgttcaagttgcctgcgaaccaagtccttgaggtctttgtggggatcaggcgatgagagcatcaattataataataataatttgttcggcaaaaaattgctcgggtctgttcatgtccacccgagtagccacggacacttggctttgaagagggctttttccttgtcgaaaacaggaagggctctggtgggagaaaggcggcaggtgtacttcggtttatatgcacaccacaggtgacaaggagaaccttctctcctaaacggctaaagatggtgcgggggtgcaattctaaaaacgtgcactgagaaattcagctaaggattcctcaaaaatacaggttgcttctgcccggtttcgaaccggggacctttcgcgtgtgaggcgaacgtgataacca

SEQ ID NO: 231939 - DNA, 558 bp, Homo sapiens
  chr6:27255943-27256501
  hyper
gctttccttcgccgcggttgcggccgcgaccctgttcttaccaccagcaattcctccagggacttggtcagcagcccaacttgatctgcgtctctctgctaaggtgtttccgcaacagggtcaactccaagtctcacctttctaggaatcccgggcgcagcgcgggggtcgggactccgacctgtatttccaggcggaggtttccctgggtcaggcggccactctctgccagagattgtcagttatccaactgtcaatagagccgccgctccagcgagtttaatttaggcacagaaaagtcctgcctgggttgaggtgggcttaggatgagtttacttgagtgtgtgatttagaaatagatctatgggacagacagacacgaaatcgggcattggggccctcgcaggcagggtatctagactggcagctgccggtgcaggatattgccaaggactcggcatccggctcagctcaaggtggggacgaagacgtcctggttgcaaggaggagccctactccccccggaatcagaactgtgcatagcgggctctggatttg

SEQ ID NO: 231940 - DNA, 326 bp, Homo sapiens
  chr6:27263992-27264318
  hyper
agctcattgctgggcgctcagcaactcggctttcttggcatttccgtctgggcatggacaagctcctgaagaaggggtttcagagctcggaccctcttagacagattgtagaagttcagtcacccggaaattgctggggcggtttggttttggagagaggcggggacgaaagaagaaagctgtgagcgaggagagaaggcagggaatgtgaacaggaaaaagctcttgcgctaaggaatgtcagagaagccagcgcccggtgcagccgagaagcttagcgacagggttgctgggccggagaccacgagatcctagaggctacaaag

SEQ ID NO: 231941 - DNA, 105 bp, Homo sapiens
  chr6:27280352-27280457
  hyper
ggtgcacagtttccaggctccgactattactggcctcgaaggtacaggctcaggcggctcagggccccggcgcagatctgtcggcccgcgggatccccggagtct

SEQ ID NO: 231942 - DNA, 149 bp, Homo sapiens
  chr6:27280637-27280786
  hyper
agtaggtgtcagtcatttgccgcacagccacctttgagatccacctgtgtctcccagcggccgaatccaggtttccttcctattcgcacttggagaactcatgcagattgccgtcaggagtggcctcagagatccggagtgggcgaatg

SEQ ID NO: 231943 - DNA, 400 bp, Homo sapiens
  chr6:27300804-27301204
  hyper
gcccagcacgcttccgctgcgccactctgctaagcggtttctgaagaccactgatcttaatttcaatcatcaaaatcacctttcagtaccgacaaaattttcattgtctaattatttcattttgtatctgatcgtttacactgtccctatctctgccaagcaagtcgaagattcgctacccgataatcagatggcctcaggtcataacctccagatctgtgcttttccaacctgccaaagatcgtctgagcctcttagcaagcactcgtttatcatagcgagcctaggaggagggcgccaagcaaaacactaggtgtagtcttctcgagtagaatccaggcagtcgtggagcgaacgcagctgccaccggagaggaatcgtgttaacagtcttatttgtt

SEQ ID NO: 231944 - DNA, 285 bp, Homo sapiens
  chr6:27342362-27342647
  hyper
ttccctgcactaccgctggttatgtttccttagtgaccctaggcctcttgcaggagagtccctggtcccagccagcgggagcggcttctccagtttgtggctctcggagagttcgcctcgtccctccctctcagataaccacctatttctgacctctggaggccgggctgagcccggaattttatgaccagcgcccgctggccgtcgtcaccctctaatttctcgcaaaactcccggggacccttcttaatgtcagtagccacagtcgccgccgctcctgcgcct

SEQ ID NO: 231945 - DNA, 269 bp, Homo sapiens
  chr6:27342927-27343196
  hyper
aactgacactcagcgcgcggaggagcccgctgagaaagggtttacctgtccgaagagaactgcgcttgcatggctctggctgtgggccggctggctcttgtccgcagactacatttcccagggttgtctgcggctggagagatttagggtttggggcgtggctagcacaggcctgaggtcctaattgggaggtgtaggcatggcggctggagagtctgatctatgtgacacctccactgtgactagggtataacgtgaataatttgtat

SEQ ID NO: 231946 - DNA, 776 bp, Homo sapiens
  chr6:27356279-27357055
  hyper
gatttatttgtgtacgctatttaaaactctgtgaaccaccggtctaggctatactttgcagtgtattaaggtggtcttcggcacctctcgcagacccccttcctcttgcctctagcgccaacctctcagcctctcgcataccaggggaggggctttgcaaaaccttccacgaaagtgaatcccagcacagccctgctgtagctggctctcaggcgcaagcgcagagctgcgaccgctgctgatacgttgctcagtctcagtgtggtctctgttttgcaactggtcgtccgcgtcaggagacttaggtccaggcgactgcccagacaatgactggtcccgcataccgagcagagcatgatcagcagcagtctgagtggaagagtgcctgtgatcttagggaacctgatgggcgttggagcagcggttcgacgcatgggtttctctttaatccttccgacttccccaagcccagcgcactcaggttccgctccaagtgcgggacccgcccggggtgtgtcgggggtactcggccggaggcggccggtgagtgaggcttacagggccccgggaccaaggtgggtgctcttagaggttctggaaagcggaaacacgggttcttcgaaggaaacgggcgaaagggtcgcgtgtggtttggctgcaggtcgggtcaggaggcacctccacggttgggacgccgcgtggcgtggggtcatgaagcccccagcgctcgtctcactggcgggccagcctagtccctctgcggcagtgacagccag

SEQ ID NO: 231947 - DNA, 413 bp, Homo sapiens
  chr6:27440586-27440999
  hyper
agaacaaagccctccaagggatcagggcgggaccgccccgcacagaaggaggcgaggtgcgcccccttcgaggactccccagctttctcctgcagaggcctctaagcgcgaaatcagaagggtgacgtcacgagtccggagggctggctgttgccatggtgatacctgagctcccctccccctatagcgatccacacactctgatcccgggtccggaagcgcattgaccgccaccagacctaacgcagggagccgaagcaactggacttccagcgcgccaacctctttccacgcctacaaccggcttcaacggtcacttccggtcgttacgagcgagccccgccccgcacgccggcgccgggcgggcacactggaccagcgttcccagaacactccgcgaaggtgttcctgaa

SEQ ID NO: 231948 - DNA, 59 bp, Homo sapiens
  chr6:27447357-27447416
  hyper
ttggtaggggaaacgtgtgactacagagcaaagaaagatggacaatagcgagtaacttc

SEQ ID NO: 231949 - DNA, 277 bp, Homo sapiens
  chr6:27463097-27463374
  hyper
acttaatgtcacaacgaagggacacagaggagacttttccacataatttttcgctccctccacctaagacacaaatcagcggaagcgattccgtgcctggaatcccctacgaacaccgtcgttcaccgaggagctttgggctcctggaagtccgaacaccccggatcagaggagagttggccatgactccccgtcggtaccggctgggtttggtgccagctatggcgagtacagaagcctggccggtcccggggcaggcaggcgctcgctggatgtt

SEQ ID NO: 231950 - DNA, 50 bp, Homo sapiens
  chr6:27463632-27463682
  hyper
cattggggtctccccgcgcaggttcgaatcctgccgactacggggtggtt

SEQ ID NO: 231951 - DNA, 1064 bp, Homo sapiens
  chr6:27470527-27471591
  hyper
ttccgggcgccgacgggagctcgctcactgtttactaacgtgaagtttgtattctttgtttggaacgctgatgatgctcatcctcacgcgggagtactctcattccagtgctcttgtccaggtggcacaggaggttggctttttttgcttttttttttttaaccaaactctcgttgtacctgaaagtttgcgttcaactcacaaagcccattttcttgtacctagatagtaattatcctgatttgcattttctcatgtctataccgtgaaaaaaaacgttgtgattctgtgtagtcgtggccgagtggttaaggcgatggactagaaatccattggggtctccccgcgcaggttcgaatcctgccgactacgagttcgaggttttagataattaacaacagaaaatttagaagaaagaaatttaagccaactcacgtgttgcgaactgaatttgtttggtacttccccgatcctgaaaccccacaacaatggagggtggaagttactgaatacctactattttcataagattatgggtaccttaattagcagatacctagtcattttcccgttagcggtacctttgtacggttcttggggacgcctctcgtttccctgccttccaaaccctcctgaagcctatacctgttacaagtcttgatagtgctttcctcttcatggaaatttagtcctagtcagaggtccaagtctttggtcaattatcagtttctgtggaatcaatggttcaactgctttggtcacccggtctcgctggttgcaaatgactagaaacactgtcagagatctcgacaccaccacaatcgaaagaccaggctgtcctgacagaccccgtcgttttggcttaggcggcagattaaagtgtaaattcgccaagtataatcaatttagtagaatacaaacttacagacttaaaaaagtgggcaagaatacttaagtttattagaggtagtcaaaactcgctgacgcagagttcttcctcgttagtatagtggtgagtatccccgcctgtcacgcgggagaccggggttcgattccccgacggg

SEQ ID NO: 231952 - DNA, 134 bp, Homo sapiens
  chr6:27486949-27487083
  hyper
gcggcgagcctcgcggttcttccaacaacgcaatctgtcagcgcggctaggttggtgccctctccccctgtatcggggcagcccggcttagggccgcagaaccgaggctggggagccccgcaggctgttgctaa

SEQ ID NO: 231953 - DNA, 35 bp, Homo sapiens
  chr6:27512539-27512574
  hyper
atcagagacattgccggcctcggtcatggaggtca

SEQ ID NO: 231954 - DNA, 728 bp, Homo sapiens
  chr6:27512834-27513562
  hyper
cttttccccgggctcgggtggctgaaggccttggctcttgggaatggtctcgcgtccttcaccagaactgacgggaattatatttacctgaagagtcagagacctcttcagagtcatcttttccagttaggacagaaacaagctccctcctcagctagcacgcccgctccagtccggttttagccgttccttcggaagagtaagtcagttgaatgtcatcgaagaagctcctgatttagattttaactgtacgtaaacgcagatgaccccccactctcgtgccttcatttaattcccgttgcttctcccatgggtattcagaggcttgaggttgcttggactctcaattcaatactccctttctgcgggttcgtgagaattaggtgtgaacgtggtgtccgcggatttcagcagctagcgggcaagctccagcgcccagaaactttgagtcgcttgtctaggagtcctgtgttgaattgcaacactatgcactatgttctggttattgatgtgctctgaatgagctctttcgttcgtgagcagaggccctgacgagactgaagaccaactatttccgagcgctccactcaaccattataagttcaccccagccgtcagcgatggcgtaggtaggtagtcgtggccgagtggttaaggcgatggacttgaaatccattggggtttccccgcgcaggttcgaatcctgccgactacggttttaccaggtg

SEQ ID NO: 231955 - DNA, 542 bp, Homo sapiens
  chr6:27533823-27534365
  hyper
gcgctgtgaggcaacggtctcaagagtcctcgagagaaagagaggtgttgcccctccctggggacaacctgacactaggtgtggagccagtcgcggggatgggcgaccgccatggggccaggggcggaagtggggatagagcacagggtataaaagactcctgctacagctccccctctgctgtcgggtgcagacacgaggtagcctccaggtgacaacacgggtggtgagagccgccgcatgaatccacactgcggctgaaggtcaagaattggcggtagcccatcggtagcccagagacccaaactgtgtccgatgtgagtgaaggtcaccccagatcagtgcgtcagttccgttttggcggccaaatttctgacgatcccatgtaagaaatgccacacctgtcaataggagcgactcacgcgctgggtctctttctcggatcgggtcgccaccccagtgccgggactatgctaaagactagagtctcagacttggaatttcgaggaaggtgttccaaaacgctgcgctccctccggcga

SEQ ID NO: 231956 - DNA, 142 bp, Homo sapiens
  chr6:27559866-27560008
  hyper
atgacgaagaaaatcgggctcagaatagagtgggaccccttcggtagtgaataatcccgcagctcattattgcgaacagcagcccttagagatcgtagctggctggtaaaggcggctttagagcggacgcccaggcttcttc

SEQ ID NO: 231957 - DNA, 392 bp, Homo sapiens
  chr6:27560493-27560885
  hyper
gagtttactccctcggtcactgtaggtcttcagtcattcatgagaggtgttaaagcacctctaacaagtgcaagatgcagtgttttggaggaaaaaaacaggcacctagcagaggatggtttcgatccatcgacctctgggttatgggcccagcacgcttccgctgcgccactctgctgtccccttcagctgttgtgccttatctccaagtaacttaaacatctcctaacaccgctgtccagctgcgtcaatatttttttcttccttatccatttatcttctctagtctctgtctttcatcctcgagttgtctcacgtttccttctcaacatagtcacctacaacttgttgtttgctcctttgcaacttaagaaaaccgattgaaatccttt

SEQ ID NO: 231958 - DNA, 31 bp, Homo sapiens
  chr6:27561177-27561208
  hyper
tgaaaatcgttgctcgcggaattgaggcaga

SEQ ID NO: 231959 - DNA, 650 bp, Homo sapiens
  chr6:27572938-27573588
  hyper
gcggtgtgagtttacgacagttgctggtcagatcaatgtccgactcccctttcagagagacagacgatatacaggaatctggaacattcctacagggctctctgagaacggagacctttttctcgtgccttttttcttttcttttctttttttgtttgtttaatttttatgttagcggattcacagaccaatagatggaaatccgctgcttactttctcgcaggagaaaatgatctccaacagtgctgcgggactgcgtccaaatggcactgaaaatatcccaggattctgtaaatgtggggttttcctttgtcgattggtttgatgtaagagagatgcctctctctttgcgagaccctgtttggcgaacatcggttggggagggaaatcttggaggtagaaacggctgaactattgtggcattccttggcgaaactttcggtacaaatctggtagggaaaaacaaaagatcaggctgtgtcagaagtgggattcgaacccacgcctccatacggagaccagaagacccgaacacaggaagcagtaagcttgagtctggcgccttagaccactcggccatcctgacactgtgacaaaaatccttgaaactatacatgatgagtaatcacggcttacggctcgccttctgg

SEQ ID NO: 231960 - DNA, 220 bp, Homo sapiens
  chr6:27585094-27585314
  hyper
tttcctattgtttgcgtttataccacttccggtcacacgggcattgttttgccggtatgactttgggggatgaaggtggggatgcggaatatgtgattgttttaccctttaagacctttgggacagctggctggattgctcttaaacagcagatttcacagcctgtcttctggaagggagagctgcgtcctcgggataagacaggcgcatagagcctgga

SEQ ID NO: 231961 - DNA, 709 bp, Homo sapiens
  chr6:27598639-27599348
  hyper
gggagagttttggggaatcccgaaagacagcccagagatgctggactgcgaatgcaggcgcgctgcaggcgaggctgggagggccgccaggagcgctgcgggtatcgggagacacgcagagggaggggcaggcggcgggctccgcttcttcgcgtcctggctctgaaagcaaccacaggccagcggggcggtgctaggtgaagctacgaagaagccaaatagctcgcgtcttctacaaaaaccgtgttcttgctagaacgttggcaaggagaagccggagtctctcctttttctcctcggcttttctcgggctttctgaaaagagcacctgcatattcccaggaaattttggctcctgatggcatgggggaggatcacattcatcttccaggagagatggagatatcttgatcaaattgtgttttatgcaagaggcgaggggctgcgaagggaggatctcgggcagctcagcgcgctgccgctccggcgcgaggccggggtcgagcgcttcagtagctcatggctctgtagagtgcgcatggccaagcaaaggaaagcatgctccagtggcgcaatcggttagcgcgcggtacttatacaacagtatatgtgcgggtgatgccgaggttgtgagttcgagcctcacctggagcatgttttcttccaattgcgatttcagacatttcacgataatgcatttttcccttat

SEQ ID NO: 231962 - DNA, 82 bp, Homo sapiens
  chr6:27635352-27635434
  hyper
agaatcaacaaaatcgttacttgctgattcatttaactgctaatatattcgttaaaagtttattaggcgtcagtgatcttga

SEQ ID NO: 231963 - DNA, 281 bp, Homo sapiens
  chr6:27635788-27636069
  hyper
tgaatatcttcgccgattacatcagtgcttatgtttgtgacttcagagacactgagaaggcgcggctctttccctcaaccccattcgccttcctttcggcggcgttgtcttgaaccaacctgaaaataataagtccttaagttacaagtcactaaagggaagtttgcaacttgcgatccagtacactgacatgactctaaaaagagaaggctgccgactctgggcgtactgcctttgaattagccatactccgcaaggagcagtgccgttcaaaaaaaaaa

SEQ ID NO: 231964 - DNA, 324 bp, Homo sapiens
  chr6:27636297-27636621
  hyper
tagaaaaacaaaaatatcaacgaatttatatatggtttcctttaaaacagcagcgcattcgtgtggccggttagctcagtcggctagagcgtggtgctaataacgccaaggtcgcgggttcgatccccgtacgggccactggatgccatagtggggcccttcacttacctgaagggaggccttttaatttaagcctgtcgaatcacaggtgctccgaatcgaatcccaggtgctctgaatccgaaattaagacgccctcttattcgtcaagcgagaaggctatttacgttcgtttccctttattgtgaaaaatgaaaagaacag

SEQ ID NO: 231965 - DNA, 376 bp, Homo sapiens
  chr6:27640044-27640420
  hyper
gggattgcagaagtgagccaccgcgcccggccttcaaatgtacatatttcttgatgtacatttccacaagtgtgcgcgcgctgtaaaagccacagcgatagcactcacaactttctatcctagtgaactaatgaaagctaactgatgaaagtagcaaattggaaatctaaccagaaaatggcgacgctgtgagcaggatttgaacctgcgcggggaacccccattggatttcgagtccaacaccttaaccactcggccatcacagctccgaggacactttttgtttcagaggaagtcgtgttaggctctttgactctctcgctttttaatgttcccacggcaggttaatgcttccgtgtttgtatttgtcactttt

SEQ ID NO: 231966 - DNA, 322 bp, Homo sapiens
  chr6:27647779-27648101
  hyper
ttctttcttatttccgagaaatctcgcaaacggcgtgaacactacgctgattccagaaatggtcgggttcccttccttcactcaggatggtcgcctgctgggagctcatttcgaaccgagctgaacgctcattgctgagtcctgggagaaggtcgcgtttgtacagaaggctcctggcagcgagcaaggccgggagtgggcccagtgcgcacgaagtcgcgccccgaattcccactgggaggaacgcactggaattgaaatgtctgagatcaagccccgctgagaatcaagtcccagaggatcttctcggctggtggaaacg

SEQ ID NO: 231967 - DNA, 79 bp, Homo sapiens
  chr6:27648346-27648425
  hyper
ggaatttcgaattgcgggaaacccgcagacttagtaaggtaaaagcgcagtaacacgaggtttccgtagtgtagtggtt

SEQ ID NO: 231968 - DNA, 1107 bp, Homo sapiens
  chr6:27655156-27656263
  hyper
tcctctgagttgtcgaatccgggcctcgcctcctcctcccttttcagatcataggatttctctcccccgcaaataatggcccttacttcgtaaacacgctggctccgtaatccctattattgttttgggggtttggttctgtccagggaggaggtgagggcagatgctcaagagaggctgtccccaccgtccttttgtctcagcgaaccgcagtccgcgcccgagcgccactagctgtcctgggacgggaactgcagcggcaagtgtgtgactttcttgagcccggagccacaggcctgggaagcgccgctgagacttcagggtcgtagtgacagaggaaccacccgaggctaggcggggagagggtgcagtttccggatcccgaaggcttcgagaagagccgacctgtctggaagggtctccaagaacagagaggactctgcaaccatcactcgggagccgcgtcctttcatccttgagacagctccgtggtccaacggttccccgatccgctggccgagatctcaagcttggatgcaacttcggattcgccccaggcaggaggaaggaagccccgattggaaacgttgacttgaatcttctcggatcagaattagcaggttaagaaaaactgtttccccgtaagaagcagggttctttggtgttcaatgtggagctccgccactcccagcccgggtgaaggaaaactgggaaacagaatgaatgtgattatctattcgaagataaatttccacaaagcatgccgtttgatagtagcttataatgtggaagtaaggcatcctgtcatccggccggttagctcagttggttagagcgtggtgctaataacgccaaggtcgcgggttcgatccccgtactggccaagtattctctgtggcttttatcaccagaatggatagtaacccagacatcgatctaaacgtgtacctgtgtgtttctccaggcttaactttgccccgagaaaacggatctgtgaatttggtgcgccctcgcttactcgacagcggttaatttgaacggggacgtttctttccgctgcctccaaggcatacccacatcctacccgtaaaacaaaggggctatagg

SEQ ID NO: 231969 - DNA, 701 bp, Homo sapiens
  chr6:27661581-27662282
  hyper
taattcttgaaggtgtgtcaggtacattggatgcactgtactattctgtctacctttgtatatatactttaaaggtttttccccacaatttctctgggaaacctgaacctttcttccccgtgtgtttagaagggaaggtgaggagagtcaaaggcacatggagcattaacagttggaataaacgacagagacacggaaacctccgaggtttccagagcggacccggaaatgacgccaggggatgcaaacccttctgcccctttttgctacccctgaagcttactgttagtggtcgagtttttctggaagtgggcttccgcgatcgcggggaccaacgccctgagctcttgtgcccaaaggggatcgccaggttttttgatgcggatcgaaagggactggccccggagcctacaacctgacgcaggtgggacttggggaaatgtcgagaaacctaggtctgggacttgagttggcttccagggcacacattcttgttcagaagaaacacattgcaaaaatcgggaggtgacgggcagatgaagtgtcggcgcttcgcctcgggactccagtgcaacctatggggcttttggaaatgaggaagtcgatgactctgcagggactcctctgacccaggagcagatggcgctcgtctgggcactccccaggagaaaaggtgcatcgggaagcagcctggcttgtgg

SEQ ID NO: 231970 - DNA, 507 bp, Homo sapiens
  chr6:27774851-27775358
  hyper
tgggtaaagggggcgccaccgcaagttgctgtgcaacatccagacatcaccagacccaccacctggagcctggcctggcggtgtcaaacgcattctggtctcatctttttagaaacccgtggatgctcaaggaatttccggataacgtgatcccggatgcgcttgactgacttacacggaacgagcaaagcgcaaagcagtccctgctaaggacttagtttatgccctcaagcgcaaaggtcggaccctctatggtgttggtagctatatgcacgtacctcatgtacatttcaccttaaatggctttcaaagagctagattaatttagtggatagatcaaaatgatttatgacccctcgccccccagtgataggaagagcgaaccagctcttctttagataatagtgagtggctctgaaaagagcctttgggttggacaagagcttgagaatttacttggagctggtgtacttggtgacggccttggtgccctccgacaccgcgtgc

SEQ ID NO: 231971 - DNA, 446 bp, Homo sapiens
  chr6:27775598-27776044
  hyper
ttcttgccatccttcttctgggccttggtcaccgccttcttggagcccttcttcggggcgggagcagacttggccagctcgggcataatgaaacaatagtggcaaaaccaaaacaagaagtcggtctcctctttttatataatagtttatgcggccgaggtagtgggaaggtctctgctgattggtaattatccgtggatgacgacagatgccagttttgcccaatcaaaataggtatcctgcataatcgagtcctattggtctaaataaaaataaaacgtaagccaatcgcacagcttccttttcgcgcccagtagaggctataaaatgtacgtttttctagtttcacttcagtctttcttgaccgtatagataataggccttttgccatgtctgggcgtggcaagcagggaggcaaagctcgcgccaaggccaagacccgctct

SEQ ID NO: 231972 - DNA, 113 bp, Homo sapiens
  chr6:27776275-27776388
  hyper
cttctgggcaaagtcaccatcgcacagggtggcgtcctgcccaacatccaggccgtgctactgcccaagaagaccgagagccaccacaaggcgaagggcaagtagaagcctgg

SEQ ID NO: 231973 - DNA, 944 bp, Homo sapiens
  chr6:27777635-27778579
  hyper
aacaactgtatagcgaaaatagaaaataaaatatggagaccatgaactgctaagtctgtcagaggaataggtgaacaacaaaaatttgagtccttcgccaatccggttactgttgggtaggccttcagcatacttttgtccaatcagcttcagactctcactataaataagcggctagctttctctttctcctgaagtgaatctagctctgaaggcatggcgcgtacgaagcagactgctcgcaagtccaccggcggcaaggctccgcgcaagcagctggccaccaaggcggctcggaagagcgctccggccaccggcggtgtcaagaagccccatcgctatcggcctggtacagtggctctccgcgagattcgccgctaccagaagtccaccgagctgctgatcagaaagctgccttttcagcgtctggtgcgtgagatcgcgcaggacttcaagaccgacttgcgcttccagagctccgcggtgatggcgctgcaagaggcatgcgaggcctacctggtggggctctttgaggacaccaacctgtgcgccatccacgccaagcgggtgactatcatgcccaaggacatccagctcgcacgtcgtatccgcggcgagagggcttgagtctcaaggactcactgattacatacccaaaggctcttttcagagccacccacatgcgcgctgaaaagatctgtttctctcaggaattcttcctggtacttgttttgcctgtagtagatagggcccatttccagacgttatacaatctgtttcgtaagactcagcctatccctttttgaatgctaattttgggagtcttaacatctaataatgtccggcatttttccgtaagcattgagtgtagccaaaagttccttcgtgtattgctctcccatctccgcagcccggttttgaccggatggtgcttctaattttct

SEQ ID NO: 231974 - DNA, 124 bp, Homo sapiens; identical to SEQ ID NO: 200387
  chr6:27782099-27782223
  hyper

SEQ ID NO: 231975 - DNA, 296 bp, Homo sapiens
  chr6:27782431-27782727
  hyper
gcctacgggaaactgaagcccggcccgagaagagcgggtcttggccttggcgcgagctttgcctccctgcttaccacgcccagacatggcaaaaggtctattacctttacggtcaagaaagactgaaatgaaattggaaaaacgtacattttatagcctctactgggcgcgaaaaggaagctgtgcgattggcttacgttttatttttatttagaccaataggactcgagtatgcaggatacctattttgattgggcaaaactggcatctgacgtcatccacggataatcaccaat

SEQ ID NO: 231976 - DNA, 438 bp, Homo sapiens
  chr6:27792190-27792628
  hyper
accctctacggtttcggtggttgagcgtccctttctatcaataaaaggcccttttcagggccaccctactttctcagctgaagagtggtaacactgaggagtggttttggtaggtacggaattttgcttggttctgagtcagttctggggggaacagttttttgaacacagcggcacacgtgtggccattcacccggggtcactgtaggcaggactaattacgagatgtaatgtctaaacttgctcaaaattcgtaagcttgtttacgtaatggagaaaatactcgtacacagaatgtgcagtaccagaaacgtttatgtaacccccgtagtgagcttgacagtggtaatcggaaatcgtttttgaaaagcctccaaatccacaagtatttgtgggttttttttgtttcgtctttgtctgcgagttggagtgcagcgg

SEQ ID NO: 231977 - DNA, 439 bp, Homo sapiens
  chr6:27798620-27799059
  hyper
aaactagcctgggaaacacacggagacccggtctttggaaaaataattagccttgcgtggtggtgggcgcgaggttccggctaatcgggaggctacagtgagccatgatgacactgcactacagtctgcgcgacggcccatgtcagtaagctctggagcacctgaaacaagttgtgttgggtattttatttactggagagcgattagtgactgatgcctacttacagcgactagagacgcatgctccgatagcagcacaaactcagcaggcgcgaacaaatggtaaagagaaactgggcaaacaagcatcacggctcctcagctgagaaagtgggggccctaaaaagggccttttgttgatagaaagggacgctcaaccaccgaaaccgtagagggtgcggccctggcgcttgagcgcgtagaccacatccatggcggt

SEQ ID NO: 231978 - DNA, 51 bp, Homo sapiens
  chr6:27799499-27799550
  hyper
tctgaattttgtaacgtgcatagtattttgttaccacgttatgaggcttta

SEQ ID NO: 231979 - DNA, 267 bp, Homo sapiens; identical to SEQ ID NO: 200391
  chr6:27804768-27805035
  hyper

SEQ ID NO: 231980 - DNA, 271 bp, Homo sapiens
  chr6:27805258-27805529
  hyper
tggtttgttccagatcttgccggccacgaggtccttgctcacattatctcttttgtttcggctgcaaaaggttcactgcttgttatctcgcttcttgttcacccgcccatctaccttacttctgccctttgcttttacttattctgccctctaactttcagctccctttgttattctcttgcctcacttttcttattgtttcagctgtattgcaggcgcgagctgccgcgcctaaatttcttgatgtaccgtaaacatttcaatgtctact

SEQ ID NO: 231981 - DNA, 206 bp, Homo sapiens
  chr6:27806305-27806511
  hyper
gactcaccactggttaaacgcacaacttcattctctaccccacttgcgttaagaagcagtgaataagcggtaggttgacagagctaccgtcttcctgtttttttcctccaattttccggcagttactcccagtcatgcccgagccctcaaagtccgctcctgccccgaagaaaggctccaagaaggcagtgacaaaggcccagaag

SEQ ID NO: 231982 - DNA, 240 bp, Homo sapiens; identical to SEQ ID NO: 200394
  chr6:27806811-27807051
  hyper

SEQ ID NO: 231983 - DNA, 439 bp, Homo sapiens
  chr6:27832931-27833370
  hyper
cgattctagatgacgtcatatacacgtttgtccaatccaaagaagcatgtttcataacagcgattccattggttgaaataaaactgtaatttgagccaatggcacagctttattttcgcgcccagtattgactataagtagtggagctctggtgaacttctctcggctgttctcagttcctccatttatcgtttcttcgtcatgtcgggacgcggcaagcagggaggcaaagctcgcgccaaagccaagacccgctcttctcgtgccggtctccagttccccgtgggccgagtgcaccgactgctccgcaagggcaactatgctgagcgggtcggggccggcgcgccggtgtacctggcggcggtgctggagtacctgactgccgagatcctggagctggcgggcaacgccgcccgcgacaacaagaagacccgcatta

SEQ ID NO: 231984 - DNA, 79 bp, Homo sapiens
  chr6:27833430-27833509
  hyper
aagtaaccatcgctcagggtggtgtcctgcccaacatccaggctgtgctactgcccaagaagaccgagagtcaccacaa

SEQ ID NO: 231985 - DNA, 325 bp, Homo sapiens
  chr6:27834075-27834400
  hyper
ggaaaaaaaaataatccagtacagaatgacacggtcatatcaaattggcatgtaatagagaccccatcttgaaacttgctactatattgtcttgtgcgttgatagcatattatattaatgccgaacacattagtgacgccgaagtagctggtgcctaaatggcttaaacgcggaaaaaccacatacagatgatggaacaaaaactggccaatcagattatagagcgggctttttaaaatataagaagcttctttgtagctaggcgtctgacaaaaagcttgacaccaacttaacaaaaaccaacggctggaattcatactctaat

SEQ ID NO: 231986 - DNA, 810 bp, Homo sapiens
  chr6:27834671-27835481
  hyper
ttttgctgctttgggcttagcggctttgggctttgccgccttcggcttaactgccttgggcttggcaggactcttggttgcctttttcggtttggcagcggccttggccttcttagggctcttcgccacctttttgacgccagccgccgcgggcttcttcgccttcttcggagtcttcttcactgcctttttcgcccctgcagccttcttggccttcttaggcgtggcccccgcgggcttcttagctttagcggcgcctgccttcttggctttgggcttggcttccccggaggccgccttcttgttgagtttaaaggagccagaagcaccagtgcccttggtctgcaccagggtgcccttgctcaccaagctcttgaggcccagcttaatgcggctgttattcttctccacgtcgtagccaccggccgctaaggccttcttaagggctgccaaagaaaggccattgcgctccttagaagcagccacagccttggtgatcagctctgagactgggggccccgtcgctttgcgcttagcagcgccggcgccggcagccttcttagttgccttcttcttagccggggatttctccaccggcgctggggtggctgtctcggcaggagcggtttccgacatggtggcaagaaactgctagaagagaataagctcgaaatctaaagagcaggttttgcgttgctgctatgctcgggccccgggcttatataagccggcgctgccctgtgattggtggagcgtccaatccaccgccctctggccgccgccgctcgcggttggactcccaaattgtgt

SEQ ID NO: 231987 - DNA, 1677 bp, Homo sapiens
  chr6:27839729-27841406
  hyper
gcataatagtgacgcgtttggcgtgaatggcgcacaggttggtatcctcaaatagccccaccaggtaggcctcgcaagcctcctgcagcgccatcaccgccgagctctggaagcgcagatcggtcttaaagtcctgtgcgatctcccgtaccaagcgctgaaaaggtagcttccggattagcagctcggtcgacttctggtagcggcggatctcgcgcagggccacggtgccggggcggtagcggtggggcttcttgacgccaccggtggccggagcgctcttgcgagccgccttggtggccagctgcttgcgcggcgctttgccgccggtggacttgcgagctgtttgctttgttcgtgccatggctaagtagacgtacctactcaacacaaatgagagaaaaaaactgatcatcccggtatttatagctgccctcgcgttctgattggacagtagactgtgccatgccacgtctcacacacggaattggctcccagtttaatctgctagtgaaagggagacattccgcctctgttttgggtcaagaaacgtaaaatggttttgctagctaaagaaaaacaaaaacggaaacaaaaaaaaatcccccaaaagtctaggatttttcatgcatcaaaatcctgtttaaatataagcttgataaatctaaacttgccttgcactattttaattacgaggtgtcattactgatttgacaaaaagttaaagaacgtaaaggaaaagtgaaactagagtaaatttgtaaatggaggcattgaaggggatatgaaattcgagcgttgtggtatgccagtatttctcaaatttaaacgtacttaatgttttagaagttggccgactttttctgtaaagggcgatattaaaacattttgggcgttgcggaccacagtgtcatagttacacagccctcgcattggtagcggtaaagtaatcgatacaagataaatgagaccggctgtttcattatgacttttgcaaaaaccagagaggcgttatagatttggccgtgtatcagagaagccggcacttttaaccactaagtaatgctgaaaggggcaccgaacctcaaacttcagcgactgcttatgtggaatcgctaatttgccaaaactgccatacgtttaagtgttcttaagaaattaactatctttagtctacagctctttcacagacttcatgggtggccctgagaagggcctttgaggaaccgtgtaagtaagtaaaacactcagccgccaaagccatacagggtgcggccctggcgcttgagcgcgtaaaccacgtccatggctgtgactgtcttgcgtttggcgtgctccgtgtaggtaactgcatcgcggattacattctccaaaaacactttaagaactccgcgtgtctcctcgtatataaggcctgagatgcgcttaacgcctccacgccgtgccaggcgtcggatggcgggcttggtgatgccctgaatgttgtcgcgcagaactttgcggtggcgcttagcgcctcctttgcccagacccttcccgcctttgccgcgcccagacatgtcttgtactaaacaaaatgcaacacggcaagcctcgcagcagtactttatatagtaataaatcggacctgattgggaactctccacaccagctgcatccggtcggccgattcacaga

SEQ ID NO: 231988 - DNA, 499 bp, Homo sapiens
  chr6:27858289-27858788
  hyper
tgcagcgccatcaccgccgagctctggaaacgaaggtcggttttgaaatcctgcgcgatttctcgcaccaggcgctgaaatggcagtttgcggatgagcagctcagtcgacttctgataacggcggatctcacgcaaggccacggtgcctggcctgtagcggtggggcttcttcacaccgccagtcgctggagcgcttttgcgcgctgccttggtggccagctgcttccgcggtgccttgccgccggtagacttgcgagctgtctgcttcgtccgggccatagttgagaaagctatgctctgaaagcaagcagctgaatgagcagtggcttctaccagaatttataacgatgatctgatcctgattggtcagaactgttgtaggaaaaacctggttggttgttaatactatcttcatttggttcctgccacttttttttttttttttttttttttacctgacggcttctaattctgtcgcctaggctggagtgtggtgg

SEQ ID NO: 231989 - DNA, 71 bp, Homo sapiens
  chr6:27860879-27860950
  hyper
tttggccttggcgcgagccttgccgccctgcttgccacgtccagacatggtaaaacgacctgtggcctaag

SEQ ID NO: 231990 - DNA, 65 bp, Homo sapiens; identical to SEQ ID NO: 200398
  chr6:28109924-28109989
  hyper

SEQ ID NO: 231991 - DNA, 986 bp, Homo sapiens
  chr6:28175218-28176204
  hyper
caaatgggaggactcgggcagctttcctgggatatcacaccatatagactgagaatttcagaaacgcaaagtgcgcgtcccagcagggcgagaatggcgttaactatgtcaccaccgcccaaattccctataatttaccacttatcgttcctggctttattctccgtgcgtgcagggacatgtaattctctaggagacggtggtccggacttggttcccgactccctcgtggctgcaaacaggggcagctgatttgggtggatgcagaggttgtggccaggggaagggccgcggggcagcgcgtagaactgattgtaaacccaacttcccgcctcggagcgagccgcggctcggagtagcgtcattcgaaagccaccggagatatcgagagagctccttaactgctcactgagcaaacttcgttttacagctttggggttgatatttgggaaactgggtcctaaaagtggcttctggtcttcagaaggctttgttctccgcttttgattttttgacaccacgggtttcacaccccaccccaccccccagtctcacacaaaccactcaaactcgattgcgtctccattgcgctttggggaaaaataatttaagattctcgcttctgaaatacagcgtgatggttaagagcatgggccgtggaaacagacccggggaaagcctcagctcggccactctttgccgcgtgaccctgggtggcaccttctaagggtgattctgggattctatgaattaatgcatggaaagcgcttgcgagagcgctagccggagtccgcgctatttaggtgtttgccaatattattgttgttgttaaggtgtgagggatcttggaagacagaagccaggaataaagtaaacctacagagacgtccctccccaaaccccggccgctacccctgcaagaccttgtggagcatgttaggtttcgtggcgtcgccaagttgtacctcctgcgcttcgccgcagat

SEQ ID NO: 231992 - DNA, 34 bp, Homo sapiens
  chr6:28186864-28186898
  hyper
ccttcccgcgccccggcccgaagtctatacattt

SEQ ID NO: 231993 - DNA, 93 bp, Homo sapiens; identical to SEQ ID NO: 200399
  chr6:28219718-28219811
  hyper

SEQ ID NO: 231994 - DNA, 191 bp, Homo sapiens; identical to SEQ ID NO: 200400
  chr6:28220077-28220268
  hyper

SEQ ID NO: 231995 - DNA, 640 bp, Homo sapiens
  chr6:28249085-28249725
  hyper
ctaccagccagtgatgaccccgaagacagacatttaccactgtgttggttttcaatcgaaatgatgtacataaatttggggcgtgcttgcaccgtccgaatgggcctggggtccggcggcggagagtgacctgggcggggcaggaggtggcagcgggggtcctcccggctcaccagagagacgagcggccgtgctcctagagaggcagggaacccgccagactccgccactccgctgcgggcgcggcgcagggagaagcttttgtacccgcccagctgctggaggcgccggcagcgcccgccagacccgccagcccagcggcccgggctctggggaaaccggcgctcccgacaggggagcaccgggcctctgagctccctcgggagcctttcacgaggtcagctacgtctttgttgtgcgcgttcctgaacttttggtccattaaccaacaattagacacgccggtattcagtgcctggcgcggtgctagatgctgggtgtaatctcagaaaaatacattcaggggcgcgcctgagggtgctggctgctggcatctcaggtgctttacgtgcattcgtgaagaagcccatcagtatttcttgaataccaggtacgtgccgggcatgtagagtctatgcag

SEQ ID NO: 231996 - DNA, 1219 bp, Homo sapiens
  chr6:28303247-28304466
  hyper
gttctggtaggttccggcaggcgctctactttcctttattaggactataagcccagcttctgtgaatcatcacctcagcccctgattggtccggggccaaactttcacttcggcttctgataggtcctgggccaagctaagcagcagctatgaatcatcatttcagctcctgattggtcccggaccaagctgagtcaagcgttcgccaggacagcccgcagactaagcgcattccctctcctttccagtccataaaaaccccagaacgggccccataatgggtactcccggtcgggaccccttctctgctggcagagagctttttcctttcgcttattaaactttcgctctaacctcacctttgtgtctgcgctcctttatcgtcttggaggcaggacaaagaactccgggcgttatctcagacaaagaaaggctgtttaatcttcaggataaggggcgggacctccacctactccacgggggcttcaggccagtgaatgtgtaggggcgggggtcacgcctgcgcagacgttccctccccgcctactccaaggcacagacctgaaatcttctgggaacctggcgggtcgcgacaaggggccaagactcaccttcggggcaccggcaagctacggaacaggtggcggggctgcagcaccccaatgaccgatcaaccgcaaaggccggaaatgcgtcagccgttctgagcccactggctgaagccaggcaactctttcctttctaggaattccagaggtggctgctgcttggtgactcccttattgcaaaccccggggccaaaaatcccagtcccactgggtgcgaggcggagaaatccggcgaggcatttctatggggagcggcccccagcatttaggagttagatggtcatcgagacccaaaacattagagccggaaggtgttaggaagatataaacgtagagagcgagtaacaggaggcaattccacggccaaacaggtttatttacaggaaaagcctgcgaagagttccagttaggaatctggctgagatcctgatcgcttacaagctgaggcttttataataaagtttctgttggggaggggttggggaagtgctggctagttggaactgtttggacactttccaactggggacagatgtggttagggccgttaggctctgttgcggttagagctgttatgctctgttgaagctatggacggggttgacatttgc

SEQ ID NO: 231997 - DNA, 702 bp, Homo sapiens
  chr6:28367113-28367815
  hyper
ggtccctaggacgccggcgagcgtctgtgacccaccactgtccagaaatgtcggtaagcgctgaacccaaggatacacagcccgaagcaaacgcggaaggtatgggccttacagcctggaattgctgcagagactgggagccaaaccctcatcctaatgtcccaacgcactttggggagggagagcttcccgcggatccgcctgggtttgggaggaccggggtccactctgcaccggccagggcctgaggggcccagcagctggaatacagcaatctcccgcccacctgctcgcagcgtacagagcacaacatcgctcacctgcggcccccagggccagaagagaactccctcctacggagcgaaggcaagaggcctcgaacccttttgggacccggaacccatcaaaagtgacccacaaaggccggaagcggccacggggggtctaagaaccagcccgcgcggggcgcacttccgcggccgctctaggaagggagcgaaaggggctttcaactcggtagtgtttccgcgcgtctacgtgagaggaaggttgatggctttcaggcccgctggtaaatggaacgggtttatcttctcctcttctttacccagccattgtccacacttcccccgacccgatgggtggtcgaggcttgtagaactgatcttaagacagggaaatcccttgcgtctccattcactt

SEQ ID NO: 231998 - DNA, 468 bp, Homo sapiens
  chr6:28410971-28411439
  hyper
ggggaaaggggtaggggcaacgacgctgacttttggttaacaaagcccttccaggctgcggagcaacctcctctgcccttcacctgcccggcccatctctggccaagaagaccctgccgccaaatccccacacccagtccaggtcgcagtgcacagactggcccttccgaagcccctcagcggtagcccgactccgaagctcaccgaggcatccgtgagaggagatgccacctagcgcagatcacatctgctctgaatccttgacaaccgcagcccaaagaatgataaactacaaaggccggaaatgcgtcaccgcggcccgctctccgcgaaacagcggttccggctgtgttccttctaggaaggccggaggtttccacacctctgtggtcgtcactctgaatcccgtctgtagtcttaagtgagatactaggtgacacattgtcttccacgcggcaatataataac

SEQ ID NO: 231999 - DNA, 101 bp, Homo sapiens
  chr6:28414754-28414855
  hyper
agggctctggcatccgggatggaggcgcgtcgctttctgtggctggcgctggatccaccctgggtctccagccacggctgcagagagggtagcgcggtttc

SEQ ID NO: 232000 - DNA, 1370 bp, Homo sapiens
  chr6:28456972-28458342
  hyper
gacatacgaatacacggggaaacgtattcggcagtctacagtgtcaaaggatttttctattaatccaagaaagagcattacagaaagctatacaatacgtgaagacgattaaaaggaatatatctatacataattttaaaaaacctttgaatcttgaaagtcactcacttagggtacgtgaagctgccaaatttatcagagaaggaacaggcatctctcgcatggagccgtgggcctcggcgttaaggcactcttcagctacaggtggcagcccgtttagctcttcttaaggtcttgtgatgtcattttcaagaggccagtaaagttctgtgtcacgtggggcctctcaggaggggtgcggaggtgggggaggggcggggagcaggactccactgctttggcctcaaggagtttggtcgacacttgaagactgaccaagaaaaagtaatttgtcccagttttctcccaccctttgttttcttctgctcctcttgggcttgttttttttttgggggggggggttctttcttttttcttttcttttttttttttttttcccgcagtaagttctgaaaatcgcctcccagaggagataacgcgttctcctctgtaacccgtccttccacgtcccggtggtgggggggggggtcccggttctcattctttcggggacctgcaaggagccccgcccgcaggctttgaaccgatttcggctccgcgtccaggagcaggccctacgtagggccgggggaattcaggtgcgtctgcggggcccagggcacccagggcaggcggggactgagacgactgagggttgagggacaaggaggttgggactggggaggggagacccgggacccgcccagaacgctttcgtggggttggagagggcaggacacagcctctctgggcccggtagtatgcgaagacacgcataacgcaaaaggattcccgtcctggactttgggaattaaggccctgaacacattgagcaaaaagtagatctgtctgtacagacgtttctttccacgtctttcatagtaaggactttattaaaaagcaggcactcgaatcctaggtgggtagatgggaggctggggctggggatggggacgtcctctgttttctggttgtgcacattaaaaataactctctgctgcctactcctaaacgcagccggcaaaaatgagacgtcaactaagcgccgtttcagtcccagagccaggtcgtccatgggggttttcaagcgttttctcgatgactgatttttctagaagcgaatggattttattctcccaggtgtaaaggctacctcctgcttcacacccgggtaacataaaagacagcgctgggaccgaaactcgggtctc

SEQ ID NO: 232001 - DNA, 251 bp, Homo sapiens
  chr6:33538965-33539216
  hyper
gggcgttggggggcggtgcaggccaaaactttttgggctgccccacccatgcctttccggttagcgttgcagctccttagacgagtaggctaaccacagcccacccgcctttcttccagcgatgcaacgatctgttcgccgctcaatgccgcatgctgttcaaagcccagaggctggagtgggtgcgccccaaaggccccgcccaaggaagggcacgcttgcgtgctcgcggcggcggccatcttggactc

SEQ ID NO: 232002 - DNA, 176 bp, Homo sapiens
  chr6:33547966-33548142
  hyper
cccgagggacccgcgagactccagtgatcatagaggtgccagcggcacccggctccaatcagctccctctagaggaagttgctctgtggccaccggatgcagacgcacaggccgacagcctgtagggtgatctgggtgggccaggcccaggagcatgtcccgcccactttccccac

SEQ ID NO: 232003 - DNA, 351 bp, Homo sapiens
  chr6:34111735-34112086
  hyper
cgctctgagagacacgtggcttcgggcacccagctaggcaagcccagctcagtcggtgtccggaaaggccgcgttctcccgcgccaggggccggcaatggtgcggagaggggagaaagaagcaaggcgcctcctccgacagggactgaaagtctgagggcgggatgtcactcaaggcctaggggcagggggcgctcgtacgttcgggcctcaggactccctgccgccgccgatgctgctgccccatctcagcacaaacagcctcagaccgccctggtgcgggggcgcctctcgcagtcgaggcctccacctcccggccccgcccccgcgcggggaggagacgcctcccacc

SEQ ID NO: 232004 - DNA, 44 bp, Homo sapiens
  chr6:34112566-34112610
  hyper
agcccctgtatacagagacagtactttccaccgggcccgcaaaa

SEQ ID NO: 232005 - DNA, 690 bp, Homo sapiens
  chr6:34112910-34113600
  hyper
cggcctgccccgggggcgcaggcagtcgacggccggaggcacggttctcgcggtgcccagagcccgggccgcggcgggcagcgctgacgctgcggacccagcgcgccgcggagccgcccggagtccgggacgcagcagggatgagctggcggccgcccggccggagccgccgccaagcgcgcggcgttcggctgctgctccggcaagcgagcaagcgagagggagatcggcggcaacccctgctcctgctgcggcggagcccggcgtccgagccggaaggagcgggagaggcggcaagaggagctgggtctggccgagagctccgggctgggaagggagcggagcgggagcgaccagcgagcgcagccggccgaggtacgggcgcctggcggcgccgcaacagcggcaacagcagcaggaaaaaaaatgagagcgagctagagagcgcgctggagagcgagcgagagagggagcgagagacgagagagcgaggaaggcgctgagaggggaggctgcgggagagggcgggagagccgggaagcgcaagggggcgagggggccgcagccgcttgccccggcgcccacagccgctgctgcacccgaggaggcacgagaccaatccggcaagtttgcgctgaaagtgcgggccaagctcacggcgcttctgccggccttttaaagagagagcac

SEQ ID NO: 232006 - DNA, 157 bp, Homo sapiens
  chr6:34119201-34119358
  hyper
cgggggctgtcagccgtgagccaaatgtcattagcatggatgtcacaagccgggatgtcaaaatacaattaacatttaaaagccccttccgcccaagacctcgtggccgcctgctccttcggcagagtggcagggctccgggcgccagggggagcag

SEQ ID NO: 232007 - DNA, 344 bp, Homo sapiens
  chr6:34191991-34192335
  hyper
aaagtgttcgaaacgctgctttgacacagtgaccttgtgtgagccctagctgcacacaccccccccacccacgccctccccgcagacagcagcacgcacacccccggccggctcacggtacgcggccgctgcccgcactcccgggtcgggcctgcgcgtccctgtggggttgggcgagcggggtatcgagggtccagcagcctggacccggcccctccacagggcagtcccttttccagcttccaaaagctagcgttgctcacctactgccagaccccagacccacttctcccacgaggtgtaaagaaggacccctgagggtcttccacgtcaccttgtggagc

SEQ ID NO: 232008 - DNA, 34 bp, Homo sapiens
  chr6:34359487-34359521
  hyper
ggcttatgcacaacgccctaaatcttccgaagac

SEQ ID NO: 232009 - DNA, 558 bp, Homo sapiens
  chr6:34433450-34434008
  hyper
gcaccaagggacgccgaggctcgggagaggaggaaaggccaaggcgatggggagatggggagagaggcagggagcaacatcccgggctccgagcgcgccagctgggagggctggggaggagggcgcaccggagggctcccggcacgcgcggggccgcgggcagcccccagaagagggagccaggcaagactgctggggcaggggtcggctgaagcagcggggagccggaccccacccgccacccgccacccgccacccccggcgcctgccaaactggttgctgcctccccggcagccgcggcgcgtccacctgcgcagccaccgcgccgccctgcccgcgctaccattggctcgctaaaaatgcctctctaatctgctctgctcggtgcacgcctcctcctcatccttcccccctctccgcctcagctctgaccttcctccttcccgcagccccggcgagatcccagagcgacgcggtggcggcggcagcgccagccccctcctcccccgggaagtcggccgggcttgaggccgggccccagacgtcccgcttcgccc

SEQ ID NO: 232010 - DNA, 59 bp, Homo sapiens; identical to SEQ ID NO: 200415
  chr6:34856883-34856942
  hyper

SEQ ID NO: 232011 - DNA, 829 bp, Homo sapiens
  chr6:35181395-35182224
  hyper
ttgcgcgcggtctgcgcctgacctccctgctcccggggaagccgtctccatggagaccaggcccgctcccccatcgccggattgtaaattcctgcaggcagcggcccggcagcctggggagggggccaccgcgcccgggcgcgcagggggagcggccaccgcgccgaggccccatttgaaagaaaaaagggcacgaaaaaggaggtggtggagaaggaggaggaggaggaggaggaggagggggaggaggaagaaaacgaaaaggagcgaggagaggaggagaaagaggaggaggaggagaaaggcgaagaaaaagagcctgagagacggagaaagagcgagagaggaagaaagagaggcagaaagggcgtgtttctggcgctgcgtttcccctcccctttctcaggtccttcgctcgggctctgcgcgctctccggctgcagctctctcccggcgaagctgggaattgggtgggattacacggagcagccccgccgccgccgctggcagaggccggcttggagagggcgggggttcccctccgtcagtcgcccctggcgcccctcgcctcgtcgcactctccgcctcgctctccccgacgtccggccaggaggagccggtagcatcgggagcctcgcgccgagggcgccgcggtccgcgccccgcgactgcagcccccggcctggccccggcggggcgccccctcccctccccctcctgcgagctgggatccggccggcttccgccctcccctggccgcgagaccggccccggcggctgggccgccagtagctccagccatgggctcggggcgcgtacccgggctctg

SEQ ID NO: 232012 - DNA, 307 bp, Homo sapiens
  chr6:35227367-35227674
  hyper
gttggatggctgccgcggcgaagcggggggcggggtggaccgtgcccggtattttctatacgggttccggggcccggtagaggcgcgccaagaggaaaggaaagtgcggcggccctggaacctggatatcgcgcgaggcaagctgcgcgcgggcgggcgggctatggcgcaggcgggttgtggggccggcgctggtggcggggcccggtgcatggcggtctgtcggcggagtcgccctcgggggctgtcaggttggtggctgcgggaggagtgggccaaccatgcccagggcgggaggccgggcggg

SEQ ID NO: 232013 - DNA, 1084 bp, Homo sapiens
  chr6:35435672-35436756
  hyper
cagctcttcccctctgcaggcgttgaaaggacaggaacagaactttccggacacttcccttaccacgagtccacgttagagcaaggtgctgagggagggaggtcgggccaggcttccttttgagaacataagctggtgcggagggcgcgaggggagaggggtttgagggacaagcgtgccggaatccacgctgtcagtgaacatcactgggctgtaccagtacgtgtgactaccgaagctcgagccccgaacccagccgcttccctaggggtccagcagcagcgggcgcgaatcggcacattaccgggggaccgcggggcgctcaggactgcgacaactctgtgggttaccgcgccggcctagcggcccagcgacgccccccagcggccagagaaggccgcgcttctcggggttggcccacccaaccgctctgcgggtaggaccgaggagcaaagcattatcgcgagatcagggccactatttgagcgcatgcgcaagacatgctagtctcttttccggttagcgcggcgtgagaagccatgaggtgagttggtcctgaaagccctatccgcgttcatccgcgccttcaggtgccccgccgagggttcggatcctgtaggccgcgccgcggacccttgcgccacctgcgccgcggggcatttctcaaggcgggtcggcctgcgggtcgcccttcctaccaggtccgatcactgagagcctccctcttccaccggggcttgggtctgggtctgagctcccgtcgctctacttggtgtccggaatctacgggggagtccgccgtgggccgcccgcccgtctcgaagcctagacctcggaggcttccaggcagtccgagcgtgtggactccgcggccctgagcgccctgtcgcttctctcccgcagcagcaaagtctctcgcgacaccctgtacgaggcggtgcgggaagtcctgcacgggaaccagcgcaagcgccgcaagtgagtgccgaccctggggcacggcgcgggtggcgagggccggcgggtgcttaacccccctcctctctcgaaggttcctggagacggtggagttgcagatcagctt

SEQ ID NO: 232014 - DNA, 313 bp, Homo sapiens
  chr6:35464273-35464586
  hyper
aagggcggcggggcccgggactgggcgccccggatatgagctccagggtggcaggcaggccctccacactgtgcggcccccggatccccgccccgaccccccaagcacggacggcgggacaggcgacggcacaggggacacggtctccccggcttccccaccttcccggaccaactcgtccccgtcgcgggggggtggggagggcggggggcggggcttcccggagagattttcccccttccctctaaacttcccggcaccccgatccggggctccagctccggctggacaatagctcggggacccagtcccc

SEQ ID NO: 232015 - DNA, 35 bp, Homo sapiens
  chr6:35479458-35479493
  hyper
ggtttcccgggggtcgcgcttcttggcctcggggt

SEQ ID NO: 232016 - DNA, 119 bp, Homo sapiens
  chr6:35479523-35479642
  hyper
gcgcccgggcctgggctgggtctggggaaggctcctcccgcggcctccccgtccgcccagctgagccgagatgcggggttcagacagggtcccatccgcgggtccgcgaggcagcgcct

SEQ ID NO: 232017 - DNA, 172 bp, Homo sapiens
  chr6:35655508-35655680
  hyper
aatttactgaacggcggccaaacgctgaacacactgtcctgaaccacactgaagggtatctacaattctgcatctccgcttacaacttgaaacttactacgctttcgccaccactgcagaacccgattttagagactacgatggtcctgccggttcgttaatcgaagaaagc

SEQ ID NO: 232018 - DNA, 559 bp, Homo sapiens
  chr6:35744105-35744664
  hyper
taaatacaataaaatagagttttatcttacaataaaaatagagttttatcttacagtttcaagcttctacttggaagtaacacgtatggaggctcccagggcccctacagtctggaatcccgcccgtgcgagcctgagcgcctttcctccctccttcccttccgcaggcgtcctcgccctccacgtccctcctccgccggggtggcctggggcgccgggtcacgtggccggggaagaggttttatcccgcggcccctcggaaccccgccgctgctctgccgcccaggcccatggccgcagccctggcgctcgtggcgggggtcctgtcgggggcggtgctgcccctctggagcgcgcttccgcaatataaaaaggtgagccggggagcgcgcccagccggccgcgaccgcaggagagggtggccccgccgccggggcactggagcccgaaggcgccgggcagcctgaaagggagaggtgggtccggaaccacacccaggcgggtagcctggggcatcctcagacggacttcaaaagccgcttcactttcccctggtggc

SEQ ID NO: 232019 - DNA, 90 bp, Homo sapiens; identical to SEQ ID NO: 200417
  chr6:35995284-35995374
  hyper

SEQ ID NO: 232020 - DNA, 548 bp, Homo sapiens
  chr6:36098064-36098612
  hyper
aggcaccggggtcccgctgggcagccccgaccccgtgcctgggccgcacctgccgcagtggctccgtcgggccgggcggaagcgcgggagcgcagggctggacaggcccgggcgtggcggccccggcgcacctgggcgagccggcaggtgggagcgtagcagcccggggcccccgccctcgcgcgggggaggagcgggcggcgcggggcgggcgcagcgggggtcggggcgctgggagcccgttgggccgcgaacgcagccgccacgctggggccgccgagatcgggtgcccgggatgagcctcatccggaaaaagggcttctacaagcaggacgtcaacaagacagcctgggagctgcccaagacctacgtgtccccgacgcacgtcggcagcggggcctatggctccgtgtggtgagacccctgggccgctggggggcggggggcgggcgccaggctctcccctttccgcccagcccgccctgggctggcccctcgccagcgccaccttgaccgcggacctcaaggcccagcgccctccccggggc

SEQ ID NO: 232021 - DNA, 183 bp, Homo sapiens
  chr6:36252988-36253171
  hyper
ttctgagcattcgtcggcgcctccccaggggctgctgcgccccctgcttcccgcgcgcccaccacgcacgctgctctgggagcagggccggcggcgccgccgcctcgcagcgattggttgaaccggaggttgttgctaggctaccagtgcgccctgagcctggggccccgcagtcccatcctc

SEQ ID NO: 232022 - DNA, 113 bp, Homo sapiens
  chr6:36354418-36354531
  hyper
ggagagatatctgccgagagagaatttggatcggagccagcaaagcaaactccagaagccttggctgctgcgaaaggggattcaacacctttccgggtcgttctcacttcatt

SEQ ID NO: 232023 - DNA, 1049 bp, Homo sapiens
  chr6:36354736-36355785
  hyper
aactgcctgggaaacgccagccacggagctgctgaggatcagactcctgggtttcagcatggaggccagggaagggtctgataatgggtatgggtcctggcgagaggggagtggagaaaggccttggagtgggacggggcgccagctctgggggcagtctcgaggcacctagaaaaccggcgagtggggagaggctgctaaagaggggctccctgcgagaatgcgttcaccagctgtgaggacctggctggcgcacgaacttccaaagacctcacatctggttggtgtaggggcgaccagtggtaagggggctgcggaaagggcccgcaggggctgtgcgtgatgccttcagagctgtgtatgacaccgagagagtcaggggcggtgacccgcgtctggaggtggaaggggaagtgagtgagggatggatgtgaggtttaggaatgtgttggaaagagagattcccgccaggtaaaaggtctgataaaataggtttggaaatctaggtggtgaggaaaggatgcgggagcaggtggctctgcgtgcgcgctgcgtgttcagccgccaggctcttacctgcattacaggtggaggtgaggaagccaccggctttctgtcttgagcgctcccctggctgtggctgctggggccctaggcccgcgccccgcagtcctcctccgccaaacccctaacctggctccgagaactggaaggtcgcgtgggaggaaatctctttcgagaagcgccaaggcgtgtgcgcccgggtcctccgcaggcgggcaggcgcgcgaggcgctccggtaatcgctatccttccgggaaacgaaaacgaaagagcgggatgcggttccacttgcgccgctgcgggctaggagcagggcagggcagggcaggggccggccccgtgggagcgcagcaccggggcgctgcccgctcgctagcctgggaggcgtgggtcctgcacacagcctccagccggcggacagtccctctggcgacctggccttggctcccactggggcagagccgggattctgcaggatctgagg

SEQ ID NO: 232024 - DNA, 358 bp, Homo sapiens
  chr6:36391057-36391415
  hyper
ttctcaggctccccgccagagagcgccgccaggtcctcggaaccacctcgcgcactttagctgggcgcgcgacccgcgcaaccagtgagaaccccgctcccgccctaggctttctgtggtggaaaaagcgcgcgcgcggacgagcaggttaggcgatagaggtcacgtgggccagctgtggccaatggggagcgcacatggcgacgcggccggcggcggcgcgcgcgtagctcgcctcgggctcctggcgggagcgggagttagggaggccgggttcccgaattacacacaccagcgttatttattctatcagtctttggttactctatctggcgttctcgacgccgtaataacaagt

SEQ ID NO: 232025 - DNA, 97 bp, Homo sapiens; identical to SEQ ID NO: 200420
  chr6:36410471-36410568
  hyper

SEQ ID NO: 232026 - DNA, 142 bp, Homo sapiens
  chr6:36563963-36564105
  hyper
ttctgggattgcaggtgtgagccgccgcgcccggtccatgggcatttttttaaaagtgaaaatcgttggccttatttttattaaagctggtaagttttggcttatgtaggtactttgaatcgcttgcctggtagtataacct

SEQ ID NO: 232027 - DNA, 36 bp, Homo sapiens
  chr6:36628645-36628681
  hyper
ccctgcctccccctcggtgggcgtggccgcttccca

SEQ ID NO: 232028 - DNA, 343 bp, Homo sapiens
  chr6:36646212-36646555
  hyper
ttgtggctcacttcgtggggaaatgtgtccagcgcaccaacgcaggcgagggactgggggaggagggaagtgccctcctgcagcacgcgaggttccgggaccggctggcctgctggaactcggccaggctcagctggctcggcgctgggcagccaggagcctgggccccggggagggcggtcccgggcggcgcggtgggccgagcgcgggtcccgcctccttgaggcgggcccgggcggggcggttgtatatcagggccgcgctgagctgcgccagctgaggtgtgagcagctgccgaagtcagttccttgtggagccggagctgggcgcggattcgccgagg

SEQ ID NO: 232029 - DNA, 129 bp, Homo sapiens
  chr6:36703003-36703132
  hyper
ctgagtaacttccccgtagtcacgtagcaagtaagtgctggagccagtgttaaacgcaaacgccgatacccatagacttaactctgaagttatgcaactgcttacaggaagatgcggatgcttcgggga

SEQ ID NO: 232030 - DNA, 247 bp, Homo sapiens
  chr6:36806978-36807225
  hyper
gtttaggatcgaagcggcaggggccgcggggctctgcgtccagggccggggcaaggggacccggccagcgggaggctcacctgcaggacacggtgatctccaccttggtggccgggatgctgcccgccaaggagtcgaactcgctcagcgacgccatgtcctcaggctgctccatcgcccaccgcaccccccaccccaaattagtcaatccctgcgcgattcacgcctcctccggagcgactggagc

SEQ ID NO: 232031 - DNA, 545 bp, Homo sapiens
  chr6:36807968-36808513
  hyper
gtggtcctggtcgcgcgcatcttcatttgcgcccgccccctctcaccacccctatctcccatcaggggtctccatcctgggggagggggagggttatgggaaccaacgggcgcctttttgagaaaggtctatgcagggttgagagggggcataagtgggagggaggtgtgcaaaaaagatcccctcccaggggcttgggtgtggagggtctctgctgagtgtgcgccctactcgggggcgggtctcagttcagaaacagaccctacatctccttctggggaggtgtgtgggggcgaccccagtgccaggagggactacctcggtttcccagtggcccaggtggggtcggtgcatgggcgcctcccccatccgtggttcccgccagccgcggcctcgccaagtcggctgccgaaaccacgcgccagcgcccttccactcccccgcccgtcgtgaccacacgactgagccagcctccaggtctagaagctcctgccacccagtctggtggcaaccagactgggagatcggcccgagctccctgggct

SEQ ID NO: 232032 - DNA, 145 bp, Homo sapiens
  chr6:36954119-36954264
  hyper
ggacactgggctgcgggccgggggtcaatggtggcgggcagccggggccccgggctcgggagctgtggcggcagccgcaggccggggcgctcccccgggatgcccagagcacgcgggggcggggttcggcgcctctggctgccag

SEQ ID NO: 232033 - DNA, 149 bp, Homo sapiens
  chr6:37138727-37138876
  hyper
ggaacctgacggagaccctgggcttccaggtggccatcaaacacgtggagaaggaccggatttccgactggggagagctggtgagtgccctgcaggagcgacccccaggatgagtgggtggggtgaggggcgcccccgactcccgccct

SEQ ID NO: 232034 - DNA, 501 bp, Homo sapiens
  chr6:37139056-37139557
  hyper
atcacggaaaggggagccctgcaagaggagctggcccgcagcttcttctggcaggtgctggaggccgtgcggcactgccacaactgcggggtgctccaccgcgacatcaaggacgaaaacatccttatcgacctcaatcgcggcgagctcaagctcatcgacttcgggtcgggggcgctgctcaaggacaccgtctacacggacttcgatggtgagccaggcccgggagggagctgcccaggtgactcggcccggcccggcccagtccggaggcctcggccagtctcccgcgccagccttttgtaaaggtcattgggccgcctggctcgatgctagccggggtgggacgcaggagagcctcccagcgtagtaaagccggggattttcagccagctgaacctgtaatgtttctggcatgattttattcttcaagtggaattcagttagttccaggctttcccgatgaataagaggttgtgggcaaccggcggtagcccagat

SEQ ID NO: 232035 - DNA, 167 bp, Homo sapiens
  chr6:37225492-37225659
  hyper
cgtccacggcttgcgcagctcaccaatggcagcggtgctgggtggaggggtgcccacatccaagatggcgtccccaggagctgggagcgggtgaccggcggcggggaagcggcctgggttggccctcagattgcggggtctgggggcatctcgccgggcaaaccctt

SEQ ID NO: 232036 - DNA, 45 bp, Homo sapiens
  chr6:37226110-37226155
  hyper
ggggtctccaccacgcacaggtggttggtcgctcgaggatggccc

SEQ ID NO: 232037 - DNA, 138 bp, Homo sapiens
  chr6:37483957-37484095
  hyper
tgcagcttcgcggccgctgcgattgggtggcatttgtgagcacaaaagagaagactcgggcattcagaaggccctttcagcaaagggcgccacaggcctgctggctggaaattctcctgagatcggttggagtctatt

SEQ ID NO: 232038 - DNA, 779 bp, Homo sapiens
  chr6:37664032-37664811
  hyper
agaagaagcgaagccgcagcaacagcggggaaggcgagcccgccgcccggccttggtgctgacagccggctcgcccgcaagccgcgcggcaactccggctcatgcatcgcttggcttccactccggaggccgagccaggacgaggtttcggtgcaagtcgctgcaccagtcctagactgggtctgtccgggtctcccgagccgaccgggtgctctcaagggttcctaatcattcccacctctagcagggtgtgggaaagtgggtgcctcctcctgacatcccggcttcccaccagaccctacgaccggcccctgtgttccgaagcagctagctcggtctccacgcgccctggagagggcggggacgcgggcatccactccagagtccgagtcgaggtctccaccaaaccccggcagcgcgcactttgcgcctcttgcaaagtttccgcgcgaggttaagccaaggtggagcgggacgcgggctcttaccgtagactccttgtccccggcagtggaaggggatcagcgccagaagtagaaggcaggtcacctccatcttcacggccggtgcttcatccccgcgaggcggcgcagcccgagaggcggcggggggcgcattcgccggggccccgcgacgcccctatgtccccccctttccctgagaggtgagagagagagcggcgacgaagaccaggagactgaagaggcggaggtggcggcgacccgtgtttctcctccggcggggccgctgcccgcgtggggacgcagggggcgctggcc

SEQ ID NO: 232039 - DNA, 131 bp, Homo sapiens
  chr6:37665471-37665602
  hyper
cgggctccgagctctcgggagagcggggctacgccgcgccccaagttggtcgtccccgcccccgcccggcggccttggcctgcgggggcccagagcgggcggggccgggccgggctccggggcgcggcggc

SEQ ID NO: 232040 - DNA, 112 bp, Homo sapiens
  chr6:37666463-37666575
  hyper
gggtcctgcagccgcgcgagacgggccgcggctgtgggtctgcaaggctgtctgcccggctcgagaggcccccgcccctttccaggcgtctggtgctggggccgggccggag

SEQ ID NO: 232041 - DNA, 404 bp, Homo sapiens
  chr6:37673050-37673454
  hyper
tctaactttctccccggcagctccgcgggaagcaggatcaaatgttctccagcctgaaaagcccggctggggtgtgaggagaaaggagaaggggaggaggggcggccaatctgcggtattggaaggggaggggccggggccgggccccagggacaggcctcgtgactctccttgctccctttctgtttaaccctcccagccaattctttttcctttagccattagctctttttgatccacgtaaaagggggtggggggcgggaaatctggcgtggacttggaggcgttcagcacacccgcgaccgctgcgtggcataaactacagggggcgccattcacataggatacgacagacatggcgcccgccccctccgcccccccagtacaacgtgggggccctgctg

SEQ ID NO: 232042 - DNA, 113 bp, Homo sapiens
  chr6:38607281-38607394
  hyper
gctgcccctgattcgaactcctctctttgggaggctggtagagccaccccgaatccccgaaacgtctacttcccactacaccttcgtggactgcgaacgggacggctaccgct

SEQ ID NO: 232043 - DNA, 76 bp, Homo sapiens
  chr6:38670958-38671034
  hyper
cagccaatcgctgcgcggagagcaagttgactctctgctgattgggtcccagtgagtcagcgcctccacccacagg

SEQ ID NO: 232044 - DNA, 628 bp, Homo sapiens
  chr6:39016339-39016967
  hyper
tcagagctggtggccgcctcctgcgcttcctgattcccagccgcgctcgctcggagagcagtgcccgctatctcctggcccgggaccggcagaggggtgcggcggggcgggcccaggggtctctggcggccggaagaaccgggaccctgccaggcccctcccgcgggcagggcggcccctcgccggctcctcccccaccgcccgccaccagcccgggatcagtctccgcacgcggttccgcaggtggcagcgatggcccagtcctgaactccccgccatggccggcgcccccggcccgctgcgccttgcgctgctgctgctcgggatggtgggcagggccggcccccgcccccaggtgagatccagggaccccgacgacaccgggggaggcgggtggctctgcgggctgcaggcgcagtgtcctggtggagggccccgggacttgaacgaaactccgagaccgctggcgggggcatccgaaagcctcggggggagtagggactggagacttggtgcccctgggctggaaggcccaggtgagggcttggactacagaggattccccccaaccccagcgaggcgccctcttcctcgccacccgggtccctctgcccgggcacccgctgcc

SEQ ID NO: 232045 - DNA, 224 bp, Homo sapiens
  chr6:39082798-39083022
  hyper
cagggggttgggccgccagacccgcccgtttccgcgccgcccgaaactcagctaaccgctgttccatggcgcgcgcctcgcgtccgttggccgataagggagcgcgcgcccgcaggccgcacagcagttgcctccgctcggcccgcgccggccgccgtgcgcctgcgtggcagaagcccctgctgagcatgcgcactggtgtgacccgcgtctcctccgtttgt

SEQ ID NO: 232046 - DNA, 673 bp, Homo sapiens
  chr6:39196879-39197552
  hyper
tccaccatggctcccgagcggccgcctcctagagaaagcctctcctagccccagctgctaccagtccgcccgccctccagcctctgaaaacagctgtttgaatttggagctccgcatgcgcagtgcccggtactcaccccccgcaagcaccgctccccggacagagttgcttggccaagttggcccacggagtgcggggagctgcgtggggccccactcacgcggcccggggtgggcgaacaccagcggggctgaaagggcgccctggaccgcggatgcgtaaggagcgggaagaacacaggacttgactctgggcagacacgtgggccgcttctccacgcgtcgctcctccgcgcgccactagcagtatgcgccgcgcccgcctccgcacgcctctttaaccagcgcccggcgcgctctgcccccttgctccgggctccgaccggggaggagcccaggcgggccccgccccttccccgcacaagcagcccggcgagcgcaggagtgagcgcgaggtgagcgctagaagaggcttggcgctccccgcgctcccagggtcagccgccaggggaggctgcgccgcccgcccagacctgcacgccctgcggtgcccgaggggttgcggtctcagggactcgtgtttgttattaggactggcgtgttaactaaaatg

SEQ ID NO: 232047 - DNA, 46 bp, Homo sapiens; identical to SEQ ID NO: 200426
  chr6:39271082-39271128
  hyper

SEQ ID NO: 232048 - DNA, 646 bp, Homo sapiens
  chr6:39281490-39282136
  hyper
tcaggccgggcggggccggttacgcgcgcgccccctgccgtagtcgtcctcgcccccaaatttggatgtgtccccaggcatctgcctcctcaccgggccagcatgccctctcgcccccaagtaggactcagcccggcttctcgcagtcctctcgctagggcgagggtcttttcctccgaggtcccccaaccctctggtccccgcgcaggaacgcccacccccgttgtgcccgcgtctgcgttcccgacgtttccctgaacaggaaacacctgaccagggcctgaataggccccctcgccctcggcccgtacaccccgcggcccgctaccccatcccgccgcgcccaggccgacgccgctcgcccctgacccggatcagcgagtccagcgccgggcggtccagacacgtgaagttctgcaacagctcccacttgtcgcgctggaagctgcggctggagtcctgcgccgcgcggccctccagcgtccagaacacgccggtgcccagcgccaggtaagccaggtaggcgagcagcaggagcacggtgctgggcaccgcgcagccccggaccctgccctcgggagccgcccgggctcgcggtcggtacatagcgggagaggcggggagccggcgccgggagcggtggact

SEQ ID NO: 232049 - DNA, 554 bp, Homo sapiens
  chr6:39692836-39693390
  hyper
ctgacagcagtgcgcgggggtcttcgcggctgcagggctcctcggtcagtgtgtgcgggattccgggcggcctcggcgcccaccagcaagcccctcacctccgcccagccccttcgcgtgccgccgcccgaccccagcccaagaggccccgccgcgccggcgccccggaggctccagcccgtaccccttgttggtgcttccggacagggggcttcaccctcgcgaatatctggatagtctgcttcaccatctcctccctggctctgcaatgacccttgacctctctcaggcccgggctgccaaaactaactcccaccacctccggcgacccacagtcttagcaacagtagctagggacactacccagtgagcaccttggcagccaggatcccgcctcctccctctaattggtcgcgaccggaaggaggccactacggggcggggctagggaggggagggcgggggtggagaggagagcgctgcgcatgcgcatgagcgagtgtctgggctctgggtttagcgccggacccggcctggaccgtgtggttaaaggg

SEQ ID NO: 232050 - DNA, 180 bp, Homo sapiens
  chr6:39759927-39760107
  hyper
tcattgtacgcctcgccctgccggtggcgctctccccccgcctgcgttcggtctgaaagtgtgaaaattacaaatcccaagaaactgcaatcagaagtctacctagggaaaattcagagtaaccttgccataaatatcccgctccaagacgcctgacgtcagagcggggcgggcggacgg

SEQ ID NO: 232051 - DNA, 633 bp, Homo sapiens
  chr6:40555283-40555916
  hyper
ctccaatctgggagggagtcgggcgggctgcggagacagcgcagggccagcagtggagaaaacccagcggccagaggcgcccaggaacccggcggccgtgcgcaccgtccccgccgagctctccggcgcggcagcccccagtggcgaaccgcggagctgcaggagccgaaggcagcctctgcgcccgctgccctgcccgctgccgagcgcacccgcttccgagacgaccaacaccgccgcggaaaccagagggattcacggtcctggcaggggtggcgcggggacgcacggtggggcgggagtgggctggggccgcagtcgcggagggaggtgggcaggccgcgagccccggaaccgggagggcggtctccgcggtccagcggcacgggcagcccctgcggaaggcgagccgggcggccagggctgcacctctgcagctggcgacggcgctgccacctcacgtgcctagcgcgccctgcagccgtcagcccgccgcctgctggaggaaaacccgaccgcgccggccctaggctgggagtgggggctggggcgatcgcgcccacccagtcctggggcccagttcagattctcgaatcctggtaagggacctatgaataacgagcgccccgtgca

SEQ ID NO: 232052 - DNA, 290 bp, Homo sapiens
  chr6:41039968-41040258
  hyper
tcctaccctagggcgggtcagcgaggacgcagtctgtcctggggtcctatgggagggtgcggggaggctcgctcaaagccccaacgtacccaagtcacccttcacctggaaaggagtcggttgtttggaggtccccgccccgcggggaagggctccggatccgaccctggtaggtggggagcagcggaccagcccaaacgcggagccaatcccgccaaagcccttaattgcacgcatctaagatggccgcccccgcccggtagcggggcggaaacgagcccctctagctt

SEQ ID NO: 232053 - DNA, 170 bp, Homo sapiens; identical to SEQ ID NO: 200431
  chr6:41040504-41040674
  hyper

SEQ ID NO: 232054 - DNA, 144 bp, Homo sapiens
  chr6:41337024-41337168
  hyper
aggcaacaggtgggacggggagccagggagtggaaacgccggaggtcctcaggctggggatcccggagtcctcgctcagattccgattccggagaaggccaattccgggaccctatccatgtcccattccgggcaccttcctca

SEQ ID NO: 232055 - DNA, 90 bp, Homo sapiens
  chr6:41339070-41339160
  hyper
ggacagcctcctctatgcactgcttcctcttccccagccctgctccctgcatccttccctctggtcctagtgtcctggtgtcttgaagat

SEQ ID NO: 232056 - DNA, 235 bp, Homo sapiens
  chr6:41340240-41340475
  hyper
agagcttgggagtcatgggtttccagctcaagccccttctctgtgggccccacgcttgctggctacccccaccccacctaccctgcgccacagcccccacaaaatgaattgacgtctcctaagcacttggcaagttccatctcctgcgctagggtgcattgtctcatctaatcctgacagcaactcaaggagcaaagcactatactatacccatttgagagtcgaggaaactgag

SEQ ID NO: 232057 - DNA, 112 bp, Homo sapiens
  chr6:41341075-41341187
  hyper
ccatccccagcgccccccaccgggccgggacctccgccagcggtcctcggcgcccttcctgccccctccccccagcggtctcggccccatcccgaaccgccaccctgggatc

SEQ ID NO: 232058 - DNA, 699 bp, Homo sapiens
  chr6:41342774-41343473
  hyper
ctcttgggtccttcaaaaagcgccactttggagacggtgataaatctgcgctgcctgagtcgttcccctactcccaacccctcgctcctcatcactgcccctcctagaccctgctgtgtagacgggacctcaaggagttcccgagggaacagatttgaaagcccagctccgggttccatggacagtgtttgacaggtcagcccctcgctgtcctcctatccccctcctccaagtccggtccccctctttcaccccaacccccactctcgcgtgggactcagacactgatcccggagcgagaatgcggctgacagttaaattgcagtgtaggccgagggggggaaaagggaccatgtctctttaacgggccctgcagacaaagcgtctccccttggagcgagcggagccaggcgcagccgcgcgcagacctgtcagcgcgtctcacgcgcttgggagagagtttgcaaagtcataattatatctcttaacctgtcttgctctctgcagaagaaggtcccattatattgaaatgagattattagccatcaaatactttctttctcgggagttttttttttttttaattcaaataccttaacgacttggcaattgcattttgatcagatttagttggcgccccagcccggagcgggagccggggcgggaaggcagctggttggggagcgacgagggggaggt

SEQ ID NO: 232059 - DNA, 90 bp, Homo sapiens
  chr6:41343716-41343806
  hyper
ggaaatctgagggctacagaatagggttgggtctggggtactaggtaaggaccgaggctggagctgggagtggctcgggattaacttctt

SEQ ID NO: 232060 - DNA, 242 bp, Homo sapiens
  chr6:41438186-41438428
  hyper
gggacggccagggccgggccgcgcgtcctaggcacccggagcgagctgctaagccggactggacggcgggagccatctgggccagcgcgggggccggggaagttcaaggcccgggcactgcgcagcgccgagggggatgacccgccgtctccggggcgccagcgccggctagttgctcaacctgctggattagtcactcggcgggacccgcgggaccgtcggaaaaacgcgaagggagcgct

SEQ ID NO: 232061 - DNA, 491 bp, Homo sapiens
  chr6:41472018-41472509
  hyper
agaggccccagggcgcataggaaaggagggtgctgccgaggtggctgcctgggggcgggccctacaggggtcatttggggcatcccctgcctctaggcaaatccccacggagccccatcccgcaccctcccgcagtgtccagggcgaacccctgtccccaagcccaggcttaggagtgaaatctcgacggctcaggttccttctctacgcagtcccccagccagactaggaatggatcaccgcgcgggtgggctcagttcccggcttcgcccgggtctaggaagaatgataaaaagtgagaatgtaaagggaggaggtactataaaacaaaaggggttagacacccatcaggcagctgcgacccggtggtaaacatgagcgtctcctgtgctcccaccgcctgcgttcttcccggccgcgtccacgttggtttccttctcgttgtcttggtctctcctgattctgttctcgtgtcagtctgccctgcctct

SEQ ID NO: 232062 - DNA, 68 bp, Homo sapiens
  chr6:41513949-41514017
  hyper
cacctgctttaggcgaattatggtagcactagaagttggtctcccctccctccgccgcttgctctctc

SEQ ID NO: 232063 - DNA, 918 bp, Homo sapiens
  chr6:41605676-41606594
  hyper
tctggcgctgtgggcgggtggcctgggagcccagatccctgtccctggcttaggaccccgggaggagaccgagggggtgggtaaaacgtgactgagaaacttgatcgcgcccatctttggggcaaagagatttggaggccgcaattattcagacagttccacgaagtggttgaggtttctctctttctcctgattttccagaaacttttgcagagtttggacaggcaaaggaaaacgtgcagcccgcggatctccgggcctcagagagcagggagtcggggagactgaggccccgctccgagagcgcggaggaagcgcgcccagccggcttcctgtgggggctcgggcctcgggcgccccgcggacagacgtgtccggctcctggctgggccaagcccggcgcgggggaggggacccgcagaggggcgactgagaaggcgaggagggggcggggagagggtgggccagggaagaggggaggggagaggcgagtaggggaggagcgaggggggctggagggagagaaggaagaaggaaggggcgaacggcgtgagctggcgccgaaatgggagaaagcagcgagtgagaggggaaggggcgccaggcgagcacccgggagccagcgggacctgggcaggggcgcccggagcaggcgcgcatggcgggccccgcgcggggatccggctggaagagagcgtagcacggctcgcacgagtgagtggacgtgggaggcgcgcatctgcgggggaatcgccccttgcccgcctccggcgccgcccgctgagccctgttttccgcaggtccggggccgatgtaccaggtgagcggccagcgcccctctggctgcgacgcgccctatggagcccccagcgcagccccgggcccaggtaggaccgggagtggcgagcgaagctggac

SEQ ID NO: 232064 - DNA, 112 bp, Homo sapiens
  chr6:41651428-41651540
  hyper
ctcgccacatcaactagtctcgctccggccgccgctggaggtgtggaaccggcgtggccgcagcgccacctcgtggccgtgaggagggaccgtgcccccctcagcacccaaa

SEQ ID NO: 232065 - DNA, 35 bp, Homo sapiens; identical to SEQ ID NO: 200435
  chr6:41747771-41747806
  hyper

SEQ ID NO: 232066 - DNA, 123 bp, Homo sapiens
  chr6:41754978-41755101
  hyper
ccgcaagaggcggcgaggtgacaagtttggagtgcgcccccttcagtactgcgcgttctaagacttttggcggagactttcttggcaaaacccattccccaaagctacgcttcccctgctgag

SEQ ID NO: 232067 - DNA, 256 bp, Homo sapiens
  chr6:41755385-41755641
  hyper
ggcgacgccgatacggttcctccaccgaggcccatgcgaagctttccactatggcttccagcactgtcccggtgagcgctgctggctcggctaatgaaactcccgaaataccggacaacgtgggagattggcttcggggcgtctaccgctttgccactgataggaatgacttccggaggtaaccgagcccgaggaacttggtccttttctggcccttaaatccgtatttcccctttcttgcgaggctggcgcctca

SEQ ID NO: 232068 - DNA, 170 bp, Homo sapiens
  chr6:41862277-41862447
  hyper
agctcatctcgctccgcactagttcacaccctcgtcacgtctggctcttaatcactctctctttcctactcccaactattaccccagctctgcccctccttgtcttccacttccaacacttaccccggtacccctcaccccaacaccacccgctacgaagatttcccctt

SEQ ID NO: 232069 - DNA, 156 bp, Homo sapiens; identical to SEQ ID NO: 200437
  chr6:41888908-41889064
  hyper

SEQ ID NO: 232070 - DNA, 100 bp, Homo sapiens
  chr6:42072115-42072215
  hyper
tcttgacggatggccgggactccttggccctcgcctggctttccacccctcctggcttcccgcaccagccgggcccgcagctcacctgccggcagctggg

SEQ ID NO: 232071 - DNA, 62 bp, Homo sapiens
  chr6:42072635-42072697
  hyper
tactggagggccggggccgggggctcagggtcattgctgaactctggcggcggtgggatgac

SEQ ID NO: 232072 - DNA, 716 bp, Homo sapiens
  chr6:42109902-42110618
  hyper
cccggcggctgctctcggccagtccgcaggttccaacgtgtccctcccctccgcgcctccaggagacagcaccgccggccctgccccagcgccctccgtccccgccccagcgccctccgtccccggagtactcaccgaagcccccggtcccctcctccggggcctcctgggtgaagatccagggcggattggtggcgtagagggaggtgctgggggtcgtggtgtgcttcttcccgaagagtttgctgaaggtgccctgcaccgtctgcttctttttcatgctgccgcagcccgcgcgggcgccagggaaggaccttccctccctcgccctgccctgccccggactgaactcagcacggtttccccaggggactctaccaggccatgtcccccgccgtcctccccgcccgcgcaccgggcaacaggtgctgcgggcgccgccgcttgccgggaaatgcgagctacctggccaggtaaaaggcagccgcttggccgggccccgccccgccgccgcccagctccccaggccgcattccttcccgcctccttctacaacaggccattgttggcacggcccggtgggctggggacctcgcccggcccacgcccagcctgggagacgggccaccccctcccccaggttcctccctgcacgcctccttcaccccacttccccctagtccgggaaaggaggcgggtgagtttccagcctctca

SEQ ID NO: 232073 - DNA, 150 bp, Homo sapiens
  chr6:42145868-42146018
  hyper
cctcgctgcatctccgagggtccgggtctcccctcagcgtctcttggggcttgccgagatgggcggagccttgggttatgatgggcggggcctgaggctggagtgagcggggcccggatgggctcacggcggccgcgcccctcgcccagg

SEQ ID NO: 232074 - DNA, 176 bp, Homo sapiens; identical to SEQ ID NO: 200438
  chr6:42418934-42419110
  hyper

SEQ ID NO: 232075 - DNA, 141 bp, Homo sapiens
  chr6:42531865-42532006
  hyper
gagcgcaggaggccgctgtccttcctttccggttcacgtcacccttctctccctctgttgctccacctgcagccacttggacggctccgggactgattgcctggggcaggggtggcagtcgaggccgccggggccgaggtg

SEQ ID NO: 232076 - DNA, 34 bp, Homo sapiens
  chr6:42738993-42739027
  hyper
gacccctccccctgcgggccgccgctgcgcccgt

SEQ ID NO: 232077 - DNA, 49 bp, Homo sapiens
  chr6:42896709-42896758
  hyper
ggacagtttgagtcgtcctgcttgcaccttaagcgcctacaagagtgcc

SEQ ID NO: 232078 - DNA, 272 bp, Homo sapiens
  chr6:42928260-42928532
  hyper
gagggtcctctcccgccgtgggattgcacagagggctgggtccgcaggctggctaaaaggacctagcccaggattgcgaggcagcgccctccctgcagctggacagactcgggcgcccggcccaaagcccggcaggggcgtgtccgcgcgctcacctgctattggccaggtggggctgtcggctgccagcagtgcttatgctttaagtgcggagcgggtggctgcggagccaggcgcggcgcaggatggtggacagcgtgtaccggacccgc

SEQ ID NO: 232079 - DNA, 172 bp, Homo sapiens; identical to SEQ ID NO: 200441
  chr6:42947095-42947267
  hyper

SEQ ID NO: 232080 - DNA, 321 bp, Homo sapiens
  chr6:42952280-42952601
  hyper
gaggcgcaggcaccgctcgacccgggcgcagcgcgcaggcggtggcgaagagacgccgagcgggccgagtgcggccgagcaaagccggagccggagcggggccgcaggagacgggccgggtccggacgggccgagatgccctataaactgaaaaaggagaaggtgagcgtggccctttttcccccaccgccgccttggagcctgcgcggagctctgggaggggccggagccaggcccgggacagccccagactgaccctcccgtccagcccccgcaggactcctggggccagccctccgcccccgcggctggcagcacccc

SEQ ID NO: 232081 - DNA, 273 bp, Homo sapiens
  chr6:42981636-42981909
  hyper
cgctcagagcccgcggcctccacttccggcggggcaggacgtgcagaggtgcctagtcctccagccccgccccatatccatgattgacgctggcgaggacgaggagtccgccccttgccccgcctccgtcattcccagcccaaaaaacaaaggactgcattacccagtggcctcctcggtctcgacacatatttgcacatgcgcagaatctctcctacgcccctgcccactcctcagccctctcgtccctcaggaaacgtatggactacaagt

SEQ ID NO: 232082 - DNA, 35 bp, Homo sapiens
  chr6:42989814-42989849
  hyper
gaattcagcagattccgtagactttgtttttttaa

SEQ ID NO: 232083 - DNA, 303 bp, Homo sapiens
  chr6:43027111-43027414
  hyper
agggccatcagcacgacacccttacttttagccaagctgctcggtgctcctagatgacgttgactgtccggcgccgtcgctccgcaataacgtaaaaggaggcgggcagaaaactggagcccaagctggatacacacctcctttcctacctgaacgccgtgagagccaatccgcgggcagctctaatgtcgcgtgactaggaaacaggccccgcccccccagacccgtcaaaacaattgcctcgagcggcagccatcatggatttaaaggggcagtaccggcaagagcggcagccacaccggc

SEQ ID NO: 232084 - DNA, 168 bp, Homo sapiens; identical to SEQ ID NO: 200442
  chr6:43138368-43138536
  hyper

SEQ ID NO: 232085 - DNA, 572 bp, Homo sapiens
  chr6:43138813-43139385
  hyper
ttcctttaagaggcgtcggctccacccctctcagagtcgcggtctgacgcgagatgacagcaacgagttcggtatgtctatgcaaataagcgccctcttgtgggccaatggggagcggaggtgccggaaccacggaccaatggggcgggggcgctggggctcaccatataaggagcggcctcgccataaaaggaaacattgtatctctttatatggggggaagggtcgggggatccctccgccgccagcgcgtggtcccggccccctccacccgccgtctcggccgcggccagcagcccctgccccccgggggacgctgacggccgcccggcgcgccgccctagcagacggacagggggcgctgcgcgcggcctggggcaacccgggccacaggggcaggaaagtgagggcccaggtcggcccgggcgtgcaggggccccgggttcgcagcggcggccgcggcagcgatagcggcactagcagcagcgggagtgccgggttgagccgggaagccgatggcggcggctgcggcggctccgattcctcgctgactgcccgtccgccctcctgca

SEQ ID NO: 232086 - DNA, 173 bp, Homo sapiens
  chr6:43196993-43197166
  hyper
ctcaccgcgcgcgcccagctcggcggccgccacgtgctcggtgagcactgtcccgaatcgccgcagccgagacacgatccgctcgtacagcgtcctgtcctcgcgtccgccgcgaatgctcccgcagaagtacagggccgggcggccaggctccccgcgctcccagctctcgc

SEQ ID NO: 232087 - DNA, 56 bp, Homo sapiens
  chr6:43211194-43211250
  hyper
gtgctgatgctggcggcgcggtgcattgtgggcagctccccgctctgccgctgccg

SEQ ID NO: 232088 - DNA, 393 bp, Homo sapiens
  chr6:43237210-43237603
  hyper
gcaggaccttggggcgggtggtttgcaccctcctccaccctgcctgaccccgcccacttgcccgggacgccggcgccgcaggggctgtgagcggtgggtggccccggagacggagctgtcgagtctgtgcctgacacctcttttccctccactttcttggtctctttcagttggaggaggacagactctcggggcactccctcccgcggtacagccccctgcgacgactggcgtcctccgtgttctcctcctccacgctggagacggagcattaccctcaccccggcggcggcggctcctcgggctcctccggttccctcattcagcgcagccgctcggctgagagcagccctgtgcgggcgccccaccggcgccacgcgcccctcgctgctg

SEQ ID NO: 232089 - DNA, 158 bp, Homo sapiens
  chr6:43242826-43242984
  hyper
tccctccgtagctgcgcgcacttcgcccactctccggaccctgcactagcggccccggccgggagggcacgaggactgcgcagccggacccccgcaggtccccaagccaggggtcccgtccatccgcccgcccccgcggccagcgccacgaatgtacg

SEQ ID NO: 232090 - DNA, 1002 bp, Homo sapiens
  chr6:43243258-43244260
  hyper
taagcctccaggctcggagggccctgtcgccccacccctgactcccgttacctcactgcccgtcgggctgccccccaccccgccccaataattggccttgcaattggatgccaaagagcccagagttgagggggagcagagctttgagcccaggtctctcagagcaacccaacagccccctttttgcccacgccccaatccgcgtcccctgccccaccccaccactgagggccctgggggtcaccaaacatgcccccccatttccagctcttcccacacccccacccccgaaaataaaactcagggaccaacatctgcttcctttgcacttgctccgtcgaccccgctccccgctcggaggggcttccgtgggggagggggcggggctccgggccctcagagttctcagtgtcgagcgaggagaggggctggcccctgcccccggagaagcgggactggtaggagagagaaactcagcaccggggcccagctgagccccttcctgcgtaaggagacgccttctaattgcggggtgggggcggagtaggggagggataggaaggggattagcgagaggaccctcgcggaggtcctgagtcccagtcggtttattcctgagccttcccctcccatcgtaagtccttccctcgaccccccattttgtactgcaataatactgtattatacgcttgcactatttcccgaccctggccagcggaagcatgcacgaaaaactcaaaaccacacacacgctcacacgcacacacacgcacacgaagatgggacgctttttttcttcctctctctctccggggtgcgtcctccttagtgtacatagcggcgtcggggggtggccccaggcccgggtagaaaagcatgcactgagccccctgcccctagactgcgagtactgtacaaatccaacacttgaaaccgacacgcacacgcgcggcgccgccacgggggtgggacacggacacgcacccacgcgcacacggccgc

SEQ ID NO: 232091 - DNA, 280 bp, Homo sapiens
  chr6:43276399-43276679
  hyper
ctacactgtggctagccctccgcgtcctcagggaatccagcggctcccattcgccccatcttctccccctccgcagcccgggcctcaccgaagaaaacaggttgctggcaacgcggacaggtccagctcatagctccgctccaggcagcgcacgcggcacacagtaggtacgccgctgcggctcagttccgccccctccgcaggctccacccacggctcagctttgagcctccctgggcggaatccgcggttcctcggcgctcattggttatcagaaatt

SEQ ID NO: 232092 - DNA, 75 bp, Homo sapiens
  chr6:43337694-43337769
  hyper
ttagggatggacacgaaatggttgaaaaccattcgtgataatataaacgggcctgtaaacgttagctgtgtggga

SEQ ID NO: 232093 - DNA, 56 bp, Homo sapiens; identical to SEQ ID NO: 200447
  chr6:43423048-43423104
  hyper

SEQ ID NO: 232094 - DNA, 38 bp, Homo sapiens; identical to SEQ ID NO: 200448
  chr6:43478199-43478237
  hyper

SEQ ID NO: 232095 - DNA, 252 bp, Homo sapiens
  chr6:43543534-43543786
  hyper
ggtccatcatgaccgtcaccgctttcaccagctgctcgcacagcgcgtttacttgatccatcgccatgcctagcgccacgcgccgagagcgcacaccactgcagtcccgggaccacgaggcacgacagctccctcggcgagaccacccgttggtaccgggccgcggcgggcggcgggggtgggaagctggaggaggagcgttagcagcaactcgcgctgggaagaagccggcgctgcgcacgcgcccggccc

SEQ ID NO: 232096 - DNA, 126 bp, Homo sapiens
  chr6:43597011-43597137
  hyper
tctgcacaagctacgccccccacctccctggcctccgggtcgcgtcagaaacagccgcggggcaccacgggatatagagtccccaggcctgggaattcacttaaatgacacgtcgccgccctacaa

SEQ ID NO: 232097 - DNA, 141 bp, Homo sapiens
  chr6:43597646-43597787
  hyper
taaccggaggcaccgcggtggccccgacacgagacccgaacccgtaaaccagcttcctccccgaaggctgcaagcatacccaaagcgagtattcctcctcccctttgttttgaagcagaaccaatcgggaagaactgagtt

SEQ ID NO: 232098 - DNA, 133 bp, Homo sapiens
  chr6:43598079-43598212
  hyper
gctcaattcacagccgcatggctgtctcatgactcagaccactcacagtgtgtccacttctcccctcttctcgaactgcgaggtgctcatacacggtcaagaaattaaacaactcagccgggtgcggtgcctc

SEQ ID NO: 232099 - DNA, 152 bp, Homo sapiens
  chr6:43603409-43603561
  hyper
ggcaagggttaggcgtacatttgccagggtgttaaaggaggaacgcagggttcaaatcccagctccacttaacctcccccacactgcggcgacgccgcgccttttttccgacccaactgagccggaagtggaggcgcgggcttcccatgatg

SEQ ID NO: 232100 - DNA, 272 bp, Homo sapiens
  chr6:43612858-43613130
  hyper
gtctctggagctggcgtccggcagtgggcagggcctcagcccggaccgtcgggcctcgctgctcacgtctcttatgctggttaagcgcgactaccgctatgatcgggttctcttctggggccgcatccttggcctcgtcgccgattactacatcgcgcagggcctgagtgaggaccagctcgcaccgcgcaagacgctctataggtgaggaggcccccgggacgggctccccagagggtggctacctggaggcagggcggggtgggcgggtc

SEQ ID NO: 232101 - DNA, 752 bp, Homo sapiens
  chr6:43969983-43970735
  hyper
ggccgccttctcccccgccgcccgcgcccacgccctcccccgcggggccgtggcagtgccaccaagggcctctttaagcccctttgaagccgcggagccccgcgccgcaggaggccccgccgctatgccagctatgccagctatgtccctgctgccgccggccgccaccgctcccccattaatgctggctaatctggctaataaataaactcccctcccagccccagccccgcgccgactcctccccgcccccgcagaatcgatgtcagggctcgactagagcaagcgcccgcactccaccccactccctcgagatgtagctgacgttttttcttatggctgccctaggtctgtagcccgtcggggattctcggggagacgtgggatttgggaggtctccgcctagccactgcgtttgccttcctcttttccagtccacctgcgcaccaggggcaggacacgtggctgggtgcagacgctggcccggatgtcgcggaggactcgcgggccggtagagcgcgcggcggcggcggcggcggcggcggcgggaggagacgcaggtcacgcccccttcccaccacctcccgccgccgacggggcgcgcgcgccgaggagcccgggacaggtgactcctagaggactgcgtctgcgcctcccccggcgggagtcccttcttcgcggcctctgccgccccctgcgtcccctcctgggcttccgagagtctgactcagccaagccggcatcgcttcgcc

SEQ ID NO: 232102 - DNA, 83 bp, Homo sapiens
  chr6:44044181-44044264
  hyper
gcagcccattttaaatacaacggggcctgaaggctaacttctggccttcctgcttcgggaaatcattccaataaccgggaaaa

SEQ ID NO: 232103 - DNA, 66 bp, Homo sapiens; identical to SEQ ID NO: 200450
  chr6:44094340-44094406
  hyper

SEQ ID NO: 232104 - DNA, 596 bp, Homo sapiens
  chr6:44187017-44187613
  hyper
acccccagccctgcggggctttctgcctgccacacgccgtccctgctcactaccccatcggtttccttcgggagtcttcaaagccagtgcacgtgctcccaggtctcagggaggcgacccagggggaggggcagagagaagggggtccgagcccttgggcccctaaccccgtccctttccggagcctcgggtgcccaaaggcgccggccgccagtcccaggcccgaagggcccctcccactgagtcggctctggtctccccgcccctgagccgcgaggactggacgcagctggctgcggagctctgggcgggcgctggggtcgcctgttgcagcctctcttccgcccggcggcccacaccggtcaggcccggcgcgggctgcgctctccagctgtggctatggccccagccccgagatgaggagggagagaactaggggcccgcaggcctgggaatttccgtcccccaccaagtccggatgctcactccaaagtctcagcaggtgcgcggggcggggccggggggcctggcggggcggggtggggtgggggcgaggtctgcgccgttctcacgctgccgggcgggacagggggcca

SEQ ID NO: 232105 - DNA, 42 bp, Homo sapiens
  chr6:44225458-44225500
  hyper
tgtgcttcgtcatcgcccttcataagcgtcccagaggtcatg

SEQ ID NO: 232106 - DNA, 735 bp, Homo sapiens
  chr6:44264996-44265731
  hyper
tcgggtgatgggaacggacggcctttcggagaagcctagggccccagggcttgggaccgctctcctccacgccctacggatgccccactttccccctcttcttcccagtccctcccctcgcctcactcggatccccagccccgggccagacggtttgcagacagtgactgtggtggggaggaggcgcggggcgtcctcgcgtggagggcgtggggtctcccgtgggtacggaccggcgcttccccgccacggaaaacgcaacccaggcaatggccgcccgtgggcttcgggccggtgtgggcagaggacgctagaggggctcccgggcccagccggccagagggggccccgataagggagaccggggctgggtgtccccactcccggaggtcgcctcacccgctccgggagccccggcgctcgcctcacgcagagtcccgcgcgccggcgcaggtctttgtcgttggggacgccccgcgttgctaggagcgggccgggccgggaggacgagcgcgccgctgcttcctccgctgccgctgccgctgcgcgccaggcacgcggcttactcgcgcgcagggtggccaggcccggcctcgggacggttccgtggaagcggccgctttgcgggtagtgggactgtggccttgcgctatgccctgtgcttccgtgggacgtgtctaggaacgggtgggctttctgcgggaggcgggggtcgggcagggctgctggtctgga

SEQ ID NO: 232107 - DNA, 34 bp, Homo sapiens
  chr6:44355180-44355214
  hyper
tgccactcggtgacgtcacgatcaatcccaccac

SEQ ID NO: 232108 - DNA, 127 bp, Homo sapiens
  chr6:45345432-45345559
  hyper
tctgcgtccctcccggctctctgacgtctcccccgcccgaatccccgcaccgccccccgcaagccctacaacctctgctttaagaacccttggaggcactgctgcgcttcccgcgaggagaatgtgg

SEQ ID NO: 232109 - DNA, 1561 bp, Homo sapiens
  chr6:45387305-45388866
  hyper
tctctctctcttttttgaggcgaaagcctggcttcccttcccggatcggccgcctgtgggactcgagagacctgtgcacgcaggggacgcggcggtgcccggggttagagctctcccctgtgaccgaaaagataattaaaaatcgcacgcgcaggagccagctcagctcctggctgcgcttccagttggtccggtctggctaaatgggttctcgcaccctggcggcgcccgggctgggaggccagtaggccgggcgcgaagagtaggttggggaccaggtgtcatagccggtggcgcagaatcgcttctcggagtcaccgagggtggcagtggcaggcggcggctgtggggcgggaggggcgcggcttggggctagtgtctgtggagggatttggggaagaggcaggaacgtggagagaaacgtgggaaagggaaagaccgacgagggaggcgtggagcagtgcatggaggaagggcaggtaaaaataaagccccaattaggaaggacagagtagtatcccctgaactccatccttacccctcgagagcgcacacctggctaccccgcacccccacctctgctcccgcggtctggcagaccctcagtcccccgcgcatctcttcagcggggcgatcccgagtcacgcaaccacagccccccaagctcatcttgtactcgaaagggctccagagtccgcgactggcaccaggcccccatcttccgtgcccctcatgctctcagagcccttccaggccccttctagggcgcagacccgggcgtgggctcagcgagtgggagcaaagctctaaaaccagacagggagggtcgtggcaggtcgctacgagggtgagggaggcgtttgcactgagcaataaaaacacccagtaatgggtatgtgaattgctttaaataagatgggagggcgtgagagatgacccaaccatctttcttccttgatgcttcgagggggaggcattctaattcttcatttattttataaaatcacttgttactgtgtcagctactccactaggaatctttgaaactttggcaactgatgatttttttcgcaaacacgttttcaagctttggaaggctttaaagagtttggtaataagcaagaaacgtagtagtacacaacgccgagggtaaaacggccctgtgcccccttcttggggtgtaatagcctcaagcggatttcccggcttctgcgggcgcagcacattgttttatttgttttgaaggctcagagtttgaggctggtcgtagacacccacgtgctctgactctcatcagcgtaatgatcgacttagccagagtcgtgtctatataaaccacaaaaacctaatcattagaaatcccagcctccaaaaaccacattttaggtaaaaagtgccgctttttttccgcgctccttcatcctctcgaccacaactttttgggggatccaaagtcgctttttaaacccacactaggaaataaatacataaataaacagccacggaagcattttgaattttttagttcgtatttttaatttttccccgtgagcgctgggga

SEQ ID NO: 232110 - DNA, 43 bp, Homo sapiens
  chr6:45390376-45390419
  hyper
cccggcaaaatgagcgacgtgagcccggtggtggctgcgcaac

SEQ ID NO: 232111 - DNA, 237 bp, Homo sapiens
  chr6:45390539-45390776
  hyper
tgccccggttgcggccgccccacgacaaccgcaccatggtggagatcatcgccgaccacccggccgaactcgtccgcaccgacagccccaacttcctgtgctcggtgctgccctcgcactggcgctgcaacaagaccctgcccgtggccttcaaggtaagaggctacaccgccccccgcccccggccgggagcggcggaacctgcccgccggtgtcttcctgcccacggggctgggc

SEQ ID NO: 232112 - DNA, 165 bp, Homo sapiens
  chr6:45391376-45391541
  hyper
gctaccagtgcccgggagggtcctggacaaacctagggtctccagaggagggggtgtcagggcgggggcgtttgctctgttcgctgacccgcgccagatcccgttaccgggaggaaggcggggccgctggggcgtccgcaagccccgaagcgggggcgttcaggg

SEQ ID NO: 232113 - DNA, 962 bp, Homo sapiens
  chr6:45982721-45983683
  hyper
tttattttaggatctctgagcgaaagagagaaagagaattttaagaaatgtcattttcgctttgccaaagatcattgtgtcaataacgtttctctcccattcctccccctcctcccgttttaaaggaaaggttcacgggtccagccaggtttctgccgcatcccgacacctggagacgtctttcaggaccagcctgaatcgcgtccgggctgggctctggactcggactcgcagcggtgacagcggaggcggggacgggggtggacaaactgcggatcaactctccgagaagacggccacctgccggaacctgccttcctccattccgcccaggagcctcgcagcggggcgctggcctgcggaaaggccacgggggagcacagggctccgcgccgccctcctgggagggtccggagtccagcgcaccccgagccctggtgggtgagcccggcgggaggcgcggcaggtgcggcgggagactggaccccgacctaccttcacaaagagctcgatctcggggtccctgtcgtccccgttagctgtcgccgagtctgtcatgccgttggcgcccggggctaccgtcccgggccggggaggcgccacctctgcagcacctgggccagcactctgcgctcctgccgctgcccagcggggctcctcttcagggcggtgtttaatttttcacaaaaccatctattctccagcccgagcagcggggtctgagagatcagtgtcccagatgctcacatgaaaaggagcgaagccgggaggaggcggggggccacggggaaagccgggttaagggaatgacaacaggtcgtgggagcaacaagtgccgggctgcccggaggtgtcacaggatccgcgactgtcagcgatcccgccgccgccaacgcgcccaaaatagccggcggctgcagggcggggtcagccgggcggggacgcggcggggacaccccggc

SEQ ID NO: 232114 - DNA, 705 bp, Homo sapiens
  chr6:46138267-46138972
  hyper
gggcaccgattaaacggaagagggaaagtgcagaaggagtaggtttgtgtagctcgggtagacgtcaagggcgggggtgtccatcttctccaccaggattccatcctagccacccagaatggtcgcggcgtaggttatgttcccaattcccagtcatcccgcccaccgaggcctgggcttcttagatgtgcagtggcaaggaggggacgttgctttagggacccagaggagcagtgtgggttcccgggagggaagccacccacgcccctggactcaccctcgcagcgatccgttcagtccgtattagtttggagcaacgggagggagggtctggaggagactccctcgggcgcgccgcgggtaacggcgggagggtgactggaggaacgcccccggaacgcgcaggagctcacctgcgctcaactctggagcggagcacctgaccgcgccgcttccccgccccgcctcctggcttctattggctgctgcagagatagtcacttctgcctgggttgcccccgaaagccaggctcccaggagtagctgcacggcctgtcaatcagcgggggcaggggcgggcgctgcctgggtttggagggtggagggggaggggactcccgggggcagggacccatctggtagggcgaaggcgtgggatggccaattgcttggtcacacacaaaaccttccggcaacgtgcctttt

SEQ ID NO: 232115 - DNA, 538 bp, Homo sapiens
  chr6:46459377-46459915
  hyper
cctgccctcagccccgcaccccctcctttccacttcaggtgcccgggagggcgcaggagcctccgggcacctggcgtgggagcctggctgcaggagtcccggcctcagcgggaagaggctcctcggggtcccatactaagctgagggtgagggggcagcgacagcccagaagaaatggtcagagaagcaaactgtggtgggggagtactgggagaaagactcttcttaccagatgtctgagccccccgactctggctaactgaggaaatgtcggggagcccctggatggtcctcccgggcttctgcgcttggtgggcgctggcgccctctggctggagccctgcgcccggcccagcccaggccgctgagggtgccctgcgcgggcttcacagctttgccaggatttgcagccatcagacctgaggacagaagggttcgggctgcaaggaatcctattgtgtgagagccatgacacagtgagtgggaggttggtatcctacagcaaacgggactgaaggtgaatcgcaatctagggtag

SEQ ID NO: 232116 - DNA, 876 bp, Homo sapiens
  chr6:46702585-46703461
  hyper
agagagagagagagaaaaaaaagaaaagaaaactccatgtgttccctgcctgtcctgattctccccccagctctgagctcttagggttgcttcctttcgggaaaaggtttggaagaactggtgtctaataccgtcatcctctccctctccccgcaaggatcctagcgctgtttccgagggctgcagggactgtgagcccaggaccggccagcagagcgggtgcgactcagcgagcccaccccggccggtcgccgctccggggtcccgacctccagcgcggcgaccgtgcccttcctcccactcccgcctcgcccccggggcccctcctcactcaggcgcggcgcggagctgctcgcgggaactggggtccctgggcgcgttccaccgcgcaccaacgcgacccaagcgctccaaacccgactgcttctcgccgacagcactgcgagcctccgaccagccgctgtccccctggctgcgggccgagcagctctggcaggcggcgggcgggtgggctgcgcgcgggctgtgtcctgggtccgcctagcgcggccttgtggccccgaccctctcctcccctggtgatgctggaggaggtaccggggaggagcgtgtgtggccccggcctctcactagcagcggcggctcccgacgctagcctgctcgagcgcacccagcaccctccccaagaccatggcccgcacctggacccgcggttaacttagcccgccgcggagagagccaggcaatgcctgggtggtgtcgtgctcaccagctcctttccgcagacctgatgccgatcagatttactccctgctgaattcaccccccagtcaggccggttttccttgtttcaccgtgttctctgaatacactgaa

SEQ ID NO: 232117 - DNA, 996 bp, Homo sapiens
  chr6:47276365-47277361
  hyper
ctagccacaggtaaacgagggatcggaaagactgtagaaaattcatcttccttcacacacatctccttccccctccccccattccagtgccggcgcgctggctggctggaagccggcgctttggaggcgccggagagtgggtctaagggtgatatttcggcatacagaacctgagaccccacccgagccaagagggaagagagagggtaaagggattgaggagggggcggcttgcgccctgctcgggaatgcaccgcgcgacagcacccggaggtctccggtgtccggcgcgcaccggtaccactgtcttccactgcggtagcatcccgacatgacattgcagctgcaacaaagcgccggcctcggccggccgtgggagccccacaccgcggcgaggccccacaccacgcagaggggcagtggccgatgggtggggggctgtggctgcgggcgtggggagcgcgaggtaggccgagtagggggaaaagccctcaaatgcgcagaagctgggcggctacctctagcgtctcctccagcaaagccagactgcaaggaaaacaattcgtcttcattccccagccccggctgagccctgagattcccccaaataacctagtcgaggccctctggtgtgttgccttcccttggaaacccctcagtgcccgtaacccagtcggccgggccccgcgcctccctaagccccggcccggtgacccgcccggctcccggagagcggttccttctgctccggcgccgccgccacccccggtccacgcaagcgctcaccaggagaagggagcccgcgatcatcgtggctgtggctcggcgggcgatgcggctgcaggaggcgagggcggtgctgctgctcggagaggtccccatggctgaaccggggactcgcaggggcgcccggggcgcgcggggcagctggaatcggcggctgcttctgcccagcgccgcatccaccgccgcctcccgggccgggagcccatctac

SEQ ID NO: 232118 - DNA, 127 bp, Homo sapiens
  chr6:47382532-47382659
  hyper
ttcatcttctccagcgcccgaggcatcagaagaatttatgtgaccccaagatcaccttgaaaccatattaccggtttatggtttcctaaaagctttttgtgtgattaggtttcgttttactgttaat

SEQ ID NO: 232119 - DNA, 78 bp, Homo sapiens
  chr6:47755947-47756025
  hyper
acctgttgccacgcgatggcgctgtcgcaacaggaacggtagctttcctggccagctcgcctcgcgggcccctaaggt

SEQ ID NO: 232120 - DNA, 1136 bp, Homo sapiens
  chr6:49518140-49519276
  hyper
ttgcgcctcagctccggagaaaaacgaaaggtgggtgggaaactaggatagaggtgaaaagtaagaggggactgaatcagcgaatgacaaagggagcagggctccggacaggggtaggaggaagaagaggagtgactggggcttgtgtcaagcttcttctgaatggctagacagccgccaggtgggagaggcggagggtgaagaggcgggttccgcacgcggttagcctggggctgatctagtcttcagctttcaccggctgggagtccggagctgcagcagaggccacacccagggcttggtggtcccgcgctttccggagctcagcaggcgcttgctgcttgaaccggtcaaagaaggaacgaatgaatgacccttttgccaggatggagacccgggggcctcagggagctgcgaatcccatggactcctcccgcagcctgggggacctcgggccttttccgcgggaggtagggcgcggggctccgctagctccgggcgcccggaatcccgcgacggcaggggcgagccgaagccagggcggcggccacgaggacagaacggcagatcgggccctcggacctcgggccggggaggaattggaccgtgagtcctgggtcagagagaaagtgctctttctcctgcacccagagaggtggttagggactcgaggggaccctgcacgggaagaggtggccggtgcagaggaccttcctcatgcgggtggagaggaccacggcgaggagcccaactacccttctgtctttcaacgacaaaagcgaatttctggcaggcgtgtagccccgccgcgggacgcagcagacccacccaaatacgtgcttgtgcgggtggaggattatcaggtaacacaagaagtgttgcagacctcctgggccaagggtcgcatgaccacgaggactgaggagcacttcgtgaccgcgctcacttttcgcagcagtagagagggacagcctggggaacgctggggccctgctgaatcccgggctctccaggcacgaacaggggcatcccgcgtccacgccgcggggaggagggtttcaccgtctccagggacttggctcgaggaaattaaactctaatgagtagctcgagaaatgttccgggatggtggatga

SEQ ID NO: 232121 - DNA, 491 bp, Homo sapiens
  chr6:50674321-50674812
  hyper
gtgcctaggccctatggttgcggctcaattcgtgcaacctcagttaccagggggtcccggggccagcgcggaattcgcggaattcaccaagccgcagctgcctgccgctgaatgcgaagagggcgcaggagactggcaggtacagctggtggtcccttcggcctgatttccctgctgagtgccacagcgtccgagatccacgactggccaggtggagccaccgactctgaagagaaccagaggcggaccagccaggggagagggcaaccctgggagcactgcacccttgtcggtcccctggaaagctagcggtaagatccgggaggctgaatttgaggccgcggtagtccaggcgacttcccctggaaggtgtgacgatgacttgtactgcaaaagaagcctagaccaggcctccgtctgggtgttttcttttaggcgtttggagagggatggagatggtgggtgggggcgagggggaggggtaaaaagag

SEQ ID NO: 232122 - DNA, 308 bp, Homo sapiens
  chr6:50681730-50682038
  hyper
gggggaaattgcatcgtaagctttcggagaaacccaacatgtcaactacctttccgggactagtccacgatgccgaggtattattacttttttttttttttttttttgagcgcgcgtgtgtgtggcggcggcggcggtggcggcggtggcggcggcggtggcagcctcccctgtctctaatctatattggaccgttacgtttaattataatctgtctttcgggggaagttaaggaaggaaaggggagaaagttcgttatgacatctgtcgccagggagggcaactctctgccacgttaagaaacattt

SEQ ID NO: 232123 - DNA, 1117 bp, Homo sapiens
  chr6:50682266-50683383
  hyper
gggagcaagttgaacgatttgcacagactggattttttaaaatatatggacaatgattttgagcagcccgggccgaacatctcggcatagacaggcgcagaatttcgatgctggggtctagttagagtggcaaggcgccccgggccagcgctcttttcgggtggactcgttcctctgctacccgcggccccggagtcagttgcaaacctggatcccaacgccaagctccctgcacaagttgggcaggggctgtgtgtgtgtctgtgtgtgtgtgtctgtgcgtgtgtgtgcgtgtgtggtgtcacccgcacctatatagggtgggggattttttttccgctctctcgactgtgaggacgaggccgcccacccccagttcgcctgtttgcaaaggctctctggtgaagacgctgagacccggcttcggctcggcccgagtcctacgcgctcgctttccttggagtgccagagaaagctcctggctccgggagagcggcgccttggttgcaaaatgacaaacctcaagtttttctgctctcccttttccccctcttccttccagatacgtcacgacggatcaaacagctaccgtttgatgcagcttggctgtctggagtcagtagccaattccactgtcgcctattcctcctcctctcctttaacttactccaccaccggcaccgagtttgcgtccccctacttctccactaaccaccagtacaccccgctccaccaccagtccttccattacgagtttcagcacagccacccggccgtcacccccgacgcctactctctgaactctctccaccactcgcaacagtactaccagcagatccaccacggggagcccaccgactttattaacctgcacaatgcgcgggcgctcaagtcgtcctgcctggacgagcagaggcgggagctgggctgcctcgatgcctaccgccgccatgacctgtccctcatgagccatggctctcagtatggaatgcacccagatcaaagactcctgccagggcccagcctggggctggccgccgcgggagcagacgacttgcaggtaaataagcatgcagcgaatttgtctgctccctcccctcttcgccctccccctgcc

SEQ ID NO: 232124 - DNA, 188 bp, Homo sapiens
  chr6:50683584-50683772
  hyper
agtccgggcggctgcggccctccatctttggtttgtcctcacagaagtcttttgtgaatcaacatttgtgaccctgaggggatgaggtggaggagatcgaggagtctggggttgggccaaccggactcagagtaagatccaataaattgatgaccaatcgtaccctcaatctccgcactttacagggt

SEQ ID NO: 232125 - DNA, 237 bp, Homo sapiens
  chr6:50684820-50685057
  hyper
tatttactccttttaatagccgcgtctgctgctgatttttttgtatctgtacaaattttttttctgtgctaggcacaaagccgagcatttttcaaaagagcggattagaacatttgcaagcactagacaaagagcgaatcccgtgcaaaaggacaccgtagtttatccaattttcgacttagtgccattcaactggtcatttatgcaatgtcatccgaccaaacaacatgttttact

SEQ ID NO: 232126 - DNA, 176 bp, Homo sapiens
  chr6:50689870-50690046
  hyper
atttgccactgcctcggaggcgcagctccctgcgtgctgactctcggttaatggtgtacgcgattttgcccgcagctccggctctccaaccatcagaaccaataatctttactttaccctgtgctcgcgtatcgatagcttctttcgcctcgggcgtaggctttgatatgttaata

SEQ ID NO: 232127 - DNA, 531 bp, Homo sapiens
  chr6:50690662-50691193
  hyper
acgcgaagagggagcggacccggccatgggcaggcaggagcgctttcctgattgcccgtggctacacaaaatacaaactactttgaatcaaaacattttggaggaattaatatgatctgaactctgcacgttttaagagagtttgagtttgtcagagcgcttagaggtgactggcacgccaaggcaaaggcatttacgccgcggtacaaacattgtcagatctgatttaatttctttaaaaaaaaaattccttgaaatggaaccttagcttcaattgctcagtctgcccataacagagtagaaggacctgatcgcttttccctttagccggcctcaaggccggcagcaggctgcttggcaggaggaagcgatttcctctgcttctctgggtttcaggaaggcccagagccttggaatccgggatggagaaagccgtggattctttcagcagctcctgaaggagtacaattggaggagcgtgggaagccttgctcttcttcctttgtcagtactcttcggattccagatgga

SEQ ID NO: 232128 - DNA, 706 bp, Homo sapiens
  chr6:50691924-50692630
  hyper
cgcagaaatgcaaccgcagaacaaacagggacaggaaactcttgtaatcgcttacacatttttaatgtgtcagaaaaaaaagagcgatcactggagatgaagaaggggagaagaaaaatccctgccgtttgtatttctttcatttgaattgtaaacatctgtttggctgtaaggcgaacagatcatttattttgctctcaagatttggtctaattatgtcaacaccgacgctacgacgagtggggcggcgctgtggctttggagaggatgcgcgcaccggcccagcgcccggaagcccgctaggaagtattgatcgcacctggagagcgcgcgggacctctcgccacagctgggtgcgttctgagacgggggaggcgcggaggccgtgagtatggctcagaggcagatttagaggctccagggacccgcggctccttggagacagccgccgctgtttcctctgccccagtagcctgggatgagaagagaaaaagctcacccaggctccggcgcttgtctttcccatccagttgcagcacagacggtggcggggtgtgtgtgtgtgtgtgtcggcggggggacctgtcttgtcctaccccgcagttcacaccctgcaacggggtagttgtttttttaaaaaaaagtggcggggttgggtggcctataatcaggttgccgagcgtgcgtgcatccatttcccattgca

SEQ ID NO: 232129 - DNA, 195 bp, Homo sapiens
  chr6:50785153-50785348
  hyper
tccatccctgttcgcgcagagctgcacacagcagtcctggatttaaagacaatcaccctttgcagattcactctcaccaggcttaataacttccaccccaaattgccccatccctcctcggtccctcctggcatttcttttctgtcccaggcgcagagatcctcttctgggcgtctgttccggctatgagaagct

SEQ ID NO: 232130 - DNA, 1163 bp, Homo sapiens
  chr6:50787266-50788429
  hyper
tgcttccttgagggtcactgcgtccgaacagaaatcgcagccgcctcctgtgtgggcatctttcacggaaatttctgcccacgttcaatgcgtacgggtctctagcactgaggctagctcaactcttcggggcaggagaagttgcgcccagccaggaggacgccagccgcctccggggcccggaccgcgctcgccaaagcccttttccggctcgggcgagggctgacgcggccagacggctccgctactcgcgggcgaggcggactaggcggacgaggcggccgaggcgggcgaggtgggagaggcgggcgaggtgggagaggcggccgaggcgggcgaggcgcggggcgcgcggcgggccaggctggggaccgggaagcccgcggagcctcgcttttaagcggaatggtctgggacagccccaggtggttgccaggggaagggaggaagggaaggttctgctgagacgtcgaggttggaaataaaaacttcggaaaggcgaagcggatttagaaaaggagggaagtcgaggcgggcgaagcgggccatggagattgctaagaggaaaagttggagagaaaaggaaggaagagaagcagactcccgggtggcgggcgcgggccgctaggtcagacgaaaggtggagggatgcagaggctccccaaagagccgagaaagacacgcgacccctccggatcgggacagctcctgaaagcccggcgcagagccgcctcgaagatcctaagagtgggcgactcacaggcgcggccggcaagctcctgggggactcgggctcggacgagcgcccacaggcagcgcctggcgcccacacctcctgcccccccccgaatcctaatgttggggtgtgtgtatgtgtggaggtatgtaggagagaggaggaggagataagagaggagagggagaaaagcaggagagagcgcgagagagcagagaggagagagattggtcttgttgctgaatgatgcttggggttttccttttctctttgtggttgtgtatcgactgtaacgaagagccgcgcctacgcgcctggtggggattgtttcggttcggcctccttttctttccttaacaggcgggataatggtaaagtccaaggcgctagaactgtcctaaagaatattagcgcccaaagtgggcat

SEQ ID NO: 232131 - DNA, 276 bp, Homo sapiens
  chr6:50789339-50789615
  hyper
tttgccagccccctcgtctgattacatctagtaattctccactgaatgaacgtcatttacaatagtaggggagctctgcgctcgctgctgcttcacgctccatttgtcctctattctccctttaaagtactcgtgtaatattaatagtcatgaatatcaattattatgaggcggtgtaggcaagcggagggaggaaggggcggccgagcagtctgagcccagcttcgggtgaaagaggactgcatctggagccccgaagaacggcagaagaaaaga

SEQ ID NO: 232132 - DNA, 441 bp, Homo sapiens
  chr6:50791124-50791565
  hyper
gcacgatggtgtcccgagccacagctcgcggctctcccagctgggctcggtgtcccaaggaccctactcgagcgccccgccgctgtcccacaccccgtcgtcggacttccagccgccctacttcccacccccctaccagccgctcccctaccaccagagccaggacccctactcccacgtcaacgacccctactccctgaacccactgcaccagccccagcaacatccctgggggcaacggcagcggcaagaagtgggttcggaagccggctctctcctgccccagcctcgggccgccttgccccagctctcgggccttgacccccggagggactaccactcggtccgccggccggacgtgctgctgcattcggcgcaccacggcctggacgcgggcatgggtgacagcctctcgctgcacggcctcggccatcccggaat

SEQ ID NO: 232133 - DNA, 612 bp, Homo sapiens
  chr6:50793375-50793987
  hyper
tgaacggagcacctcggggccaagttgttgctgtcgggaatacagaccacagaggtagagagctgaaaggagaaaagcagcaggcagcacaccggagccacttgcaggctctccactcacccaacccccaccctgttcctcccctgctttatctcatttcgtcacctgccgggaggcccacgggaccttcttgggacgacccctatagtgcaagggacacaccctgctcctgtccctagagggaaacagcaaagacagggacggtctctgcctccgcggtgatgacagacctcccaaggccagggtgaagttgactgatgcagggcaggtgacaaagaccaggggttatgtttccaggaccacagcctcgaatccgaaggcttccaatcatctgctcaacacagaaggatccacttccgagttaggaagctggggtgcgggggctaaagttacacaagcaggttgggatttcaacgctctccctacagctatcgaatgggtggcctgcactggtccagtctttaaaagggcctgcactggtccagtctttaaaaggaccagagagtgcctaggcctggaccttaaagtcacttgttccgatctcaaggacct

SEQ ID NO: 232134 - DNA, 33 bp, Homo sapiens
  chr6:50794270-50794303
  hyper
tgtgcatgagcgcgcgcgcgcgcgcgcgcgtgt

SEQ ID NO: 232135 - DNA, 229 bp, Homo sapiens
  chr6:50794582-50794811
  hyper
ctaaagaagtctagtaattacgagtctgagttgtttttctgcgcttccgcatgcagtcctaattaaatctttacgatcctccctgtgacgattaagcgccagcatgctgcgtgaatatcctgtacaaaaacccagcaggcggccgtaattagatagaaaatcagacaagagccttctcattaactaccacaactaccccacgtcgctgatgaggcgtttatacatattt

SEQ ID NO: 232136 - DNA, 497 bp, Homo sapiens
  chr6:50803771-50804268
  hyper
agttccagttcctcccaaatcggtgacttctctaatgatgaataaagacggcttcctgggaggcatgtctgtcaacaccggcgaggtgttttgctccgtcccaggccgtttgtctctgctcagttcaacttcgaagtacaaagtaactgtgggagaagttcagagacggctgtcgccccctgaatgcctcaatgcatctctcctcggcggagtcctcagaaggtaaccccaccacgaaaaacaaaaacaaaaacaaaaaaacaaacaaaaacccaccagtttttatttattggacagtgaggagaaggttccagcaaaacccaatctgcagtctgacgcagttgcctagcaaccgggtggccggagcattgctttcgcgcagcgcttgggaggatccgcggccgccacctgctcgcccacaaactctagtgtccttgcatccaggcctgcccgcgccgcgcaagtcctaccgcagattttgccgccctgggaacctt

SEQ ID NO: 232137 - DNA, 200 bp, Homo sapiens
  chr6:50805675-50805875
  hyper
ttgcaatttcagagccaaatcgaaaaatggggggagatctttgcgagaaaggctagaaaaaatcggtttgaatttacccgcgggcaggcgcaaagcagcaaatgtcacgttactcacctccctggtggaaggtaagcaagacgtgtggccatttcacgaagtggctgagcttaactgtcggctggaggctgacattttac

SEQ ID NO: 232138 - DNA, 395 bp, Homo sapiens
  chr6:50808433-50808828
  hyper
tactccgtttccaacgttgctgtttgtcatcttccacagacttgtaaaatttactacaactccagaggggaaaatagtaaatctctggctaaatttaggtctagagctcatttgaacttttacagtgggttttctatttatttgatttactcctgtctttggcttcggtgtcatattgttggtgttttatggccggctcaggcctgcagtgggcggcgctgcgtgcgcccgcacgtttctcttgcaggcgcggcccaaacagccgcgctcatttatttagtgttggaggacgcggtttgtcccgttgacagcgtaatttaaagaaatatatggaaggctgaaaaatcatttgctcaaatttgtccagatgtttttgagacgtgattggaatttga

SEQ ID NO: 232139 - DNA, 493 bp, Homo sapiens
  chr6:50810509-50811002
  hyper
cgaatgtcccaaagcgagtccaggcggtcctggaatggaggggagaaaggctgaagtcgggggaaggcaaggctttggggtggaaggggtgcattacctccccacccccgctttcctttcagtcccagctgctcgagaagggagggcgctgggaaaggaaacagagcggaatcgcccacattagcctcgctcttcggtgacccggcgcctctgggcttgtgtgagcgtctcctttctaatgccaatgacaacgacactgagggtgattttctgtgcctcgcccacccctttgcaggcaactttgtaaagaatttacggatctactggcgcaggaccggacaccgatagggaacagccgacccagccccatcctggagccggggatccagagctgcctcacgcacttcagcctcatcacgcacggcttcggcgccccggccatttgcgccgcgctcacggccctgcagaactatctcaccgaggcgctcaaagg

SEQ ID NO: 232140 - DNA, 526 bp, Homo sapiens
  chr6:50811325-50811851
  hyper
catttggagacaaccgtccggattttccacttcggttctttcgagtttagtaatactgataataaaagaaaaccatgatttccccttccctttggaaaataaacataagactaaacatgagaaaaacgctaacttattggaagaaaatcggagaaacgttggtgtcaatgctttgagagctggttgactgagacgcacgaactttttaattttaaatatatttttaggaaactctcgcagtccccgccctccatctcacctcacccgtctcccaaccacccttttccatgttaccctcccttcctcacattgttacgggaatcttctgggatgaaaatgagtgtggttggcccttttgcgttgtttcagtcctctcggtacctccccgcccagccctgcgatcttaactcaccgggcccggctccccggccgcttgcataattagggagggcgagggcggggcgggaggcctgtggagaccaggcggaggctgcaatttttggtgccggccggcagagcaggttct

SEQ ID NO: 232141 - DNA, 948 bp, Homo sapiens
  chr6:50813318-50814266
  hyper
ttcgtccgagagctcggccgatcgcattagatgtgttctgattgcacaaggccaggagagaccacactgaaaacgatcgtctcctttccttgcagggcaacgcgccccacgcgtgtgacgtgcgagagacgcgatggacgcgccttgctcttactgtgcaggtcctgagagcgtgtgggccacaggcgcccagtcgtgttgaggacatagaatcagccgctggaggggctgccgactgcgcgggcccttcccgctctcggtctcaccctaagggctaaggcgaccgagaaagccccattctccagtaggtaatggggcggcgcccggtgggctgcaggtggggagggctcccagcgccgccagcggccacccggggcgccggctcctggagggagagtggcctagaaatatccaaggaatccgaagcttcccctcctccacctctgccagtacggaaacaccccaccgtcacaatcctaaagcggggagatgggatgggaattgtcttacttggcaaggcagggtaccttcattgccagacgccctcatttgtgtgttcctccttgctccagcgagatagaaccttttgcgcccccaaccccgtttcgtggagtgagcccactaccccttctccctccctcacttctcctttcatgtaggacccccgcccccttgctttccttagccaggcccgctacatttatctgataattgagttattaaaagatttggtttccttgggcctataaatcaataaacagtaggattaacgcaatagtttgccttttaagtcaagggagacgtttaaggcaagcccctttgagctttgttttcaaaccaaacaggtgagttgcagctctccccccggcccctgcactcttcagacatttggtccctgcccactcctaaacgctcagtcccaaaacaaaatagcgaaagacaggagga

SEQ ID NO: 232142 - DNA, 159 bp, Homo sapiens
  chr6:50814564-50814723
  hyper
tccatccccacttaaagaaccgaagaggcttttaaagacctggctgctttgttttccttggccaaggaagccactttctctcaagcaattatttcatatcctacgaaaactttggtcgaatggaaaactcgaaacctcgagcttatctacacactgttc

SEQ ID NO: 232143 - DNA, 355 bp, Homo sapiens
  chr6:50817110-50817465
  hyper
tagaacctctaggtcgttgaccggcccagcgcagggaccctgagaccgccagatccggtgggcggcttacagtggcccagaacgcacccgccggctcgtgttagcgggttaagggcttgattaaaaatagtgctggaaggaagacccgattatttttttatgaagccacattccttttcttcatttgcaaataacagttccgtagggtcccttcccagggaccctgggcgccgaagttaggggccacctgagagttgttggcccggtgggaagtgtcccttcctgagggcgctctcggcttctcagggcaagctgccttccacgcttggactttgagggcggttgtctgtcatgt

SEQ ID NO: 232144 - DNA, 149 bp, Homo sapiens
  chr6:50817669-50817818
  hyper
gacccgacccacgacggggtggggtgtggggcgggggggcgcgctctcctcccgttcctctccgccgggatcgcggtatcctaggggagggaggaactgcgcgcggtcggagggagtggataaaaaagacagggcgaaaactcattttt

SEQ ID NO: 232145 - DNA, 844 bp, Homo sapiens
  chr6:50818171-50819015
  hyper
aataacacacgctccgggcacagggaccgcgggccaacgaaccgcgcgtgcgccgcgccagcctgcgtcgagccgtcgcacacggctccgggagcccgcgtctaggcacgctctccaggttgccaagcagggtgtcaacaagtgcgcacgcgcggacgcccacgcaggcgcacgcgccgtggcgcccccgggcgtaaccccagctgctgtgacgggccagggctcgcagctcgcctgctagagtttgtggcgcgccctcgggatcagggcactggggtttgaaggggctgcagcgtgggaagccttcaattttttttttttgtaagctgcgtgtgctcagattgaggaagcagttttgtcacacatgttcaacacgttccacgctggtcacaagctagcaaggtcaggtagtttttcgcccacttgttcgaaaacctattagttcctgcccaccctgctcttcgcttttcctcctctctcctaagggctgcagccttctggagctgactcaggcgagaggcgtccagagcccaaataggggtcacacctgctgtcgagagagtcctctgcataaaaatgctctttaaaatttttaaaatcagcataatggccaatggacttaacaaagcgtgacttgcccaggctgcacggagggcaactctggcagtcatctgtaactcgaccagttaacgtcccgaacgtgcctgttcgcggagatattagcaaacgtttcaaggatgtggctgtcagatgtcattagccaacgcttgctcacccaaccatttgcctaactgggaggagggcatggccacggcgtataggcgtagaatttggggggagggag

SEQ ID NO: 232146 - DNA, 104 bp, Homo sapiens
  chr6:50819300-50819404
  hyper
agcgtccggactctcgatcagatgccctagagctcagaagcacctgattgcgcggaaggctggtggtggttacttgggcaaagagagtgcgactcgaaactcga

SEQ ID NO: 232147 - DNA, 273 bp, Homo sapiens
  chr6:52149493-52149766
  hyper
tccaccaaagtcgcgtggaggttcccaggatgactccaccccggcgcgaaaacttccgaactcttcccgccaccaaaggttacctcgaggaagaggcggggaccttgggagcatataagcattatgattggctgagttctctgaggtcggactagcgactgtccaatcaaaagcttcttcttcttcgggttttccgctgcgcgccccgcggtggcgggaaacgtaccatccgggattctctgttcctcccctccctccgcctcactcactgac

SEQ ID NO: 232148 - DNA, 630 bp, Homo sapiens
  chr6:52227414-52228044
  hyper
aaggctgagcccggagggcgggagattcaggaccaagacgtgggggagtccgacagggcagaacgaggggcgtcctgtccgcatttgtggggcgccctccgcagggcggaggggaacggaacctgggaggggagtgcggaggagaggaagcccggggcggtagggagagcccgaggaagggcagcccgaggtaggggaaccccggaaagagtagggtgggtctaggcatgtgctttcgccggggaaagatggagggggcttctctgagagggtgggcgcgaggagcggagttgtgatgggaaccgccggcagctggctaatgggcggatgctggggcttggctggatgggaacgccgcggtggggtgtcggaggtggctggtggggctggaacgctgggaacgtctgtctaggctatgagaacgcagcgccctcggtggaacagggtcgtagataactcgagagggaatctagtctagggagcaagaccgggcatccccagacggaggcgggtggggacctcgcactcagcgcgcttggggaatattcggagcctgggtttgggggctgctgcaccttgccgacccggtgcggggacctggaggtagccgggcacagcagcttcctgtgc

SEQ ID NO: 232149 - DNA, 405 bp, Homo sapiens
  chr6:52284759-52285164
  hyper
gcgcagtgaggtccgccaggactaggtggaaggagagaaggaacgtccctctctgcaactcatctaagggcctgctcggaccccggatctcacagcgagaactaccgcctcgctacacccgcctttccccgcgccacccaacagctcccacgtctcatcctccgggagcggggcggggcgaagcggaagaggaggggccgacacaaccacgcccactagccgcgctccaaggccgcggcccacttaccgcgagaacgcggagtcctgcggatggcgcacgcgcaaacctcctgtgatgcctgcgcctcctggccccgccttccgctcgtgggagttccggatgtttagcgttaccatggatcctggaggtgcccgcgaacactgcttgtcgcctgggcaaccgga

SEQ ID NO: 232150 - DNA, 172 bp, Homo sapiens
  chr6:52441278-52441450
  hyper
ccatggtggcagcgcggcggttggttcgaggccaggctggggtttcagggctgcagacagagctgcaggatacgatgagtgcccaagggggcggcagagcatggcatggctggcacggcgcggagctgggggtgctgtctgggctggccggggtacaggccggaggggtaca

SEQ ID NO: 232151 - DNA, 282 bp, Homo sapiens
  chr6:52535661-52535943
  hyper
ctgctccgtcaggcgggaggcagcaaaccccagccctggctccaggacagggccgaaggcaggatagacggagcaacgggtccggctgccgccgggatgttgcagcacagggcctcctggctgcctggcctacaggccgcccggattcagccggagggcatggaccgggtggagtcctgcaaggcgagaagggacacagcgcatgcgcgcggcagggagggcgtttccaggagggagcggcctttgctcagcgcgagacggctgggcgccgagtgggacagc

SEQ ID NO: 232152 - DNA, 34 bp, Homo sapiens
  chr6:52926828-52926862
  hyper
gactccgaacgaacgcctcgttgcagatcggctc

SEQ ID NO: 232153 - DNA, 420 bp, Homo sapiens
  chr6:52929646-52930066
  hyper
gcctcgcgggcgccgtctccacggcacttgggtttcagggccatggaatcgcaagcccttttcgcactgcattatgggatctgtagtgagacatgccttgcgttggctctttcctcctgctgggcgccaaagcgcgtcttttcctcaatctccagtctgtctgtgctctcaaaaactttagtcgttataacaactgtgactgttgagaaatttcactgttttcctgcattcctggcgcgggactctagccagaggctccgaggactttgtagcgactgtcccaagcgtccagttcgatgcttctcagggcggcttgctttaagggcccacccctaaatttgggttgtaaaaatttttgaggtaatgcttgttcaagttcgcttaagtgttcactcagcccaacacgcgggttgggcttga

SEQ ID NO: 232154 - DNA, 140 bp, Homo sapiens
  chr6:53212358-53212498
  hyper
aacatcagctcttccgtacaattctatgaagcacttcctgccacgggtcccgctatttaaaacaaattaggctgctcgctccccacaaatcccatctagcacctctcggttcctcagtctagctaataaaccatgcactg

SEQ ID NO: 232155 - DNA, 255 bp, Homo sapiens
  chr6:53213967-53214222
  hyper
aaatttttttcccctttcttcctaataagcctgcgtggaacgcagagcctgcgcaatagccccggtgaagttgtcgatgccctgaactctggtttttttactgccaggcgtggcaggagtctgtggccgcatttgggtggcagaagcccaccctcgttacggtctcctctatgagttatgtcatgctgaaggggatccacttcatcgttaaagctgaaagggttaaatgcccacggagaccgccggagtgaaggt

SEQ ID NO: 232156 - DNA, 186 bp, Homo sapiens
  chr6:53224377-53224563
  hyper
gccgggtaattcccgggcaatgaccagacctcgtccccgcgctgacccttcctggggacatcgggtgggggtggaggaggcgctgagctagggagaggagggttgtgcggcccggaccacgcaaccttgggatcggagggtggttgaggccttgagggaagaatggaaggcggccttgacttctgg

SEQ ID NO: 232157 - DNA, 912 bp, Homo sapiens
  chr6:53408897-53409809
  hyper
taaatctctttcatattgaccgcaaaagcgaattttgagcctgtaaggtggatcatggtagttgccggtctgcagatacactaggttgaagactcgcagcacctaatgtcactttttcatgctcacgccctcccagcgcccaatccgtgtttatggaatgaaggggaaaacccaaaagaatgaatgaacaagaaaggagtctagtcaggaggatggccctggacgcggactaggcgaaagcagggacgatgctcccggggccgggaggcgctcgaggacccccgggcgcagtggagaacgcggaccgcgatagggccgggggcgtagggcaagacaaaggcagcgcgggcggccagacacgggtgcccggcggggacggggaccgcgggcgctcacctcatcgccccacttgagaacgtccttgtgccggtccttgacggcgtggtagatgtgcaggaactggaggatcccgtgccgccgcacgtggtcggcatggcgcttggtttcctcccagctcagcggcgagccctgggacagcagccccatggccgccccctcctcctcctcctcctcctccgggctgacggcggtcgcccgctccgggcgcgagacggacactcagccgcccgcagaaggcggctgccgctccaccccgcgggggcgctctcgggccgcagtcggcggagggagggtcctgcccgctccggctccccggcggcggcccctggcgcccaggtgacagaccctgggtccgacgcaccgcgcggaggcgaaggcagaagaccgagagcaggcgggacggctctcggcccggcggcctcgccctccccgctgctcctcctcccgctccgatgcggcggcggcggaccccacggccgcgctgccgcggcggctcccgcttctctttgccgg

SEQ ID NO: 232158 - DNA, 291 bp, Homo sapiens; identical to SEQ ID NO: 200482
  chr6:53659861-53660152
  hyper

SEQ ID NO: 232159 - DNA, 48 bp, Homo sapiens
  chr6:53660404-53660452
  hyper
tattcaaagtgaccggatattttgcgcgtagtcactggggctcgtgct

SEQ ID NO: 232160 - DNA, 624 bp, Homo sapiens
  chr6:54711373-54711997
  hyper
tgttcggggtttggcgtgccaccacttgggacttgttgtaacccgtctccactcccgccccctccagcgctgcaccttgtctcggggaggcgcggttcgagccggaatcagcctccctccgcggacctgacgctgggcaggtaactcccctcccctccctgcccgcgcccaggcgcttgctgcttcctgggaggcaaaccttcggcggccggcgctgtgcggcgggcgcggttgcgcgcggcttggggcaagtaagtggggtttgggctcccttgccccggacctcggcggacgggaccccagcgggtgcagggttgaggtgcttggggtactgggggggcccggggcttcacccgcccctggccggcgcggcggacgggagggataggggactctcccttgggagcgcaggcgggattggaaattccacagggtgtaaagctcagttgcttcagtcttttctacgtttctttcattgtcgtgggggttcgagtgagttgagaagtttgaaaagttgtctcgggcggagtcggtttgggtccccagaggactggcgccgcccctcgtggaggctgcatttgtttcctcttttccagtgtaggagtgcgccgaggaccccgggag

SEQ ID NO: 232161 - DNA, 230 bp, Homo sapiens
  chr6:55443863-55444093
  hyper
ggggcggcagtcggcgaggggagggagactggaggaggatgaggggcgggcaccgcgctgggaaactgcgccagctcgggagcgcgcccctccggtgcactggctgtgaggaccagagctgttctgcgcactgcggcggcgccgagagggcggggagtggggcgtggcaggtggccgcgcctggggcagcgggtgcacggggcacctgcgggaatcgacagaaatgccga

SEQ ID NO: 232162 - DNA, 405 bp, Homo sapiens
  chr6:56112174-56112579
  hyper
gtctccttacctggcgcagtgtccaggctcggggttgccgtcgcagccagctgagtgttgcgccagggggacaggtatgttccaggcagtggcaagcccaacccgagcaagacctgcgctgaaacggattggctgccctccgcccggagtccgttctccctgcagcggccagtgcagagctcagaggctcagaaactcgctctcagccccctggaggcggagcccgggagataaggttcgcgctccccacccgccccctttccttggccgaagaccagagggtggattttggatctggatcttgaagggcgaactgctagtgtcgccctggtggaaacactcagttcaaatcctgctagcatcagaaaatgcacgattgaggattgaaaacgagggtgaaggagg

SEQ ID NO: 232163 - DNA, 695 bp, Homo sapiens
  chr6:56716204-56716899
  hyper
aagcactgccctctcggcagggtccagcactgagcccccttgaatctttcttttcgatctctcatgtttaggcaaattccagggtaaggtgtctcccggagctggggatgcggagccagatttctggctgaaatcatcctcatcggaaaaatccgcagaggaagacatagagcagcgataggacgcgttcccggaactctacagagaatgacacagaaaaagcattaacagcaaaatactcacatatgctcaatgatttaaacatctcccccaccaaccaccgccgccctccctgcccccaaactgggtctggcatatcctgcaccatcctcggagctgagggaatatgcagaaaccaaaaaaataaaacccggagctcaccatcttttcttggccaagtctccaatcgtaaaaacaatacacaggcagtttcaatacatgaagatttgcacggaagaagtgtgtggcctgtggtccggccaccagctcacaaatgactggcccaacaatgaagccagaatcaacagccttcctgttacaaacctatagtatttggctcccccaccaggacagtagaaatattttccattactagcctgctgcttaattcatcaatgcaactaactcgaagtttcgaaaacaaagcacaaatgcaggatgttgagtcccaactcctttccgcttcaagtcacctc

SEQ ID NO: 232164 - DNA, 492 bp, Homo sapiens
  chr6:56818398-56818890
  hyper
ttgctaaaaccgttcgctgggcactaatatgaaatcacttaaaaggaaacatgccactttcggctaggggacagcatgttcgtcattcagtgtcctactggtttcttaacacgcatataattaatattggtactcaggaaagagaacttcttctgaccttgagcgtgcgcgctaaataaattacctcagaacgaaagtggtgcgatctcaaaacagcatctggggagaaaagagataaatgagacttcatttaactccttgttcttcacctaccgagtgactcatgacttacctgggagaccagggttgggaaagcacatcgcagactcctggaattcggtgggacatcctgggggagggaggaggagtcctggggccatcggtctctacgtgatttctccgcgagaagtttgcatgaaagttctgggggagttggggagccccgaagtttccatgccttactttcttacccctacgctccagcgaaggatg

SEQ ID NO: 232165 - DNA, 236 bp, Homo sapiens
  chr6:56820671-56820907
  hyper
tttgtcccctccccacgtttcttcataaccagcaaaaagtatatggcagttggtggccaggggatttaacactgatgcaatgccagcacggaaggtatagcgagagcgctgcagtgtgcctttctgcggacggccacggccacctggccaggaagcggctgctgcagcagtcattctgcggcatcttgcggccttggcgggcggtgctgtgccgcgttctgctgcccccaaggcaa

SEQ ID NO: 232166 - DNA, 661 bp, Homo sapiens
  chr6:57036934-57037595
  hyper
gggtgctgggagaaactaaacgaagccgtcactgagcaatacacccacagcccgtcgaccgataggaaccttcgcgtggggggagttggttacttttaggttgcatgaagaggcggggcctcgcggggcggagctgggggtggtctgtgggtccgcgcgggcttcgggtagttcctgggtccggggagcagacgatccgctagccacattaggcgctcggtctctgcgtccgcccctcccgtgcctcagagacttgcgctccccaggcccgagcccctgtcggcccatcctcgagcccgtgtggctcgcgaacctctaactccagccgctgcagccccctcccaggcccggcgtccccgagccccgcgggcgccgcgcctgcccttctttggctacgctgcagccgcggtgtcggcgagtcctcccgggttgcccccgcgggcgtcagagggagggcgggcgcccgcgtggtgacggcgacgcctgcagcccaaggagcgctccactcgctgccgccggaggggccggtgacctcttggctaccccgcgtcggaggcttagatggctcaggcgaagatcaacgctaaagccaacgaggggcgcttctgccgctcctcctccatggctgaccgctccagccgcctgctggagagcctggacc

SEQ ID NO: 232167 - DNA, 168 bp, Homo sapiens; identical to SEQ ID NO: 200487
  chr6:57086140-57086308
  hyper

SEQ ID NO: 232168 - DNA, 233 bp, Homo sapiens
  chr6:57087024-57087257
  hyper
tcagcagcagctccgccgggggtggtggggcgcgggagtctcgactcccctcatctgtggacccgccgcgctgcggagcatgcgccgtgcttcgtctgcgcatgctctgtgcggacccgcggccctgccccgcccctgttctggcgggtggctggcggcggctcagctttccaggcgcctccaagggagcccgggagggcagtggggagatcagagacgagcaggatctccta

SEQ ID NO: 232169 - DNA, 84 bp, Homo sapiens
  chr6:58147510-58147594
  hyper
tcggggtctcttcacggatcactgaaaccgccttctccgaggcctccagggtgactaaaagaaagggtgcgtgttctgtgttct

SEQ ID NO: 232170 - DNA, 58 bp, Homo sapiens
  chr6:58147837-58147895
  hyper
atctcagacactttcggagcgtgttttttttttcttgtcctttcgctccccttttcgg

SEQ ID NO: 232171 - DNA, 203 bp, Homo sapiens
  chr6:58149325-58149528
  hyper
cacaggcttttctaatgtttatttcacagtaacaattatgtttcacagtagcaactgtgggcagtgatacagaaagtcatgagagaacacgaaagtaaatgtaattgtacccagtaatcttgatgggacgtagtccgctgaatcgtacggttgcgtttgcagtttagtgttcctgcaagagcagatgacgaagagagctaaga

SEQ ID NO: 232172 - DNA, 63 bp, Homo sapiens
  chr6:62995456-62995519
  hyper
atgtccctgtagaccgcgttacatacactttatggtttctctatcaatgatcctaacaggtca

SEQ ID NO: 232173 - DNA, 411 bp, Homo sapiens
  chr6:62996119-62996530
  hyper
gggaacaggacgcggcccacctccgccaaccactcattggtggtggtgccaggagaggcggggcgctggcagaaggccgcgggctctcattgggcggtagcgcaagtcgggtggcctgactggcaggaggcagctgcagaggggaagggagctcggaagatgcaaacgctttcttcttgcgcccaagccttccctggctattaggcatgcccagttttgtggagttctctgtgtcttcagctaaggcgcagaggagagagagcgcgggaaaagcgcaggttaaagagagaggtctgagtacaagtggacaggggagatggagatgagaagtgagccacccgagagggtggaaaagcgccagggaaagtctcaggaaggtagatgggacttcacctgcgtccctaaggcaca

SEQ ID NO: 232174 - DNA, 71 bp, Homo sapiens
  chr6:64345435-64345506
  hyper
ggttggggagctgcgcatcaatattatattaactgtgaagccttagtgcttactacggtcgagaaaaagcg

SEQ ID NO: 232175 - DNA, 624 bp, Homo sapiens
  chr6:69344103-69344727
  hyper
ttatcagacacttcgtcagccaactgtccaggaggcaaaatgactatctatgatgatagatagacagacagatagatagttagattaaaaggtggggaaacatcccttttccctttttcctttctatataatctggttttttctcttcaccccttttctcgcttcttcccaccccgtccccaaacctgttactagggaaacttgaaaaagaatcagatacattaagactacaaaacgaaacaaaagtttagaccccgaaaccatgattccattgccaagcacaaagcaatgcaagagcccaacgtcggtcgccgcaccgcgatcctgacaaagcctgtatggagccagaacaaataagatgttaattgcagcctcgcagagaaaaaaatactattgttccagccagagacactcagcagctcggtagctgggatgtgccccctccgctgcggactggatcaattctgaatcccggtactgaaatgacagctctctggctgcgacaggtctgcgctgaaagaaagagaaagacgatcaagtccagcattcacttcccacccttcagagtcgccttcccatcctccgcacccccctgcctcgcctcccagtgagtttctcttacag

SEQ ID NO: 232176 - DNA, 562 bp, Homo sapiens
  chr6:69345567-69346129
  hyper
tagagtctcccttgggggggcttctccctccctttagcccccctcggtttggaggttggattcagttggatacggcgcaaggttctgggctcctgctggcttttttttcctctctctcatcgacccccctttggttcccaccccccaccttttgcttttcgtatgtatgcatttttaaaaataaatcctgattttggaagctgagccggggaaaatgggcaacggtgattgggaccgaaggggagtctctccgtcactgttgctgggacgcgtgcctgtgctggtgtcttagagcaagagcctccctgagctttcggagtggaaggtaaggaagggggtccaggggtcaccttttctctgccgggggtcgccaccgtggagctttgggcttaatgtttgagaagggaggaaaatgaaaggaaaggctgttgctggcggatggggaggctgtgagcagatccgactgtctgcatttacttaaacgccgcagttgaaaagttagagaagtctggttttcaagagatgtgctgggtcagaaggaataagcggagagacctagaaa

SEQ ID NO: 232177 - DNA, 447 bp, Homo sapiens
  chr6:69942708-69943155
  hyper
tcaggcttttcaaagaaatccgcattttaaaagccagcatttatggtccaaaatatgggacgggaatcagagctggtagaaaaatatgaaaagcctctttacaccctgagtatttgaaacaatccgatgagcataggaagtggctgccaacgctctggcggctgctcgtgctgccgccgctgccgctgctgttcctcgcatagggctggacagagctagtcccggtttcagcacctccggcgctggacagctctctgcacgccgcaccgccgcctgcttgctttttcccactctcgctttgcattactggagatgcatctaaattacatcctgttcaacaacaagtagatttttttttcctgtacaggaattacagtagacgactctctcaattaaactgcattttcttctttacggatttggctatcaggcgtatttatcccgatt

SEQ ID NO: 232178 - DNA, 484 bp, Homo sapiens
  chr6:70506529-70507013
  hyper
cccctgcccccgccgcccgcccaagcccccaacactaaggagccctccacagtccaagctaaaagcggggcggggcgaagagggtctccggggcccggagaggccaactgcagggcctgcccctcccttcctcccccagtccaaacatggggaaaactccaagcgcctcccctaccagtagtaagaggccgaatatgcaccagccgatcaccagctccgccgaggccgcgccagaagtcgccatcttcgcttccggtccagaccaacctgagcgcccggggtggggaaaggggagggggaaaggggagagagcgcgagatatactgcacccgcgcaccctaaaggttaaaggggcggagggggaggagcaagtggttgccaaggagactggacccactagcgtcccctggcggcgagccgagcgggggcggggcagcaaggactgctcaggggcggggcgcgtgcggacgcagtgacatcacca

SEQ ID NO: 232179 - DNA, 1247 bp, Homo sapiens
  chr6:70576373-70577620
  hyper
gtcctctgtcctcgcggagtgggagggtcacactgggagagactaataagggcagagatgcgtcccccttccccactcgcagggagctcactcctcggcggtgccgcagccctgtccggactccactgcgcctctgaggggctcaaatacgaattcaaggtaagctgcgcggctttgcgaccggctctgcacttgccctctcacacatgcccgggctatgtcatctgctcgtgttcctagttatctgtgtgcatctgcttttcaagaaaatgtaaaaactgtgctacacatggaaatatgtttaggtggataaataatgcacacctgcatacgtttccataggggccttaaggatgggaccaaaaacgtttggcaggagacggccactctcatgtggtacataccatgtagttcgtgttcctatgttcacatgatgcaggcttcatgcgttacacctaagttctaggtggtttttctggctatgtgtgtctgtgaagcggaactatggagcactgctgatgcgggtagggacagacatcaaatacattacaaaaaaaatggggggttaaaggagtaaaacaaactcactatcaattcatgccgttagagcgctttttttttttttttttgacggtgttagccctggaagcgaggcagccagttaagcggcgtaagctaagagacgcggggttccggtgcggtgccctccggcccggggttacctactccacatgtgggtgtttttcccaagtgcggcttctggggggcggcgcgggcgcgggcggggattcccggactccagccccaccacgttccggagcgtccggccctgttccttaattaccctgcagcatgcgcagcgcggtcggccacagcgccgccgccgtccccgcagtcctccctgcagccaccgccgccgccgccggaacgtcccagtcgcggcgcgaggaagacgcggccccagcctctgccgcctccgctgtcagagtcccgaggccaccgccgagagcgcgccggcgccgcagccacagcggccgagaaccaggaggcggcgccgggcggcccagctagggcgctgcagggtcgcgaggaagtttgttggcccggaaccaagcacgccgtcgggcacgctagctccccgagagcaggcgggcgcgtaagcgaacccccttagaggttacggagggagcgggaagccggcaagagggtgggcagaggagctgggggacaggcgggtgccacaggag

SEQ ID NO: 232180 - DNA, 1040 bp, Homo sapiens
  chr6:70992020-70993060
  hyper
aaacctcagctgggcttatgcgcccccgccgggtcctccctcgcgcaggaggcgggaggcgctggagcctttgggaaactgctgaaatgctgatggaagccagggccgccaagttccgtcccggagccgccagcaccgctagctggactcggggttagtgcagctacggcgggctggaggagcgggagagggagcgtgcctggattcccgccttttccagcaaggcctgctgttgacagtgaccaggaggtggggcgggggagggggtgaggtgcgggaagtaagaagcaataacaggctaagaattaaacctcggtctccagtcacctattaccttcagcgccagagcctgcagtagggaggacccagattggggaggagccccccttcctagaccaaggggtcatctacggctctggacttcgataggactcgcggcaggtgctcgaggctggaggaagcgcgggtctgagagccctggggatgctccgcgcctttctcacagctccctcgaccgctgcgccccgacctgtcctcgtgtgcgcttgaaaaatgcaaacactccctgcccccaacttacctcgtcggtggtctggctgggctggagaagaaaagatggggagaaagtgagaaaagcacccctcaaactcgatcgcaacttacttgagccgcgcacaagcagagccccaacagcagcagccccagggccccgcggtcccgcgcagtccaggccatgcccgccgcccgccgctaatcccttggcccggctctgcagcctggttcccctctaggcttccagacccgccactagcataggtggcacttcgtccctgcagaaaaagcacccccgggagtagcggttgccaaagcgtccaggcccgggaggcgcgcgttccccctgtttatgaatggccccggagagggtcctgggattggaggagagctagggggcaggggaggacggatagaatgacaacagtcgcccttaaccccttccctgccgccgcacaggcgaggactgagcacgcagctctgcctcc

SEQ ID NO: 232181 - DNA, 261 bp, Homo sapiens
  chr6:71123290-71123551
  hyper
gatgtgagggggcccggggcgggatggtgctgacccgggtcgggccgtcttcttgcagctggacaacgagctcctccgttcgacaggcgggggaagaggccgagccgggcgagaggtaacccccttactgtcccctctggctcccccggctcccgacacccacgacccctccctccgtccctcttgcccaggggccaggaaggaagcggcctcctcttcgtccgccgttcgcccgccgcggcccctcacccgactgctggc

SEQ ID NO: 232182 - DNA, 259 bp, Homo sapiens
  chr6:71123791-71124050
  hyper
cccgcgcctcccacgtgtctttttgcccgggtggtccctccttgggaagcagcgtatctctgtgcttccatcccttgcctggctcttccctgtccggagctccttaccctggccgaccaggtttctcactcttgttacctccataatttcttccttggttttattttcctctcatccacctcctttcggtacttcctcctggttccctttttgttagttgccgattgtgttttgctttagcatcgctttgcattggagt

SEQ ID NO: 232183 - DNA, 78 bp, Homo sapiens
  chr6:71377331-71377409
  hyper
gccagctacctttcgggaatcaccttgggcagaaggcctttttgcaaaaagactcggcagcccgggccccgtaggttc

SEQ ID NO: 232184 - DNA, 465 bp, Homo sapiens
  chr6:71665452-71665917
  hyper
cggagtgcaaggggcgtgtgactgcagcccggccggcccggaggcccactcccgccctcgcccacccagcggggcaggctggcctttacctcctggaagagctccagactataggtgttgtcgtcgtcagcgaagaagagcacgccgggctgcgcgcgctggtgctggtgcctctggcgcagccaggcgaggcccgcgttgcgctgctcagtggcgcgcggcagcccgggccgcttgtagcgccgcggcgtgggcacgtgcaggtgagtgctgggcagcccggcccgcgccaggaagcggctcaccagctcgctgcgcgccgccgcgtcctccaccaggatccagtgcagctgcgccacctggcggaacgtgttggccaggcgggtcagctccgctttctgcaccgggcggctgtaggtgggcgtgatggcatagatggtgggcagctgcggctccggctgtggc

SEQ ID NO: 232185 - DNA, 988 bp, Homo sapiens
  chr6:71666157-71667145
  hyper
caccccagagaggggcgagccgagggaccccagtgcgcagcttggacagcggcggcgccagcacttagggagtggtgatgggtgcgctgtccatggggccgagggcgctgcagagacctggagccgcggggctcactacctgggcgtggaggagcggcaggttcgcgcaagctagagcgacaaggggtgcaggcgggcgggcaggggctgcccccgactccaggtgagctggcgggaagcgggactcggtccagccgcgcgccgccggtcccggagttgtgccgagtgcgggaaaggcgctgatccccaccgcgctctttctgaagagtggaagccgagaagcggcacccggtgcgcctcgccgctccagtccggcggtgctgcgggcacaagggctccagccgcgggcccccaggacgctctctgggacgccttcgagggcgggcggcggcgctgggggctttccttcctcacattcccgccggggtggcgaggagcgggtggagacgctgggggttgtgtcccggctgtgttcgcgcgccgcagcggaagcctgctctcagtcccttgctcttgtcttctcagaacctctccggatccagcagcaagatcccaaagcaaggaaagaaagaaaaagcgagggggcgggggcgctgcagaatccagcgtcctcccaagtcctcctgtgggaagacagcagcgctgctactggtggagaggggctgcgagagggaggcgcggagggaccccttggctctccgccgggtctggcgctaacggccccgcgagcaagctcgggaggcggccgctgcaccgcgggtggaggagcgggaggagcgtccccgcggggctgcacgacctcctggagggggtgatgctcgttcacctctcttcagctttgtgaaataccgcaaggtctttggagatgagccaggaaaatccattcacgtgcggaaatttgccgggctacgcgcgttgctgctgatgc

SEQ ID NO: 232186 - DNA, 977 bp, Homo sapiens
  chr6:71998102-71999079
  hyper
gacccgcctgctgacggtgacacctcttcgacaccacgtccacgccagtcctcagctccaggagctgggcgggatccctcatcccgctcagctgggagatgccccgggagggcgtcccccggctccgggcggcgagggtagtagccgaccccaatccactccgggggccgccgggggccgcgtgaaggcaggtgttccggggagaaacgtggaagggaggcgcggcctggggccggtggcgctcggctgggggccgcagttggctcccctgggggctctgggcggcggcagctcccgcctgtggggaggagaaggagccggatgggcgggttcaggcgcgcgcggcggcggtcccggggccgccggctcctccccgcgagggtgcctgtccgccgctcgccgcgctgaggcagtgcggggcgggcgcgcctaggctgccgcccagcgccctcgccgcggccatgcccgggccctagagcgcctgccgcagcttgcgccccgcagccccgcagccccgcgcccgccgccgcctcttcaatgggcaacctgctcggcggggtcagcttccgcgagcccaccaccgtggaggactgcgactccacctggcagaccgactcggagcccgagcccgaagaaccagggccgggcggcggcagcgagggcccggggcaggagtccgagcagcccgcgcagcccccggagcaagccggcgggcggcccggcgccagccccgcgccggacgaggacgccgaggcggcgggcgccgagcaggtacgcggcccagcggtggcctcgggtcgggctggggcgccccgacaccccagaggggcaagtgccaagccgccctcgcgctcggaggccaggggcgccaggtggctgctcgccgctgcgacccgacccctccgcgccgcggctgacctgtctcccggtggagcccgggggcctgcaggagcccaaagcgccggaccctcccactg

SEQ ID NO: 232187 - DNA, 516 bp, Homo sapiens
  chr6:72130205-72130721
  hyper
ccgcgttctttgtgtgtctctcgccgccctccagccgcttcgccgctcgcctgacagctgatgggctcaccgcgccgggtcccgcgtcctctcggccgcagccggcggagcccggcccggcaggaggaggaggggagaagaggagcgttgacagatgctgtcttggagcgggcaccgccgggggaaaagtctggactgcctcggcgagaagcggccggtaggcaaccggccccagcctcgcattcgcctcaaagaccccaattggctaggagcccttccctccgcagcggctcgcgcagctccgctcttgcgccccgcgcccggctcagcggacggactagcgcgcccggtcaagaatcctggggaacccgctccgccccctggctccagcgccctccaatgatgtcggcgtacagagggctgttccgcccaatcaggtgtcggaaagcccagccagtccccgggagtgtagccaatagaaggcgactccggcaacacacccgccctgatccacta

SEQ ID NO: 232188 - DNA, 1015 bp, Homo sapiens
  chr6:72596016-72597031
  hyper
aggggtacctggggatagagcgaggtgctgtgcacgttggcgactgtaggggtagcggccggggcacgcgtggctcggacccggggagtgggcgggtgggtgcccgtgggcggagcggcgccgggactgagtggctggcagctatgtctgcgagagcagcggcatcaccctggatggaagcctctgagactccgcctaactgacacccaaactctccctctccctcccgcagccccaaattggaggcagcagagcctgggagcagcctccacggcggcagcggccgccccagtcccagccccagccccagccccagccccgcccccgccccgcgccccgccggagacgcccggatcggcggagcctggcgcgagccctcgccccctcgcctctcccgccgcgcctccgcctgcccgcccccgccggccgaggctgggctgcgggaggcggccgggcggccccgagcttcgctagggcgaccaaaacaaaggcagcatccggggctgggtggatgcaaacaaccatgaaagactgggttctcgctctccccggctctgctgctgctgctgctgccgccgccgccgctgctcctcctcctgccgccgccgctagggctccgctgtgagggggaagcaggggcgcagctgctgggcgtgcatccgaaaggtgagagccagagagcgagcagagggggcgggcaggccacgaaaatgtcctcggccgtggggccccgcggtcctcgcccacccacggtgcctccccccatgcaagagctgcccgacctgagccacctgaccgaagaggagaggaacattatcatggcagtgatggaccggcagaaggaagaggaggaaaaagaagaagccatgctcaagtaagccagccccagccgcgccatccatgcctccgtgcctccatccgtccattcaccactcactcccctagtcctcgcggctgagtgtggggaaggggctgccagggtgctgggtgcggacggaggcgcccgccttgggcc

SEQ ID NO: 232189 - DNA, 628 bp, Homo sapiens
  chr6:73329601-73330229
  hyper
ctggctgtcttccagggaaacgtgtccctgtgtcctgccttcctgagacttcttgcctgcacgcggggcccagccgcgccagagagatggaagtgactttacctacccagcgaaagtagcagtctgcaacaaggaaaacagctaagttaagaggaagtggttttcattttactgcttgcagaaaggccaagattttgacgtttaaagcgggcacacgagtcattttaagtctctagatctttcaccctgaaagtccctgcacagaaactccatagggagtctaaatatagcaacagcaccccctcccgccccctccgccttcagtcagggtcccgcgcagctctaggattggagagcttactccagggcgctctctgcatctgcctcgaatagcaccgcacggagcaacctctctcgcacctccacagtgcgtgggtgtgaagtgtattaggggaaagctagagagtgactctgggtgatggtgctcggctcacagtcacatggcgtcgccgccagctgcacagagctcccagctagcttctgctgcccagaggcttggggggaaggagggagggaagcaggctcctgctggtgaccaggagcaggcgagagggcttcacacaaataa

SEQ ID NO: 232190 - DNA, 40 bp, Homo sapiens
  chr6:73331889-73331929
  hyper
gccccctcgcggtgcccgtggtgatgccatgccccgccac

SEQ ID NO: 232191 - DNA, 129 bp, Homo sapiens
  chr6:73972642-73972771
  hyper
ttcaccggactaaccgagttcgagaccacaggggggtcaggtagccaaggctgggctttgacggtaggaatgaaggaggtgagggtggcgcgccgcaggcctgggccactccctgagtagggcggcggc

SEQ ID NO: 232192 - DNA, 132 bp, Homo sapiens
  chr6:73973011-73973143
  hyper
gcccactgccggcgcgcagagagcccagcagctcttgagtccaggaagcaagggtgggaggagggacgagccagtggcaatgacccagacccggacgacccccattgctgagccagcggagctgcttggtga

SEQ ID NO: 232193 - DNA, 32 bp, Homo sapiens
  chr6:74019358-74019390
  hyper
tgaagatcaggactccgtattctgagactgtt

SEQ ID NO: 232194 - DNA, 221 bp, Homo sapiens
  chr6:74161043-74161264
  hyper
gtaccggttggttgtctgatcgttggatgtgtagatgaataaacgaacggtttgtcgttttacttagactaggctaccgaaaaacatgcaaaagtctaagttacttccgaagggaagtgaggggcgcgacccggggaaggtagggactgcggattgcggaaggccgagcagcggggctcggcgggagggcgccaagcagctcaccttcacgtgctcatagt

SEQ ID NO: 232195 - DNA, 285 bp, Homo sapiens
  chr6:75911844-75912129
  hyper
gggtcccggatctccgcttgcctgccatcatcccccaggctgcttggctgctggctcatctgcccgcaccgtccgccccgccgactgagctccccacaaagcacacagaggcgcagagccagcgctgttggagtcttttattgtgttctgtcaccgaggtcgcagccccgagccaggtggttggttaccagccaagcgagcgagtgcgcccgctcttcggggctcctgggtgccacccggaggtgtcctgttggttgcgctgattagagccgtcgccccctctcg

SEQ ID NO: 232196 - DNA, 2355 bp, Homo sapiens
  chr6:75914015-75916370
  hyper
cgagaagttaaaggcgaacaatcgacccaccgaaaagctgtgcgcagatttttttttaacagctgaactcaacgaaaacctgagtggtaacacttttgctgggtctcgatcgccacctgtcgctttcccgacttagctgcaagaatgaatcatctcgcgccgggatatcggaacgccagccagccaagcatcccgtcaatatatgttttaaaaaagaaaatgctttctctcctttttagccaaaacattcatttgaatgcttagcaacacttcattgagcattctcagacataaatatctgaaagcggccgcccctacgtggcagcgaggactccctcacttcaccctcatgaataaaaatgagtccactggggtgggagtgggggctaagtggactcgtccccttctgccaactcgccccctcccaattccctgctggaagaacccaattccttaactcccgcgtccagttaaaaagaaaatcacacacacacacacacaccgcgtgcgcgtcgcctacctcctctcccacccaccacgaccttggcattagccaaaggagagcttagcgtttatttcctttcctgccctatccttccccagcattcactagaagactacagagtccggatcgagagtctccctggcccagagtcccagggagccctgaactggtcactgaagggctcccgaggtcgcccgcttgggggtacctgttccgctcgctgaacgagtccggcgacccacgctttctgatccccacaagtctaggatctgagtgggaaaccgccgcggagatctcacagaccccgaatagggcctccaccaatgcaccgggagggagtcggagaggggactttctcccggagctgggaaaagtccgccaagaatgagtaccctagtgctgcctaacccaccatctcggatgctctgaaaggtaggggaggaaggagccagaacactccactaggaatctgttacgagatgccacacacacccgtgcagcctcgacgagctgcagagcactcagcgggccctccaaagaattccgcaccgtgcgtcaccaaaataccttcccagcgcccccgccgcacgcctgccctccccgacaaagccacagccgcgagataaccagggccctgctgccccagaacccggcgcgccctccattgaaatcgacagcatctacagatgaaactcctctagaaacggaaacactgaacgggatgctttgcgtgcacaaaaccttgctcagctcttaagaaaagcaacattcccctctccctcaaaaaccccaaagaatcaccaaatcccagtatacaaggcaacgctctagcccacctacactattacaagtccaaactgtcctcgcccaggattcttcaccgctccgggcaaggtgcaagctagacgccgtttcccgagttgtctctgggaatgatgggggtaggggaaaggggacagaaaccaggctgacctgaggcggcggcaacagggagaggtagcggcggcgacagcggcttcccggcgtcggagaagctggtgctcggtgtggcccccacacgccccggcgataggcgctgcactccaggagcacctggcggccgccgaggcgtgggcagctgcggggaagtccaggaggaggaggagaatcccaggaggagaggcgggcgcggcaggaagactggagatggcctgagcctgcagctgccggcgcgcggacgcgtctggggcggttcgccttagccaagtggaaagagactccgcgccgcgggctacttaatagagggctgttcccagctctcagtttactcggttacgaaacgcctgagaaggtggacggctgccacggggtgatgtatgctcctccggcggtgaaggaggtctacttttgggaacgtgtgcatacttcgagcattccttcggcgtgaggtggcgatcgccgtagtagcagtgccccgctggggggcggggagaagggagggagcgtagagggggacagccgcagccgggttccctgccaagggaagccgcgtactccgccacttggggcggactgggatttctttaatgaagctcgggtttccctatccctgagatttctttaatgaatttttctacattaagaacaatggggaggggaccgactcccattttcggaaatgcaaggatgcgtaacccattcacccccgctcctgcggatctccatccttcatctgatatcaccacctccatcttcctccccctctgtcctgggtgcacttaaaaccgatttacaggatttccattaactaactgtctgtacacgcggcgcgccttctgtctttttcaatctccaagcgcgattggaaaccc

SEQ ID NO: 232197 - DNA, 206 bp, Homo sapiens; identical to SEQ ID NO: 200511
  chr6:75916810-75917016
  hyper

SEQ ID NO: 232198 - DNA, 41 bp, Homo sapiens
  chr6:75918553-75918594
  hyper
tcctagtgtgataaacggtaaagaacgggtaaccctcttcc

SEQ ID NO: 232199 - DNA, 299 bp, Homo sapiens
  chr6:75994549-75994848
  hyper
agtcggctggagacgccagagggagggagagagggaggagggagaagaaggagggacatggggaggggaaaggggaggaggatagaagcgggaacgaaaaggcggacgcaccctgatcatctgtcctgtgacgggctcagccattggatcgcgaatctgcgttcgcgcatgcgtggtcctagagctacggtgacacttcgcgtgcggtgtaggcgcatcttcgctctgttggccgtggctttagtaagcacacacctgcctgctactctggttatcgtggcgacggcaggtctggattg

SEQ ID NO: 232200 - DNA, 33 bp, Homo sapiens
  chr6:76459159-76459192
  hyper
actgcggggcgtcggcgccggggtctcgcgttc

SEQ ID NO: 232201 - DNA, 1926 bp, Homo sapiens
  chr6:78172262-78174188
  hyper
atacacaggagatccggattcgctgggcacgtcgggaacccgcgagttaatagaggtgaccgaggacgtggacccgggggagtcggttatcagctgggctcgggtcaagcgcttgccggtcctgttgggcgtctgtttcaaaatccgggagcgggcttctacgtagatgcggccatagagggcgatgaggagcagggtggggaagtagaaagcacccaccgtggagtagaccgtgtagaggatgtggtcggtgttcaccacgcattccgacacctcctcttcggccttagcctgacgccagaagaagggcggcagcgagatagagatggagaagacccacaccagcgcgatcatgaccgccgccctcttgggagtccttttagctgagtactccacggcgtccgtgatggcccagtagcggtccagggcgatgacacagaggtgcaggatggaggcagtgcaacaagtgatgtccgacgacagccagaagtcacagaccacctggcccagtgtccagcggccggtgacagtgtacatggtgctgatgggcatcaccaggatggacacaagcaggtcggtgaccgccagagaggcgatcaggtagttagccggggtgtgcagtttccgggtccggtacactgtggcaatcacaaaggcattggagagcgtggtggccaaggtgatgagcgccaatagcataaccagcagtactttccagggtagggagatggagtcctggtaaatgtagtccttggcgctgcagttttgggagggagcagaggataagttggcttgaggaacccaggtctcggagcccgcgggcggcggtggagcgcactgagcacccggttcctccatggctctcctcgccccagctccggagcgcagctcttgggcatggagcggacgaaggagagggcggaaggaccgtggcgatcgcaggtttgtccccagttgatagttccgtgagttcctcaattattcctccgcccaggttcacagctgaaactagaggtcatgggtgcggcagccaaggcaggcgggcgcctcccctgcacttccagagcgcctagctaagccgccgcgtctgtggttgttcctctccacaccgggtcttagacctgggttgctaagagctggcccaccgagccctgctccgctccagctccctggaggcgtctagtgcaggagggtgaagtactgcttgaggagaaggctttgaccaaatgggatctcttaccccagttgcttgaggctgagcgtctcctaacctggacgcttttggatctgcagactttgcccacaggagtttcctaggtgtagagaccaaagcttgcaggccagcgagaggtcccgagatcttgcattcccacccctcgccccaagctggggcacttttggggggctgcagcggccgccagagctgggtggggtgaagtctaggagcagcgctgcgccgcgcctcgcgccggagctctgccctccctctcttttcactctctggccactcggacgagctgccccgcggagacggagccataaaaggggggacacgggggctggagttgcggctgctcgggccgcgccgccgccaccgccaccctggtcccacgggagccactcggagccatgccactgggtgcgcgggtctggaggacctggcgcggcacactgggaaggggcaggtgtctgggggagctggagggacgcggcgtgcaccagcccgggagaagcgtgcgagctacggagcagatgggctctttatatagagtccaggtccggtccgccagagcagtgcaactcgtgcggcgcggcgggtgcggacgcccgctccccatcaccttccctttttctctctccctccctcttttccccccgccctgttcctttcctggccaaggaagctcccgccgggtcctaccgccc

SEQ ID NO: 232202 - DNA, 905 bp, Homo sapiens
  chr6:78175791-78176696
  hyper
attatttttgtcaactgcagcgctcacttagaaaccatagaagagggaagcaaagccggcgagtttaaaccgctaggtgggggcattggccaggacggatcaaaagtgtgtgcgattgcgggtgtgtcctgtgggagtgcggggtgccaggaaacaattttcccgttatcctaggagaactggaaacgattagagacaagtgttaaagggatgggaagcgggggaaggccgacaggaatgtaaccagctccatgcgacctttcctcttttaatttctgctcgggagcatgggacggagaaaaaacaaagcaaaatttgttccccacacggtttttggctttagcggtttggggacctgtggctttctccagccatgcctccactgcttcgcagagtcccagactcccagaggaatccgccccttgtaggcagtttgattttaccctctttggtaaagagctgcttaaacacacaccgccatcatattgaccggatgttggcagagttcagtgaagaaccccatttccttaacctgacttccgcatttcaagtattcctttctcactttaaaacacataaaacataggtgtttgcacagaggcgcatgtgtgtgaaacacccaagagagaaagagaccctgtaaagtcgcctgtgcctgggtcaccccttcggagtaggggtcgctgggtaaggtccaagtgccagctctgcagtccccagcggcgctagaaggaacctccaggcaagttttgggggaaattcacctgacaggggaggagcagagagggaatcagtagcggaagggaaagggtggagatggattacctgagcgcagcaaaacttagttgagtagaaataagctcccgtatgaacaccgggcactaaaactgcgaattaatgtggtt

SEQ ID NO: 232203 - DNA, 94 bp, Homo sapiens
  chr6:79577181-79577275
  hyper
tccacacccatcccggcatactttgcgccgtgcacaggcaagccctggtgcgcattggccccttcggccgccgtcggccggtagttactatgga

SEQ ID NO: 232204 - DNA, 519 bp, Homo sapiens
  chr6:79620218-79620737
  hyper
aaacaatagttactgtttgacgaattatacaacgtagacctaggtcgtgcgatagctacaaaatacctaaggaaatggactaggtcgtaacaagaaaaagtgatatcaagcccgggcagaagggcgcattctcggcgcggagggcggagcctttcctggagtggcggcggatgacccgggctcccgctcctcacctcggcgtggggcgcaggcggcggccgcaaggaccgcggatgcttgaatcgcgcttctcgccggctgggactgccccagacacgcacaccctcccgacctccgccctgtcgcagttccagggcgctccgcgctgtcatgattgctgggtgcgcgctccgtgctgggacagccgcgcaccaacagcggagggcgttagcaccccaagacgctgctgcaggggtctgaaccgctccttggcctactggcaccgggtcctggacgaaatctaccgcggtccaactgagctttatcttgtgcggtgacgcccatgcctaggtcttgaca

SEQ ID NO: 232205 - DNA, 526 bp, Homo sapiens
  chr6:79788062-79788588
  hyper
cgcccccgccccccggcgctaaaaaaggagtgcctccgacccctcgtccccagcgctccgcacgcggcacagtgagacccccacccgctcctccccgcagggcgtgcgatttatttatttatttccagtcggagaagatgtcggagcccaagccgccggttggctggaaggcgctttctctgtggaggccgatagtggcagggagggggccggggacggttccgcggagggatctgacgcacacggagccgcagcacaggctctattcagcggcgctggctggagctgagatggaagttagtttctatgtagcagaaatatgaaacaaatgaagcaaaactgcccagagaggggaaatgccccaaggatgggtctcactcacgcgcgtacacagacacacacgcagagagcactctcacgctgggcaagctcgggatcgcgctacccttcccgagttgaatgatagtgtttggtttctgtctcttgccatgtgcatgtgtataaatgctgcggattggcatctgtg

SEQ ID NO: 232206 - DNA, 710 bp, Homo sapiens
  chr6:80246696-80247406
  hyper
gtcttccttctcctcgcggtccctacatcctcccccatccctaatcccttcatcttccctgctttaagaaccacccgcaggcccccatccacgaacgccccttcactagctaccagacgcttcaacccagcctcacctcgcacctccacctcccccgccgtctccacgcccacttcaaagcccacctccaacccgcaggctcttcagcagagccgatgcggcgtcccgcctccttgccttccctcttaggaccaaactcccagctggggcctcggcgtctgaccgccaaagagcgggtgcctggttcctgcggaggctgccgggcgggtgccgaggttgccgagatgcgggaggtttgaacacaaggatgggacagaggcgaggatcggggctcctgggtggcagcggcggtaacctgggctccagggtaacggaggcggaggcctagactgcactacgaagagaccgcagccaatcatgatgactctacccgagctcccattggcttctgtctccagacggccctttttattggcttcagtggaactggaaggcgggacggcgagtgcgggagaaggtctccattggccgaccgctctagctgtagcggagacccccaagtagggaaattggggcaaaacgcggagcgctccaggctcctacgggctgtgcggtgccagggctcgactgctgagcgtcgtgggctccga

SEQ ID NO: 232207 - DNA, 922 bp, Homo sapiens
  chr6:80340635-80341557
  hyper
gcccggtacgccagcggccctgagacgatgtgtgcccgcagcacgatcgtgtctgttggcatttctgggtgtggatgctccaaaccaataaaccacaatacagaacccaagcttggactttgaaccgagcccttttgcctagtttgctttttcctcatcaagccaggatccttgccaacccacctcacagcttctgcccgggctgtggctcccctccagccacctgcgcgtgttcgggatagaagcgcggtcaggaggggagctcagtccaccagccactccagggagagacggaaactacaaatcccatcaagccccgcagccggctccctcctcctccctctccttccccttcagcctgcggccgggcggcgctgggcttttatctgcggacccgccgggagggagccagatcccagcgatcttccccgacggcagcgctttacccagaggctgccggcggctcgtagctgggttcagctctgcgtccacgccagcccggagcccggggggcaaggggtctgtcccgggcgcagcgagaggatggtcatccgcgtgttcatcgcctcttcctcgggcttcgtggcggtgagcgcggtgggggcgggcagtaggttggggtcgcggggcgcgggtcctgcgggaggcgcgcggcgctcgtcactgcgcgtccttgcgctcagccggtccgcccgcgggagcccgcgcccggcaggtgatccatcacactccgacaacaatgaagagggcggggaggaaaggtgggtgggggaccccggcctcacccaaatgcccaccctgcgtggcctgaaaggcagacaacgcggcctgaaaatggagtccgagggaagcccccagctcctgttgtgtggcatggaaatttggggaacgggttgttcaagagcttcggggatcccccttc

SEQ ID NO: 232208 - DNA, 418 bp, Homo sapiens
  chr6:80487603-80488021
  hyper
ggaactggtagaaacgagaaacaaaaaacccaagagagatttcatttttcactaggatgccaggtataaaatagcacatctcttttaatattcagaatagccggagtctccatttcgttattacaataatgtctttatcccttcccaggttctccccttccattctctacctctttgcgatcaaactgagcacccgggggtttcccaaacccagggttaccggatcctgagcatgcgcggaggagggacagggagccgcccacgccgggctccgcggctgcagttgctgttgtggccacaaggtggcactaagtctttggcggccgctggccttcccgaccgtggaaagtcggggccggtggggctaggtaggaagagcacactcctgtgaggttgccgggggcggggctccacctgg

SEQ ID NO: 232209 - DNA, 85 bp, Homo sapiens
  chr6:80656571-80656656
  hyper
agcacagggtggggcggctcctgcgaggagctcctggctgcacaggctccatctgatatgtcagctcccgcatccgagagctgat

SEQ ID NO: 232210 - DNA, 347 bp, Homo sapiens
  chr6:80714142-80714489
  hyper
gaaagcccgcccacgggcgtccggggaacgcctgcaaagtgccagcaccctaccaacccaggcgccgcacgggtggggtcgcggccgcaggctcttccggggcgggcctagcctgacgcaggaggaggggcggcccccgtcgcacaagaaccaatcacgactgtcgcttctacgtggctagcattgaccaataggagaccgtagtgatagcgacggggaaattcaaacgtgtttgcggaaaggagtttgggttccatcttttcatttccccagcgcagctttctgtaggtaagttctgtcttaccggtgcaccggcgcactgaggaacagccgcagccggtgtaggg

SEQ ID NO: 232211 - DNA, 107 bp, Homo sapiens
  chr6:80816125-80816232
  hyper
ctcacccgaggaccgcacggccgacctcggggaggctccaccccagaaactatttcattggcgccacctctagcccacacttcccctcttccgcatgcgcacaagga

SEQ ID NO: 232212 - DNA, 165 bp, Homo sapiens
  chr6:80816657-80816822
  hyper
tcgcaggcgcccgcgaggggcaggggccggcaggctgcaatccttgcatcccagcttattaacttcctgactctctggaacctccttgcctcagggtctaactgtggttcacttcttgctctatttttgtgactgttcagccctcgagacgcagtcccccctccc

SEQ ID NO: 232213 - DNA, 2413 bp, Homo sapiens
  chr6:82461398-82463811
  hyper
actccccttccccgcgcaggtcggcgcagaagatgaggtccaggtccttgtagcccaggccgctgtcctggtgcaggacatggctggctgccgagccgttgaggcgcacgtcgcggacgccaatgcgcttctcggccaggcgccgccgcaccaccttcacgatcaggctcggctgcagctcgagcgtggggaagttgccgcgcccgtgaatcggaatggtctcgctcaggatgccgtccagccgctgcacttgctcccagttcagcacattgcagtgcgccgtagggctttcgcaatagtccaagcaatgcccaccgaagctgccgccaccgccgaagtcgccgccgccgaagtcgccgccgccgaagtcgccgccgccgaagtcgccgcctagggggatgtaggggctgcaggccagctcgtcctcagacatggcgaagtacccttcaccctccgccatgtagtgcccgccgagcgccacttggccctggtcagtcctaaaaagaaagggaaaggagcgcggtgaggacgcgcggcggcggagagcacgcgcggcggcggagagcagaggcccgccaggaaaagagcgccccctcccccgatagttccctgaccccgggcctcctcggagactccctcccccggcccttacagtccccagccgcgcaccgcgccccgcagagcagccccgcaccaaaagtatctctgatgcatctggaaagcgcaagcgagagtcccgtctgtgtcacctggaggcggccgccccttctaggagcgcagcgagcgagagcgaaaccgagaggcggcaacacttccaggagctgcgagcgcgctcagacagcaaatagcgacttcgtctttcccagacccctgccgcctgcgctcaccactccctccccgcgacccctcctgcgccgctgccaccccagctgcggtggtcccgaactggcggctcttgctgccacacacgctcgtgtctctggagctttagcagttgtgcggggaaaatgtcttcagtactttttttataccgggcttctctgcgcttccggggcccagagcggcacgttcgccacaccctcctcatctgcatagggcgccgccccctctgccctcccccgcccgcagggcacgcagctgactagcccagcagttagtgcgggacgactgccggtgagcgtgaggtcctgggctgtatgtgcggatactgtgtgcgcccgtagatgcgtgtatttatacatacatttaatttatgtacgccccctcccacaaatctcttttcattttccccaggaggagacactttaaatgccccaggaatcataagtggtcatcaaaaccagatcacgactaaaatcctgcaactgcagaaacttcccaaaattctcgcggactcagcccgtctttagatcatcacggttgggctccggaggttcctcacgaccgctcttttaaacctcggtttttaggtagaccatttactccattgataaacccgatccaagtgtggactcatgagtccactcttgcacgcaaatcagtcacggcgcgtgagtgggaagggcttgttgataactgggtttcgattctcgaaacctcgggaagcgcgccggggagctctgggcgagcccgagaaggcgcgggggcggcaccacgggcctcgggcgtgcgcggctcctgcgcacgagtggctccaaggggccagtacttcgcgggggtcagggcgcgtcacggagcagacgcgggcgagcagccaatggccgaggactgggcgggccgagtgggcgcagagagcgcgcccggggagtgcgtgctgccccggagtccagggaaagggccgctaggtgtccggtgcctttgctgcgagttctctgacaaaattggaggcggcgaagcgcgttcctcgcggccccctaaagtttggccattttaagtgcatcatagtgtcagtggaatacgatttggttttccacgagacgtaaaagtaggagtttcaagaataaaatgaattctctcctccagcttcggtgacttcggcagagctaattctacgcacgctcactcgcgccaccaccactctttgctagaaagctgtggccgtctcttcggcagctcgctgcctccatcaactaacccggagcagctttcccagcgcctagacgctgccgggggctgaggtggggcagaggggagaatgccagggtcacagaatactccccaaaccctgctcagccctgcccgcccagactgggaggaaaaacagcccgcacctcctaactgggggagccccggcctagtcactcaagctgcgcggctcgggggtgaggggtagggtgcgggggtgtcacccgtggagcatccagctgcgtgacaacgccgccccctcccggtgccctgccgagctgcgtcccaa

SEQ ID NO: 232214 - DNA, 1869 bp, Homo sapiens
  chr6:83073030-83074899
  hyper
aaatctgaagtttgcggcctcaagtaccactttgatggggagagcttctgaagcttccatacaacctgccgtgcctttgctgctgccgcagtagattttcagctcatttctttctgctgctgcttcgcgctgctctgtcatgcctaaatctatctcgtcactgccaaaggtgcctgaatcagggtgaattccacgagattcaccagcggttttgctccagtccaaggtaaatacagtatgcaaaatgaggaaccacccaaggatgtcggggaggggggagagaaagggattccctcaccttttccggcacattcctcgttaatttccaccaggaggaggcgcgcagcccagctcccctagtctctcttcttaaatccccctacctacggctgccgaggttggccgcgcgtcgggaatctccccgacagtcctggccctcccccgccccccgggttggtttttcccagctgcggaggttgggaggttgggccaggggctggggtgcgaagagagtcggcgcccgcaacgcggagccgggaagtcgtcgctactctggtggaactcagagttggttctggaggcggcggacgcggaggtgagcagtgggagcccgcggcctgggagagacccgggaggcgtcgttggggcccctccccatcctcgggtggagagtagggttggttcgggttgccactgtaccccgagtcccactgctgctttgttcccagactctcccctcctctttggagatgacttgaacccctttgagatccgaggggctggcggggcgcgggctggggggcgacagttgtagctccacttcctgctaatgcgagaaggtacaaaaagagatcaaaaagtcctgtaacctgaaacttccctcgcatcctaaccgggacctggtggagaggtctgggcgggggcggagacacccggaggccgaccttccgccgaggcggtgcaggaaggaacgggagagggagaagtttggtagggaaggaattggggattaagcggtaagttagacgcgggagacgagtctcctcgggaaaggcggagggcgggaggccggtcgggtttatttagtgtgggccagggaagaaggaagactttgcggtctgggtgtcggatgcgcgtccccctccggagtaaaagtgaccggaggggttggggaggcgaggccggggcgggcttttggaaggaggtctctgggacagactggagacgactagactcgaaaaggccggtttttgcactccggaagccgcggcagccaccgctgttcacgcctctctcctgcttgtcccaggtccctcagaggatccagcgaggggcgccaacaagaggcgaagaggtggcaccagggcggcggcaggaagaggagcgggagcaggagcgcggagcggagcgtcccgacccgccgtgcgtactttctggagggaaggggcgggggaatcggcccctgagggaagcgcccggtggcgagggggttagccaagttccggctgcggcgccactccctcggttccacgagaggaaagttttttttttccagacgcttccgccggctcgcgccctccgggcccagcctcccgagccttcggagcgggcgccgtcccagcccagctccggggaaacgcgagccgcgatgcctggggggtgctcccggggccccgccgccggggacgggcgtctgcggctggcgcgactagcgctggtactcctgggctgggtctcctcgtcttctcccacctcctcggcatcctccttctcctcctcggcgccgttcctggcttccgccgtgtccgcccagcccccgctgccggaccagtgccccgcgctgtgcgagtgctccgaggcagcgcgcac

SEQ ID NO: 232215 - DNA, 215 bp, Homo sapiens; identical to SEQ ID NO: 200532
  chr6:83775565-83775780
  hyper

SEQ ID NO: 232216 - DNA, 91 bp, Homo sapiens
  chr6:83902912-83903003
  hyper
cccttcacctacacgcagcggagaagcgcccaagcaacaacgtctgcacccaaacccagtcctcagaaccgcagacgtggccctgcgtggc

SEQ ID NO: 232217 - DNA, 196 bp, Homo sapiens
  chr6:83903545-83903741
  hyper
atcctgggtccctcggggcagaggccagtgaatcgtaaacgtccggagccctggaatgcggcccaagcgaaaaggccaccgcggtgttgggggggggcggtccgcgagtccaggaccgaggggtggcgactggcgctggggaactcggagcccatcctgctggcactgcggcctctctcgccgcagcgtctggctc

SEQ ID NO: 232218 - DNA, 138 bp, Homo sapiens
  chr6:84221725-84221863
  hyper
gcgcaggatgctcccgggggtccaggcgtcccagcctgaggtccccatcctcgtgtgcagcctgggcgcctggtacaagtcggggtaaccctgaggcttgtgcatccagagaagctaggtccccggtggagactagct

SEQ ID NO: 232219 - DNA, 438 bp, Homo sapiens
  chr6:84417598-84418036
  hyper
gctgtactgagcggcggcgatccgatccgtgagcgtttggcccgacatcttctgtggtcgcgtctaccgcctcctcttctgcaggaaacaaggggagacggtccggctttaatccgcagaccctaccctccaagcacccaggccttgcctcctccagccgcgcggcggctctctcctcctccatccccaccctggcaccacctctcggagccagcaacgcgccaagccccgctcctgcgatgcggtccagggagtcttggccgtgagtagggccgtcacggaaccccagcgtgggctccagtcgcagcatcgtgacaccgtccccattctcccccggcccccacatagggccagactcaccccctggggacccccctgtcaatcagcactttccccgcaacctgacccgcgggtgctggactagccacaacgtgcgtt

SEQ ID NO: 232220 - DNA, 42 bp, Homo sapiens
  chr6:84418336-84418378
  hyper
gccgcccgggagctctgcggaggcgccggagtcttggggcgc

SEQ ID NO: 232221 - DNA, 568 bp, Homo sapiens
  chr6:84418918-84419486
  hyper
ccccctcccagctactcacacacaccgccccccggggccgggagcttaaaggcgagggggcgcctcgcgcaagcatccccggcaagccggcggggagaagaaggaggcggggaggccgacacccacccagccagcggctctccgctgggcgccgggccgcccctccgctgctggcgccgcacccggcacgcactgggctcgcgcaccacgcacacctgcccgccgactgcggggggagccctgggcgttgggggcgttggccaagacgggcgagtgggcttctcgggttctactctgtgaaggccaaggcaagggcgtcgtcgcgcgctgcctggcggagcccagccccttccccacactgtcgctgacacgcccgcctgtcaaaggctccgaggcccagatgagcagggcgattttaaatgtcagatcctgccggccatccgcgaccgtcacctgtgcgtcttcagctcctcaggctcctccgcttgtctcagttacaactgggagcccgggtgggcaggtaattctagccactttagtcttaaacggatactgaggtctgctgaag

SEQ ID NO: 232222 - DNA, 1072 bp, Homo sapiens
  chr6:84562706-84563778
  hyper
gccaagtcctgagtctccagcgaatcaagcaattaaccagtcacttggcctttttgcagaaatccacaaaacgtgtagactcgcttaattccatctcctcctggcctcttcacacggaaattggctgctcgggcgaatgttgtttttctccgcagccatgtgtcgaagggcgattaacattcgctcgacaaaaccctgtcccgggccatttgggagttgcacgcgttcacacccggggctcagcccggtgcgccttcacgcgcagcctttttgtttatgcggctagcagggagaggggcggagaggcagcgaacctctcaatgtgcagcaggccgcgagggctatataaagctcgggtctcggacctactggaactggtcaagattgcccgcgagctggcagcggccttccgcccagctctgcggcgtcatggagaacgcgggaggcgcagagggtacagagagtggagctgcggcgtgcgcggccaccgacggccctacgcggcgcgcgggcgcggactccgggtaggcttccccgcgctgctctgcgcctcccagcttcccccgtctctccctcctgcgcctccccagctcctcccctccaactctccatcccccactgcccggtgccagcgctcggcttcggtggattctcccgggtctgggctcacgtctcctctgcgcgccttgtgctcccctatcccgcagatacgcaggcttctggagaccctgggtggacgccggaggcaagaaagaagaggagacgccgaaccacgccgcggaggcggtgagtgagccacgcgtctcaggccgcgcctcccacgggtgcagaagatcgaccagggctctcgggacgcagggcctgagagagacatgcgagacaccgggtcctgcctctcgcttaacatcccgcctgccggtggccataaaggtgccgacgcggcggatgtgtcctctggagcgatgggccacaggcacccagccgggagcgaggctgctgagagccctggggttacattcccagcgggcacgaggaacactgggtcgtgcacgtttccactttctagaaggag

SEQ ID NO: 232223 - DNA, 70 bp, Homo sapiens; identical to SEQ ID NO: 200534
  chr6:84569263-84569333
  hyper

SEQ ID NO: 232224 - DNA, 157 bp, Homo sapiens; identical to SEQ ID NO: 200535
  chr6:84743222-84743379
  hyper

SEQ ID NO: 232225 - DNA, 651 bp, Homo sapiens
  chr6:84743595-84744246
  hyper
ccagccggtaaccacgggcgggacagggcgcccagggcggagcaaagcccgggcgctgggtgcggggcgcgtgcagctttggtcaaggcagggcttgcttgggtttgggggcagtctttagtttagaggggctagagaatggggtgggaggaggagaattggggtgtgaggacgcccacgggaagagtgtggaccccgtggagagcaccaagtttaaaaccttcccggcagcccgctgatgtgcgtgtggacgccgctgggcgtccgaaaagcctggaagcggcggcgctcggggcttgggtgggcttcctcccctccgctgggccccagcggccgaggcacaccctttcccgctggtgagaaaactttccttgctgcggccctcctgccgccttggtgccctgcaactgagagagcccccctgggctggggaaatgtgctggctcctggccccgggcgcgcctccatgcactgggcagggttctcagatgatgcctggcttgacagttgctcattcattttgtttggactggggagcctgctcgcaggtcgtgttactgattagagggaaataggggttttacactttccccgccgccccaccccgcaacccgcccccgctccccccgcccgccccgcgccccgtgcccc

SEQ ID NO: 232226 - DNA, 102 bp, Homo sapiens
  chr6:84937361-84937463
  hyper
agacttcagctgccgggttctggagtcacatgacccgggctggtcacgtgggccgtgggtttcccaatgcctttacaagcgaaggtcggaataaccacggct

SEQ ID NO: 232227 - DNA, 2317 bp, Homo sapiens
  chr6:85472293-85474610
  hyper
tatctcatgaaagcgcttccagagctcggctccctgcagatccacccgcggggcctgcggcgagggcagaggggtcccgggccgggccagggagcgcgccggagaccccttgggggagcctcccggtgacgccagaggggaagctccctgctggaagccgtcctcacagccgcctggacagcaaaggacagagaaagggaactggtgagggaaacagaggggaagccagccgcggagacgggcccacctggtggctgagaagaggaaaatgaccgggagaaaaggggaagctttggtgccatcaggtcctcctaaagaacaagccagtcgatagacacccacattctgcctgtcgaaggggcgcattcagagctccagtgtggcctgcttggtccccaagtcccaagcccgggagaggcgcgcgggcagcgtccaccccacccgctgggcctccgcagggccaaggccccagcagaaaaggcttcacgccgccgccggggtctgggacgcttgcccgacggagtcagaggagctcccgggtccagagtccccagtgcaaactccgacgcaacctgcgcctcgaagcgcaagcagcaaaagcgcccggactctggtcccaagagcctgggcctccttaagccataagcgtctgcggcgcctcgctttgggccttcttttgggccgggccggaggcatcttctagaaggctcttcagaccccgctttcgccaaactcccggcgccctgcgcttccagcccagcagagaaaagtgtgaaaagcaagcccgcggtcgccgtcggccttggcagagaaatcaagaggagaagggaagggaaccgctcaactacccttcgggaaaccaagtttccaaatatgccgccctcttcctggtttgcacaaacggtttagggcattcgttccggtttcagggtggggtatgccgtcgctcccctcctccccgccctgtgcttttaaaagttaggaaacaaaaaagagcacccattggctggaaccccaagggaggcagatgcaggaagcacagagctgcaccgctaggcgcagcaaacagccgcggccgaaggcgcgggtcgccgagtgggcggcggccgcccgcgaggcgagcctggaagcagtatctgaaccgtctggagggtgaccaggttgcgcggcgagctttgcgactgacacggccaatgcgctagtggctgagtggccttggccatgtagggacgcggcgcgcacgcacacccacagactcgcagaagttcaggttcgcgccggagagaagttataggcaggaaggggcccactcacccgcggctccgcgctccaggtctgcgccactccgagccggcccagacgtcgccccagccggcggcgggagcgcagcgccttcgtctccctcagaagaacccttttcgcccgcgccgccgccgcggctgcagcctccgtcgtccacggcccccgccgcctcttcggcgcccagttttcgccgcttcttctgaagctgttgctgcttctcggcgccgatcagcgcctccaccgagaaagcgtgcgccttgaggcttagcatgctgcacggcgagccccttcgcttctcggccatcccccccgccccgcgcccgcccgcccctctctcatatacactcacgcgggcacacgcgcgctctcgctcttcccccaccaaaaactaaaaggctctcggggcctcccgagatctgcccccttccccaccgcgggcaaaaaacagatttggcgtttccgctttctcgcttgtgttgggatccaggaaccggcgacgcgccggccaagtctcctttcctgggtctctctcgcgcgctctctcactgatgcactcctttgctcccaccccttccacctcctcctgctgctccgaggtctgcctcaactgatgcgccagagaggactaacatgggtaaaaaacactctgtggacacaaattagggattgtaattgaaatttgttgccttgatctgtcagcacttccaggcaggagagcggtgggaagaacttgctcattagtgtcaataaagcggcgggggcggagcccgggtccctgtccatcacccagacggccggccaatcaggaggcgccgactccgcgcagcccgcgcccacttccttacaaggtagcgaaaaaccaggagtgaaaagcgccgctgtctggcttggatgtgccagccacacggacgctgaactctgtctctctgacgtccgtagctgagtccagccccgtagtctccagctttcctcaccaggacctggaaaggcggaagttcccggctttaaactagac

SEQ ID NO: 232228 - DNA, 224 bp, Homo sapiens
  chr6:85475698-85475922
  hyper
gtatatatatatatatatatatgacaaaggaattttttcctctccctcgtccctcgtttaattcaatctccgcaaccgttggctgcccttttatctctgacttctctgtaaactttcagtagagtagcatttgggggtagatccgccactgagactgatccttttattgtagaagagaacgcgcggttcctggaggccggacaccacagcgggagtaggaacct

SEQ ID NO: 232229 - DNA, 266 bp, Homo sapiens
  chr6:85476132-85476398
  hyper
ggggtaccctaggccggtattacatcattaaaaagaagcgcaaatcccatttctgaagcttagccgaaggcaggcgccggcagggagagctaagaggccgcctagagagtttgggccgggagtgggagtgggacaaggcgggagctaacttagctggagtagacgccagaagaagttccgttcagctgaggtgccccgccccaatcccaggctctcggggaccccaagaagggagctacccggtgcttctccgagcggtccttaca

SEQ ID NO: 232230 - DNA, 553 bp, Homo sapiens
  chr6:85476714-85477267
  hyper
cggggactggtgtccgcattgccgaaaggctggaaagcagagcctcgtctacatccacgatgtttctagaacgtggcccttagaaataattcaagtgtgagtagggcgccgaggacaggacaaggcgtttgccccctagtcctgctactggctaaggagaatcatagcagtagagccgcaccactgctgccgccgcctccaacttgcgttaagttcggctcaggctactggattgggcaggaccagctaacccaggtcccgaggggcagtgtgtcacagactgcagcccactccaacctcggctcctggagaaggggcgtcgaatctctcttgggcatgggagggaaagacattccgagttggctgggcggagtggcagccttgagagtgacgagtgacagcaaagcctcgtcctagcaaggccttttaccaacagcgcggcatgccctttcgaggagagcgccaggccctcgcactttgcaagtcaagagagcaaagaaagcggggacagggcgcgtaatcgcaatgtccggtcgcgcgtgtgcacgtgtct

SEQ ID NO: 232231 - DNA, 484 bp, Homo sapiens
  chr6:85478297-85478781
  hyper
tgaacatcagcctacgctgagtcaccaggcagcgccgcacaaatgggctagggcttcccctttccgcgattcctgtccctactctttcccactctctttcttctctttgcacatacttttcttctcgcctctccttcggatctgcgttaatgaaaatattttatcttgtacaagtttataaagcctacggtagtaaattcaggcgtcccagggctcaaggactgcactcttgcggatttctctgccgggtctggtgctgcagatgcaaacccaggccccgtgaacaaagcgatccggagctgcaattcctccctgctcactcctgtggctgacttgcacgcacagacatcgcctccccacttgttggcgactgttttccattcttcccccaacaattcgtccttctcaattccgattagctgagactgaagccctctacaaaggacctgtgcagcccacggaacaactccgcagttctcaggta

SEQ ID NO: 232232 - DNA, 70 bp, Homo sapiens
  chr6:85481724-85481794
  hyper
agacagtgaggaatcgagcgtttcatattatgggtttccagaaagacgtgggagacgaatgaggcgcaga

SEQ ID NO: 232233 - DNA, 253 bp, Homo sapiens
  chr6:85482158-85482411
  hyper
ggaattcgtatttccgatgaagttccaaagctgaaattaaaatccagtctgggtttctgaagctcatattgttttggacaatatctgcgttttctttcatttagttttcgttctttctggttttggtgctttttcttttcttttcttcttttttttttttttttacattgccgaagacaatctgatttacagtttgactgagagttgcatttctgtttagaaggtgaaacgtctaaatcgcttagccaaatta

SEQ ID NO: 232234 - DNA, 1842 bp, Homo sapiens
  chr6:85483040-85484882
  hyper
gggaagctctacaacgcggcttcttggagttctgaggccgcctgcgcattcactttccagtgtaagcccccgctccggaatcccggctccagcccagcccgcgcccccttccctggaaagacctggccggccgcgcccccgaacccccgaggcgtgggtgtcaggctaagcggggctggtccgaccggtcgcttccagctctctccacctgttggaaagcccaggcccaagaaccgcgccagcggcggcagcacgtcactcggcggccacggggagtcagggagcgcggaacgcgggtttctgttgataagtgcaaagtacggccctctcggtgctaagtgcacagtaagtgcgaagaataaatacatcatctcccggggcggctgtctcgaaaacgcctctcagctgcctgcgtttcagagcccgtcaagggttatagcttagtgtgggcgtccgcgccgcgcctgcgcctccgagcgccggccgagaagggcgcgcagccacagccaccacatgccactagccccgcaaggcgcctgactcctctaaggggaactcgtaatgctcaccaaaagcctcagaaaccctggaacctataagaccgcaccaccgcgcaaacggtgtcccgggctgcgctcccgcactgcaccggcagcctatgaggcgaggccaacccggagactgcgcgcgacgggcgtgcgtgcgtgcgcccgcagattcgcttcaggcggtaggtgtggagtacctgggcagctccggcgggaatggtgttggggagaaggagctgtcattcatagtcttctacatatctgaataaagaattgctttttaaaaataggttcagagcctagtgagtgaaaacttaaaagtccccgcgaggagctctagttcccgggcggcgcggccccgactttctcgtcggtagcgctctggccttgggcgcccgccgctttggctatggaggtacagtggccgcgtcccggggagcctgggcctccttgcggctccgagcctccgcggcgcccgcgccccgactctccggtcccggctctctccaggcccggctgtctccggtccctcactgacttcgccagccgcaccacccacctctttctcccgcagacgtaaacccgaatacgccccggccttgggcctagggcctcggcctcgcctggctctacaggattcgggggcggggtaggccggcagagctcagctcgcgccgtgggtccacatgtttttatttcgtgaccctgaccgcgtcccggccataacttcctctgcgttacaacggggataataatccccggccggcctgccggatggtggcgggataatatatcccggtgagggaaggaccgagcttggcagagacacttaactgtcccactgtgtggctgttcacagtccgcccagatttaggggtgggatggggggttttcgggccccggcctgctccccctctccagaccccgcagaaaggggttcatgggcaattaggttccgctggactcgccgggctgcgggcgggtgagcgccgccgggcaccgggcgggggcacgtggcgccctctggggaccgtccgccgcactgcctggcgtcctgcctggggaggcgcagcctagcccagcacctcccgccgtctcaggctcggaggagctctgtacctggctccgcgctgacccctccacctggctgaaggcagcagccctgggagactctggcactctgggccggagcaggagctgtgccccatggcaacccagactgaaagggaagccctgtctgttgctctttgctgcggattcgagggaggccgtctcgagtcgctcagaagcgacc

SEQ ID NO: 232235 - DNA, 1327 bp, Homo sapiens
  chr6:86159088-86160415
  hyper
agctgtccgcgcgtcgcctctgttttatcactaaggttttaattgtgaataaacaaggaactggattcgaatgatttcttagtttctgagatttttttgtctaagcatcgtagacttcgtgcgttctcaacccaacaggaagcgtcacatctcagtgagcttcggctctcacagcccgaaactgcaaggagctcctctgcccggcctctctttactcctcctctctgcccctcagctcgctcatctttcttcccgccccctctcttttccttctttggttctttgaagtgatgagctagcgcaaccacaaaccatacattccttttgtagaaaaacccgtgcctcgaatgaggcgagactcagagaggacccaggcgcggggcggacccctccaattccttcctcgcgcccccgaaagagcggcgcaccagcagccgaactgccggcgcccaggctccctggtccggccgggatgcggccggtacccgctccccgccgggaacaacctctccactcttcctgcagggagctggtgccagccgacagccgcgccagggccgctccgggtaccagggtcggatcgggtgacgtcgcgaacttgcgcctggccgccaagccggcctccaggctgaagaaggacccgccccggccttgacccgggccccgcccctccagccggggcaccgagccccggccctagctgctcgcccctactcgccggcactcgcccggctcgcccgctttcgcacccagttcacgcgccacagctatgtgtccccgagccgcgcgggcgcccgcgacgctactcctcgccctgggcgcggtgctgtggcctgcggctggcgcctgggagcttacgattttgcacaccaacgacgtgcacagccggctggagcagaccagcgaggactccagcaagtgcgtcaacgccagccgctgcatgggtggcgtggctcggctcttcaccaaggttcagcagatccgccgcgccgaacccaacgtgctgctgctggacgccggcgaccagtaccagggcactatctggttcaccgtgtacaagggcgccgaggtggcgcacttcatgaacgccctgcgctacgatgccatggtaagacccgagcccgcgcccgggatagtagtcccggactgagagaggagccgggctggaaaagcagcggatggcagagtgtggcaagcctaggtccagggcgcggagagatgtggggataaagtgagactccggccagtgtgccagctggatgcatagaagtcccttggacgattcgtcttaaacggacgttattgcgcccccactatgagatgggag

SEQ ID NO: 232236 - DNA, 1516 bp, Homo sapiens
  chr6:86302912-86304428
  hyper
aaaattgcggctacgaactggaccttgaacactcctccgtcagctgacttgactgcctgtgtacagtctcaatttgagccgacacacggatttcacttttgaaaagcaacgaagatgaagaactcgttttgagaaatggatgagaaaaaggtagctcaggagacgaagcctcgggaaaggaggcaatcaaccccaccccaccggcctgtgcttccggcctcgacgctccgccgtgctccccgaggccgctcctctgcggagctcgctctccccactggtccccagtcccgcagctacgcggcctccgcacggttaagcagcacgggccgggcgtctgcaccttcggagaaaagccgccgcccaggctccgcgctgcggcgttacctgttaagaagcagggaggcggcgctgagacagagcagcaggaagcagaacagcgggtactggcggcagatctcgcgtcccacgtccagtcgcagccgctgcttcagcttctgccccatcgtccgcacccagggcaccatctccgtaacggcgaggccgagactgcgctactggctgaggcagaggtcaaggcgaccccccatccacacctcgcgtccccgccccaccgacttggcggcgcacacagacgcctaccggcagttagccgccgcaggctgaggtcgcgtccggctgggcccagccccacgccccccgccgcgcgtgcgcggccgcggtccccagccgaccagaggaacggccgtagaacgtgcccgaagtcgtcacccagcgcaaagcctctagcgtctcgccgctccgccctcctggccggagtagcgcgcagtcttccgtggaaactctgacaacactggcgaccggccatttccggaaatcaaaggacagccccagcacccagtaactgcctgtattgcggaggagagggaagaaggttgtagggagcccggaagaaactacagcacccccgtagccgccgggcgctgcctgaggggcaaccggagctcgtggagcccgctgggaactgtagtcttcgtgacacgaacccgcagagggatggagcgggtggtagcgcttccccgaccccgcaacgctccgcgcctcaccgtacactcggctccgggtgggagcaggtccgagctttgcgtgacgcctaagggagagggggataggaggacgcctttgagtcggtattttaaaaggggtgtgttgggggctgggggggtggcgagtaaaacagccctagaataaagactacaactcatcaggccgccaccccaccaacaaaatctcttttgcgcgctcacgggcaagggtagagctcaattcacgccggctccgggagcccaaccaaaatccgagtgcttggaagaggcaggttggcagattaggtaaaatccctcttatagagtctcatggggttttccctttactaattcatcacatttctaaatttttttttctgtattgtccgctacagtgagagatgcaggaagactattatcgcgaaaatttactt

SEQ ID NO: 232237 - DNA, 103 bp, Homo sapiens
  chr6:86388826-86388929
  hyper
ttgcagcgcagggcggcctcagcttaggaccgattcgagaagctgggctggctggctggctggcgctgggctgtagtgggcccccagcggaggccgccggagg

SEQ ID NO: 232238 - DNA, 863 bp, Homo sapiens
  chr6:87646717-87647580
  hyper
ggtctgtttgccattggaaccgcgtagagaaagcgtgcaaacccgtcaactgctcccgccgttcctctccctcctcaacccaggctcgctacagaagaagggagtagggtctgcccccttgttgtatctattttccccttctccgccagggctgtggccggcaaggggctcaggaggtgagtcccttgcccacacctccaaccccgctggcccggtttataacatggacagccctgccctctagtgtctgcaaccgggagccctaaggcgccatcagctccagaatttctcttttataacctaagcaagacctggagtacctcggagctgcgacctccagttcacaataccacctgcctcacacccgggctcatcttttcatcccacacccaccacccccctctccgttcacggtgtcccgggaggctgcgacctgcgtagatgatttagcagactgcccctgcccatgctcctgctcctgctcctcctcctcctcttccccgctctctccctctcgcctcctcttccagtccaggcgcccagactcggcgaagcgcagcgcctgccaccagcggtgcctcgggctgcccggcgcgccgcgctcccaggttctgtctcgccgcaccccggcgggcactggcgcgggcaaggacgctggcggggagaacgccctgggctcaacgtactccagaatcgaatgttgagagaagcagtgctctgatccagctcaggagaaaaaggagcgggttccgagtgagacttctggagccagctggacgtgccggtttgcccagtgcggcgcggctgcacgcaccgtccacaaggtgaggggcgcacaccttccgggacgaccttggcttccc

SEQ ID NO: 232239 - DNA, 814 bp, Homo sapiens
  chr6:87861486-87862300
  hyper
gtaggttgatggagcctcttcgaaatcaggcagcagtgcccgcgccacggcctctgcaggacagactccagcatccccggggtgggtttccggaggccccgctccccgccgcgccctggaaaggctccagaatctctcggcctggaggcccctggcggcctctgctcccaagcggggagtcgcagccaggctacagcgggcttgatcctcagtgctgggtggaaaaaccgcggcggcaaacgccgggcctgcaactgctgggtgtcggcgttgctggttcgcgggcggcggcggcggcggctccgcgacaacagaggacgcgagcaaccggcgcagcgcccagcagggccttggcggggtggaggggcgcaggctgggttagcggagcagagcggaccgatctggtgccctccgtggcccgaggcctgcggaccttctccgttctccggcccagggcgagagcggggcaagagacagcgccccgatagtggcgcacgctctccgccatccccgggcctcgcgctttcacctcgcgtgctggggcgagggcggggctgcggggtgtactgggtcgggggtaggaaggacctgccaggccttagccctgagctatccgtcatccgctaacgccgcgctccctgcatccctggcttggcccccaggctctgcgccgcttgtctgtagcagacacaactcagctcccttactgtcctcaggcccggctatttcaagaattccagaaaaagagtgcaccggcgtgtgcgggccggtgctgcccggaaaacccgtgaagcaggcacgcacggcccggatg

SEQ ID NO: 232240 - DNA, 40 bp, Homo sapiens; identical to SEQ ID NO: 200549
  chr6:88032035-88032075
  hyper

SEQ ID NO: 232241 - DNA, 251 bp, Homo sapiens
  chr6:88117490-88117741
  hyper
ctcatcattcccacgctagcaagttaatatccttatttacgagaacttgtgtttcacagtcttaaccacggaggttaagatgtctctgcctgaaattcctttgtttttaaagtttttccagcccatcttttgggggaaagaccctcaaagtgggaccccgccccacccccacctggccccgccccctctggtccggagccttccatctccatggttacgcggcggtggctgcgagcgcccaactgctccga

SEQ ID NO: 232242 - DNA, 210 bp, Homo sapiens
  chr6:88182399-88182609
  hyper
tcccagacggcaacgctcccttcactcaacttccttagctggcggggagacgcagtttacagaactacctccccaaccgaatttcacacacctgtcacctaggacgcggccgggaaggcctcccttcgatccgcgttctccccattttggggtgtagcttggattcctgagcccagttttagtgcgtggccgaccgggaggccggcgagg

SEQ ID NO: 232243 - DNA, 329 bp, Homo sapiens
  chr6:88299609-88299938
  hyper
ggactcctctgcgcgctccgggatccatacctggcaagcaatagcgcggcgaaagccgcacgccatgtccacctctacggaagtgcgccgcagtccgccagttccggcctcgccccacctccttatacgacccgcctccccgcgccggaaacccgccccggagggtgatgccagccaatcaaggagccgtgtggctcgccactaacctctgccctgcagccgcgagggcgcgcgggaaatcccgagtgcatctggaatacgcagagtcagtaagaccatggctacgtcctcgatgtctaaggtatgtggtggccgatgcgcactgtggc

SEQ ID NO: 232244 - DNA, 36 bp, Homo sapiens
  chr6:88410992-88411028
  hyper
cttattaggtcctcgggctacgaggacctagtgaaa

SEQ ID NO: 232245 - DNA, 308 bp, Homo sapiens
  chr6:88678313-88678621
  hyper
ctacttttagaaaacgtgtgcttaacttgtaaatgtagttttcagtgctggtaagaatatttttgttttgaataacaatcgcgttcttttccacagcgcgaggctctctgctgagtagcaaggagcccctcccagccggaaggcttttgcggtgctagcagcgcctgtctcagagcccttctttatcaacactgggctgcagggccggtttctgaagtacgtagtaaacataattgttctcacattaaaaagaagaggaaaacaaacaaggcgcagatatgttccgcagttttcgcagcactgcatgg

SEQ ID NO: 232246 - DNA, 66 bp, Homo sapiens
  chr6:88875377-88875443
  hyper
ccatacagctaagtaaacaccgacgcacgattcgctcacacggaataagaactccacgaaggacac

SEQ ID NO: 232247 - DNA, 429 bp, Homo sapiens
  chr6:88877003-88877432
  hyper
ctcagcagccgcggcaggaattaggggacatgctcgttaattgtttccactatcagccgccgtctgcctcctgtgtgcacggatcaaaccttaattggtctttacatttatcatggtgaattgcgaacctccaaacaagcctgggccgccgcttctgccgaggaggcgctcccctcccctccgcccccggggccctgcagggtgtgcggcggcggtcgtggttatttagacatctttatctctcgtgagttggatcgggagaggatcgcacggtttccacctgacggagccacgtcacgtcggccacaagggccccgtgctgggcgctgggttcggttcccggccgtcctcttgtggccgccttggcgttcattttatgacaccttgccggtgttcccagacatcatcccgcaccgctccgttttaccg

SEQ ID NO: 232248 - DNA, 70 bp, Homo sapiens
  chr6:89827458-89827528
  hyper
cgccgggcctcggccgtgctccgcggcgcggctgttaccccgcccctcctccgcgcccccaacctgcagc

SEQ ID NO: 232249 - DNA, 57 bp, Homo sapiens
  chr6:89827948-89828005
  hyper
atgtcaggagggcggaggccaagagggggcttgaggccgcggcggggacgccggggg

SEQ ID NO: 232250 - DNA, 810 bp, Homo sapiens
  chr6:89855491-89856301
  hyper
attaactaataaccgttctcattctgctgctgtgggaaataagcaacaacggaaaagtaatcgataatcttagagcataactcaaaggccagagcagccaaggaggtggaagagtcccgagccctgccttctccacagcacccccaaaaccccacggcggggcagagcgcctggtagggtacgagcggccgccagcgtttcccgcgcggcgccgggggcggccccgggactgggggtggtgccctgggagctgtgtggccgcgtgcgcgctccgccggggtcctggaggcctctgggcgcgtgcgcgggcggtcgctacctgcggccgagccagggagcgagagggcgcagagggcagcgggcttgggcagcatgaggcccggaggggagcggcccgtggaagggggcgcgtgcaatggccgctccgagctggagctactgaagctgcgctcggcggagtgcatcgacgaggcggccgagcggctgggggccctgagccgcgcgatctggagccagcccgagctggcctacgaggagcaccatgcccaccgcgtgctgacgcacttcttcgagcgggagccgcccgcggcctcctgggcagtgcagccgcactaccagctgcccacggccttccgcgccgagtgggagccgccggaggcccgggcaccgagcgccacgccacgcccgctgcacctgggcttcctctgcgagtacgacgcgctgcccggcatcggccacgcctgcggccacaacctcatcgctgaggtcggggcggcggccgcgctgggcgtgaggggggccttagagggc

SEQ ID NO: 232251 - DNA, 391 bp, Homo sapiens
  chr6:90120936-90121327
  hyper
aggtgtcctgacaacggtgtttgcgtggatcccgggaaatctgcggcctctcggagactcccacaacagcttggcgagcatccccccgccgccccgcgggtctccccagccactacctgggtgggcccctcccgcggcgacgcggggcgagactgacacccgcagctgccgacgaccctgccagtcacgccgccgccggctgcctttttttagccacgacatctgaccctggcttcaacagcaccgttctgggagagaggtcccagggcgcgcccgcggtcccctcccctccccaaccgccagacgctgcggagagcttggggtgaggggcgcgggaggcaccggctctgaaaggggcagaagcgcgcgctcctccagcccagacgcttac

SEQ ID NO: 232252 - DNA, 1005 bp, Homo sapiens
  chr6:90121507-90122512
  hyper
aaggcgccaaggggaggaaaggggcgcgagccgaggacgcgggggccgggcgctcacctccctcctctgtgccgctgtccggatcggcgtcggaggagtcgggcccgtctccgtagtccgctagccccaccagctcatcctcctcctcctcctcctccgcgtcgtcctcgtcctgcggctgcggcttccccagcacctggctcatcgtgcccaccggccggccggcccggggacggcgggggtcccggggtgggggccaagcctcctagccggccgcccgcagcctatttctgaagcggaggtttgtctagagctcagcggggcccggcggaagcgggggccgcgcgtcccccggcgggcggcgcccaggtccgggtcccgcggttcccagcgcgcccgaagccccctcccccgccccgcccgccggcggaggagtcagccggagcgcggcagttcctcccggaggagggagagagagagagactgcgtgacccgagtcacctgacacacactgtcacatactcacatacacaccccgcacgggcgcgcgcgcgctcgcccggccgcgggcaccactcggcggggcgctgggccgaggacacacatgcacacgcacacgcacacgcacgaggagaccggggaggcgcggggcccctgcaccctcccagactcacaccgacacacgccccgtacacggggcccccgggacgccggccgtcacccaccgcggctgcgcgccaggggcccccacgcgcctctccttcacgtggtccccgcacaggcaggggagggggcgccgcacaccctcaatgtcccccccgccgtcccactcccacacgcccgcagagcgtctaccgtgggcggatgcctcctgcttacagtcctgagctagggtcccaagcgggtggcctcccaacactgtggcgcccagatcccccaccccagagcagcgtgcccaggacaccctgtggacgctcaagagccccaggcggagaactcagataa

SEQ ID NO: 232253 - DNA, 95 bp, Homo sapiens
  chr6:90142740-90142835
  hyper
cccagggcctccgcggtgccacctctctctcgcgagggtccctgccgtgccccggctcgccgctgggaggcgctgcggcaccggcgtaggagccg

SEQ ID NO: 232254 - DNA, 113 bp, Homo sapiens
  chr6:90143615-90143728
  hyper
cggggtccagagagtcggcgtgctgtctggtttgggtccagacatcagctcacccaagcttatcttgggcttttaagtgtgttgcttccggtagatctcggggactggagggg

SEQ ID NO: 232255 - DNA, 97 bp, Homo sapiens
  chr6:90348368-90348465
  hyper
gaaggcagagaaccgccggtacctgctttaacgttagcgtcgctgggggtaagcgggaagcagccatgtccaccagaggtccgccggagcctcagcg

SEQ ID NO: 232256 - DNA, 149 bp, Homo sapiens
  chr6:90529581-90529730
  hyper
gtcccgccttttccgggagggaaatggaaacaaaaatctagtcggtttggatgcaggagtgatggggactcgcgaacacagcacgtggtgggacagaaagaagagtgcgttaggccggggaggaaagagggggcgtgtgagtctcagcc

SEQ ID NO: 232257 - DNA, 245 bp, Homo sapiens
  chr6:90539225-90539470
  hyper
cagcactttgtctcgcacgcagctgacagcagaattttaagataaagtattaaataaatgacagacctctcaaggcttcctgtctttcactaaaaagcttctctcaggccacgcccctacctccactcaggtcagccccttcctattgaagccccgccccatcgccttccccgccaccttacaccccgcccctctctcttaaagccctaggaagattactggagtttggcgccaaccgtgttttt

SEQ ID NO: 232258 - DNA, 972 bp, Homo sapiens
  chr6:91005911-91006883
  hyper
gccagcaaaatacaatgcgcctcggccgccgtaaacagccgggagggagagcacacattcggcgcggcgcggccgccggctcggctcccacccccttcccgttcctagaaaatgccataaaagcgggcagggcgcggggagggcggctgcgcgcccggcggccggggctcccttcccgcgccgtttccccacgcctccccgcccgccccgcgcgcccgctccccccgcaaacttgccccgccaccccgcccagcggcggggcccggggcccggggcccgggactcacctcgccggagaactttgcgtccttttccgcctcctcttccccgcgtcttcccggctcgcagccccctcccggcagccggcgaggtgggcagttcgtgggtcaccgaaagctcgcggaggggacgcgcatcacatggcagctcgttcccagccccccgagtgcgccgggaagggggaggggaaggggcgaggggaggccggggggaaagcgagagcggggcggcggcgggagtgggcaggcggggtggcgagggcggcggccgctcacgttagcgctgtgcgaccgcagcccgggcgtgcacggccgctgctgccgctgctgctgctgctgctgctgctgaggcggcggcggctcggcgctgtttgctccgcgccgcgcggcttgcgctctccccggaacgcccacactctcaatcgctacattgttgacattcggcgctgacgtcacccgctccccattcacaataactttacgggagccgggcagcgcacctccccggccgctggggcgcggtacgcccggcgactagcgtaagccgctccgcgaatggcgctccgggggctggggcggggggcgggggacgggggcgggcgcgcgcgctccgctggctcgcgggagggggcgcgcctcatgccgccgcagcagcagatctccccgctttgtgcggccgcgcggcccggagagc

SEQ ID NO: 232259 - DNA, 191 bp, Homo sapiens
  chr6:91297176-91297367
  hyper
gcctgcagccgggcgaggtggtgttgaactgtgttttttgtgacgaagcttacttttaagtttcatccctaaactaagttgacctgtttctttaagacggcttgcaaaatgtgttttcctcaatgtgggatatggaaagaagcagttgctcctgttattttgagctagtacctgacgctatgagaaattct

SEQ ID NO: 232260 - DNA, 100 bp, Homo sapiens
  chr6:91320248-91320348
  hyper
tttgtgtagtaagccgagttctttcttgactgtctgtttatttgggatagcccggcgagggggcgctggagattatgggggtgggggcggtttcttgggg

SEQ ID NO: 232261 - DNA, 174 bp, Homo sapiens
  chr6:91321128-91321302
  hyper
gcgcgccccgagggttgcaggcgggggctgcaccgggttgaagcccagtcaaccacacgtcccagggcttaggcgccgggcggggacaacgtgtctgcctgggctcagacgctgctagggggcatccctgtcggtgagaccagactcagacacgagggggcctgggctattaca

SEQ ID NO: 232262 - DNA, 3685 bp, Homo sapiens
  chr6:94126127-94129812
  hyper
gaaataaacattgcgagattactgtttattgccattctgctacccctcagctcagcctgggggtggaagcaagggacctaagcagacagcagtgatggccaagttaagagagaaacaaactaacaaattaaaacaaaacagaacccggcccgagaacgtttaatcggaagccgctctcaagtgatccgtgcgtctctcttctgctcggtccgctctctggttaaaccctcaaaagagcgcgtatcccttcccgctcggagcagagtgccgacctccctttgcgcccgcggaggcgcagtccctcggctcacccggacgctgggggccaggcctaggactccagggctccgcgccccggagtcctgtgggccaacaggtgatgggagaggggctagactgggggcgcgccctgacagacccaggcaacgaccgcgcgggcaaaggctggcgtcccggggctggggcggggccgtcggaggggcggggcgggggctgccagacgggcgcgccagccgcgccaagcatccattacgcctctgccagacctgggcactccagggagccggtggcgccctcgctcgagaaggagtcgggaagaggagagtggctttcgggaagaggagagtggctttcgggaagcatctcctctgaggaagaggcggcggcggcggcggcatttacggagagaaaaagtaagcagctgcactttgccttcaagcgtcagactctgacacgcgctccctgtagcgatgataactgaccaacccgagagaacgtgcacaaggaaagtgagggaagggggtttcttatcttcctctagccacccccaaatgccccaggaggcccggcacctgcttcaagcggttcccagcgctagcccttgggtactgcgggccgcctcggggcttgtgaactcctagaacgccagctcttggtcgccgctgcgccctagaggcgtcgccgcctagaagccgggcgcactcgccgcccgccagccacagatcaccaccctccctcccatcacccccgcgccttttatacatcacacttctgcatctaaagaattcaggctcttagaatcagaatcctcttcacgtagcttgcacccagaagagcaaagagaactagacattctggctgcaggaacctctccccctagtgatgcagttatttatagcccaaactccagcccgagtctgcgtgtgttcgcgcgcggggtttcgccgcggcggtgcaaacttttcctctggtccgctattccagaggaatcacagtatgccagggctgaaggtttctgatcgctaacgtcaggggagtagaaatgtggttttggaggggatgagcgtgcgtttctagcagatgtccgtccttctgcaaacgcgtaaccgccagcttggaggcacggggttctctgaatgggttcagcatctatacaggttgcagatgtggaaagtggggtcagaaggtcaggctgaaagaaggactagaatttggcgccgggtttgaggggggcttgagcgaactaagaggagtgcacgatgagaataaagaaaaggtgcactaagttttcagaaatagatgaatcaaggacctatatgtaagtcccctcaacaccccgcccgataaccaccatgacctaaatttcataacagattcctctccctctacacatcaggaataagtaattatttctcttctgcttttaacagatcgaaaaatgaaacttagatacacagcctgaaagaccaggggggcgacgggatgaggggggttggggatgggattgtgacactgctcaaaagcaagagacttccattgacagggtttatttttccccagctccaactacaggcaccgaaaggtattttaccttctgtcaaaggttcaaagaaggaaaacataaccatatacaggcgtatctgtaacagcttgccaaataaaacctgccttctcctaccagaaccaaccctcagggttcaggtctttggcaaggattgggcactcggattcctcaattgctgcactatggggcaaataattggggactttgagtcgcccaggcggcatccttacaaattgcacagctccagcccgccccctgcctccacggcccgaccaagcccgctgggctgccgctgcccccatgaccgctgggcccgacgcgcagcgcgcgctgaatggagacatccccggccctcgggtcgcgcgccgcacgccgcgcttcacctccgcggcgttattgttccgtgctggcggccgagcgccaaccgcaggaccgcgccgccgcctccgacgcagtgagcacttcattagtaacccgagctttccgagctcatcgaagtctcggtccctctgggaaggctccgggctcccgccactcgccggcgggctggcggagacggtaggggctgcatttcccagtctccaacccaactctggccgcagctcccacagaaggcgaataaggagacaaggaagaccgagctagagagagatgtgacccgcctgaggtactaagaaataagctcgccggcagttcctccaaccccaccccacccccgttgctgctcacgccctccagactgcccgcgccagaaatcccgcacccgtcggatggacggctccgggcacagggctgtaggcggctcggaacagccctggttcgcgctcgctggtccgccaggagcggcctcagcggtgagggggcggggagccggcgggggagggtcgcccggcgccggaggcgcggccggcagcgccgcggacgagctggcttgtgcaggtagacatctaaataaataagtcagaacaaactttgctttcccatcaccttaccttccttcgcagcctgcgcctcccctgtgtgtgcaaagcggagcagccagatgtagcataaaataatccatgaagggtaccgagtttgaaaaaccatggtgcatgagcaggttttattttaggtttcagttatcttgagtcgtggatttttaaatgctgtttgttccgaagtagcttttgttttattgtgctccttgcatcgattccccttctcggtccccgatcggctgctccacgtttagctttttttaatttcccccccactcctgttcgctcgcaccgtgtttgctgcctgcaagtctccgactgcagaccggccgcttgctccacactccaataatatcaattagggggggagggggcggggctccgagctgagagcctccgccactcgggctgagtggcaggcacagccggcctgccaggaggcgattcccagggccaaggggcgggtcccggcgaaatggccgccccggccacgggggcggggtccgaggcaggagccaatcggtgccgagcggagtcaggttgctggtccaggattccctccaggttctgagctcgcgctggatgttcagaggagaacgaggatggtagccgaggtgtgtgctgctttggacgctctgcttttagcaaccgcagctttcgcgtagcagaataaatccgagaataacgctcccaacttacactcttttctatagctgtactccgcgcgatcttttagaaaccagaggcgaagcaagccttctctcagctaccaagcacggagcccggacagtgaaatgagctgtgcctttaagtaaagtgtgttttacttttttgttgttagaacctccgcgggctgggtaac

SEQ ID NO: 232263 - DNA, 31 bp, Homo sapiens; identical to SEQ ID NO: 200562
  chr6:94130101-94130132
  hyper

SEQ ID NO: 232264 - DNA, 1412 bp, Homo sapiens
  chr6:96463090-96464502
  hyper
ttcctagatcattgagaacacggtccgaggcaattgggttaaaacgatatatgtataaatttctttttttacctcgttagctggtcaaccccggcggtaaacaaccaaggccacccctgcccaggcaacagctccaaggggcaggcgatggttgccggcattgagctccctgctggcgccttctggcgggacagccagtgccaaagagcgcccagggaaacaaacaccaatgggggactatacagatgtcatggatgcacatgtaggatcataatctgcccagaaagaggagagaaggagggcgacaggctgcggatcctggtccaggagccgccgcaatggagcgggcggcagtgtgcgcgcacaggtgccacaggccggtggcggggagagctgtagaggctgcctcccggactcagcactcgcaccagcgcgctgaagccgcggctgctgccaagcttgggtaacccccagcctgagccacgagaggaagagcccaaggaaagggcgcgaagggggaaggagggtagggtagaaggagggcgggggagagacccatcgcctcatcttacatttcccctcccaagctcatttagtgggaacctctgctgggctcctgcgcgcctccctccccaccccctcaactctgggcgaccatctccccctcttcccttgctcaccccccacccttcctgctcttccgtccctccctaccgcgtgcctcctcccctccccctcgcctccctcccctccagcggcagtagctgtagcagcttcagcgaagccggagatgggcagagagcgcgcgcggcgcagcagctccagattcactgctctcccctgcagctccccgcgcccccgccgctgtcgctgcctcggtgtcccccagccccagtcgcgctcttaggacagcgccgccaccgccgcctggccctgcctgcctcctgcgccgcgcagccctcgcgagcgccccggatggcgctttacccctaggaccggtgagtaggcgggagagtgcagggggtcgggcgtcaaagcttggcgcggagagaacatcttttggtttgggaggcaccccaaaccagctgctgtgattccccgtcctccaggcagagggtccagggagggtgttgctctgtggtccccaaggggatgtttgatttcaactccacctgctggcaacctgaacccctctccgtcttggggacagctgcctgcagctcgcagtcccgcctcaccttccagcccccaggctcccacactagcagcagtagatggccccgaccctctggtcaccccaaacagggtcatctctactgttactgtccctgcgttcccaccttatgccagtgcacaaacgcccctatctgccacccttcacccgatctcgcgctgacaaagccttctccaca

SEQ ID NO: 232265 - DNA, 149 bp, Homo sapiens
  chr6:96839753-96839902
  hyper
aaaccctccaaatttcctagcgtgagacaggcaccaagcgggagacttggttgcctggcaaccgcgctcttcacaggcagctggagtaaaaggaaccgtctggtgccaaacggcctttcacctgcttcgttaaagggaaatcagagaga

SEQ ID NO: 232266 - DNA, 118 bp, Homo sapiens; identical to SEQ ID NO: 200566
  chr6:96969409-96969527
  hyper

SEQ ID NO: 232267 - DNA, 113 bp, Homo sapiens; identical to SEQ ID NO: 200567
  chr6:97284791-97284904
  hyper

SEQ ID NO: 232268 - DNA, 126 bp, Homo sapiens
  chr6:97345804-97345930
  hyper
cgtcgccccctagcgctcgggaggccacacaccgcttctctgcccagggcatttaaaagggagcccctcccttcggggcgagtgacggctcccacgagggccgcttccggcgggaggtggcggggc

SEQ ID NO: 232269 - DNA, 143 bp, Homo sapiens
  chr6:97372842-97372985
  hyper
aggccggtgcctgcgctgccgtctctggcacctaacccagcagaccgctcaccccatcgggtaagccagtctctctccttgtaacctgttctgcagacctgaggaagagggtgggaggctgctggtgcgccaagtgggggcag

SEQ ID NO: 232270 - DNA, 151 bp, Homo sapiens; identical to SEQ ID NO: 200568
  chr6:97731282-97731433
  hyper

SEQ ID NO: 232271 - DNA, 53 bp, Homo sapiens
  chr6:99272075-99272128
  hyper
gggggcaggtctgcgaaaaagagaaacacttcaaacagcgctgcggagagtgg

SEQ ID NO: 232272 - DNA, 157 bp, Homo sapiens
  chr6:99272417-99272574
  hyper
caagtttcaaatgtcgccagtctttccagaagcccctggctctcgcaggactgggtgcaggcgcctctccgggcctcggagccccgccccgcctccccatccccacaatcccaaggctccaggctctgcagggaaccgcggcgggaattttccagcc

SEQ ID NO: 232273 - DNA, 1246 bp, Homo sapiens
  chr6:99272781-99274027
  hyper
ggacagtgtctccccgtcccgaaccccttcccgccacctcctccaccccccgccccgcattccccccggggcgaccctccctccacctgcggactgccccaaggaatggaaaacctgcactcagaagccaccccccaccccgcctctgccgtatctgctaactttgctaacactccccttcccctgccttgtaagtcactatttacgaccgcgtcgactcgcgctcacgcacgcctgcccttttctccagaagcctgaaagtggctgaattcaaacactgacacgtgaaaactctattctgagtgacttagaatctcccgctttgaggttttaatcttgatccgccggtcctgcccaaagttcagagcagctgtccgaaaggtccccgcatttgctgtccctaggaaaggtgaggctaggaggaagggggaggcaacgcagggaatgtgagaggactggggccacactgtgtatctaggaggaaactctgaatcctaatctcaagaatgtaagtctttgcgcagtttccaaatcgagtccatttagcagctttcttcggagcccgggtaccccaagtggcaacttaggaactgggagaaggaacgtgccaccaccgaccacctatcctggtgggaggaggtactgctcccccctactcctcccttttccctgctccctctccatcagcaacaggttgtcaagttgaggagacatcccctccaaactctctcactccccacttgtggccgaggcctgccctgtgttcatcccagacagtcaggcagacgctgagctgtccgcgtcggcgtgggcgcctgtggccagcgtattgtgagatttctaaatgtcagggcactgttaaggaaatgtctgacaaacctgtagtaaacctcttcacgaaggaaaggagggctgttgtcttggcttttggttgtgtgtccctcatggcccccaagaaaacaatttttctgttccaaacactctttggatcaagtttcgtccttgcatttctagtttaggcgtttctactagaaacgaatgtgtggtgcgttttggttgggcattacttgcaggtgtcttgccgcttaagtttcctggactgagacgttgactggtgacctaggcttgtttggggcagctgtaaaaggtccctgtaacgctccaggtctacctggggaccgcccaccaactccctggtctccaattatcattgttagtgcaaggtggagaacgagcttaattcttt

SEQ ID NO: 232274 - DNA, 67 bp, Homo sapiens
  chr6:99275314-99275381
  hyper
tacactgtccgcgccgcgtgcgggtccctctgctaggaccgcgccttcaacgcggaatcgctgacat

SEQ ID NO: 232275 - DNA, 477 bp, Homo sapiens
  chr6:99275581-99276058
  hyper
gtgcccaggtcctccgggcccttctcctcgagcccgcagtcggctctcagggaaagggtgccaggccccaggcggcacttttattttggttaagaggagggagggctgctcccaggcccgagggaggcgaactgagcctttctgtttggatttccctcctcgctatagcaaccagcagcatccggacaaaaatgcgccctccctggacaatggcccggcctcctgcttctcgccctcgtcttcctcccccggatcccagccaggacctgcctaggcgctcttcgaccacggaacatccctccccgccacccccacctccatcctttccatagcagtctctccccgggtcagtccagggcgctgggaagccttagctctcgctttctacccccactgatccccccacgcgggccgaggctaggacacaggacctcactaccgagttcgggggctcccgcaggggagttccctgcaggg

SEQ ID NO: 232276 - DNA, 1078 bp, Homo sapiens
  chr6:99276259-99277337
  hyper
gttaattaagttcccttccacgaactgagctccgtgcctattcattattctctccctctgacctagggcgttaatatgatcaggcctatgactcggccgtgttctgttttcctattttgcatttaatgctgggacccggctgccctagattaccatcgaaaactctcagaaaagacaagaggagccaggaggtctccctgctccaatctgcctaaggcttcctcttcctgcctcctcttccggccaacgtctgcccctatgttcccaggacccaaattctggaaacctgtctttaaaaatacaatcatctctaactttatgatgtccaaaagctgtctagaatgacagattcgaaactctgagacctagcagaagattttggcccacagttattacgactgtggttaactgctctccagaaaagcatctctcccgcccgtgcaccacctgctcccctccccgcccacccccccatccccccccaaccgccgtcctcccggacactaacgacacaattgttaagtgcacttgtacacttcagaaggatttgcattcgtgctgtgtgcaggcagaataagagaactgaagtccaacttcaaccaaatacgcctgtttatcccagggctggagcaacagccctagcccttgaaaatggcttcagtgaaatagctgagtacaccctcctcccacttccccagtccgcctctgtgcgcaggtgtatgttagtgcactcgtccctagcttgccttcctcttcgaaaattgctccagaggatgagagaagccaggagctctagcaagagcttcatcccagtacatttccaaatgctttagagctaaggaggtttctgttgaaatcactttaatttatcaaagagttgtcatcccctactggtggccagccatccacctgctttaaggctagggggagaaaatgcgagcgtgcctgtgtgtgcgtgtgcgcgcacacacacgcgcgcgcacacacacacacagacacctttaggctccattgttaagaggtcatttaactgttagtcctttgaaagtgaaattgcgggaagcaaactggaagccac

SEQ ID NO: 232277 - DNA, 4244 bp, Homo sapiens
  chr6:99278874-99283118
  hyper
gtagttctgttattcgaggatgtttcccctccactcagcgcaccccggcaagagggagtcggctccgtttcttcagacaagtccagctcagggtattgactgagtagaggttcctccggacctgggagaagctggggtggcgccagcatctccttacaggtgcctccatcctgtccttgcggaaggggcttaggacaccccgcagtccgcgccccgaggtggcgaggcccgcacgaatcgcctgctcagccattgtcctagcgagtgatctcgaggagctgtgctggatggagtgagggagatatcaagacaccttgtcagttcaaagcattttagcgttgtttgaaatcctctccacgtcaacgtaagcagcctgtgtatttgaacagctgctttgaacagtgaaagggaataaactgattcaaaacctggaggtgtctgcccgagacaccttcaacgtgcttttatgcgggcggagaatggcaggcagacgcgcggactctgccctgacagggtcagcccaaagaatgggccccagagcccggggcgggggaggaaccggtggagaggccccagtctggacctaaaaccagcgagagctcaggtttcgggagccccgaagaggtgccgcgctgggaggcagacaaggaagcccagggtgctcggaacccggcgttcgcgccaaccgggcccctggcgcctggaggggaggcggcggtagctcgtggggaggtgttgctcagagccgcggtgcgagcccagcctggcccgcccggtgattggccgcgcttgggggtgggggtggggtgcagagactgaggccccgggtaggctatttctttgtgtactcccggggatttattgggtatattaaaccctgttgggaacgtttcggctccttggccgccagcgaaatgagacggggatggaagttggagttgagacctgggaagtcaacgtgggaaggatctcagcattaatcgccggtgatgtcctatcgcagacaggaagttttgatgtacacgtgcagcctattcttgtcccctcacactagcgccctatgccgggaggagggcgggggtgtggggtggggtgtggagagaaagataagaggaggaggaacttttaaattgattcagagccaggccgcctcagttccttcgaagatgtgtttgaaaacttcattcttctttcgagtgtatcatcctatgggctgcagaaggccttgtgcctcgagaaatgtgaaattaaatccagagaaaagcagacacctgccccagaaaggtgggggagaagtatgagctgcttagcacttggacgcggcccttccccagggctggattcttctgtccgtgggagctctgagctccaggtccgcgaaaagaaaggcacgacatgtcaggagaagatgcggctggcgggctgtctgtgcgctccccaaggcccagggaaagtcacgcgcctagcacaggggacgcagggccgaagccgggagaaggcggttctgcccgccacccagccccttggctcgcggttgcggagccgcgggcaccagtcgctgagtctgcgcgctgaggctcggacttgttcattttttcctagctagacaaagttatgggattcctagcagcccccaggcgcgcggccagagtggccccgcgcttgcgctgggacggagcgacacgctgtgtgtgtcctcgcctcgcctcgccgcgcgggtgcgcgcgtggtgggggtgcaggtccgtcctgctggcggcctgtgggctcgcccctcccctatccatttctctcccccacacacgctcataaacacaggacacgtggaaattctcagccaaagcgtcttgcccgggcgggtgctcaacgtggtgatttataaacagctcagccactctccaaagagcatgactccttgttagtcatgatgaattttctggcccgctccagtctgctgtctggattcagatgctcagaggccccaaaatgctccctctgagcgttgatttggctgccctctcaagcctacgaccgccggcaaaaccagcgatagagcgaggggtgagaggtggggacgcgatccaggttccctggggtctgtcattcccttcccggcagtaactgttgattcgctttacagcgcccatgtacacacccggccctgcgtggcggtcacgccgctccagcctgggtccgcgcccaagttctagctaccgggcttgcaggctcggaaactcgcaggcggcacctgctctgggcggctaaagaactgatggcgcgacgcgcccgcgctccgtagagcggcgctgcgggtgcatggtcccatagtcttgctctggagttcactgctgaaagctgagctgggagcttggccagggagcgccaaagacatagactaaccccacccgctagcgcccaccgaagttactgattaggaaggttcccctggcatcagcccatttgcttcacacactcttcctccttcccaaggggctaacggaaaagttgcacctaccagcggtaggagcacggggaatcgcgcacgcaggccctccgcgcggcttcccggagcggcctttggcgactgcgccgcccctacaaggccgcacacccctcgccagcactccggcagcctcgcacaagacggagcccacgcaggcttctagttttctaaaccaaaaactgcacgcgccggcgtgtgaatctgacggagagacttttagagttttgtttggttttcagttcagaccgctacgctgtcagagcaagcaactccgagccttgatgggaatgacttacaagccgcggtgcgggctgagcctgcctctctcggggttctttccccaagggagtgggagacaattgggcctggaacctaaaaggaagagagcctgtgctagccgcggggtagaggggaaggagaagagctttgggccgaagtgtccgcacaccctggagcaagagacacttgtgcactgaaattctaaccgtgggatgcaaggagagttgaacaggggaacaggtctggctcttggctctaggtttaagagatacacactgtgtgtgtgtccctaggtgaataaaaatccgactcccgctggctcggtgcgacccagcttttcccttaccccctccgtttccccatcttaaagccctattgggaaacgaaagtggacaccactgcctcccgccccccaccccaatccaagtcttccaagtgtctgtggccgataagagcaccgggaccgcccccctgccggtcttctctgcctgggagacagatggggggcggggcccatccgagagagggcggaggaggccccgggtgaggaagaagcgggggggtgagaactgagagaatctgaatcgggaggcgaaggggacggggaggagggctaggaggactccgagcccgggggagggggagggagtagctctgcgccaatcagtggcgccggcctgggaggttgctagcggtatccacgtaaatcaaagggcgcggagccaatgggagggggcggagggggcggggcccaggcgcgtgccgctgcgagccggcgctgccaagagagcgggagagagctggagagagcagggagaggggggagcgccgagctagtcagagagtgagcgagagcgagaaggagggagaggaggagaaagagagcgagggcgggcgggaggcggcggcggcggcagcagcagcagtaatagcaggagcagcaacagaaggcgtcggagcgggcgtcggagctgcccgctgtgggagagagaggagacagaaagagcgagcgaggagagggagcccgaggcgaaaaagtaactgtcaaatgcgcggctcctttaaccggagcgctcagtccggctccgagagtcatggcgaccgcagcgtctaaccactacagcctgctcacctccagcgcctccatcgtgcacgccgagccgcccggcggcatgcagcagggcgcggggggctaccgcgaagcgcagagcctggtgcagggcgactacggcgctctgcagagcaacggacacccgctcagccacgctcaccagtggatcaccgcgctgtcccacggcggcggcggcgggggcggtggcggcggcggggggggcgggggcggcggcgggggcggcggcgacggctccccgtggtccaccagccccctgggccagccggacatcaagccctcggtggtggtgcagcagggcggccgcggagacgagctgcacgggccaggcgcc

SEQ ID NO: 232278 - DNA, 404 bp, Homo sapiens
  chr6:99283178-99283582
  hyper
cagcagcagcagcaacagcggccgccgcatctggtgcaccacgccgctaaccaccacccgggacccggggcatggcggagcgcggcggctgcagcgcacctcccaccctccatgggagcgtccaacggcggcttgctctactcgcagcccagcttcacggtgaacggcatgctgggcgccggcgggcagccggccggtctgcaccaccacggcctgcgggacgcgcacgacgagccacaccatgccgaccaccacccgcacccgcactcgcacccacaccagcagccgccgcccccgccgcccccgcagggtccgcctggccacccaggcgcgcaccacgacccgcactcggacgaggacacgccgacctcggacgacctggagcagttcgccaagcagttcaa

SEQ ID NO: 232279 - DNA, 274 bp, Homo sapiens
  chr6:99283797-99284071
  hyper
cgcaagggcgcaagcggaaaaagcggacctccatcgaggtgagcgtcaagggggctctggagagccatttcctcaaatgccccaagccctcggcccaggagatcacctccctcgcggacagcttacagctggagaaggaggtggtgagagtttggttttgtaacaggagacagaaagagaaaaggatgacccctcccggagggactctgccgggcgccgaggatgtgtacggggggagtagggacactccaccacaccacggggtgcagacgcc

SEQ ID NO: 232280 - DNA, 532 bp, Homo sapiens
  chr6:99290259-99290791
  hyper
ggtgcagcacctggacaaggcgggcgagtgtgctgccggccaacatctgctccttgcccagtcgcaaaagaggtaccttggccttgccgcgcaccccccacctcggggaccctggccgctgtcgcgaaggcccagacagcctagctcggccgcgcggggaggagagagacagggaaaggagcggggcactccctgcactcccagccccggccttcgctcgggacgctgccaacagcccctgagttcctgcctggaaatcagggattctctgcggctccccaggcttcgacgcccggacccccaggggaagggtcaacagctcggacgtcgagctgttccactctatcgcttcccaaggaagcgggctaggggtaacgggcacggttggtgggtttgcccccagcagaggctagcggtggcgattaggagtccagatgtcttgggtatagccgtcgccccgggaaagtgggctctagacgcaggagttggcaagccctctctgggggcacgcgtggctggggcagaggtgcag

SEQ ID NO: 232281 - DNA, 567 bp, Homo sapiens
  chr6:99291259-99291826
  hyper
gttccctagagaagggagcccgggagaccctctgggcaccccggcatctcaagccagagctgagggcccggaaagtgaggggccgcgcctcagtactggaggcctagagtccatctccgcgaactgggggctctcagggcccgcagaaatcccccttagccctccgaggcccctggaaggagtcgccccgggagaggaaatcactcagctctgaaaagcgtcgcaaacgggcggtgggagagttctaaagcggcctttcgcctctcggaggaggtgaggccgagctggggatgtgcgggtttggggcccagaactgcaccgcagggccgcagaggcgggaagctggccggagaggagtgggaaggcgaccaagggcagcagcaggggctcctgcggggcgcaggtctgtgctggcgccgggcctggcctctgcaggctcggcggagcctcccgattgctcccgccgcacccgcccgcggccactcacccggccccgcggccagcccgggcggggtcgcacgcaaacaaggatgcttctatttactcgcctctgcctgtagatttcta

SEQ ID NO: 232282 - DNA, 535 bp, Homo sapiens
  chr6:99292123-99292658
  hyper
tatttgcccctggaatataacgctgacccaaatgcagtgaactgcacggcccttgtggggccccaactttgatgtgggcctcggcttggaagaggcgtctgttatttattatttccctcccaccagcgtagcctggtctcccagcgccgtgcccgccgcccccgccccatcctgcgccccagatgcgcgccccgcttggaccagtccgagcagaggggggttccgaaatctgctcggacgcagcatcgctggccgcctgccccgctagttccccgagtgcgattactttttaaaggctcctttaagcatatttccgtgaatctgtttcttgtgctttaatgttactattaattgataagatcagctcatcaaacatactatttcgatagggaattgtaattaaaaccttaatcctgtttgagactttcttctctctctaaattcctttttcttatgaaaggggtgcaaagttcactacaaaaagtactataacagggagattaattcgttatctaaataacaatctttgctattg

SEQ ID NO: 232283 - DNA, 944 bp, Homo sapiens
  chr6:99292688-99293632
  hyper
tggtccgggaggcccttaaaaaagagaatatacaaagcagaagatctggaccaagccccaccgactccgatagacttgggagagcgaggggatccgcggtccgccccccttaaccacagtctgaggaagcttcagaagtgggtcctggccgtcccaggcgatgccactggggaagcgcagcgctagagccgcgggcctgggagccgggctcctccacagtcctctcccctcgcaaagggagatctgatctgctcagtctctaggtaaatattcgaccgattctgcttttacttttaatatttaaacttggattatcccgtctccaaatgcgcgttcctaacctttgccagtggctgggatgtaataaatcctggcggggccggggcgctcagcctccccaggtcgcggccgctgcctccctcccccgtcccgccccgccccgcgggccccggcctgtccgcccctcgccgcccgcagcgaaagccgcgccggaatgaaatcagcgcctccccgcagctgacggctgagcatcctgggcgctggcaggcgggggaggccgccctttatcccggctgaggagtcctcgggggctgcagatggagccgcggctacccggaggagaaagagcccggcttcgtggaggcagcagcccccaggcataggagggggtagcaagtggggccaggggccgggaggttgggcggggtctatggtttgtatgtgttgggtggcgggtcggggaaggtaccctttccaaacctatctcccctcctcgctagcccttttaaaaaggtggtggccccagtttgagaataagccccagcgtctctgaagccacgaggaccgtttgtgctcccaagtcaactcagtattccgagattttcttcttttctaagagcttcaccccctccccacaccctccttctttccgtctaacaaagtct

SEQ ID NO: 232284 - DNA, 772 bp, Homo sapiens
  chr6:99295650-99296422
  hyper
ccacacacgcctcccgtctagagagccccagtggcccagggccacctccagtccctggacttggaaatcaggacgctgtggatcccacaggcgccccgcgacatcctggagtcgccgggagtggcgctgcggtgaaagccggtgcctagagtgggcttaggggtcccattccactcggaaagtcctctcacctccccaagggccattctgccggcgcaatgtgggggtccctccgccactcgagcagagcctgcctaggccaggcacccctttgggtgagagcggagggcccctgggacgcccagccaggcctggcgtctggggagccggggctcctgtgtgtgtcgggcaggctccgatggccgaagcagggacgaaggaacggcttcgctgcgggaggctagagggctgcgcttccgccctcccggcctccctcttgccgcatgagcagcgcagggcctcctgggctgtgctggggtcaagagttatgaacacttcgtgtcctcaggagctcacgggggtgacgagaggcggtctgggtctgaagccgctacacagaggggagcagtggggcctcggggagcagcggggcctcggcttggcggctccccccgccaccccgccacctttcaggacccaggccaagccgcctcacgaagaccaggaagcggcctctgccgggaagccacctgcagcctatagtcccctccccaagcggccccagcccgtgctatctcctacatagttgccttccgaacgcctggagggccct

SEQ ID NO: 232285 - DNA, 183 bp, Homo sapiens; identical to SEQ ID NO: 200587
  chr6:99872772-99872955
  hyper

SEQ ID NO: 232286 - DNA, 355 bp, Homo sapiens
  chr6:99873214-99873569
  hyper
gaataataacatccgtttgtcatctgaagccataccatctctcatccaggtttgtgaacacgtgattgtgcggattgacatgtttcggcgccattttttttgtgggcaaaaccatctctactctggtcaacaccgggcaactgaaccattcctgcacgttactttttaacgtagctggcgccattcccgacccatctttatagtggccagaaagccaagaacgtaagtgttctacacatagggcgccttcaaattttttactttagcaacgtgatcttcctttaaggggaagtatgttccctcctagaaacactcccgccttggagaaggggttgagttcgcaactccacttaca

SEQ ID NO: 232287 - DNA, 219 bp, Homo sapiens
  chr6:99963448-99963667
  hyper
cgcctgcgttctgcgtgtccgcagagcccggagagtccctgataatctaagactcatagccaccgactagcaatttgttaggatcctgggccagcgtgcgcacctcggatgttgcaggagtccggcttaagtcccacttgttgctgggcaccttctgaaacagcctccgatttccctccgttaccctcctctgaactcttttttttttttttttttttt

SEQ ID NO: 232288 - DNA, 247 bp, Homo sapiens
  chr6:100016525-100016772
  hyper
gcggcggcgacggcgaaaggaagaggatggccccctagtctccttcacgccggccgacaacactcaactgtgcaaacccgttcctatcgacaaaagttccggcccgcggtagcggagggagccggaggggaggtgctgacccttggaggtgctgagattgaagagaactagtgttcacgagagctcgcggcggttggaaggctctcgcgagagcgtcttgagaattctggccgggggcccaagccgc

SEQ ID NO: 232289 - DNA, 664 bp, Homo sapiens
  chr6:100036480-100037144
  hyper
gagtagagaagtaacgactacactgcgcttcctttggagagagacactggagaactaaaaccgacccaagcgctaagcgatctgcctaatagagggaacgccagctgagaccagcgcaaggcgggcgctgggtggcgtgcgcgactgcaaagtctggcatgcccaggttctgctccttgggctcctgctgcgtgagccgatctgcagatccagcaaaagacccgagagcggcttgaacgccagatgattcctccctgaggatgcgccccaggcgttctgccctggctcccagccgcctcccggtgctccggggttcggcctcacacacctgtcgaccgcgtcggcccagctgcggcccaagcctgtgggactccggggagcgaggcgccccctgctccaggctgggaaccagaaatgcagcagggcctcaaaaagaaacaaaattctttccctcggggttgctgctgccgcacaaccttacccagcccgctctgcggatgggtcgtagattccggctggaagccggaggaagtgcatagagggcagcttcaaaagccaaggctgcgctgctttgcgcggggcttcttccctcgcgtgcccgcgccgggtgccggagcagcctccgcaagctgctttcatctcggtctgccggggcagggtcgaa

SEQ ID NO: 232290 - DNA, 304 bp, Homo sapiens; identical to SEQ ID NO: 43282
  chr6:100039288-100039592
  hyper

SEQ ID NO: 232291 - DNA, 1565 bp, Homo sapiens
  chr6:100050448-100052013
  hyper
gtcaccaccacttgcggaaccgcagcctcatcgtgagccattagcccagttgtttcccgtttcgcttttctttcctcagtttctccatgcaatctttataaatctcccctggaggagaagtgtccgagcgggtggaagtctgaacacaatgcaacctgagaatttctgtcactctctgcatatgctcctaagtgctttaatcccaattaggggcggctgacacacggtcctattcattcccatcagctcttgaatacatttgcctagaaatgaacttcacaaatagaggagctcctaaatgtgcccaacagcaaggaaaatcgaattgagtgcgggctcattcggcagcggccggcagagaagcgctgaatgtggaggtgccccgagacattgcaattcagcaacacgctcgctgacttttctttgcaccatgtcaaccgaaagaaccaagaaataagttggagaactccggttaaaaggcaacttgagagggattctgaatacttttattgagccgtttccaacggaggacttaaaaaacaacaaaaaaggcaccacaaaacccaccagcggcgtccgggctgcgtcctggctgccactttggagcctcccggccgccgcgcatccaccggccatgcaattaaggggaaaatggcctcatcgccggcgtgtcatctggtggcgttcccagagcccatcgccgccgccctattcagacccggccttaatgtcccacccgcgcctcgggggccgcgcagctggtccaagctgacccgcccgcccggccagcgcggacaccctcggggggtgcagcccaggccacctcaggccaaaattcggctactgaaagcggggcttgcaggactctctctgctttccctaacctccttcgcctcgggtctctgaccccgcgcggctctctgcatccccgggttcaggactcctccggccccagttttgggattccgcgttgacctaggagggaggggtgtttggtgagtcaccagcaccagggtctccaaggctgagcccgcctccccaacccccgggacaactccctcggtccccgtggggacctgaaactcaaggcctttgagcgacggtgacgagcagccccggagaagtgtggtctgaaagaagccgctcatctcagcctcaaagtcttaaggggctcctttcctctaggcggagccgagtcaggtcacacgtgctcggcgccggccgcattcccagctcttcgctcattcgcgactatgcgccaggcggggccgccccctaacgctgccgggttcgaaagccgcccgcgggtgggacttagctctccgtagcctgcctctcggagggccggcggctgctggtgagcattccagcctcgttagggcaacctgttaccggagagggagccttgcccgaacggttctactgtgggcagggagcaggaccgcccctaaaccgcctttccccgcacctcggtgtaggagagatttcgctttaacggagactctggacgcccatttcaagtcgataaaaaaaaaaaaaaagccgagtggaatgttttgattgag

SEQ ID NO: 232292 - DNA, 159 bp, Homo sapiens
  chr6:100052347-100052506
  hyper
agtctctttcttctcgcggggctgggaaccagccacaattggctatattaataaataactttcctcacagtcggcctttacatggtcctattgataaaattgttcgcgtgtcgttcacgctttttcactcattaaggagggccagggaggcgccccgaa

SEQ ID NO: 232293 - DNA, 164 bp, Homo sapiens
  chr6:100052536-100052700
  hyper
gcagtgctggtaatttaaactgggtgtcatcccagagtcgccaggccagaggttagagggacatgttcatggcttaaatttattgccctgactcttcggagcggcttcctctcctcctccccaccccccggcttttgccattcatgggccgctggatcaaagcc

SEQ ID NO: 232294 - DNA, 257 bp, Homo sapiens
  chr6:100055066-100055323
  hyper
cagacctctgcccactgccattcgcctctcagtgccctgacccgggaaaggggtacgagagaaagtggaggaagggagtgattgagtcgttacctgctaattctgccgggtggaaggggactcctattattctgagcaagtagcctctttaactgtgagagctggacggggtcgggctgagaggagaggatgtggccgagaggcgacagccctgggtggggtgcactgagcgctgtaggtgccgggaccattcgcag

SEQ ID NO: 232295 - DNA, 335 bp, Homo sapiens
  chr6:100055723-100056058
  hyper
gcccaaccgggaggcgccagggccaaaccactagctttgactcccacactccacacaccgtcgcgacccctgaccagagagacttatagcactcgcccgctttgggggcgtcccaggagccaaaggtcggcaaacagcgaccgggaaatgaaggcagaagtctggggtagaagaaaggactttggcttccttggctttagcttgccttgcttggagctttctagtaaaaagctccggtgtccagccagcgggacttgcacctcgctcctcctgcaatcacgccccccactacagtctaaagcggggtttggtgcccaccgcgcattcctctttaa

SEQ ID NO: 232296 - DNA, 255 bp, Homo sapiens
  chr6:100062743-100062998
  hyper
tttttgtttttgagagggcgccagatttgaaacagtgagaggtcccacatctggtgctgaaactcagagcaacagttcagaggtggcgtaaatctggccacctggagagctcgagtgccaccagtacctccgcaccccgggcctctggacttcttggatgagctcaccctgaaccgcccaggcggtctgctcttggtgttcagaatcacatcaatgcgaacgtcacagcgccttcgagggcgcagattttaactg

SEQ ID NO: 232297 - DNA, 501 bp, Homo sapiens
  chr6:100066683-100067184
  hyper
cggcgaaagaaccccggccgcttgggctagtgcggcggcggccaggcggagccggaggtgagagtgcgagcagcgtcctgtggcgtggcgacccctgggctcacagcctcgcgctccctgggctcacagcctcgggctccctggactcacagcctcgccctccctgggctcacagcctcgcgctccctgggctcacagcctcgcgctccctgggaataggggtttctggggtcttgttggggcagaggtgcgggagtctcgccgcgtttaggtggacagtccaggagtcctgctggagaggaggacctgggaagacccgcgatgccggcaggaggacgggagagtttcaggcgtaactggtctttgtggaaaccgcccgaccccgctgtggaggggagctgcggcacccgcgccgtgcgctctcgccatctgccgccttcccaacgggaagagggcagaggcgccggcgccatcgcgaggtcaagcgtgacccttggccac

SEQ ID NO: 232298 - DNA, 585 bp, Homo sapiens
  chr6:100441463-100442048
  hyper
atgaactagcccggcgcgctccagcggtctcggtcggggccgctgcttcccggaaagccactccctttttcttttcccacctgtgtttccattttctttgccgagtgtgaaaccagccggccacccacccgccccgctccgtctcgtaggtgcctccacagagccaaactttgtaccttctggggatggagggggatcccccagcaatcagacactaccggcgagccagccccggggaggggcgactggtggaccaggcgccagaccttcccgggcgcgcagcccacgggccctggggcgcgcccacgccagagcccggccctcgcgcggcagcccgcgggacgtcacctgggtgctcgcgtcctccccgcgcggcggacagcccgggcgcccttcctctctgcgggactgcaggtctatccgctaagcgcgcgtgaccaaaaacggctctcagcgggtcccagctgacggaaggtgggggaggagtgcgagggtctctgagacaggttgggagccagccccacctccatttccaaagcgggggtccaggcacaggaacagccaaacgcccgaaccagcggggtt

SEQ ID NO: 232299 - DNA, 400 bp, Homo sapiens
  chr6:100676760-100677160
  hyper
gaaaatctgcctgcgcccctagtgcccaaaacacttaaccctgaagtaccaggtgtccccaaccgcgggcaaacccaatcttggttcactttggcgtctcggaactgacagggctccgtcagatcttccgtttccctcctgcgcgtccgtgatattgattgacagcctctcccctcccaccctccctggcggcccagccaggcaggctgttttgtcagctgctccgcccaggccggacgaggccgcagcctgccagccggctccggcctccacaccgcgggagcacgccccgcctcggcctcgccgccgctcgggctgacactctgcctccgggcccggggagacctttccatctgcaaataacactggagaattcagactaatcggttcagcttccctg

SEQ ID NO: 232300 - DNA, 226 bp, Homo sapiens
  chr6:100729532-100729758
  hyper
ccatcatgaaccggcgtgcggagaccgcctcgccactgctgcattacaaatgctctttattaacagcgatctgtaatcaatgggctcaggctttttgccagagcccccaaatcagacaggcgggcccctgcgtcagggtgggcggagccacggggcccagctatcgagctgggaagagaaagctgtgttgtccctgcctgactcttgggtgcgatggtaaatcaga

SEQ ID NO: 232301 - DNA, 67 bp, Homo sapiens
  chr6:100902142-100902209
  hyper
ctgccagcccgcagcgacctgagacgaccggccaggtccaaccggtccttggcgggctttctgattg

SEQ ID NO: 232302 - DNA, 185 bp, Homo sapiens
  chr6:100902456-100902641
  hyper
tttgtaatattttcgttctcatctctaattgagactcattcaacttttctactttccaggtactgtattctattaacaaagaccctctctttctctccttggtgtttccccgttaagatctttggaggctttgccgcaaactttctctggtgatgcccaaaaaaataaaacgctccggactcttg

SEQ ID NO: 232303 - DNA, 706 bp, Homo sapiens
  chr6:100903676-100904382
  hyper
aaggcctcccaaagcggctggaagacaccccgaagcggcctcccaaccagaatgatctgaaaatcccccaggctgggctcgggataaatactagttctgaactcccggcgccagcctaggccatttgttgtttcgggtttcggcctcattagtatgcgcctacgagggaaaatgagacttccccacaggttaataaacaacctgtccggcacaggttaacaggagcctctctcgccctctcctgccccacccccgccaccttttaaggaagcttttgccttcccggaggtttgccttctctttctgttccccgtagaaatcttacgattgtgtctgggttaatgttttataagggactggctactctcgtctacctgccgggctttcccgatctaatatcgaaggaacctccccaagtcctagtaaggggtcccccctccctaaagtctcgaagtggggtagagaccttctccctggagcccctcgcctcctgccttcggtgacgcgctctagcacacccaatttcagttggcgagggggtaagctgagatttcgtttctgcacttgacctaccgcagaaaattcgcaaatcctttgattgtctgtttaaaatgaggaggaaaccagctccctttgcggcgggattacagtgggaacaagatctaaagattctcttgcaattcggcgaggccgagggaacggggtt

SEQ ID NO: 232304 - DNA, 158 bp, Homo sapiens
  chr6:100905736-100905894
  hyper
tgtgtgcctgcactcggcagtgccctgatctctcctgcctgctgatcccgggccagagacaccgcggccgcacccagggaatccactaatgttactgtaaatgtggggtggaggccgaaggtcacaccgctgtctgtctctctctttctctctctctc

SEQ ID NO: 232305 - DNA, 278 bp, Homo sapiens
  chr6:100905954-100906232
  hyper
cggagctccagccctcgagtttgggcttcccgtagggatagagcctgcgggccaacctggctgcccgagttggagccagccgcgaaaagacggcagaaacccaaggagggcggggttcggccagactaaaactgggggcgaaattcatgcagcgttcatgagacagtcctgcgtgacggccgaaaaacgtcaatcgatgtcgccctgggactccgggtcttcgaatgcggcccagctttggctatgccacctccctagaggcccgcgctggcgaggcc

SEQ ID NO: 232306 - DNA, 390 bp, Homo sapiens
  chr6:100911729-100912119
  hyper
ttgctcttcagtctcgcggcatttaaggtatctccgagcccctttgggaagagcaggaaccccagacaactctttcaaggccctgtgaagacaacagcatcagagcataagagatcagcggctccacaagtactcacacactcgtcccaattccaaaaacacggccggaaagggcctcagtgcgcctagccaggcgttttgggtttgtttttaaagaaacgggtaaatcggcagcgagacagccccctgcaaataatgctggcattccctcacccatgccagccgcatcctccagacccctgggaagttgcccaaacaacaaaatacatatttctgaagacccgcaagggatcttccgccgcggatccccgagtccgcgcccaggccggg

SEQ ID NO: 232307 - DNA, 969 bp, Homo sapiens
  chr6:100912357-100913326
  hyper
gttaacaggtggcgcgctcgcgacagcccctcgcaggctcccccgggggtgggaggcgccgcggcctctcccacaccaccgcggagctgcggggctgctgggcgggcgcggggcgtcttctgcttcacctaccttcagtccccacaagcggcagaggtttcgggggcgcccatctcttaactgttctcatgcctaccgtccaacccagcgacaccgccggcctctccgcttcccaccggcagagaggagcagagcattcccggctcccttttctggatcatgaattggaggaggggtgcgtggcagaaagaggaggatgcaagctttgggacgagtgaggtgattttagaatcctggtcctccgtagttgctacgaagccagttcactattattcctaattggaagccgaaaactgccccccgtaacttctttatagcttaagggtttagcttcaacttcactccggggccgcctctctcccgccctccctcaatgccactcacaagccccctcgcctcccattggcctggcgcggccaggggcgaggcgctcattggccaatagggctgagtgacacgagtcggccccgagccgccctccgcgcgcccaggctccgggctctgaatcttactacccgcgggaccgctggactcctaatgagctcagggtgccgggtcggcgctgtccggttgccgccgctgctcgcggcctcctgggccttcccgacgtcgtgcgcgacccgcgctcctcgagctccctggggtcgggtggttgagcgctcagtccagcgcggcggcccagcagaaccgggaacgtccggaggcagcggaggtcgggcctgcgggttaggtctaccggcggaggaggcagggttcgcccaaaggcccatcccgctggcagtcgctggccgacggcgtgcgcgaggccggtttggggagttattttctctttctcgtttctctgaaacc

SEQ ID NO: 232308 - DNA, 449 bp, Homo sapiens
  chr6:100914902-100915351
  hyper
tcaatgagccaagtagatgtcgtttaataaacaaagtgaatgcacgaccacgaggtgacggcctctcgctaagtcctcagcacacaactgtctgagccgcgtttaccgagagagtgaattagcatgacgacgtaacacctgtttttctaatctttgaacctaggttggagccggaacgctgctccttcactccccctcccgggcccagggacctggctttgcaccctccccacgaccccgcctgccagccccccacgcgccctgtagccggaggcgtgaaccgtgaaccggaacctcaggtgcctcccacgtgttctgcgaatttacgttcgcctctagcacgggaaattttaaatgaatttcttgaagctcagagactaatcgttttgccaatataaggagaaaagccccagaaaggaagagacggtcacgggcgacccactaacccc

SEQ ID NO: 232309 - DNA, 42 bp, Homo sapiens
  chr6:100917314-100917356
  hyper
gccaccctgggctgcgcagtgaggggccgtggacccgccccg

SEQ ID NO: 232310 - DNA, 125 bp, Homo sapiens; identical to SEQ ID NO: 200593
  chr6:101329394-101329519
  hyper

SEQ ID NO: 232311 - DNA, 301 bp, Homo sapiens
  chr6:101840315-101840616
  hyper
cttgagcccagtgcgcctggcctgttcccgcttagcctcacttaaatctcctcgcgaatctgagctggccaacttcctctgggggaaactgctaaactcagctccagttaatattgtagggctgaggataaaatagcaacggttttgaatagatgttgacttttccgacccagaggagcggaactcagggattgtttgcaaaagctaatcgtttccacagtgaagcagggagagcctggtgcgctcaccgccgccagcccctccctggaagccaagctgcgggaagactctgggactcagt

SEQ ID NO: 232312 - DNA, 374 bp, Homo sapiens
  chr6:101840993-101841367
  hyper
gcatttgctctatgcgctggaggtcggggtgggagggtgcgcagatcaagatctttttttgcgaacctcagggaaatgaccgtagttggactaagaggtccactttggagactaccagcagccctccaagccctggcagtggagaagtttcgttgctatggtttcggagaggcataaaagccatcacccagaagcaaatgtgtttgggctccttatatgtgttgtcaccacccaaggctaggcaaattcctcggcgctttgcatgcatcactcactccctgacagagcatcttggccttagtctccccatcccaggaggcgggtgtgcgctaagggagcgaagtccagccggaggcttcgtaacatccaagtct

SEQ ID NO: 232313 - DNA, 1185 bp, Homo sapiens
  chr6:101846692-101847877
  hyper
taatcttggcttcacgtcagaagctgtgcagcagtgcagtagaatagggcctggcaaaacctttgctagcaaagcgccttttgtgccgggctgtggctcgctatcgacatctcgtccgttaccaaggctgggtttcctactgatttccctcctcctctgctttcacaggctcgcgcggccggacattgtgggtgtgcgtgctggatttctcccggatgctctccgactaacatggatgtcccaccattccttgcagtggaaggttgttccttggcgcagtgagtgaagaacatgcagcgattgctaatgggtttgggaagcggagactccttcctctctctatgaccatgccgtgatcgtgtctgcggtcaccactcgacgcatcctcatttctacccgaacccaggagccgaacgctagatcggggaagtgggtgccgtgcgtgtgggcacagaaacaccatgaagattattttcccgattctaagtaatccagtcttcaggcgcaccgttaaactcctgctctgtttactgtggattggatattctcaaggaaccacacatgtattaagatttggtaagattccccatctctcttggttgcctggtatccgctcccaggcagccggatgtaaacaggcggttcgctctgcctggcggtgggctccgtggattctgatctgctcactgctctgtcgtctcctggggcttttaaagaactccttgtgctttcatttcttctcttctttatttttatttttagccgcgggagggtgaagggagggccaatgtgtggtagtggtctctgcattacctccccacagtagcttgccacggagatgatgatgacgatggaggcacggtcagccgccactcccgcctgtctcccccggcgccctgcgagcttggaggggtgcgcggtccgcgcaaaagtgcgcgccggggctgcacgcctctcagcttgcggggctggtgagttaacacctggtaactctttggcgagttgcgcctgtccgcttccgccagtgaccagggcagttctcacgtgcaaatgaaaggtactaacccttttgatttctttttccagagagccttttcgattgttttcaccgcttttccagtccctggtgcccttactgggatgcagagctttaaaaaatgttctaagattcgaggttctacttaa

SEQ ID NO: 232314 - DNA, 1289 bp, Homo sapiens
  chr6:101849705-101850994
  hyper
agcttggagttgcacgtggcgcagctgccccagtggtggagagacccgccgcctctgctggggaggcagcatccagtgtcccttccatcccccacccttggcgtggctaggcgccggcagccgccaggcgcctccgccgcggcgctatggcaacggcggagcccgcccaggcggccaccccagccccccttccccgctagttaaggctctgtgttatccttccccttgctcccgctaggactgtgattcgacccagcgtcctcctgtcacctcctgcgaggtgaggggcagcccccgcttagagtgctgaacccttgccacgtccctcgcctcccccgcccgtcttcagcgtgcgcaaccctcttccccgcgcttccctctccctctctgtatggcacacacaataacacacacatacacacacacacattctctcacacacactcaaacatagacacgcgctcgcgcgcactaagacacatgcgccctccgggtgcatttggcacagtgacgtctctctagtgctcaagaaaactttgcagttacacccaggagcgtctctgtcctgtttcccccttaacctccagcctcagccgactcccacttggctgcacaggctggcctgctcctctgcagccgctcagcaaacatctctgagaaaaggtatccggagcaccgaccctagggtgctgccccgaggctctatggcagcgacctgagggtcaaccaagggtcacctccaggcaggcgggcgagcccctgacattgagtcttggttgtcaccccgcctttgatcctgtgttgggacaacttgggttttcctgggtgcccacccggcgggcaaggtgcattttagagagtcagttctcctgccctaggtcgagccagatgttctctggccggcttttctgggagcagagcctgcgactctcccaggcaggcgtctccagagcgctggcgcggcgggcacagggcatccagcgcgtcccagcgtatgtaaatgaggcatctttgtttcgccgcagctgcgtcccggccttgcccgccccaggatagggtgaaggcgggactcttccgtccgcgggggtgtgaccaattccacggcctctaagctgaactgcggcggcggaggtaattgaacctttcttttgttactttagccggtccttctcttccgggcatgcactgaccccagcctgtacggaagtgcgagggagctcagaagccagctccggctgtgtgcccggctggcctagggttcaccgttcgggagccctcacatgtttaag

SEQ ID NO: 232315 - DNA, 100 bp, Homo sapiens
  chr6:105307822-105307922
  hyper
ggagcgccctgggcggagtcacgttgggggcgcccaggccacgccaacgcgggcgcagggctgagtatgcgggaagccacgcagcgactgggcgtactcc

SEQ ID NO: 232316 - DNA, 62 bp, Homo sapiens
  chr6:105388540-105388602
  hyper
tggtgccgccgccgcgccccgcgctcccccacccggctcagccccctcctccccgcgccccg

SEQ ID NO: 232317 - DNA, 1145 bp, Homo sapiens
  chr6:105388638-105389783
  hyper
agcggattccgtgcccggtggccgcgcgccgcccggctgttccgcgtccccttgccggctcacaatgtgctgaccctcccggccccgccgcgcgcctcacaggtctctcgacctccgcgctccctcaggaagtgacagactccaggccccttcctccgccccgtccttcgggactgaacgccacacacgtcctcacaccctctccccctctcacacccaggctagcgacgcgaccatgaggccccggaggtaagcagccggccccgcggccgcgcgagtgcgagcgtggccgggtgtgcgtgcgggtgcggacgccgctcgcggtcccgagtctggcacgtgagcaacgtcgaggggagctccgtgctgaggagcaggaagaaaagaggaggcgcgagcgccagggaggggcgaggactgggcaccgcggggaagtgacaggtctcgcagcaagttgcggttcggaagccggcgcgccgcgtctttccttcgccggccctgatttattgccccggtgctgccgctaagacgcgggcagtcgatgtacttccgggttcacacctttctctccccgctcggtgctgctgggtcggcgcccggtgtgggcactgcgttgccacagcggccgcccaggctcgccgctgcggttgctgccgggcggccaaagccggcttggagcgggagggcggggcggggcagggcgggggcgcaggccacgcgggggcgcagggcgcgagggtgcggcgcaggctggggtcccggcggcgggtcctcgcggccggtgccggctcgtctgggacgcacggggccgcgccgccagagggcgtgcgcacctccctttcgcgctccgcaagccgaactgctttgtaccgggcaggcgtcggggatcgtttttgctttggtatcggtgatgtaaattcatgaattaaaattaaggattttgaaaagaacggggaagaacgcacttggatttaggttgtttttgaaaaggaaaaaccaaagaggaaatgatacgtttgcaggagcattaactgactactgactggaacattggatgcgggtgctttgtgaagatttgtactccaaaaactttttttaaaaattgcacgttggtaaatattgagtgttttcgagtaaaatctaac

SEQ ID NO: 232318 - DNA, 117 bp, Homo sapiens
  chr6:105401023-105401140
  hyper
gcagagagagatcccgaaaatcgcccccagccttgcgtccagccctttctcgccgacgttttttcttgatcctccgaaggcccagggcgacgtttgccatcgcggcttcccgaaagg

SEQ ID NO: 232319 - DNA, 170 bp, Homo sapiens
  chr6:105401587-105401757
  hyper
ctcaggtctcggccgcctggggagcgacctgcctggagaggcgggttgcgatggcagcgctgggctacagaccccgccttatttgcggggaggagaggacgggtggagtcacttgccgcattgccacagcccctcctcctagttttaagaagaaccgaagcattgtttct

SEQ ID NO: 232320 - DNA, 568 bp, Homo sapiens
  chr6:105404584-105405152
  hyper
aaaagcgttaacatcggttgttttatttaaacgaccccctcccatgattttagtcaggcttgtgtgtaaggcacgcgtgtgcacatatatgactgcctttttttctaaatctatgattcacaaggtccctccattgtgtttaagtagaagcacgaaatcagcattctgatttatcctaaagaagcgttccaaattgtctttaagataacatgtttgagtttttcgtgttcattcataaattattttgatgtcagcatagatgaaatggcgattggttatctcttcctcttgccagccccttaaggatacgaggtgaaattagtagcaagaaagcatgtaattgacaaagtcacgtgtgctcagggggccagaaactggagagaggagagaaaaaaatcaaaagaaggaaagcacattagaccatgcgagctaaatttgtgatcgcacaaaatcaagatgttagattgatgcagaagatcactccgttccaaagggaaagttttcatctcacgagtttggagctgagggcccgtggggcaacatggccgaaggttaattttcttttcta

SEQ ID NO: 232321 - DNA, 219 bp, Homo sapiens
  chr6:105405553-105405772
  hyper
ctaaaccatcttcacgatttctctttcctcctcgtgcccgccggagagaatagtttcgctgaaaatttctctttgtcaatgggatcagtattaaatcagcaatatacaagtaaagtatcgcatgctgtaatgtaaaatgtggctgaaaaatggagttaaatgaataagtacacgtatgtatagaaacgtggaagttggtgtgatcgatagaacagtgtg

SEQ ID NO: 232322 - DNA, 44 bp, Homo sapiens
  chr6:105406225-105406269
  hyper
tgccaatagacgtacgataagatgtccttcggtatattgaaaga

SEQ ID NO: 232323 - DNA, 382 bp, Homo sapiens
  chr6:105585159-105585541
  hyper
cacctcgctcccgcgactccgctgcgggtctgcacacccgaggactcggtttgaaacgcccgcttatttattttcttgtcgcctcgctacaagattctatccttgtttgggcatgagtggggggcggcagtctcgtgggaccggcggcattcgtcgttcctccttacggggataattcgagaagtgcggtccgggtagggagagaaatcaggagagaaaatgagaaagagaatcctcgtttcccctcaaagttggacgacccactcgtatatctcctttttgggagattcgcccataactcagcacaaacagggaatagcccggaaagcgcgcgagttcccgtccgattgtggcgggggaggctgaacgtttggtccacacg

SEQ ID NO: 232324 - DNA, 234 bp, Homo sapiens
  chr6:105627228-105627462
  hyper
gggaaggaaactcccggcgctggcatgacttccccaggactgacaagggcccctaggaacggcttttctcccttgcaaaactggcctgtttatttcggctccagggtgcctggggccagagtaggacctgcaggaaaagatctgggaggaatattcgcccagaagcctctagggcatacgactcgcgttcttcaggggtcggcgcggataggaaccgcagcaaaggatccccta

SEQ ID NO: 232325 - DNA, 116 bp, Homo sapiens
  chr6:105628122-105628238
  hyper
ggctgctgaaccaaggcaactgcacgcctgctctctcacccccgctccacacacaccgtaaacaaaatgaagaggtaaatcaccatagtggggacgggaatattagggtgtattgg

SEQ ID NO: 232326 - DNA, 479 bp, Homo sapiens
  chr6:106429097-106429576
  hyper
gatgtattcccagacggatgcgggcggtccccgggcagggaccccgaatccggggtcgcagggtggtagagccggaagattggattccatctccgcaaggattgagaaaaacggactcaccgactgaactattccatctccaagttgtttttattttccactttaagcataagaacgatgagaaccaggagccaggcggccccgcgtagcggtgggagcgcaggtacccgagagtaccctctgggggccggcccggcgcgctcgctcctcctcgcctttccgggaaccgtgcgcaggagctcacacggcacgcctgcggccaggggcaatcgggttctcggttcccggagtcccagttcccggtttccagtttccttatcgacgcgattgttccgtcggggtcttccaaggggatccgaatggtggccaagtcccgctggggaaatccgcaggggtgcggcctgcggggcctttggggg

SEQ ID NO: 232327 - DNA, 1388 bp, Homo sapiens
  chr6:106441814-106443202
  hyper
atgaattgcagagtcggatacagctaatttgggggaatgtaagctggatgtcttttcctaatttatgaaacgtgaacgggggtaaggtatttatttgtacgctagttgaagtggggcaggagcactgattcctggacagtcactcaaaagctgcgcccaaagttttaaaaagcgcggggacggtggagagggaggcgaagagcccgcgctgctgggctgggctcgggtgccgcgctggggacgccgcatctactgagcggtcgccgaagacgccgggaggcgaggggcgaggtaagacgccgcctaaagaggcccgggctctcccccggggtcgttgttggaaaagcaaattccacggtgaactctaccaagctcagcgcgtacacagctagcggctctggattggactgcattcgcctaaattgcgtaattaaaaaaaaaaaatacaccactgccaccctacagcgacgcttccgctggaagacgagcggggacgcgtgacagcgcggggatagcttttctattacgtttcttgttctccgagctcgagcccccttttaaaaagtcgctcaccaaaaacggggtgggggatggaggtggggacgagaagtttccgaatgctgagttcatttggacgaggtgaggagaactagggtcctaacagcaggtccagaggactctcgagataggtttagagcccgtccttttgtctggagtgtcgcgggactccagaagtgggttgtgcaagacaaacttccagataaatctttgcccggatcctcctgcggtcaaagcatcagtcctgcccgtaacttcctaacgacatcttcttggagcagattccgcggcggggatggctgggtgtgcaaaccgaaaacagtttgtcagccctccagtcccgccgcgtcgggaatgcgagcccggccacgcggtccgaccgggtccggggacggcgcgcttgtcgcgggagcctcccggcttgcggagggcttgagttttttggcggagacagaggaaagcctctggtcgagaggattagagcgcgcgttttctccgccgagcacgctgcccgacgccgtcgcagccgcgcacttcccggttttgaaagccagagagatgagtcaagcgcaaaagctccggagtgacaatgcgagcttttggccagcctcatcctcctccccattcccttgccttcttttaggtcttcggttcgtgacaagtgcataggttaggcttgcacggaagagggtcggggcaggtgccagctcagggcacctacccggcgttgtcacgttccctttgggatcaatgatctttcataactaggctgggcatgttcgtgcagccctctgggcactctgggggacgttctcataaggctttttttc

SEQ ID NO: 232328 - DNA, 438 bp, Homo sapiens
  chr6:106534046-106534484
  hyper
ttgaaatacacatgcgaagagaggaagctctcggcggctgtgctagcaatctgggggaaagccctgggctcggccaggtggtgttggccacgttggccacgcccccacttcgcgcagccgagtggctaaggaaatcttaagcagggaggggaagccagacggttaacacagacaaagtgctgccgtgacactcggccctccagtgttgcggagaggcaagagcagcgaccgcggcacctgtccgcccggagctgggacgcgggcgcccgggcggccggacgaagcgaggagggaccgccgaggtgcgcgtctgtgcggctcagcctggcgggggacgcggggagaatgtggactgggtagagatgaacgagacttttctcagatgttggatatttgcttggaaaaacgtgtgggtacgaccttggtaaggaacttgaa

SEQ ID NO: 232329 - DNA, 708 bp, Homo sapiens
  chr6:106808610-106809318
  hyper
tgggtgctggttctgcaacccgcggccgtccccccgcatccgcgacgagggggcggggtcccacggcgcgctgagaaaggcgggcgagctggcgctcaggtgtgttcttccatagggcccgggcggcagagaggaccgcgtcccggcagtcggagcgggaggaggacaagacgatgccgctgtccccgccagcccagggcgaccccggggagcccagcccgtgcaggccccctaagaagcacaccaccttccacctctggcgctccaaaaagaagcagcagccggcgccgcctgactgtggggtgttcgttccgcacccgctcccggcgcctgccggagaggccaggtgagctcctcgcccgagccctccagtcccacctcctcctcctcctccttctcctgctgcgctagcccttggactcctgaccccacttggaggaggggaaagccccggggtctgtttcagtccgcaggagggtacccgggtccggaggggagcgatcgtagccgctggggttgacgaggttcctcgcggcttttggttcagaccaagcaccggcgagaggaacttgtgcccacgcatgtggcctttagtatgactgcaaagttttcatgcaggagcctcccgcatcagcctgctaaccagagcggcggggagtgagggttgttaccgtcctaaatgatggcgggaactctgctttggggtta

SEQ ID NO: 232330 - DNA, 637 bp, Homo sapiens
  chr6:106958125-106958762
  hyper
caggctgggctcgccgcccctgctcccccgctttcccaggctcgcctcctcctcttcctgcccacctctatgccccgcacctacccagtccccactctggcaaaccccggagcgccaccgcgcccattggcgggtttgcttttattggtttgttctgcgctccctcccgccttctggcgcgggcactggatgctagccgttttgctccaggagatataagaagcccaggttttcccccttcctgggagcgctgcggatcattcgcaggcggcccggcaccctcgcataggtgggccggcccctggggctccagccgtgcgaccccggaaccacacgtgtggcgaggaacgggtcccggggcggagtaggcagagtcccaagcgcatccttcagccacacctcctcggctctagggggcggtgagcaaaggcggtcacccctgcaacctcgcccgctacccccacgcactcctccgtgttcacatggtaggaactcccacaggcaaaagcctttccgatgcgctctgcagccgcgggatcactcgggtgtttgaacgctcgcgcgctcctcccattggagctccggctaaggcggggcccaggtgcttgcttcctccgagcttgcttaaggttttcat

SEQ ID NO: 232331 - DNA, 921 bp, Homo sapiens
  chr6:106959520-106960441
  hyper
caaacggacacaagcgaggagggctccccgcgggagaatccccgagaggcagagggcgagctccccgagagcggtggccccgcagccccccctgacgccgagctgtcacctcgctggagcagcagtgcagcggctgtggctgtgcagcagtgccatgaaaatgattcaccccaattagaacctctggaggcagagggagagcctttcccagatgccaccaccactgccaagcagctgcattcctcgccgggaaattcctccaggcaagagaacgcagagacgcccgcccgcagtccgggggaggacgcttcaccaggtgctggccacgaacaggaggctttcctgggtgtgaggggtgcgccagggtcgcccacccaggagcggcccgcgggaggactaggcgaggcccctaacggagcccccagtgtgtgtgccgaagaaggctccctggggccccgcaacgcccgcagccagccccccaagggcgcgtctgatttgccaggtgagcctccggccgagggcgcagcgcacacggccagctccgcgcaggcagactgcacagcccgccccaagggtcacgcccaccctgctaaggtgctaactttggacatctacttgagtaagactgagggggcacaagtggacgagccggtcgtgattactcccagagcggaagattgcggtgactgggacgacatggagaagaggtccagcggccgtaggtcggggaggcggagggggtcgcagaaatccaccgactcccccggcgcggacgccgagctccctgagagcgctgccagggacgacgcggtgttcgacgacgaggtggcgccaaacgcggccagcgataacgcctcggcggaaaagaaagtgaaatctccgcgggcagccctcgacgggggcgttgcctccgctgcgagc

SEQ ID NO: 232332 - DNA, 66 bp, Homo sapiens
  chr6:107077423-107077489
  hyper
caatccaagtactcggtgttgaagggctcagtgacaattaaagatggctgcgcccatgtaacatca

SEQ ID NO: 232333 - DNA, 74 bp, Homo sapiens; identical to SEQ ID NO: 200608
  chr6:107780253-107780327
  hyper

SEQ ID NO: 232334 - DNA, 130 bp, Homo sapiens
  chr6:107810358-107810488
  hyper
tggcgagggcgttcggggtccgggtgagcgggaccctacgcgggaccgtgcgctcccagaagctcccactcagcccaaccttttgggcgaaacccaggacacccagataagggtgcaggcggggtcacgc

SEQ ID NO: 232335 - DNA, 433 bp, Homo sapiens
  chr6:107810668-107811101
  hyper
cggggcgcggggacctctccaaggggtctccagcctccgcgcactctgcggtggcccccggagggggaaactattctggcagctcagtggggggaagctcgtccgggctgtggtttcctttccccgagaccccagcgttgcacccccgaggcggcaggctcagtcaaccctccccgggggacggcggccctctagccaggcgacctcaggtctcgcgacctcccgccgcccaaccttctcctttcacccccattcatttttcctcagcggctcctaggacgggctcaaaaaccaactccacacgcaacccagcccacctcgcggagctgagaagcagggctgggttccgagcgggcgccggcgcccctggcgtgtggcggggaggtggcggccgcggggggcgccgcgagccgcccgtgcccgccgcggatga

SEQ ID NO: 232336 - DNA, 112 bp, Homo sapiens
  chr6:108169775-108169887
  hyper
accgaagacaccacgtgcagtgtcttcacaggcaaagcaatcccagctgtgaatcccacggagcacctacctgctcaccaaattctggtggcagaacgaagcctccggttga

SEQ ID NO: 232337 - DNA, 58 bp, Homo sapiens
  chr6:108396125-108396183
  hyper
gcattggggtatccgtagccgaggctcgccagccggtgaccacgagcacccaccgctt

SEQ ID NO: 232338 - DNA, 535 bp, Homo sapiens
  chr6:108434832-108435367
  hyper
cttccaccaggggtcggctttgtttcttttttccgagactgatgcggctcccctactgccagagatcttagtccagaaacagccttttttgggaggtgtgggagatgccgtggtcagcccaagggcgagatgcgcctcggggtcggagtcgcccgagtggagactggacactccatgggggaggctggaaccccctgtgccacagataaatgctcgttctccaccacatgtgaggcatttgaataggagcaagtctcccgggttgggaatactaggaagtgctgggggacaggcaaggtcacggcatccaggctgcaatgcaaatgcctaggtagtgcgcacggcagcggtaatccagaatcctgcccaaagagggtcccgcaatcaccgcccacttccaggcgggcttggggagccgagggacttcgcctgcttgggtcagagcccaggaggtggcgtggtggtggtggtggacgggcctgagcgtctcagccctgacggtctaggccaggtttgtccgcggggccaagactca

SEQ ID NO: 232339 - DNA, 1229 bp, Homo sapiens
  chr6:108435949-108437178
  hyper
ccagaataatcctggcggtttagtcatcattcctaataacaaggatgttgctaagaacagaaattttacatgattttcatacattcagcccttccccccacgtgtcattaaaaaaaaaaaaaaggcttagcctgcctgcgatttccaacttctctttccacggatcgaccgcggccttggcaaggacttgagtctgcgttccagccccttccgctcccagcgcgcacgcagcctctcgcctttgcgtcggcgggttgctggttgccggtacccgctcagcagctaggagccttggggaaccctagctcttagcttccccgtctggcgaggccagagggccaagttgctcactgggctgtgctgagggataaggggagaaaagaacggaaatcgcagctacgagggctagagggacggcgcggctgcttgaggacgggtcgcctagcggtgggcgagtagggctgtgcgtaaaaggatctagacagacagtcgtgcgcccgcagggttgcaggacaggggcaggccgagttgtggcgcgtgtgtgtttgtgtgtgctcgcctccgggttgcgcgctttcagggctttggatgccggggattttgaggacccattcaaagctccgagggggcggaggctcaagcaagccagggaaaaggtcccctaagcctcagagcctgggctgcgccccagacaaagtgcctaatgcagagtaggctcttaataggtttgcattggatctaaacgaaagctagtgaaattcgtacatgattctaatgagagatgacggccaggtgttctcagcagcccctggccctcacggggcgacctgaaagttcccactctacccgagacgaaactcagagccgaggtgggggcgaaggccgggtaatgcactgatcgagggtgaggagggatgtttcatagccttttccgacatacctcacgacaaaacacctttcactctctatgagcaaaggaaagaagaaatgtcccacaccctctattttgacttcttgggaaacacaatgcctctcaaattgggcctgcgagaaaggtgtgacccgggagggttgtggggtcccgggaccttggccgggtgtcggtgacgggactgcctgaggccagaagataggttctaggtctcagtccacctggtgctggacgtcgaggaacccaaaactgtccactggaggcgccctgacgctttggtcaacgagggctgcttctg

SEQ ID NO: 232340 - DNA, 648 bp, Homo sapiens
  chr6:108438108-108438756
  hyper
actcccgccctctacgacgtcctccctggcccgggcagcccaactggggcggggacgggggttactcgggtcggatccccttttcttccctatctatcctacctccactcccgcggccacgcgaaggcgtctcacccacccccttaggggcacgtgggcgaatgtctggtggccgggtgagtggaacccgccgcccagtccttgcagcgggctctggtctagtgggtgaggatccctggggaggtcccaactccggtgcagcgtccgcggggtgaagggcgcgagtgcattcaggccccaagggaaactcggggacatctgcacagacaagaatccccaaggaggcccaggtcccacggccaaagtcctcgacccccaccaggctgtctccctctagtcctccccactcctgacctgccattcgggacggagccagtccgcgggcacccaagggcgcaagctggtacaaaaagcacgcgcaggggtgtgcctgggtgcgcaggagtatgtgtgtgtgtgtgtgtgtttgtgtatgcgtgtgcaggtgagtccagctgtcgtgtaaatgtgactctacataagcttgttgctgtgtaaatgtgttttttcttggtataggcacaaacgtgtgaacgttggtctaaatgg

SEQ ID NO: 232341 - DNA, 76 bp, Homo sapiens
  chr6:108439497-108439573
  hyper
agcagaaaggaatcgaggcccccgtccataatcgcaggtgtcggcgtggaaaggagccacgcgtgcacactcatgg

SEQ ID NO: 232342 - DNA, 1158 bp, Homo sapiens
  chr6:108439796-108440954
  hyper
tgcggggcccggagcgggaggtaccggctaggggcgcgtttctttcgcatccacaccccgcccccacccctctctccagggattttttttttttttttttttgtatccaggcacagctgggggctccctcaccacccacccctggcctccccatacagaataaagtcagtctgtatttaatggttatggcggatgtgagggggatttggcagaggcagaagagaggcctttcgctctcaaatatcgtcccttacgtcgtgtgagtctaccaacccaccacgacctcatattcttgtgcgggtgtctgactcgaatgacaagcgagctgattttttcagtacatagctgggaaatgtagtgagtgataatagagatttctctttcattttttacgcttgacttggttattgttgcttttcttttcccgtgattccttctgaggattagctctgacttccccactattggcggtcaaagtggccccgactcgggatgacaattgacggggatcaagggattgcccattctgtgcctgtaagaaccgattcgtgccagagaaactcatcaagtggaggcggagaataaagaccgttcgggggtaaatgtattcattgagaagggttctcccaaattgcttctaagtttttttaatgaaaagtaacgattgcggcaatcagcggctttttggcggattacaaatctggagggagctgcggcgctgcattgaaaagtgcccccgccttcgcaccgggcagccggttcacaggagcagcgcgaggggcgggggtccgatagcgggacaaaggcggggagggggcgagcggaggagggcggctcggggcgcccgggcgcgcatcgggcaggagacgcggaggtgcccaccccagcgcaggcgtggcagggcgccccccaccgaggaaggcgtggggcagggtgcaggaaggggaccgagggaggtctaccgcagcaccaccagcactggggagattccgggcatctggagcgaggaaggtgtgctataggggttgagtccatcaccgtggaagtccggggaatgggaggtgcgactcggtcccccacctctaccccgggcacggtggtgtcttcttttaaagacgtctcacttcgcaattggaatcgaagcgtgggccggtgtcg

SEQ ID NO: 232343 - DNA, 1232 bp, Homo sapiens
  chr6:108478326-108479558
  hyper
ccccatactgaccgcggtccctcacctgctgactgattgacttataaatctgccccccacccacttgtctgtccattgaaggcaaattcgccatcgggaacacagtagtttctcaataactatctaatgcatggccacccttcccaggatttagaatatcaaagggacgtgttctttcctcccaaatcacctgcctgcgcttcccccagccgggtgccccagccttcacctcggtccggccaccacctcatcccgcttcttcgcggcttccaggcctcgggctgggatctcagcccctgcctgtaggtgcggcccagagggtgcgacacgcgtcggagcggggcagcggaggaggggacagggacgcggcagccacacccgcatctctttcccctctcgggcatccccgagggcccttctgcctccagttccttgagcccccgaagccccccatgcggcaagagcgagtcgcaggaacaagtggggaatcttggccgcggccccctcccccgccttataaaaaagaaattgacttttgtttggagtttgtgaaaagtggggctcggggcccagtcaatggggcgccccgcggcgcgggctgagtggagctagcgcgaaccgctcagccgcggccccaattaatccgccctttgtgcggcccgcccggccgcccccgccgcagccgcaccagcggcccattgttcggcctcgccgggccgcgggatttacccttttcaaacagccggttttgtccagggcagttcgagcggaagtttctcactgacaatttgccccaaatagatagatttgtcagaagcgaccttcgggaaggaagcaaaaagccaccggcccgaaggttgggcccaaaacagggactctgcgtcccacccgcggccgcgccgcccccccgcgcccccggccctgcagtcccgaagccccgcgggggtccagaccactgcacctgctgagccagacactccgcggacctgacctccgttttacccatctgtaaaatggagcagctgggcgctggcaagccgtaagtccaagagctttggctccaccagcgtgtacgacgctcatttcctttctctctccccacaccctttccaaaaactgtaagccagaaaacctggccaggcctccgcgacggcgagaaacggtcttgaaggtcggtcggtcgccgtaatgcggtccggatcgtgcacgtgctgtttcgccactgccctccg

SEQ ID NO: 232344 - DNA, 395 bp, Homo sapiens
  chr6:108484808-108485203
  hyper
atggtagccccaagtttctacgccttaaatccgaggtcccccgtggcctgcagcagctttgcctgagtagaaggcagcccgcactaaggctccaggcttatttgggacctggtgggcgacggggcctcagcccctcccgcctaccctggagcttgttgccgccgttaccactgaaccagtcatgccagaaagtcatcacgatgatttcagaactgtattgtgatttatgcaaagcgcgccgataattacagccgggcgcacagaacacaggatgcatatgctgcgggtgtgtgcgcgcagtgttgtgcctttcgccagggctgaatggggtgtgtgtgtattccgtaggcatcttcttgacaccatgcttgatcggggactggtgacaggaaaaa

SEQ ID NO: 232345 - DNA, 2005 bp, Homo sapiens
  chr6:108485516-108487521
  hyper
gaaccccataatcgcgtccgcgttatgggggtggtggtggtaggtggctgaagcaagtggatttctggcgtgaaccagaacctgaggattccaaacggagcctggcatcttattgtgtttctcaaatcctgcccgaaattcctcccctctctgggcgccgagttcgagaaagcgctacgccgccggtcgggctagctccacaagcggctgtacaagttggctgtcaaaaaacgctgatttctcctcctgtcacctaataaacccctacgcgcttatggcctcgtcccacaatcccccaatctcgtcccaattcgaaaaaccgaggaggagggaataaactgagagataaagatccccccatcttgctctttccccgggaccccagccttggtcgcggcgccccactaaggaggacacaggctctggtgtgtgtggtgtgcgagaccccgagctcgaggccgagccaaggctgggcagaaagttgcaatcacgtgctgtcggagcccactggagcgcacagcccgctccccctgggacgcccaggcggaggacctgctgcgccctcccagggctcgggggactccagcattcacttgcacgcacaggcgaactctgattgaaagcccgggatgacaccgagtctggagaaagagggaccggggggtgggctggcggaattgcagagcgccggccacagctcccctccccgcgaacgtcgagcggagggcgggaggtgtaacctctgacctctggccgggtccacgccctgaggagggactggcaagctcttgttcgacaagttcaagctgccgagagagcttaaatagaattaatctcttagagatcggggatcatcgctccctcggcatgcgctctcccagcgccgcgcacagagcaaggcgcgagagagctcaggaatcgcgggaaggcaagcggaatggggagggggtaggggatgagggcctctcttcactattcctccgcccggagagcgggagcccgcaacgcccgccgaggacgagcggcgggagggaacgctctgccctccagccgccccggtgcagataatggaggcgacaagagattcgctcagcgtcggatgggccagctctgcttggggaagctggcggcatcctcccctcggctggtgcccaaacccactgcgcgaaggccgaaggaacgcggaacctccagaagaccccatcctcagccctgactttccgtagatatgtgcaaaatgagtaaattactcacctcgggccagatccaagttttacccaacagaaggggcaccggaccaagaatgaaccaactcacatggccatgtccggcgcgcacaatcacacgccagcacacagccacccaatttcttccgcgaatctatctggcactctggagagagggggaaaagcgttttgagaaagccccgtcacccctccccttccttcttgccgtgaaatatacgaattcatttttattacgagccgcaccgtcctcaccatcacgcacgcacagagccacactcccatattcacactttctaactcgtaagctccgacagcgcctgcattttctttgggagccgcttggaggttcattaatatcattagcatttaaccccctccctcttcccatcccctccccgcacatggctgacgtcagaccccgccaggagttgggggaaaagctaagtgggccagggacgccctattcccctccccgcggctgcctgtcagagcgcttctggagatattacaggggacccagcccgcagcgacaggcacaaagtcacggggtaatgaacttcggggacccttcgccgctgcgtgcgcggctctccccggaaacccggacctggccgcctcttccctcggaagatttcccagcaatctagttttcccactctgcgcttgggttccggcagcgcggagcccgtctgcctctgagactgcggtagtgttttccttctttccttgggagaccagcggtcggcagagattgccca

SEQ ID NO: 232346 - DNA, 1138 bp, Homo sapiens
  chr6:108487791-108488929
  hyper
ggacgaattctgagcgcccagggagcagcgcagcgcgcgactgacacccacctgtcccgcccaggagccttgcaggctggagggcagctggagagcggcggcgcccggcggcgaggcgggcgctgccggccgggactcgggcagcgcccaccaaccgctccgccccgggacagccagcatgagcaagccagccggatcaacaagtgggtacctctcgggccgccgtggggcctaggcgcgcagcctggggcgagcgagcggggaggctgggggaggtcctgcctggagcgctgcgaatctgagcccctgagagggattccagcgggcgtgtgcgttcggcccagacctgtagaccgtgagttggagcatttcgtggagaggggagagccgtttcgttgcctctggattgcttgatcccccctgtctggtgcggtgagaaggttacgacccgcgcagcccaccagtcggatgagttgtctccatttagccgccaggtgctggatgggggggccatgggggcgggaactgggccgcagctccaggcggtagcacaataacacactcgctcaaaactccgagctccagcgcgcaaaagcaactctgtgcaaagcggattttgaatggaatgctttgcaccccgtttctagctatttcaaataatcctgcaaactgggaagcagaaacaatttaaaagtcacattttccttaatcctaaatccgcgtaggtcataactggggaatttaaagtatggcgaaccactctagcaaagagaggaccaaatccctaatcccaaggacttttcgagccggagcccagcagaggcaggagtgcgcggcctgctccctccgtgcgcttctctccttcctcgaacttccttagctgccggctctccgaacgccaggccgcagctgacctctcaccaccccgagactcacgagcgcagggctaagtgtgtgtgcgagggcatttgcttgcaccctgcctgcggaacccaagaatgtgcaggcccgagccagcgttgagcaggcgcggtcacggtgctcagatctcccgggggcatttcagttcccgccatccagtggcccacggctgcgggctccagggtctgaggctggggactaccgttgccgccgcagt

SEQ ID NO: 232347 - DNA, 1162 bp, Homo sapiens
  chr6:108489390-108490552
  hyper
cccgcattcccgggcgtgagtgtccttcccaggaggctcaggaggccgtttctgttgcattctgagcctccgttgcaaaaactgaagcccgtgggtctcggcaggcctcctagctcgctcgccccgggacaggccctcgcctacacccctggaagtaaggagccccgggctctttcgtccttttcggggtgtggagcccctggggcccttgaaaggtgaggcctcagaggcgagggaggggtgagcggggagctctgcccgcctgcggctgcgcccccgctgtggactaggaggcaggccaaccctccggactttgggggaaaaaccacagcgggctccttgcggaaactttggccgttctaacttgccaagagcctgagtgaggccttggaagcctccagccccggctcaggtcgggacgcggctgctgagctttctcaggcccgcaggacagcggcccccgccggtggcgccgctgcatttaggccctttccagaccggtggcggcagccaacccgagacttgcgtccctcgggcccggggcagctaggaggtcggcgcgcagcgggccgggtcaggactgggtcgagcagacagagctgcagcccccgccttgcccggcttctcgcggctggagagcagagcgatgtcacccggagccccgcctgggtggtaacgagaccctggccagtcacccctgcagcccagactaacttctttcaacagcctctgatggtaattacagtaatcgaagctgccatatatctttaggcaattatgacacacaaaaagccccgaggggaccccctggcgagggaagttaagaacggttttccagcttcaggaaactccggctcgcctcacgtcggagctcgctcggcttgctaaatgagaggagctttgcaacggggtcaaccagcttgtctcgtgaccccaagtcaccttaacgtggctgggtggcggagtctgaggcacaggcccgctatgccccggaattttcgcgtccctccctcctgggccccgccccagcccggttgcctgtttctaatctgccccgggagccgcggctcagaggtctgctcagaggcaggactcgcactggtggtggcctagagggcaacagtccggaagctcgggcgggggaatccgaggaggggccccc

SEQ ID NO: 232348 - DNA, 541 bp, Homo sapiens
  chr6:108490821-108491362
  hyper
tgagtgcagtgcagcggagctccagacccggttcctgagcgaccaggaactcccttgggcgcagtgacaggcccgaaggagtggaggacaagacccgctgtgcccttgcctggccctctccagcccctccctcccacagcacaatctcccctcccgccctgtgggaggggggcgccgagccggtggccgccgcgccgcgcgcctcccctgcccgcctttgtcgccgtccgaattcccatgctactctttttgacgggtcactggtggctctataggcaggtgctgccgcggggttgtaattacccggccgagcctggtcgttaccgaacaccccctcacccccaagcacggtcccccgcgctctccttcccccaccccctccacctgagacgagtctgggacccacggtgcaagctcgcccggacgcctcgggttccaggagcaagtttacacctgcggtgcctcgaggccctccccgcgccacgccctcacctcccctactcccctcgcccagacgttccactgccgccccttcccacct

SEQ ID NO: 232349 - DNA, 397 bp, Homo sapiens
  chr6:108491987-108492384
  hyper
cccgaaccactttgcggagaaaataattttttcctaaaagaaataatttctctaaagcgactcaccaagcattttttaaataggtaaagcgaaagttggccaattaccactacccttattatcattaataatccaagtattagcattacaataataatcctaataataacaccgcccggcggagctcagagaaaactcgattgccttccagctgccatccctggttccagccgtgtttgtttttcttcttttcccttttacatttcaagtttgtctcctcgcgcgctcactaacaactttctctgttaaatgcaaaagcgaaggagggaggcggccaaactttccgcggagcagaaaggcagtggagggccgcactgccgcccgggcctgctgtcat

SEQ ID NO: 232350 - DNA, 83 bp, Homo sapiens
  chr6:108492638-108492721
  hyper
ccccgtctttcctgcgatttcaggccgcattttagatatcccctgcaaagtgtgtggcgaccgcagctcggggaagcactacg

SEQ ID NO: 232351 - DNA, 274 bp, Homo sapiens
  chr6:108495725-108495999
  hyper
gccccgcaggcctgcggggtctgccaaacccggctctctaagcttcacctgcttggagaaggacgtttcccccttgtccgctttcttggggtccgggactggccctcttgaagtagcctgggacgtcccagccccttctcgatctggccctgctcatgcccaaggccctcgcgttttgcaggcccaggctcggggctccagggcctgcggccgggcaaggtcgcgcctccacaccgtttccccgcccgggtgccggctccgggtctccagccta

SEQ ID NO: 232352 - DNA, 1639 bp, Homo sapiens
  chr6:108496290-108497929
  hyper
gcaggagccgctggcgacccctagaattccccagggcaagacccatgcccacatcaggaacttgcgccccacagtcatctccacacaggcagcgcttggggggaccccactctccaggggaccggcgcgcattttctgcctccggtcctaatccctctttgcagcccttcgtggccacccttaagcctgctagcctgccccaggatcttaaaatctggatagtctcacggggaggagatcatacaggctggaagttcgcggtgtgttgaaaaagggagggcagagacgcgaaaacgcggaatttccagcccgtgtgcaaattctccaagatgccaaaatcagtacggccattgggccgatgtgagtccagggccttctctctgttctacagaaaagagggaaagggggctggagaggcagggtaacgcccgtgggtgcctcggacacccagctctcccaaggctcttaagcgcgcaacagcaagaaccaggacgtcagagtgcttcctgggcctggagcacggtccgagctgcgtcccccgctgcagcctgtcgagggcgccccaggcccaggcagggggcgagggtaatgggctggaggacaccgtggggcctgggaacagggtgcgagtgggttttgctgtgaggcggcccgggccgggtggcagctccaggaggagagagagccccttcctctgcggcgcaggaagccggagggagcgtccaacctgttgaacttgtgtattgacaagttgtcaagctcggcaggccgaagattgccctgaattaatttgtttgtttaaactgttggtggtaattgtcacatctcccctgcctttctccagcatactcggagacgggttctccctcgttccattccctagcaatcccggggctcgggtcctttcctcctgcggccctcggaggccaaaagctatttctgtgggggcggggcctgcgggtagggaggcttgttcttggacggagctggaaaagtctgcgcagaaacgaggtgtctggcgtgcgcgacgctccctctcttttggatgggggcgaggatacctggctactccagcccagagggtctctggtttccctgcgaacccccttccctggtggggaggagccctggaccgaaggagaacacacctggtcttacttgaggctctgccattatcgtggcactttgagcacgggcccctcttctaagcctcagcttccgaatctattcagtgtagtggttagacgatctcagaatcccttcctccctcagattccctctcccttcttcttttcacctcttgggcgattttgcccgcccagacttgacattggggcggggctggggggagagccgcagcggctgtgtctcgacgtctctaatcgccggcatgcgtttctctgtttgcctctgcagccgtgcagcacgagcgggggcctcggacgtccaccatccgcaagcaagtggccctctacttccgtggacacaaggaggagaacggggccgccgcgcactttccctcggcggcgctccctgcgccggccttcttcaccgcggtcacgcagctggagccgcacggcctggagctggccgcggtgtccaccactccagagcggcagaccctcgtgagcctggctca

SEQ ID NO: 232353 - DNA, 106 bp, Homo sapiens; identical to SEQ ID NO: 200615
  chr6:108582547-108582653
  hyper

SEQ ID NO: 232354 - DNA, 35 bp, Homo sapiens
  chr6:108881856-108881891
  hyper
ggaggcactagagcgggcccgagcgaaacataaac

SEQ ID NO: 232355 - DNA, 125 bp, Homo sapiens
  chr6:108882925-108883050
  hyper
gctccccggacaaacggctcactctgtcccagatctacgagtggatggtgcgttgcgtgccctacttcaaggataagggcgacagcaacagctctgccggctggaaggtgcgtacccaccccggg

SEQ ID NO: 232356 - DNA, 59 bp, Homo sapiens
  chr6:109169455-109169514
  hyper
aacaaatgtggttcggcaaattgctaaacgaaaagcggacacccgcccacgacgcctgc

SEQ ID NO: 232357 - DNA, 469 bp, Homo sapiens
  chr6:109330988-109331457
  hyper
ggccgcgaggtgagcgtgcactgtcaggaaggtgcagcacgagtcttcgggcttcagggacaggggaatctgccccctacacccctgctcggccatttacctagaaccaaacagcagccaacctcgagactgattctgacagcaccaggagtaatgaagttctctaaattcgataaactattgaaatttcccttcttcctttcccataatgcccaaacgacgctgaatcggcagcagaatgcaggactttggcctataatcaatgcaaaattcattttgctaagctacgtaaaagctataaatatcactcccctacacagataataaaccttggtagcctatctctgaatcgtcttttttcctctcaagtatattcgaaggctttacaatttctaatattccttcataagcgccctccctgggttataaagacagaatttcaatctctgaaatcggatgaggaacttgg

SEQ ID NO: 232358 - DNA, 34 bp, Homo sapiens
  chr6:109416223-109416257
  hyper
gcccaggcagacgcgacccgccgaggcaaagcct

SEQ ID NO: 232359 - DNA, 241 bp, Homo sapiens
  chr6:109703795-109704036
  hyper
gtcgggaggaagccgaaggaacctggccctcaaagcgactgtgccacagccaagaaaactgggagcttctgcaaatcgttcttcttgccctcagattaccagacacgacgcagctggacttgtctcatgcctgcgatagggacggcccccaccctgacttgcatggaacagtcgacataatgtggcctactgcttccacctgagcgccccgccaggctgtaattccgcgggcccacgtgac

SEQ ID NO: 232360 - DNA, 53 bp, Homo sapiens; identical to SEQ ID NO: 200618
  chr6:109776898-109776951
  hyper

SEQ ID NO: 232361 - DNA, 56 bp, Homo sapiens
  chr6:109777177-109777233
  hyper
ggacagtcttgggcccgcccatgcctgcagggtggcgcccgagggcgtggcgctgc

SEQ ID NO: 232362 - DNA, 320 bp, Homo sapiens
  chr6:110012081-110012401
  hyper
ttgggccacacagcgtaggtacaacatggattagaggtgaggggaaaactgacactcagtgaaggaccgtcagagggccggcttccaggaaaatgggccgcagcaggcagggaaaacacaaggatctatcctgcaactcggagaacccttttcaaaagaagctacccaatcccaaaccttccgcttttttccaaagagagggaggagataaatagactcaattaatccgtcgactttttctccgcccatgttttcctccaatccttaccaaagatggtgcccttcgcttcctctctcggcagcacgcaggtcccgggagc

SEQ ID NO: 232363 - DNA, 60 bp, Homo sapiens; identical to SEQ ID NO: 200621
  chr6:110500677-110500737
  hyper

SEQ ID NO: 232364 - DNA, 95 bp, Homo sapiens
  chr6:110501273-110501368
  hyper
ggggacacgcccccgttccgccccctcgttgcaaactacacttcccattgtgccctctcgcgcttcctgccgcgctgcacgctgggagtgcagga

SEQ ID NO: 232365 - DNA, 125 bp, Homo sapiens
  chr6:110501596-110501721
  hyper
cctcttcttcttccgccctggcagggtctccgcagaagatttgttgccgtcatgtcggctgcgattgcagctctggccgcttcctatggttcgggttcagggtccgaatcggactcggacagtga

SEQ ID NO: 232366 - DNA, 762 bp, Homo sapiens
  chr6:110678981-110679743
  hyper
ggcactgaaagatgcgacccgtggagccgcctaagagagcacagggggaagagaagaagcggaagcctccggaggtcccatcgaggcggcctgcgggacctgagcgccgggctccgtagcgcggtcgggagggggcttctggtcccaggcccaagaccgaccgctttgcaactgaccttccggcgggggcgcccgcgcggggcacagcagccaggctccggcgtcccgctcccgccgccccccggcggcgcccggcgaccgctgcgcacgtaggtcacctgcctcctgctggcgccgcgcggctggcccggcgcgggcggcaggtgcggcccaggtggccgccaggccgggcccggcggggcgctgcgggtgggggacccgggcccggcgcgccgcagctctgcgcagagccgcaggccgaacaacagcacagccccgagtagacaccggcgcaggacgccgcagcccctcccgggcggcctctcccgggccatggcgctacactcggggtcccgcgggccgcgcctggccggcagcagggatgtagccccacaggccggagcggccaactgtgggaactcccccgcgggccggggtgcgggctcggacccgcctccctccctcccgaccgaggaagccccggcgtaaccttatcctgccctgccgagcgcgccccgccgctggaacggtggtgggccgaacgcggtcacagggggccctctccgcccctccggaggtgccagggcccggctgtacagggtc

SEQ ID NO: 232367 - DNA, 144 bp, Homo sapiens
  chr6:111136354-111136498
  hyper
tagaggcacgggacgcgggggccgccgccgctcagtccctcctcctcctccccccgcgaccgccgctccacttctccaacagccgcctctcgcgcgcgcgcgcgcgccgcccgccgcccgccgctccgcggtccgccttcagca

SEQ ID NO: 232368 - DNA, 40 bp, Homo sapiens
  chr6:111195962-111196002
  hyper
agggcggtgctcacgcagcgctctcgcttacacagtatgg

SEQ ID NO: 232369 - DNA, 203 bp, Homo sapiens
  chr6:111408731-111408934
  hyper
gaggcttcagtgtcgatccccgaggtgttcgcgcgcgccagctgtcctcgcggccgcctgcgcgctggccgcctgcgcgctgccagcccgcccgcccgccaggggctccgccgccctcgcctcggcctcgttagcccgccaggagccccgcagctcctccgggagcccgctggtaactcgcgtccctcgcgcttctccggcgc

SEQ ID NO: 232370 - DNA, 48 bp, Homo sapiens
  chr6:111580350-111580398
  hyper
tgcaacttcagctcgctccgccatggggcgcacgtccgccagcctctg

SEQ ID NO: 232371 - DNA, 211 bp, Homo sapiens
  chr6:111580690-111580901
  hyper
ttctgctgagaagcgcggcggcagcaagacgacttctccggagccgccgagctggagttagaggtggagctccgtggggccgggcccccggctgcggggcagcggctcctgcaggcggaggccccggcggagaatgagccggagccggaggtggtggtggtctcctggcagagcggtgggaccgggagcaagctgcggtggttcaccacct

SEQ ID NO: 232372 - DNA, 89 bp, Homo sapiens; identical to SEQ ID NO: 200624
  chr6:111804030-111804119
  hyper

SEQ ID NO: 232373 - DNA, 40 bp, Homo sapiens
  chr6:111927298-111927338
  hyper
acctcagtgtagtcgcagtgccctcgcctgggagggtgtc

SEQ ID NO: 232374 - DNA, 951 bp, Homo sapiens
  chr6:112193850-112194801
  hyper
aaggagggcgggggcggagtctgggccagcctcgcccccaagccaattcccattttcacccggcgcccgcttgcgggcgaggaaatggggtccccatccccgcgctgcctcggggccgcaccccgcaggggtgtcctccggtgcaaccgcgggaagaccccaagcaccgactccccggcagccccgcggagcgccctggcggccaagggaccgcagcaccgggccctgcggcgggggcggcgtgcgcgggggcgccggcggccgggcttctccgcagcatccccgaggcctcccgcgacgcatccccgccgcctgcttacctgcgcggcgctgaggctccggagcccactcacatggtcctctccccgccctcctccggcgcggccgaggcggctccggggggtccccggcgggcccgggagccggtgggccttccgagagcaccgagggggcggcgccggggtgtccccggcccggcggccgaatccctccctggcgcgggcggcggccgccgggcggtgcggcgcgggcggcggctttgtgtgcgcccgggcggtcctcggtgcgctgggagaagcgcggcgcgcccgggcgggagaggacgcgccgctcgcacaacaacctcgcctctactctcgccgccgggcggcgggcgggtctcgaaggccttcggctcgcggcgacccctcctcctcgcccgcggcagccccctcctcgccggctccgctcctgacagatggcgcaactgcaacgacgcgccgccgccaccagcgcggctgctcgctgctactcttgctgatgctctgcccctccagctccggaggggagcgaggagggggcggggcgcgcctcgagagtgacaggcccggctgccctatcaaagagccccttgggagctgcgagccgcaaccattggcgcctggggcgtgggcgggacggcagtaggtgggg

SEQ ID NO: 232375 - DNA, 765 bp, Homo sapiens
  chr6:114176477-114177242
  hyper
ccagggagaccagccgataccaggcaaataggcgtaccagaaagaaaaggggggaaagctacacggcagcctggtaacaaaggagcaataaaagcagcccccaaatggagggctaaggacgcgtctgggagaaaatctgaaagcgagctagcagtcaccccaatttaaaataggagggggatgcggaggaaggggcatgattcacgttgggggtggggggaaatcaagagccttaaatgggcttttgggaatcgcctggatggtggtgtcggatcagcccagttggcttttcaagttggaactgctaatacaagggatttgcgtccatcctggcggctggggtcgtgggccaggccagcgggctctcttaagggtaataacacgtttgctggcaagatgcatttctacggaaacgtctttacatcagctctggggaatatgaccatggtcgaataatgcatctgaaggaactggacagtgagaagacgaagcttcacgtaacaatgttcagcttggtgatttttaaagcaacgcttgaacaaagagttactggcttgaaccaaccgtctttttcactcagagtgtgacctatttccctacaatgagcagaaaataaaactgtttgagaattcagagccagcaccaggagaaatgaaccattccctcgactgcttctcaccttcataagcgaaagattattccttgcaagatcaccaaatgtaaacgagaaaaggtggtctgattttgccacgagtgaaaactttg

SEQ ID NO: 232376 - DNA, 265 bp, Homo sapiens
  chr6:114177462-114177727
  hyper
ttctccttagaactgcaatccggtttagaatgtcatcgttgctgctgcctcccttcctttcaggagcacattcgcctgcgtgcgcactcacacacacgttcaaaaagagtccattcgattctggcagtaggctgaaaacgatccatattgacgcgaataacatcccaactgtaaatatggattcgtctactcgaggctgtgtctcatttcaccatagaggaaaattatgtcatttaaaacagtgataaaacgcgaagagtttcga

SEQ ID NO: 232377 - DNA, 31 bp, Homo sapiens
  chr6:114178491-114178522
  hyper
ccgcgtcagcgcccgcgagcccattcatctg

SEQ ID NO: 232378 - DNA, 52 bp, Homo sapiens; identical to SEQ ID NO: 200626
  chr6:114194490-114194542
  hyper

SEQ ID NO: 232379 - DNA, 39 bp, Homo sapiens
  chr6:114292435-114292474
  hyper
ggtgaacaacctgcgcaaggcggcgccatacacagtgtt

SEQ ID NO: 232380 - DNA, 199 bp, Homo sapiens; identical to SEQ ID NO: 200627
  chr6:114662113-114662312
  hyper

SEQ ID NO: 232381 - DNA, 690 bp, Homo sapiens
  chr6:114662599-114663289
  hyper
caccttaagctggacgctccttgcaggttgccctaaaccaaggtggtcgcccaagtaacaggagcaggagtctcagcgctccagtgagtagcgacagcgacctctcagacttgtttgtagtaacagtatgaccacccttcgactgcatccatcccgcgcgcgcgcgcgcgtgtgtgttgggtgggaagagatgcataaagtggggctgtgaggggtgtggggggggccagctgggaagagaaaaccccacccacatgttaacttagcctttgcctgttctttgcctgccctctgcctgtcctctgctggggcctcgcaggcccccactgtcccaaagctgccctcgcgctccaaacagctccacagccaccccagaagtgaccgaacgcgaacccctaaactctggcgagcgcagtaaacgcgtgttccctttctccctcaaagagagcgctacccagcgctctgggagagactgagagagaaacagacaggcaggctgactgacaccttctgtctaattttaccccaggaattgcccccgccgtttctcatctcgcactagtttaacctctggtcctaagcaaacctctcaaaagtcttccccaggcagcgcccaggagaaccgaaccccacaaagtgcttttttgctggcatcacccggatgcttccctttggcgatttgccccttct

SEQ ID NO: 232382 - DNA, 50 bp, Homo sapiens
  chr6:114663529-114663579
  hyper
ccaacagggctgtgcgtggcgcgtgtgagtaagacgcgagcgggccccac

SEQ ID NO: 232383 - DNA, 121 bp, Homo sapiens
  chr6:116421722-116421843
  hyper
tcgggaaaggctacgtgcctacaggtctcagctgtgcagcagcggcaccgctcctggacccctactgccttctgggctcctaggcttgcggaacagatcaggagtcgccggcattggggta

SEQ ID NO: 232384 - DNA, 57 bp, Homo sapiens
  chr6:116575297-116575354
  hyper
gtcagggcggtagcgtcgtaacatcgcgcgagaactctctgcgcggttgactacgct

SEQ ID NO: 232385 - DNA, 94 bp, Homo sapiens
  chr6:116691812-116691906
  hyper
gccaaagaggcctggcgggcgggggtgcgggtggagtccgggccgggtggcgtggaaggccgagcacagctgcgagcggcgagtcccgggagag

SEQ ID NO: 232386 - DNA, 203 bp, Homo sapiens
  chr6:116692734-116692937
  hyper
ggggaggtggcggcggcttgtgtgcagatcctggcgctggcaaccctactttgcggctgcagaagccgaggaagagctccccaagcctctcccagacgctggattccagcgctcctgggctccgccggcactcggagaaattgttagtaaacctcatccccgaggcagtcccggggaggggaggaggcgggggcttgactcac

SEQ ID NO: 232387 - DNA, 209 bp, Homo sapiens
  chr6:116937906-116938115
  hyper
gagcccttggaggcgaagcaggggccagaaactggacgccagtcccgaagcagccgtccttggagcccgcagtctagagccaagacgcctctgggtggccccgcgggaccagaaacatcatcacctgctcctgtctctccgcgggagccctcttcctctccttctcccctggctccggccagacaagacctcgcggcaccacctcagtc

SEQ ID NO: 232388 - DNA, 114 bp, Homo sapiens
  chr6:117002085-117002199
  hyper
atgaatgaggggtcgtccctttgcacacacggaggtctacgggccgcagagtacctacagcatggccaccgcaagcgcaactaaaatccagggcttgtcgcaggcacaggctcc

SEQ ID NO: 232389 - DNA, 790 bp, Homo sapiens
  chr6:117086156-117086946
  hyper
gtgtgggtaaactccgtgtgtggtgggtgatattgcgaagtgttggcactgcggccgctttcgctcctaggtggccgcggtcggaaggtgggtcaccccgcacccttgcggccggggaccgactctccttcgcgcggcggtcgccacacttacgggatccgaggcgggatctcctccatcgatttgaaacgccctgtccacagcaggattttcttgtcgaactgcgaaggcctgcgctgcgtggggactcggtgaatctcccctgcagcgaaagcaacccagatggacgcgggaactgacgcaccggcacagaggatcagcgcgccctcaagccgactcccgggccggcccctcgctgccctcccgcaacctcctccctcccaggacctccccgtcggagccctggctcaccgtgaccttggggcccagaattgctgggggccccgccgctggagtagcaggggagaccccggggcggaagagccggtgcgggccgtcgcgtggcctcgagaggcgccccggggccgcagcggactgttagcccgcggccaaggcgcagtaggctcccgaccgccctgagcatgctgcccgcttgtcccgcgccgcacccgcacctccggacccagccacaggcgttgtccccgcagctctcctcgtcccgccccggcctgccgcgcgctggagagcctgggacgtgcagctggaacccctggcgctcgcacactcagctcgctatccccgtctccgcccccggccagcgacccgggatcagggcgtcaagccccgaggg

SEQ ID NO: 232390 - DNA, 972 bp, Homo sapiens
  chr6:117197786-117198758
  hyper
ccactgtgcaccctcgagcaaagcagtgtgtgacgagatgggatcttccctcaaatgctgagaagagccctcgccaatccctcggaaggttcccagaataaaaagcccggtccctgctgtgcaaagactgagcggtactccggtgtactttttccctgtcccaggcgtgcagagtccacgccgcgcggccaggtgccccaatagtgtacctgaaagtagggatggggccagttacagctgcactttccctgcagaagacagtgagccttcccgggatctttctgggagctctgagtgtgaaaacggtcctccggccagcgcaggttgagagaacgggaaggagggggaagctgtgggcgcccagggcgtgacaggcgcaggtgagaaagtgagtttcgcgggagcatctgccgggaccgcagacaggtggagaaacgcagtcccaccgcggcccaccgcggctcccgggcggcctgggctgtacctgtgcgcggcgtcctttctgcgctgagccagggcaccccggagcctgcggcctccttccccgcccctgcggccccgggtcccagccccgccccgccccgccccgggctggggctccgctggggaaccggccgagcggcgcgcgcggaggtgtccggcggccaggaggatggccaaggtcccggagctggaagacaccttcctgcaggcgcagcctgcgccccaactgtccccggggatccaggaagactgctgtgtgcagctcctgggcaagggcttgctagtctatccggaagaaacagtgtacctggcggccgaagggcagcccgggggcgagcagggcggcggggagaaaggcgaagacccggagctgccgggggcagtgaaatcaggtgagtgctctgccgcatccggagctgggaaggggacggggacgtattctaagaagggcacccaataataataatgcatcccgaacaaacataaggc

SEQ ID NO: 232391 - DNA, 1510 bp, Homo sapiens
  chr6:117585720-117587230
  hyper
tccaaaatgaaacataccatcgcagctggtattaccggctgaataggcagcaaaagacctctctgtgtacgggtcctagtatgcttcttcttagcgccaacgagtccttgtccccaaagttgccaaaactttaaaggaccccggccaaggagaccccagcatgaaaagccagacatccgaggccgggtaaagcctcctggactcctcgaaagcagctcacaccgggagcagccggaagcgggcgcgatctatgcgaagctaacgggttccggtggagaacatcaaagagaaaggagcaggatcgaactttagaggggcagaagggcacggcccaagagagcagaattggggtgtgggacaggcggcgggaggaccaggttagagggagcgaaaggaagtggattagaggacagcggttacaggtttcagccactgccatttccccgcagaggtagctcttctgcgccctggaggggtacccggactcccacatcctgtctgccacgacccggactccctaggggattccaagggacagcaccgtcctccccatacatcatcaggaaccgaaagcagagaatttgccccacctcggcacttctggaagcacccactcaactacagtatgagacaagggctttcctaagagacctttctccaactttctttctctgcgtgtatgagcccggatcccttcgtccccgcctccttctctctctctctttctctctctctcctattttgtcctgggagattcctactcgcggtgcgaagcctcggatccgctgggaaccgcatagtctccggcacccttggccgcatgcttgtcagaggtgggccccgggaaacacactcgctgcccctccaacaagcgtccctcgctccccattggccccccggtccccgccccccaccgccccctcccgctccgcagcccccgagtggcgtcagcacgcccgccgggcatgggctttaaatgcccactagcgggagctcaggcgcttctgccctggagcgcggtcgggagtaaaatcgcaggagtgggagggtagcgagccagctggattccgagccgcggagcgcgctggctttgctccgcctgatgactccagagcgcgggtccaagcgccgcccatgcagcacccctgagctccggggaaggagagttaatgaaaaaacacttaaccgtctccgctgcggagagtcatgagctgtctggatgttatgtaccaagtctatggtcctccgcagccctacttcgcagccgcctacaccccctaccaccaggtacgtgtctcctctggggactttgggaaggagtgcgcgccccccgtttgcggcggcatggcctgtacgccaaggtctgctgtgcctccgcgcgtctcgggcgtccgaccacgaccggcgcagccgggatgcggggattgccggagccgcccccagttggtagtgcaattagctaacccctttagctcgcctgtttgctctcgggaagcagctaagccctgct

SEQ ID NO: 232392 - DNA, 115 bp, Homo sapiens
  chr6:117587540-117587655
  hyper
gaattcatttcaaagagcaccgcgcagttttataattttttcctttgcgaagttctgggagcattatccggagtgcgaatgacccggcagaggcgagcctgatagacaatacttt

SEQ ID NO: 232393 - DNA, 753 bp, Homo sapiens
  chr6:117591131-117591884
  hyper
agcaagacttcaaaatatgtcgatggactttcagtctgtcagagacgttaggtggtggggggcacattttctggagcaagaaggctgaaacgcgagagggggtagtgagatcactaggcggccgaccaagagtgggaagaggtatcgttagcttggggagaggttaaggctaggaaagggaggccgtgctgcgctgagtcgcgggaagctccttgagcttcaaggacttgagtcggggagggagtctctccgctcttgctactctacccgccacttggtttccgcactgaggactcggctgcgaaatgggaggaagcaggcctccttttcgtgggttcccagaagcccccattttgcagttcccccacctcgctttcacaggttgcagcccccttagaaaaacgccgctgcagaggcgggggctgcccatcagccccggccatggctagccagccctgtgcccgcccggcgccttcgtctctcgggcgggacgtgcaggtcggcgctgagtccagccgcagtgacacgcacctcttttcctttcctccactccgcctccccggccggcctacagactgctccttcccgatgagccagcgcagcttccccgcctccttctggaatagcgcgtaccaggcgccagtgcccccgccgctgggcagccctctggccaccgcgcactcggagctgcccttcgccgccgccgacccctactcgcccgccgcgctgcatggccacctgcaccagggcgcc

SEQ ID NO: 232394 - DNA, 469 bp, Homo sapiens
  chr6:117804316-117804785
  hyper
gcgtctctgcactttctctccgccgccccccagcccatttcacttagtttccagacttcctgactctgctggccccgtgagaagtgacctgaccccgagggtcgccttaggggacagccgtgtgcagggccagttctttccagctgccttttgacaaagccgctcctcggccggcgctgggccctgccctccctgccgtcgctcctcccgcgcggaattggaatcccggcgtgtgcgttcggggctcgtgcggaatggccggggcacgtttgccgaggttggccttggacgctggcgagcaggcggtgctgccacctcctctcgagtgtcctgctggcgccgcaagttggaatcgtgtggcttcctgtgtatttgagccggtagactctcaaccaggctgctttttctctggagctggtctttgacttggagttagacctaattaacccacaaccgagtttaccctctg

SEQ ID NO: 232395 - DNA, 275 bp, Homo sapiens
  chr6:118229506-118229781
  hyper
gccccgccccgcccgggggcttcgaccccttgccgggggaatggggtcgcagcgacagcctagcaggcggagggaacccacttctccagcctgacgctccagtcgcctctcggactcttcctggctgggagcagcgaagagagggctagaggcctggaacagacccagcaaagtgcaaaacattgcgggcagggtgtgagccggcggcgcccagttattccgaagcgcccatgccggagggggcgggtgccgatcgccggcgcctccagtgctgg

SEQ ID NO: 232396 - DNA, 549 bp, Homo sapiens
  chr6:118241125-118241674
  hyper
acagaggcaggcagcgggatggatagagcggctcagagggaagggacagagccgctttaatgtgctaatgaggggaagcccagatgccagcgggctcagtggagctctttgtgacgccgggttcccggggctggctggagtctctgtacctatctggatcctgctgcaggccggggaaacactgcgctcttagagaggggccctgtcctccacagatagccccgcagaccctcggaacgcgggtggacggggagggcgtgcgcgagcctcggggcttgggtggtggctggaaaagggagaaccaggaggcgggggaggggcgctcggactacagaggaccggacgggggcgagtgttccgcggggtgtgtggagtaagagctgggacggacctttgtagctttgcgaaattaaccgtttttcctccacaactgccagctcggcgaatggccttcaagcccatccaacaggagataatctgtccttggaactagtgcaagtcagtttttaactacttgcggagaaagtctgaaacgtcacaaccaaccaa

SEQ ID NO: 232397 - DNA, 85 bp, Homo sapiens
  chr6:118973007-118973092
  hyper
attttgcgatactcgcccctcccttgggtaatccctcacgccctccctccgggcacctctgtgaagacacgtggaagacctgccc

SEQ ID NO: 232398 - DNA, 196 bp, Homo sapiens
  chr6:119030565-119030761
  hyper
ctggcatttctcagcgcatgcggctccccactcggctttctggagctctgccttttggcgacagagcagctagagctcctctcccctcccccatttcctctcataaagataaccagtaacaacaattggcgtgtgtgtgtgtgtgtgtgtgtgtgagagagagagagagagagagagagagcgctcccagttggcc

SEQ ID NO: 232399 - DNA, 1301 bp, Homo sapiens
  chr6:119399175-119400476
  hyper
ggctgttgcttcggcggaggagtagagttcccctcgctgcgggcgcagggcgcactgcctcccggggagacaggtgagtccggcgcggcccgcacggggtcgccacctgccccgtcgctgccccccttaccttggtgagctgggcgattttcttgctcattttcaggtgcatctcctggctgtagtccatgctgtgcccagccagctgtgcggtggccggcgagggcgcgaatttggccgccgagccgccgtaatagtgctgctgccagctcatgcccggggtcgccatcttcccaacagaccccagccggggcacctgtccccgcgggtggaggcaggcccgtggagcaacgacgcccgggaggcaagagtcgcggcggccgcttcccgacccgacacccggcgccccccagactcggccgcaggcgccgtcccacccgcgacccccgggtcacccctggaagggacggggcggtcccgccggcccgaagccgcggggacaacggcgcggggcagatgcccggggttgggcggcggcggccgggggccgggccagctcttggaggctcctcggcccgcgcctggcggaggcgtcgaggacagcgcagctccgcgggtcccgctcgcagcccgcaccgaggactcggcgaggctgcggagggaggaggagacggggcgggctgcggcggggataggcggggacatggaggaggacgcgggagccgccgttaccagggcgcgcgcggggacggcgacgtcatttccccgcagccaagccccgcccagccccgcgcagccgccgccgccgccgccagtcccgcagccccgcggccagtgcgggcgcctcgcgaggtcgatccgggatcgtgccgccagtgcttcccccgtgtggcggggatccagcagcccagccctggcggcgatccccgtgcagcgagcgtgaggcctgacgtaaaaaaaaaaagtatccccaagaagacggtgctgtaatcaccttcggttagcagaacgggtgtcgatttacagaccctttccacatgcgtcctcgtgtgtgcagggccccaagaagtggctcttccccaagaagagaggcaagcccaatccagagacatgagtagtgaagtagcgaggattccctgccctgaccttccttccaatggcacacaagtgaccgtgacactgtcttagccgccccctcccaccccgagtgcccggccactgcccccagttcagtgctgagtgtatgtgtggagggaacgctccttttcagtcagctggtggagcaccgcatagctactttc

SEQ ID NO: 232400 - DNA, 246 bp, Homo sapiens
  chr6:119670868-119671114
  hyper
gggcgaatggcagcgagtagagcagcacggtacactccgccgcggccccgcgagcactaatctcactgccggtcttggggcggtggaaagcgagggaggcgacgcggccggagagtgacggcgcggccgggccaatcacgcgccgcccagggtcccgcgggggcggggccgaggcgaggagggggatgcgcggggcggggagtttacgggaagcgcagcctcggcggggcccggccggcggcgggg

SEQ ID NO: 232401 - DNA, 575 bp, Homo sapiens
  chr6:119671587-119672162
  hyper
gcttaggacttttttcgtatgcgccctttcttcccccaaaaaacaaaaaaccgaaaaaacttgtatgtctctcccgcccacccgtactttcactattcatttacctcatagaagttggtcaaattttccattcgaagacgagttttatgctgcggtagcttcaagcaataagtcgaacactgtgttgaaattaagtcttggatccgactacttccagcgaagtgaggagttggtccaatagaaattattttccaaaatgtgttgtaattctcctgttgctccacaaataaggggttatcagagaggaaaacgttgactgacttcgcatttctgaaagctggtttgtagtcgccttatttcatccttacccttctctggaaatgtgacattagttctgtttgtgcttaagacaaaggaaacagctggcacctttcgggaaggtggctccagtacagttgtttccaggtgttaagctgtatgagaaagtagaaaagtaatcagaaatccttactagttttcatttaatcatttaattattaattttaaccatcattatttgtcgtctacttgttttg

SEQ ID NO: 232402 - DNA, 214 bp, Homo sapiens
  chr6:121757804-121758018
  hyper
tacttttccaaaaccgtctcctaaaacgggagctcctagaaagagcaggaaaaaaactttcttaaacagcgctttgggagctccccccgccaacacccgccgccccgcaccttccctctgctcgaacctgtaacagaattcagaactctggggcagttctttggagttggagctcctagggcaaagataacgctaatgcgttgtttaaaagggt

SEQ ID NO: 232403 - DNA, 150 bp, Homo sapiens
  chr6:121758225-121758375
  hyper
gtgggccggacgggcgcggggcgcctcctgccatcttagcgtctgccgggatccttcccgcgccttcgctgcccgaaccagctcggtcttgggacgtttcccccaaatcctcacaagtcaaatcgaactcaggtccgagttcgtcactgc

SEQ ID NO: 232404 - DNA, 506 bp, Homo sapiens
  chr6:121758639-121759145
  hyper
gaatgaggcggggcggctcaaggggaaagggcagggaggagagaccctcgggaagctgatgacgcgtccggggcaagtcagcctgtttccgagacgcgcgcctcacggtcgtagcagcgctgcgcccaccctgcccctttagtgacccagccagcctttgctgggggtttctgataacgctcatcgataagctctccttgctcccaaaaggcgtgcttctctttctctccaggtacaaagtaggggtgggaaggggagagctacacaatgttgtaaaaagaagcgtggctttatttggaagacggttgaatttcttttgcttcctcgacccagttagtaacgacaagaaagatactgaatatcgccctccgaaaatcgggcgcatttgaactcggtgaaaagtgtccctgtgaggaagcctaatgtttacttttgtgcaaggataactggaaattaaagcgtctagtaatgcagagatttcattaagcgagcgctcccctcccccc

SEQ ID NO: 232405 - DNA, 155 bp, Homo sapiens
  chr6:122720534-122720689
  hyper
aatgaggaggcagcgcccccttctgctcccacccccttctgctcccacccccttcatgtcagcagcagccaatcgcttttctctgtcgtgcagtcggctcctgggattggccagggacgggacaggcgcggaaccactgcgcgcacaggcggagc

SEQ ID NO: 232406 - DNA, 143 bp, Homo sapiens
  chr6:122792745-122792888
  hyper
ggcaccacattcccgccgggctcacccagccccggctcggatcgccttctctttggtctctcacactagcaccccagaggccgcaaaaagcaccttacccagctcgccatggagcacagccccaggacgctccccatctccac

SEQ ID NO: 232407 - DNA, 182 bp, Homo sapiens
  chr6:122793171-122793353
  hyper
caaattaagaaaacggtgtgagcaaaacccacctttacctaccatgcacttgcatttgggcattagtagagaacagagctgaggtggtggttgacgttttgccctccttcatctgaggaacctctctgctttttaggggattgcttcctctttctcagtctttgtccgtcctaactccactt

SEQ ID NO: 232408 - DNA, 627 bp, Homo sapiens
  chr6:122931140-122931767
  hyper
accctgctcagggcgcgtacaaccggagggacagaaaacacgatgcgacgtcggaaagcaggaagggaattgaaattcccgcagtcacgtcacagaaatcttagcagaacctcatcatcgcccaagggaactgggagtggcgggcggggaggacgcgggttgtgtgacgatcaccgataattagttggtggttaacgcacaagtaggataaaagagctcgccccaggctgccagcagaaaaaagctaccgtggcacgtgccccggggagtgatgcggtggcccggtttgcacggagagcgggacaccgcctggggagccgcgctcgtagcctgggggcgggacgcggcggccgctccctccgcccccgagtagctgccaccgcctggctgcgccccagcccagtagctcagacgcggccgcatcccggtggactgtagaggcggcagcgagctagagcccgagtcgcagctccgggccgcagagcgctgggcgagcgcgagcgccagggcaccggcagggcaggcagctgcgcgcggctggtacgtacctggtggagcgggcgcgtgagtgggtgtccctatgcgaggagggaggagtgggacttgggaagtcgggggagactgacc

SEQ ID NO: 232409 - DNA, 491 bp, Homo sapiens
  chr6:122932014-122932505
  hyper
tccttcggctctcgcgccagcaatgccaagtctttcccctgggcggtgcttaccaagccccgggtagtcacgagcggccgcggggttagcagagacccgagtactaacccgctcggccagcgtccggctgtgtggctttagccaagtcacctcacctcactggcctccgtccattctttggataaaatatggaggtgggtagaccgagtaaactcaagggtcgcccgtagctattggattttccctgctcctaggaccccggcaggccgcagggagggacacgagtgccaggtggtcgcgggctgagggagcggagggcctgtgttccggttggtgctgatgctagccccttggggaaattcctgaaggtgcatttcggagccaaatgaccctgccttgcagcaggtcccttccaagggagctgagagggccaggtcagaccggtcttcgtagagctccccggggaacgcagccaacggaactcgggtcct

SEQ ID NO: 232410 - DNA, 850 bp, Homo sapiens
  chr6:123317040-123317890
  hyper
ggaacgagaaaatgcgtgtcaatgtgaattaccgtctacaacagctactctccaggctgatctggggtcttgcacacaaagggcgaagagaggggcgtggggaggctggaaagcatggttgccccgcctggcccggcgacgcccgctcagcagcctgctgaggagtggggacgaagagcagcctaaacttagggctcgggatatttcgatgccacccaaattgccgtcctaccccaacgaggcagggaaaggagcggagcgcgcgcgcgagctgagtgagtgcttacgtcgcagcgagatctgtgctgggataattagagaggagttgggctgagccgagtcctctttcagcagcagcagccggagccgccgccgcagcccggtggggcaaccctgactcggaccgctcgggagagccccaggagaggccagcgccgcgcagcagccgccccgctgcgcccacctccccggctgctcccggagggctcacaaaggcggtggccgcccgagtggccttctccatccaggcgttcgcgtcctcctccccaccttctctcccgaaggcgaaaatggcagggccaggcgagaacctgggacagcggtggccctagccctgcgatcctcacccctcctgctaggagaggctgcgggctgcccgcggacgatgtggccgcggctgctcccgagcgcatcttcggcccgggtccccgccgccacccctcttctctgctccttccatcccgcccagaggagttgatgccgctgtcgccgccgccgccgctgctgaagccgcggctgatggatgccagggagtgccgcattgcttagcgaccccgcctctgggtttgct

SEQ ID NO: 232411 - DNA, 240 bp, Homo sapiens
  chr6:124123917-124124157
  hyper
tgcaggtagcagccgcttcacagctttcaggccggtgctcagcggaggctggtgcatctccactaggaatccacacccagctgggactgctgtgaagctgaagtaactgagtattaaactagtctccgactctttagtattttaagtgaaaacaaacaacagtttgaagcagcaacagcaactcattgcatccctattccctccggttgctaatttttcccaactccagcagcaactcgg

SEQ ID NO: 232412 - DNA, 622 bp, Homo sapiens
  chr6:124124697-124125319
  hyper
tgggacgcggcgcggacccgcatcattgcgcgcagcagccgctgcagcagccgccggggaccgcggagccgggacgcccccgctcggcccgcgccccgctccccgccccacccccgcccgccgggcccagcaacgcagggtgcctaggagccgcgggctgcgcagggaggcgggcagcggccctcgcgcgcttctgccgcccccggagccggcgcgcggcgagcgcagggcgagcgcgcgtcgggcggcggccgcgctggggggcgtgaggcgagcggcgcggagagcggcaggggcgaaacttcgcgggccagatgcccgagggcgcggcggcgctgccaggctgccgctgctgcccctgcgggccccgagcgcgcctccgcaggcggcactgcccgcggcgcggcgtgtgcaccgagcgagtgaaggtatgtgtggcgggcgcggctggagctgccgccgccgccgccgccgcgccagcaggtcctaatgcctgtcacttcccaggacgctggcagcagcagcagcccggagcccccgagccctcggcaggtttgcgtgtccttccccgcgatctgattggataaagtgggggctcgacggtggccgacgtgggacagtc

SEQ ID NO: 232413 - DNA, 180 bp, Homo sapiens
  chr6:125282855-125283035
  hyper
tatttctctgaactcgacatcctaaatagccagcgtttactaattccagagctgagtgtagttttgtaggaagttctactgaatgcggagaccaaaggggagcctgcctgctctgagggttttgttgaggctgagtgtgaactccgggcgagaaagcgcatctcagctcttagatcacac

SEQ ID NO: 232414 - DNA, 439 bp, Homo sapiens
  chr6:125283935-125284374
  hyper
agcaccggcgcagcctgcgggactggcactcaccgggcctctcaatccccagaccttgccactgcagttggagctggaggaggaagaggaggaagctggggatcgaaaagagggaggggatgaacagcaggaggcgccccccggcgaagagctggagcccaggacccgcgtgggggccgccgacggactggtcctggacgtgctgggtcagcggcgcccgtccctcgccaagagacaagtcttctgctccgtgtactgcgtggagagcgacctgcccgaggcccccgcctcggagcagctctcgccgcccgcgtcgccacctggggctccgccagtgttgaaccctcccagcacccgctcttccttccccagcccccgactgtccctcccaacggattccctctcccccgacggcggcagcatcgagctggagttctac

SEQ ID NO: 232415 - DNA, 1099 bp, Homo sapiens
  chr6:125474774-125475873
  hyper
ctgcaatatctctgcgttatgcccttatagcgccgggagtgggtgccttccgccggctgtacagagcgccggcaggtggcgcccagcggcgagcttgttccagcttggtttgggccaggtggactggaaggggcggaggtaaccagaagcggctagtggcggctgcctgcgtccccaaccccctccgcgcagcgctcgcgacacgcgtgccaggagtgggagcgagcggcggggccagctgcgttctgagcctgggcgcagctgccatctgctctgggaagcaccagggtgtccccgccgccctcagctcgaagtcagccaccatggaggcgcaggcacaaggtgagtggtcgccgatcgccccgagagtcaggtcctggggcgcgcataaaggctcttttcctgcaccacctaacttcgctctcggacagaacagattggtgccgtgttgcacatccagaactccactcccacccgcgcctttggtataatgcctgctgcccaaactcaggatttgctgtgggtctggggatcaataaagtgacaggggatccgtaagtggagaggcccctcctcaggaaatgcgcccgtggaatgctctaccctcttccgcagccagtcgcccctggccttcccaacctcgcggctgcccgaaggacctgttgtgccgggtccggaaagcgtgtttcgctccctttcccttgagggagtggggagggaatgtgactcttttcgcccagcgccgtggactcgcggcttgtggctcccaagttagggagtgagaggatcgcccgccgagggggtggctccgcagcccggctgcgcgagacgcttcccgctcggggacccgccttccgaggccaggtgaacgttaccggccccctgacctccagcagatccacacgtgagtcccggtttccgcgatcggggagcgacctctgcctcccgtggcgcgcggggcccccggccgcccagctccctgctcccggggctgcctgctggaggagcctgcggtggcttcaggaagggcggcctcatatcttggggtcacacttggaacagggttggggaattccgatggaatcgttcaagaatgggg

SEQ ID NO: 232416 - DNA, 279 bp, Homo sapiens
  chr6:125622712-125622991
  hyper
ctccgggaactggcgcggctgcagtgcggacctcgcggcgccaggctctaggctcagactccgggccgccccagctggccagcctgtcccgccggctgcttcctccgtccaccgtcggcaacgcgcggccgcatccgcaggactggggcctttccggaattcggcgtggcggacgcggcgcaggaagggcaaagaccgccggccgagcggggaggccggaagctccgccgccccacagtcccgcccgctcggccgcggcctcccggcctggtgcccgct

SEQ ID NO: 232417 - DNA, 299 bp, Homo sapiens
  chr6:125684496-125684795
  hyper
ctgcggctgcactcgcttctccctcctgcagacattcttgctgctttccggtcccacgggacggctcccaggctcccgcctcacggcaagaaaaataaaggcctccccgcacagccagccagcttcgttcattcacgtcaccgacaaacactcctagcaggcgttgttaaacgttcagggagcgcccgggacctagccgaggccccctcctggctgtgccgcggggggatgcgcagcccctcgcaccgactgcgggaaggagagtgtgggtggccggcgcgcccggtccagctgccggc

SEQ ID NO: 232418 - DNA, 577 bp, Homo sapiens
  chr6:126067852-126068429
  hyper
ccctttagatcggccgtcctggcctttctttcctaacggcatctcctttctaataaagtccctcgtatcttttggtgtaattaactcatggtacaaatccttcaaaaagaaaggaaagaactgcggtttgctctacgcgcggacatcttttcttcctaagccttccctttcgctgaaaaggttgtcgcagaagggcggggaggcttgaaatcccgccgttccctcattctttctcttttctttctctccacataacgcctcccctacacctccccacctccaatccactaccgtatttaagtcggcgggggcgctttaaagggtttcctgtgtctgtttctgtctctctgacccgaaacgcactttcggttatagacagacaaggcgctcaaccaagggacaggcaaatggaataaacagctgaggagaataaacgacctaatggggaaatctcgtgctgcctaattgctattgtgttttgcagataaataagcatattattttgatagcgttcaaaaccctgagctctcttgccctatgcattcttaacagacttctatggcgcttactatatacc

SEQ ID NO: 232419 - DNA, 1398 bp, Homo sapiens
  chr6:126068708-126070106
  hyper
ggttttgcctcaggcgtttggacgcgcccgctaattgcccgtgtggcaaacatgagttgcacctgcaggcatttgaattcagaaaaacgtgcagccctcacggaaagttgtgacggtcgagcttgagcctggcgggccgcggagcgttcacctgcggccgggaggtactggcccagggcgctcggggcgggaggtggcaggcgaccggcgcgcgtcaggctcgtcacccgctggattgcggggccggagcggggacggggtctgggtcctggcccgccctcgtgcagccgatcggaggccccgaaccccgcgccgacccagccatccgccctgaggccgacaggggagctggggttcaccgacccccgcggccccgccgtcgggcgcggaccccatccagccccacctggccccgccgagtgtgtgctttgcctggggttaagtttcagaagccaagatggaacgattcgggtttctattcacaaggttattgaaggcatggcggtggggaccgcgcaaaagagatgagagtgtggggggaaaggggtttctgttctaataagggcttagcacgctggccgcaggtcctccgcgccgaccgggctccttcccgctctcccccgggccaaaccccgccagggtcccgtctttcccagtcgcgtcctttcctcttctccccgccccgcgccgggcttgtgtggacagagaacggagtgtcaaagggacgccctgggccgatccccaggaagctatgaatccctccgtgacggaggggtctggggatcgatagacggccctttctcagaggctctctccactactgaccaagcggccctgccaacgtgtggtttccggctggaccccaacccagccgccgccagtctcccggcgcccctggctgggtctcgctcagtccctgccctcgcagacgcacagcggggtggccagttcaaaagtcctacataacttggagagaaccagcagctagaaaacctgttttaaacacacagcttgagttttatacaacccacgttgtccaaggcacgaactgttggacacgaattcatactttagaaaccaaatctaatttccaagcgccaatcttcacctcccggactctaactctgcggctgcgagtgcatacaccagggggactggaggagactggaggcaattatctggataatccaagcccgaaaaactcgaacttgaaaatatacgattatgtcctgaaatgcccgcgtcattgatctagtctttcctaccatcagagctgacacagctccagtccacgggcttctccgcggggtctaggatccacagtccctgggggctgaagacccaatggaagtaactgatggatcgcaaattggaaatcgtaacgtggccgacagacct

SEQ ID NO: 232420 - DNA, 350 bp, Homo sapiens
  chr6:126071132-126071482
  hyper
gagaaagtttgagtggtgggcgctcgcagagcgtgagttgggatggggcaagggatgtggattttcaccgtaggggtggagtagccaggatgggagacgccactgaaaggcagagcgcaggagttggcgagggagggtcctggctgtcacagttggacgcgcgaacggcagcgtctgggcgacaggcgatgtcccagccactgaaaccgtatttgggggcactttcaaaatagatcaggagaaaataaaaacaatttgatttttgatttttagagataccaaaatcacaacttgatttttggaggaattaaagcaacctgcgatgtcaaggctacgtaggttgaactttg

SEQ ID NO: 232421 - DNA, 275 bp, Homo sapiens
  chr6:126307441-126307716
  hyper
cctgaaagccacgcgtccccgctcaccagctaccagcgctgggagacccctaaccaccaggcattcacaggtgaggaagcccctcccacagcggccggagtttcggactcggagcgcgagaaacgtcgggatagcgcctgcctcgcagagcttccgcttccggcccttcaggctctgtctctgtggagactgggctttgggagggagaaagagggacctagcgcgggccgcgcaggcgcacggtgggcagctgcaatggcgctgtcgtgtaccct

SEQ ID NO: 232422 - DNA, 262 bp, Homo sapiens
  chr6:126661122-126661384
  hyper
gatgaaaggaggacgcaggctctcaatgacgtcaggtattcccgggacccgcccaccgtgggcgttttccacctacaggcaggcgtctccgggggcggggcttgctcagggttaacgtcactactgagcgccgggcgcgttccgttggcggcggattcgaacgttcggactgaggtttttctgcctgaagaagcgtcatacggaccggattgttttcgctggcccagtgtccccggagcttgtgtgcgatacagagagcacc

SEQ ID NO: 232423 - DNA, 322 bp, Homo sapiens
  chr6:127439256-127439578
  hyper
gggtagttgcgcgccggcgctggggatggggtgggggcgctggggcacaagggcgcaggggcgcacggccaccgacagccgggtgcgcctagcttgaggccgcggagaggagccgaactgggatgggtggggggtcttcggcctcaacactgcctgccagccccagtgcgcccaagtctccccgccagagctgcccttctggaggggctcttcgcacgcactgctttccccattcttctggctggaattctccggccgtcactgcagtgtccagagatgctgcgctgtagacccgggaccccttaggcgcctcttcccgtcc

SEQ ID NO: 232424 - DNA, 488 bp, Homo sapiens
  chr6:127439825-127440313
  hyper
ctcctgctcgcgcacgccagaagcagctcggggtctctccgccgccccttggccatggccgctgtgccgacggcgcccgctcccctgcgctccaggggcccccgccgctgcagccgcagccgccgcagcttctgagcccaaggggccgccgctgcagccgccgccgccgccgctcgcccgcccggatcccgcctgcggcagttgccgcacaacatgctacctgcggccgccccggcggctcctggaaccccggttcgcggcgatgccagccaccccagcgaagccgccgcagttcagtgcttggataatttgaaagtacaatagttggtttccctgtccacccgccccacttcgcttgccatcacagcacgcctatcggatgtgagaggagaagtcccgctgctcgggcactgtctatatacgcctaacacctacatatattttaaaaacattaaatataattaacaatcaaaagaaagaggagaaag

SEQ ID NO: 232425 - DNA, 142 bp, Homo sapiens
  chr6:127441153-127441295
  hyper
ctgtaccatctctggccctttcaagtgtgtcccctgggacacacacgtacagagagtggggtctccctaaagattcgcctcctcgctgcccttaatgctgttatttggagggttggattgtgatggcttcttaagacggtgt

SEQ ID NO: 232426 - DNA, 771 bp, Homo sapiens
  chr6:127441979-127442750
  hyper
tattcttggcctccgaatggtgtgtactctggtaactccccacccactctttcattccggcccggacgcggaaggggaggcctggggttcagcggtgtccacgcgcctggcggtccccgcctcctctcctcccagggtctggcctggggaattgagtctcagggtcagtgggcatagggagcccgggctggagcgcaacccactctgctttccatccgctcttccagcccgtgcccattgggcgtcccagagcacgctctctcctttacccccaccgaggacccccgggctgggagccacacacttgtcaaggagggacagggtactgagtgtcagaggcgtctcgctttgcagttttggggcccctgattctgaaggaagacacaggaaagaaagcttgtagtccttttgtgcccacctcccccagcgaggaccacggcgcaggaagctttccccgggcgctgcctcagggagctgtgggatgatgcacctctaggttgggccgagaggagtcaaaaggcaaactgcttttcgacctgccttaatcatctcaaggccaagtcaaaggagacctctgtttgtgttgaggggatgaaagaaggaatagtggaactgggttgcaattccaatttttctgtgggagtgggactgggagacagcacccacagcgatgctcttgctccttcgcacttgagtctgcgtttgcggcttggtttgctggtgcaatcctggtagaggggcgaccccttgcgtcctcggaggagacagact

SEQ ID NO: 232427 - DNA, 53 bp, Homo sapiens
  chr6:127468330-127468383
  hyper
ggatgctggtcaaccgaatgacctctctgtaactaacccgtgcacccctgtgg

SEQ ID NO: 232428 - DNA, 209 bp, Homo sapiens
  chr6:127587640-127587849
  hyper
aaactcagctaggcgccccagagcttcctcaggatagcaaagctggatttttgagcagcaccacctgctggtcctacacacgttttacttcctccaccccaaatctctttctgttggaactgcactctttcagagcctctgggccctaatacaaagcaagcacactctaaagaagccagaagaatgcaagcagcgaagtcgccgctccc

SEQ ID NO: 232429 - DNA, 723 bp, Homo sapiens; identical to SEQ ID NO: 200645
  chr6:127664172-127664895
  hyper

SEQ ID NO: 232430 - DNA, 598 bp, Homo sapiens
  chr6:127836030-127836628
  hyper
gagccttttgcgctcggctttgcggaggcggtactgcaggatccggcagtttttgttggctctctccaactcgtggcgcatttcctgcagttgacaggcatcctcctcgaagaaagtgtccctcatctcgtccatctcggttctcagctcatcgatctcgttctgaggcggtgacaggccgcgtgtcaaaatcaaactcgcttccagcccttccgacacacaccgtacacaccccattccaattccaaattctcagctttaattgccctctctctccacgagacaggagtgacaaggagctgagtacagaagaggaaactgggggaaaaaggcccactttaggccctctctcgttctcttactctacctctctccaggaagaagtgtgacaaaccattataattagagaaacggaggcccagatttgaatttaaatgaaaacctcgcgttactgagagcagattcaaattccggcaaggcctaggaaaccccctccctcctttcttgttctcctccctcttcaaggctccctaacaggttagcagcctctgatccctgccggtacacgccctaatcctcccaggcccactcttcccat

SEQ ID NO: 232431 - DNA, 279 bp, Homo sapiens
  chr6:127839716-127839995
  hyper
tgctcacttctcagcagaggcgaggtttccaagtagctgaacaaatcaacagcactttccttctgatattccggggatctcagggtttattattgtgcctttctgcgccgaggaaagttcaacttcatattattgtatgcgactttccggctgagcatgactttgggctcgctcgccgcagttccacacccactcgatttctccaaacaatggcggtaacgtcaagattcagctgcccccagagcgggtgacttcccggcggtccgcggctgggctgga

SEQ ID NO: 232432 - DNA, 461 bp, Homo sapiens
  chr6:127840309-127840770
  hyper
gaggatcccaaaaccgctcgaacacggatgcactggtttcctgcaaagctttgtcctgggttcggtcattctccatcaattatttacttgagcttcttttccaaggaggcggactagaacagccttccgggcgtgactaacatctcctgatgcagctggctggcggctgctgggagttctctttgttcactcactttaattctcagtcgagctctacacgcggtgctccctccccacccccagcccgggcggagtcatcagatgtcgtttccacgaatagataatggttgccatgatgggacccaccgtcccacagacaaagggttcttgcgaagccacgactaatttagtgcaaaccgaaataaatatcggcccacagagatcctttacagaacggtttgccttcagtacgttttcctgttttctactgagtgccggtttctaccgtgaaaatgagtaat

SEQ ID NO: 232433 - DNA, 2312 bp, Homo sapiens
  chr6:128840108-128842420
  hyper
gggcctccacaacaacgtgagaaactgtcaggtacaaagtaagttatttgcgtcctgcggcttcagccaggagcgtggctgtcgcttttcccgtcttctccatcaccctctggccaccactgcgtctccatctgcaccgcgaaccccagcagcagatgcgctcgccagccaagcgaagctgggtaggttggccagaaaagttgtcaggactggcgggaggtagacaagtgctcgggagcccgctccccagcgtccacctggtgaaacttcagagcccccagaggagagaacgaaagaagcaaccaacctacacgaaggataacaaaactggaggggaacagagggcgggaccgggagagccagggttcacggacttctctgagcggcttgaccgagaacccccagggctacagcgagacgctccacttgtctccttttgggttctccggcagaaggcagacatttacagtccgcttccagccccaggccggatccggggagcgcggggccagagccccaggccggatccggggagcgcggggccagcctggcggtggttttgcccgaggagcgggctcccacgcgcgagtcaggcttcctccaccaggcgcccagacctcgatgcccatgaacgctcagagtgggtccttagaaccgcatttcaacacatcttacagggctccgccaacacacacacagaacatgctccaagcagtgcccgagcgcacagggcaagcccgggagcaacccagagctgggggaggagaaaaggggactccgggagggacggggaagtagttagacaatagtcaggggaggttattcccgggacaaaaagcacctggcaaagcgcgccgaggtcagtcccttcgaatctccacatttctgacaatggcttcccagggaatttgtttaaacacccaagtggcagacagcaacaaacccgcaccacaagcaacagagtgccgtcacgggagtcgtaactactttttctttctctcttccccactagcccggcgcaggccacgcgagacgccgaagccagcaggtccccacactctccggctagaccgtgccagcctgagccccgagcaagcttcggagaggaacaatgggtgccccgcgtcccacctggcacgaactctggggacagccctccctctaccctgtgttccccacccccggacagagagagctccccacgatccttgtccccagccctagcggggacctggctcacccctcgtgagcccaggactccaggcgttcgtcggggacgccccccggccactcacctgcggagaactggccttgggccgatcccaggagaggccaaggagagaggagcaagagcgccacaaaagcaggcagcgccgccgccgcagtcgtatccatgccgagtttgggagaagtttcaagcagctttgcaaagagctgccggggggatcgccgcgaaatccacgacggaggagcgggccgggcctcgcggggtgaggacggtgagaggacagccgcccgcccgccctttttccttcttcgcggtcgccaaactacctcaggggcgaaagcgtcgccagcgtcgccggccggccgcggcggcagctctccatgctcggcggaggctgctcctgttagtcaagagttactttgctcggggagggacgggggcggagccgggggtgacgtcgccccgcgggctccgggcgcttctgaggaatgcgggctcgggcgcggcgccgccaccgcctcctgccggagagacgcgcgccagccccggccgcgcgccccgcgccgcctttgttcgcagcctgggccccgccgccagccgctgctcggagggagcgagcgagaaaggggagccggcgcagctcgctgccctgttccagaactcagaatttgagaggcgagagttcggtaagccgtgcgaccagacgaccgaggacgcgcgcagagaaacccccgccgtccgaggagaggcgtcctggggttccgtcccaaggtggaggtccccccgagcggttgctgattgaaaggggagtgtggaagcgccctgaggaaacacccgcctgccttgaaaactccccgttccttattcttgtaataaggaataagacaccccacccccatcgaaaacttgtcccttattcatagaataaataaaacttgaaccagaataaacgatcagtaactttccagcgtgaacagctggcgtgtctcctttctggtttatttgtcattggccaagtatttggatttactctgcttcactgactttgcttgttgctctgaaaccctccggcccctttccagtt

SEQ ID NO: 232434 - DNA, 377 bp, Homo sapiens
  chr6:129204234-129204611
  hyper
ccaccctcaggcggcggcccggccaaagccagagggggctgtctcctcctcttccccagcagctgctgctcgctcagctcacaagccaaggccaggggacagggcggcagcgactcctctggctcccgagaagtggatccggtcgcggccactacgatgccgggagccgccggggtcctcctccttctgctgctctccggaggcctcgggggcgtacaggcgcagcggccgcagcagcagcggcagtcacaggcacatcagcaaagaggtacagtcgaggcatgggcttgggttgcatcctttgccgggaccgagattcctcacttcttccactcttccgagagttgctgtctgtggactgccgtcttgcttcgcct

SEQ ID NO: 232435 - DNA, 466 bp, Homo sapiens
  chr6:130088306-130088772
  hyper
ctataaccatcttccgcaagtggagagcagggaacgccagggtcccaagaagtgacgaaaagcgataattagatctcctgcaagaatcttccctaagcactttcttccgtgacacacctactttgtggcatctacgcgctcttcacggctaaccacaatcctgtcatttcggcttattcatccagcagctgccggaaggaccgggctgaagcgtggccacgaggagggggatacccgtgcgagcgctgagccggcagagcggctgcagcccacgggctcctcggacccccgctgctgcgccgctgcagctgaccgtgcgaaagccgcatgttattgggtagagatcagctttccaggaacaggcatcagctgtgcacgagcccggcagcatctcgagacaagtgctagccggtgttggtgcaaaccaaagcttgctatgtgctcagaaagcggccccagctactga

SEQ ID NO: 232436 - DNA, 560 bp, Homo sapiens
  chr6:130339514-130340074
  hyper
tctgaggcggtgaccgggctattgaaaagatgcacctgaaacaggatctgcgggcagctgcatttgccacccggctttattgctgctttccagcggcgaaggcgcagcagcagtaacagggaagccagagcgagcctccccggcagcggcggcggcggcggcggcaccggcaccagcgcagtttcccctctccccagccctgactctacgcgcacatgcgcattgcgcccgcagccctggaccatttgtcaggactactcgtgagacggagaaaaaaaaaagagaaaatttgggggtaagaagcggttgatcggatctaatctctaattaatctgaagatttgtccgtgcaaaagccattcatttatttttctgggtgaggatgaaagttaagagccctatagagggaaggaagcgcaccctcgtcttgtgaaacagatcaggggaggggagggacagaaggggtttctcccccacttctctgcgcctctgggaaagaggagaaaacttaatcccggggaaaaaagtgggcaagtgactcggaaacggctggagggggag

SEQ ID NO: 232437 - DNA, 55 bp, Homo sapiens
  chr6:130342006-130342061
  hyper
cgcttctccacctcggggccaccgccagaaaaatgcattcgagatcattcagagt

SEQ ID NO: 232438 - DNA, 236 bp, Homo sapiens
  chr6:131602722-131602958
  hyper
aggctggtggagaacgcggtgctcaaggctgtccagcagtatctggaggaaacacagaataaaaacaagccgggggaggggagctctgtgaaaaccgaagcagctgatcagaatggcaatgacaatgagaacaacaggaaatgagcccggaacgcaggcccccatgtctctgtgcaaagcctccctgcttccctctgctgagtctagggactgacttgcagcgtgctgtttaagtt

SEQ ID NO: 232439 - DNA, 498 bp, Homo sapiens
  chr6:132128561-132129059
  hyper
tacatgtgaacccacgtattttaagtggacgatttctctctcagagtaccgtaggtagtgggggacggggcgcagagggggagaaacagaaagtcgccttcctccatggttcatttgcatttccatccagaaactcacaggtcgaccccaagactccactctctcccgcctttgagaagccggaccggcatcggcggctgcatccttctcctcctccccgctctattttggggccccatgatctcatgccctctgcagaccacacgctgcaattccagcccagcccgcgccgcgaggccacgcagggcgattcctgcaagtgtcgggagggtggccggggcgcggggaggggacggcttggggggaagtttaagacacgcccacgtaagggacccaaaataaccgacacacagagtgcccgaaatcagacaggaagccaaataatccggggcgttgagtcgctttgccctgactgcgagagccgggtgtagggcgggg

SEQ ID NO: 232440 - DNA, 196 bp, Homo sapiens
  chr6:132129409-132129605
  hyper
tcgctggtaggtccgcggccaggccccggcgcccgggagggctgggagtacggggagggcggcgccgagctcctgcgctctcagcgcagtcagcaccgggcaccggagagaggcatggtccgggagtgcttcttcgcccgcgcgctctcctccgcagcctttgcaagtgccctacacagccgcccctgccaggtac

SEQ ID NO: 232441 - DNA, 209 bp, Homo sapiens; identical to SEQ ID NO: 200655
  chr6:132271777-132271986
  hyper

SEQ ID NO: 232442 - DNA, 93 bp, Homo sapiens; identical to SEQ ID NO: 200656
  chr6:132272531-132272624
  hyper

SEQ ID NO: 232443 - DNA, 1079 bp, Homo sapiens
  chr6:132721835-132722914
  hyper
ctcccaaatagccacgatttgggaagttctgagatttccactcctagacagcaagtccgcgacgtactaaagcgctctgtcccttccctcctctgagagctgtcccattaggtccccaaagccaaagcctaggtccttctcccttcccatcagggatgaagcggggtgtattgcaggtgtgtaggcgggggggcgtctattaagtggggcgctggggacaggaaagtgttcaaagaaggaaacctgcctggggtcatccgtgctcggcttccctaccgcgcgccttctggggctccgggagagcaggcgctgcccgcggaggcgagagtgagcgtggccgggggcgcggggctgcgccaggtgagagagagctgcgggccccggggacgacccgcacctgcgccctctctggggtccggacgggaccgggctcggccgggcgggctccgggaggagacgcgcttacctggaggtagggccgcccgtgggccaccccgcccacgacgatgtcggcggacgccatggccccggtgggcgagaagccgaagcccacgtagcctgcagtgcgcacctggaggcggaaggcgatctggctgccccgctggctccagcccagccagtacttgccctccgagtccaggagggtccggtgcggataggttcggcccgagccccccgccgccgtcccggggagcagcccccacagcaggagcagcggccagcagcacatcctcgggcgcctcctgcccgccggtaccggcctccagccgctggggagtgaggagcagaacgaggagcggcagcggcggcgagcgggagcccagggaccgcccctcgggccggccgcgcgcccgcccgggaggggcaggacccgctctccccgccccgggccgcctgcagggcgcgccgcgtcccgtccggtcccgtcccgttccgtcccgtcgggtcccagccccgccaactctcaccctgcccggcccttccagcggatccacttgcagcccccgacccctgacttggtccccgaggtcggggctcggtgggaaggaaagcgaggggcttcccggaaagaaagggag

SEQ ID NO: 232444 - DNA, 262 bp, Homo sapiens
  chr6:132834326-132834588
  hyper
cagcggccctcaccgcccctccggttccaagctaaggaatgggggtatcagcaaaattgcaagggagctgttctttgaagcctgacgtagagatggtgaacgcctcttagcctgcgtgcaaaaaaggacagaatggaggacagttgtcttctttatctggtgaagccagccttcttgcacgcgggtcttcaccccgccccattagctcttgcctgtcttgtttgctaacctttaactgcagtagatcgcgttgacagctcta

SEQ ID NO: 232445 - DNA, 85 bp, Homo sapiens
  chr6:133561662-133561747
  hyper
agaaggcttagacacgaaatgtcatttcagcaatgtgcctagagaagctctgacgccgccttggaagtaagtcgttgctgcctga

SEQ ID NO: 232446 - DNA, 889 bp, Homo sapiens
  chr6:133563307-133564196
  hyper
tattactttctgatgaccccctagatggtccaggcgcgaggatgctgacccagagtccttcggagggtcacaggcgcctgggctttcccggtgccgggtgcgtgtgtactttaaaggctcgcgttctaatctccaggcactgatcgggcttttcaactgcggcgatcccactttaatagtttttatgtggcgtggactgaatgtctcctgcagtttgccagggtcggtgaaattagaggcgccttgtcagagcagtcgcgttcattggctcgagtagcgggtgccatggaaggcttataacttctccaaaggaagggacctggctgggtagagcaggtttttctctccttccaagcctgctgggtctggggaggcagtggaacttgaaatggctcggatttttagcgtggtgaagcgaggtttggaagtagacgtgtgtgtgcttgttttattctgcgccgcacagcaacccgaactttcgtttggtagcacttgaaagagttttctccctttgtttgcgagattctgaacagctcggagcgattagggaatttgcggaccgagtccggtggcagagctggggcgaaagcagagagcgcaatttaatttttgtcatctcttccctgcttgggaggatagtgtttcccttcaccaccacccctctttctccttcctatgaagacaacggatttgcgcctggggtgagagtgtgtgcgggagagtggtgtggagactgtcctctctcaccgcgtctcctgcgcctctccccgccatcccgagcgggcctagagagtcattcatgaatcttaacctgagggcaggggaggaaggtgcaggtccctctgccctttctgccaaggtgcagaatagcgcccgggcgtgtgttttg

SEQ ID NO: 232447 - DNA, 58 bp, Homo sapiens
  chr6:133890489-133890547
  hyper
ttgttactgtggccggttcctggctgggaacaggctccttttcggcactacctacttg

SEQ ID NO: 232448 - DNA, 159 bp, Homo sapiens
  chr6:134175362-134175521
  hyper
cggctctattaaaacggttccatatcttccagccccgcactcatgattcacagtaatgcctagtgttagcactcactaatcgacaatttgatggggaaggtgaggaggaaaacgaccctggaagcagagtgctggtttcacacccgctgggtatctgtt

SEQ ID NO: 232449 - DNA, 629 bp, Homo sapiens
  chr6:134175886-134176515
  hyper
aggggatgggctgcgaccgctcccagtgaccccacgaaacccagaggggaggctgaggctctgaggccagccaggggagctgacgatctcgcagaagccgcggcgagtctcccccggaggtctaggaggcagagccattaaagccaggctgcccgctgaaacgcacagtaaaagtgactgcgatttatttggattagtcagtataaaggtctggggagacagctatttattcgatacgggaccttgacaaattgggcagtgcaagaaaggacagtccctctgacctcaggcggtgctggggcggaaggtaggaacctcccacctgctcctggccccagggggcgcgcatgcccagcgggagcgcatcttcacctgcggacgtgaggctgcagcgctgccggccccagccagccagggtgccctctcccggcttgaggggttcgtattgctgcctccaggcctccaagggagatttccgctcactctctggcggcaccttctccccagcttctgggacggtcaccaaatctgagatcctgcccggttaccctgcaggtgacccagtacccccgaagggtccacctggataaaagtcgtttggtctggcagcatccgggtcatatatctga

SEQ ID NO: 232450 - DNA, 1058 bp, Homo sapiens
  chr6:134210316-134211374
  hyper
gctgcagaagtcctcggggttccttctcacaactctgcgaaggggaaagggttgtgagacccaaccagaccccaactccagctcccagcaggaggtggctgcgccacactcgggaggcctcttggtttcagggtctctctgtctctctctcaccctcttcctcgctttctctgtctctctgtctctctctctctctctccctcgtccactcccccaaacatgtccaccggctccctcagcgatgtggaggaccttcaagaggtggagatgttggaatgtgacgggttgaaaatggattcgaacaaggaatttgtgacttccaacgagagcaccgaggagagctccaactgcgagaatgggtctccccagaagggccgcggcggcctgggcaagaggaggaaggcgcccaccaagaagagccccctgagcggggtcagccaggaggggaagcaggtccagcgcaacgccgccaacgcgcgagagcgggcccgcatgcgagtgctgagcaaggccttctccagactcaagaccaccctgccctgggtgccccccgacaccaagctctccaagctggacacgctcaggctggcgtccagctacatcgcccacttgaggcagatcctggctaacgacaaatacgagaacgggtacattcacccggtcaacctggtgagtgctcccggggctgcagctgcagtccaggcgcgcccgcactcccgcctgcggtgggcgcgagtgcgcgcggggctgggagtgggggtgtgggcgcggcggtgacttacacatctcgaccaccgcgggcctagagcctccagggaccggaggcgggcggtctagacacggccctcgctctctgccctaccagcccccggagcgggagtgatttatgcgagggtttgacgtggcagcccaattaaaagtttgcaagtgtgttgagctggcacagaggagggatcccccgctcccgctccatcgccatcctccctggggtgcagtggctgctgcggaactgagaacactgacaagacgctgcgagcggacaggcattttgttaatcc

SEQ ID NO: 232451 - DNA, 536 bp, Homo sapiens
  chr6:134212582-134213118
  hyper
ggaacccagtataagcccttttggctctcattctaaaagaccaccaccagcaccaccaccacctcgagctgtgacttggcgccaaagcagctatttgctttatgcagccgcagggtgcgctaggaccgggagtaaattgcagagataaccggtctctccagagcaccgcctgcccccaccgccccccttcctttcatctcaggccccgagtccaccccaccccctccgccacggccacttacctcctccaccctcttctttcccgcagacgtggccctttatggtggccgggaaacccgagagtgacctgaaagaagtggtgaccgcgagccgcttatgtggaaccaccgcgtcctgaccttggaggtgcgagtctgggaaaggcgcgctcccggggggagcgggccccgggaaggcgacccctgccctcagtgctctctgtctctgcttccccctcgcaatgctcctctctctgtcccaccccgcgagaacactttacaacgacgaggagattcgtttccaaaccagaggagatc

SEQ ID NO: 232452 - DNA, 461 bp, Homo sapiens
  chr6:134213962-134214423
  hyper
gtgcgtttagctcccgccacgacttccggcggactgggtttaatttaaacattttccaggctacggaacagctcctaagggaagattaagttgagataaacagagaagcaaggccgaggagcctgcgacccgggtccctcactgccccagcgcagcccgcggcggccgatgcgccagatgccaccggggctgtttaatgttcggggttatgaccgcagtgtttacaagacgtcttcggttatttatactgttattcctcgcagagagccttgaaacttccgcttcatttgctctttcttttcgattttttacccttttttctcggcttagtttggtacctggagcgagagcttctccgcccttccaccaaccccacaggccgcttcgcgggtggagccctctgcctggccatggaggaaggatcccgctaggctggtcccgactggagaagctgctctgcc

SEQ ID NO: 232453 - DNA, 776 bp, Homo sapiens
  chr6:134216762-134217538
  hyper
agccagacttctgttggctccgttgcgacctctaagggagagagaaatctgggctccctggaatcacgtcccctgcaagagagtcccttggtccattctcgggccagaaaaaaatctccccatcactccagtgcgagtggttggccttgctctggtccggcactgtgtgcgtcgggaagtcggcctggagttggggttgcagggacgccacggctggtggcgagcgcagcaggagtgcctggagagctcgcggccagcggggagctgagcgcaaaggcggaggagggaagcagcctctgaggcttccccgcctgggagaagagtttttggaagtaggcgagacggggaaggagttctgagcctcagtccgcacagcctcctttccgtccctttccgggtgcaatctccgggccagcgggtgcgtgtcccgctgcagatccgctggctcagggatgaggcgcagggcaggttctgggttacgtccccacaccgcggggaacccaggtgcgagcggggcgcagctggcctgccaacatcctttcttagctttgcatccttcgctccaaatgctggctctgcccttggaaactcgctggttgccagcagcattcttcagagtccgccgggcttccttcaggcgtttggaggaacacgcctttgatctttgggtctgggcaggctgcgcgggcccaccctccttccagttcaccgaaagattaaccacctccaaggactatttaagagcccctctcagggccgaacggggagaaagggtg

SEQ ID NO: 232454 - DNA, 149 bp, Homo sapiens
  chr6:134496207-134496356
  hyper
ggggacggcctggcgcagggccgttatcagtctccatcggctcctggggcaggagagagagaacgcgccggcggagggcgcggggagggccggagagcccggggtagttttccacctctctcatttattccgccgccggagaaagccgg

SEQ ID NO: 232455 - DNA, 410 bp, Homo sapiens
  chr6:134499449-134499859
  hyper
cttccaaccggatacgtgatgggtggagcaggcgccccctgttctgtcccagcaacctactaagacttccgaacaggaaggtgacacacggcggaggggtgcttgaggggagggggagacgggggagctgtgtgtgacgcgcgcctgttaacactgcacaggcattaggttgccctgtagctgctattcaaactcttgatctgttcttccttcctgtcgccagcctctttctttggtccagatagtcctcctactgggaggaatccggcccctttcctcatactccctggtggcgaagtggtccgagtagcctcccgaactgtttgtaaatgcaacctagagggcgatcgagttctctgggagaacttgctccatatacgcgtatacgcggcttcccccacttgtctcct

SEQ ID NO: 232456 - DNA, 450 bp, Homo sapiens
  chr6:134638727-134639177
  hyper
ctcagttcttcactcgcgcattctgcagcaccagctactgcagcaacctctccccactttcagttgccaccgacagcggcttttctccttccatcattgctccgaaacatatgcatcaccgctgcaggaccctgggggccggacggtgggatacggccaatctccggggagatgctgtggctcttaccgagcgggagaagggtacgcctccccgcccccagctacctggctgctcttccgcggccggcgcggggagcgagtcgctcttctccaggtgatgcgctcctggaggcggcttgagagaggagagttgtttttgattgtgcaagttccagtgggagctgtagttaagcagctgagagaaggagtaagaaagagcagaagccagagggagggagggagaacagcgccagaaaggcagagggagcgagaaggcgaggctggaagaag

SEQ ID NO: 232457 - DNA, 166 bp, Homo sapiens
  chr6:135501660-135501826
  hyper
ggtgggtggggcccgggtgtgtgctggggtgagagtgaaggacatgtgacaatacgacggtggcggctgcaggatccgggaggggagtgaaagctccgctggggcgctccattagtgagcggtgatggttgccgcccacttgtattgaagcgtcctttgtcactaa

SEQ ID NO: 232458 - DNA, 445 bp, Homo sapiens
  chr6:135502364-135502809
  hyper
cgcactgcaggggcgccagatttggcgggagggggagtgtccaaagctctttgtttgatggcatctctgtttacagagtttacactttaatatcaacctgtttcctcctcctccttctcctcctcctccgtgacctcctcctcctctttctcctgagaaacttcgccccagcggtgcggagcgccgctgcgcagccggggagggacgcaggcaggcggcgggcagcgggaggcggcagcccggtgcggtccccgcggctctcggcggagccccgcgcccgccgcgccatggcccgaagaccccggcacaggtaacggggagccgggcgggcggccgagggcgggggcgcgcgggggcgcgcggggcgccaggctcccgggagcaggtgggaattcgttccgggatcatctgaggggctgtcagaccctccgaggacctggagccc

SEQ ID NO: 232459 - DNA, 214 bp, Homo sapiens; identical to SEQ ID NO: 200663
  chr6:135503875-135504089
  hyper

SEQ ID NO: 232460 - DNA, 56 bp, Homo sapiens
  chr6:135504369-135504425
  hyper
gcgggctcggagccgtttcttgcaagggcgagcgtcaactcggcagggattatatt

SEQ ID NO: 232461 - DNA, 111 bp, Homo sapiens
  chr6:135504753-135504864
  hyper
tagagcaagcaaatcgcatgcaaagttcaaaggcgagcctgggtggccagcctggcagggaaactcaggagctgggcgcgtgagcagccccggactcgccctgctgcgtcc

SEQ ID NO: 232462 - DNA, 69 bp, Homo sapiens
  chr6:136571551-136571620
  hyper
atgtcaggcaattcgggaagcgactgcttttccttctcaagaggcgggtcttccgagagtcagccaata

SEQ ID NO: 232463 - DNA, 210 bp, Homo sapiens
  chr6:136610843-136611053
  hyper
ggcctacctgacacgccgaatcgcggttccgggaatttatctccgttgcaaccacacagcggccatttcccgactcaagaacgcgaggaaaaccatagagctaccttcgacgcgctagcacgtctccgtcacttccgatctggggcgtggcctcgggtgccgctaaatatgcgggcaagccccgcccacccttccgctccggtccggctt

SEQ ID NO: 232464 - DNA, 112 bp, Homo sapiens
  chr6:136611539-136611651
  hyper
atccctttcgtggcgtctgatcaaatcggagctcaagccgcagcagccggaaacctcttaggctgctcgtgccaaagaaggccgcccttctggcggcgtgatgacagcttta

SEQ ID NO: 232465 - DNA, 551 bp, Homo sapiens; identical to SEQ ID NO: 200665
  chr6:136871695-136872246
  hyper

SEQ ID NO: 232466 - DNA, 408 bp, Homo sapiens
  chr6:137112602-137113010
  hyper
gctccagcgctgggcggtgggtggatccataggtctatcgcacaagtacacacagactcttgcacaagcacacacgctctctccggagcggcgagcgacaggagcagtcacgcagcggcgctcgctgcccccaaagtggggcaagaagtaaatgcttcccgcccagaaaaatgaaatgccccgaagaccgccagattaaacgcgggtcccgaccgcgcgggatgggaaaggggtcacacacgcacctgcattgtaaaagcggtccagcacggtggtttctccaaagtcgagtttcccaaaatgcagggtttccagggtggcgcccactgtctcgcacgcctcccgcaagctctgcagggcctcgctctcggccaccaccagttgcccttggctcgcttcgttgatcac

SEQ ID NO: 232467 - DNA, 194 bp, Homo sapiens
  chr6:137143483-137143677
  hyper
aaccagatagcaccgcagaggaggctgagatgcaacgacaaaagctgtcgtaattattaataatacctaaccctggatcactcccctgatagatctgtatctttgcagcaggcgcaattcagtttggattcacccaaaacaaaaatggtctccgtcggagtcaacgccctttcctgtgcggaccaatcagaatc

SEQ ID NO: 232468 - DNA, 1115 bp, Homo sapiens
  chr6:137241793-137242908
  hyper
gttgcggtaaatcacgacttcagcactttggctgaagtgtcgcgttcagcacagaggtggaagtaagaggcagaaaacagaagaaccacgagagaaatggatcctgtctattaaggcaacgtgatgcagcgctaaaaggttaggaggttacgattcccggggctaagagaaataaactgctggtggtgaacgaaaggggtgctggagcgcagcgatctcgaacctttcccttatagccaaaccctggccaaggccacaaatttcaaatcgcctgaaaaccaaactgtctggcgcttaacggttacctcggctgagcgaaacccttggctgctgctgatttaactacaggtccgcgcgagttactttccagggaactgaattcagaacaaagagttaccgaagccttactccctctccaaaattagaattccctttttctcttagtcatataggaaacacacagttcacaagtcctgtggtgcaaaggtgtgaaccctggcccagggaggtggtgactctccccgccctccgcctgccggttgtcctgcttccgaaagcaacccacgacggtcccgcagggtgagggttccctgggatcagttccctgggatccggagaacgccacgcggagtctccctgcagggtgaggggccccgggttcccgccccctccccctctactctcccattctgcgagcgcagccagcctcccctcccacgcttcgggaagcgtcgcccccgagctcctcggttcctggtggtggctactcgtgttagtgacttcgtttctgcgcgtttgcttattttcatctttgcctcagttcgaatgtgtccccgccaccaggccccgctgctgggcgagaccactgaaccccctgaaagcttccccggagccgcgcgcataatcccgggaccctctctggaaggcgtgcggagagcggtgcgcgtggcctggcaccggaaggagccagcttccgggctccgaggcaccccctggacagcgccccgggccgcgggttcctcctccgatgcccgggcgtcgtcgccgggatcgggagcttcgggggcccgccggcaccgacggttttcgcttccctggcgggcagctggacgagg

SEQ ID NO: 232469 - DNA, 677 bp, Homo sapiens
  chr6:137244348-137245025
  hyper
tggagtcctccaagcctggaccaagccggaaggagggggccgtgaacttccttgggtcacgaggggctggaatggaggtgggggatgggggcgaagctgagggttcccggggctactgcggggtgtctcgtgctgcgcagggggctgcggccctggggcagacgacccaggtgctgagcgagacgagagcctgggcagggggaagcttcactgggggccagaacaggcgttctcccccgcgcctggcccgctccgggttgcaggccactggctggggctccctctccctttggtgccccacggggcaggggctccggggtgcaggtaccacgcgcccaagtgacctcggtgccagctcggggaagccacagcacctgccccgagggcatctgcgctctccggggcctttgtcttggacagaggaagatggagtgacccggggatatggcgggaaggcgctctgagcactgagtttggctgtcgcatttgacacgggtggccgagggacggcgggcgtctgtcactcaggaatccggtgggcagagctggggcgcgaacccagtctcctttcctacccgacgcgttttccccgtgggtccccgcccacgccaacctgctgtcttctctctttttccttcccgcccgggctcggccgtcctcctcgtgcgccgcaggag

SEQ ID NO: 232470 - DNA, 532 bp, Homo sapiens
  chr6:137310848-137311380
  hyper
ccatggtgactatgaagggacgcagtcagtccaaagccaccccgggaaagatgtggcccgcagcctggcaggctgaggacgtgtagggggctgcaccaggcgcagcgagtaaccctactccgtttctgaacgcacgcgggggcgctgccaatgtaaggctccctgttaggaacgggtcctagccctcagcggagggtcacaaagaaatgagactttcctggcaagactgtggaatcagatcgagccatttttaactgtaaatgtctggctttgcctgcagcatttcaaggaagacttgactgctgtgcgttgccgccctccgccccgctcccctgcacttacccacccacctcgcctgcgctgatccgcagacgcgcgcggggaaaggcacgcgcgatgctttcccactcgctcagcgggcgccgctcactggaaactcgctccggattccgaacccgagagcagagcagagggaagcccctttgctgagcagctccttagtggagggcaatgaacgcgctgaaatcccaga

SEQ ID NO: 232471 - DNA, 44 bp, Homo sapiens
  chr6:137365286-137365330
  hyper
ttggcttttaaagcgcggatctcgcgacgcgcggcttgcaggac

SEQ ID NO: 232472 - DNA, 280 bp, Homo sapiens
  chr6:137365624-137365904
  hyper
gaagctccggcctccgcgcacctcgtcctctgcccgcccgaaagcgaaacctggccggcgggcaggaggggagagctcggcctcgagctctgcctggcggggccccggcctggaggcatccccgacccgcacctggcggcgcgacccacctacctgcccgtccccaaggcgccgccaggagcaacagcagcagcggcggcagcggcagcggccgcagggccgggcggccgggagcccgcatgggcggcggggctgggtcacatgtcggggggcagcagac

SEQ ID NO: 232473 - DNA, 2636 bp, Homo sapiens
  chr6:137808692-137811328
  hyper
tccttgtcctttcccggagtagacggaagggaggcgagatggtgggaggctgaataaccaggaggagaaaggagtcgccataaaatgcacccgcgccaccctccatgtcccccagtggaattgaggatcttgcttgtggcaaaagtgcgttcttggcaccacagccccgcagctggggaggggggcctcagtacccggcttccgcaattttccaggcgtggaggtgaggggtgcttgcgtgtaaactgtggcaacccccagaatcaggccctggctcctgcactttcggaggtgtctgttgcagaccacgaggaaaagaggggtcttactcaagtcagggccggacagaactccaaaacttacgaggacagctatccaacactgcctcacagacccttaggcgctgccccctctttgcccctgtcctcctgcggtgcgagaaacccgaccactctgcttctacccgaaccccaggacgcaacagtaaaatcaaggcccgtcgttgaactcccaggtctgcgcatccctccctcctggctccctggggtcttggccccagcaggtccagtacccatccccagagggacccactaccctgggcgtcccagggtgccaggcacgatggcctgcaatgggggctgcaatttaaccgaggcgagttaaattccttttgccggtgcctggctgcgaggacaaacgtccgtactttcgttcgggagccacgggcagtccaggggcttgggttagaagcaacggctctcttccaggggctgtgatccgggtcggccagggagagcgaggccccggggtcctctgtgaggtccccagcgaagagacgcagctggggaaggcgccgcccccgggccccctgcgccaccctaaccgggcctctccttagcaaagttgacaaattcttgagagtgtcagcccagggctgcgcgtgagggcgctgggaccggggaggaaagagcacctgccgcgctcagcccgactttgaatttgtttgttgttaccgtttttgtttttcctcccagtttccataaacgcttagtatttcgaggcactttgcaggtgttggcgcaggtgatgatgggcctcgttggactctgcctcccacgcatccttttgttttctgcgcgccagcctgtctgactgtgtcctgcggggaccccgagacagtccggggtcagggcgtagagactcatgcttgccacttgacccatccgcaacccggggaccccctagcccgtcgcggagctggagtttgggcttccggctcccagctctccgccctggatacaggaagagggcgggagaggtcgcgcacccgcgccgctcggcggggatcgctcacaggggctccggggccaccgcgagcgcggactgcggctgctggcgggctccttcgtcgtccaacgcaccccatcctctcccgccccgcagtgtcccagggaaggcttcactgaaaacagacgctcgacggaaaactgactctgcaggcccgagctttcggagtttgatttctgtgggccccttaaacgggcactgggtacaggagaggccccaactctctgcagggacggggagggaagggcactcactctcccgcaagttttcctagaggcgagctgaagatgcaggccacctccctcccgcacggcccctcccttggcctagttctgtccaaagacacttcccagccctcgagcggcggctcctccactcgattcctgcctacacgtgaagagcttggacccagcggggctgcactcgggaggacaggcccagatcctgcacggccgggaggacacctggccccgctgtcttctcttcacagctcccctttctcggcttcggcctggagcggtgcagggaggggtggacctggggtggccttaagatatctagcctgggtgcggagacttgggagcccacccttagcagtcactcctcctccccagtggagggtgagaaaaggggaacagagggccccggagtctctggaagggacgtggaacgcgaagttaaatgttggtgtctgagcgatgtgctggtggggcagagggggttccagcgtcctcccagagtgaggaggcttttgcaatttctgctgaatgcgtcagtggaggcacaaaaccttgcttgacctagcagctgggaaaaaaagaagttcgaggggacacaaggccccctgctgctggagcgaggaaaccctgggcttggccagctcgggccgcttctccctgcccgtttgcgggctgtcggcctcagcggtcccagaaacaaagatctagtgagcccagccgacgccggcctcattttccctttctaagggtcactttcttccgccctctaaattaggtcatcgcctgggaaagcgccgagaggtttctagtgtgggcttctcaaggtgtctccgcccaggaggatttcgccatccatttaaacgtaaggcggggtttaatctggaatgaaaggatcgtcgtggtgtttccagattgaatgaaaaactaaacttgcaaaatttcgagaaagtgacaagtttacaacgaaaaaaaatcccggccgaaacccattttcacctttgcggtcatgaaatcttttttctggcgtcgataattcgagtatttaaaggg

SEQ ID NO: 232474 - DNA, 943 bp, Homo sapiens
  chr6:137814250-137815193
  hyper
cacgacatctggttcgagtccccctttgctaccacctagaaattgcggtttgattttggtcctttccctccgggggtcaagtggagtctgagatctctcagacagcgtgggaggctgcgggccccggagcctgccctcccgtgggccgagcgtgcagcctccctcttccctcccggcccggcaccgcggcccctcccgccgctctccctcctccttggcagccgggcccgcccgctgctcacttgagcaagtccttggactcggccgacagccgggccatgttggctgtggagagagcggacaggtgcggcggcggcggcatctggcagatggtgcaggggcagggcagaccagcccagtgctggaagccgctgcccagctgcagcgcgggcggcgtggagggcgccttgagtagcgagtggggaggccggatggtgccgatggcgggaagtgaggcggcggacagcggtgacgaggcgttgccagatgagagcgcgccgcccaagatggggtgcaccgggtgcacggagttggccgcgtgcgcggggtggccggccgagtggcccacggtcccgcagtgaaaggccgagtggtggcccccatagatctcgccaaccagcctcttcatctcctccagggagctggtgagcatgaggatgtagtttctggcgagcaggagtgtggcgatcttggagagcttgcgcaccgacggcccatgcgcgtagggcatgacttcgcgcagcccgtccatggctaggttcaggtcgtgcatccgcttgcgttcgcgtccgttgatcttcagcctcaactgctgtaggtcctgctccgacagctgcttcttgattttgtacttgctgctctctcccgcggccttggcgccagcccgcgagaggctttccccgggcatcttctgcatcatatcgccctgcgtggacgagaccga

SEQ ID NO: 232475 - DNA, 394 bp, Homo sapiens
  chr6:137815402-137815796
  hyper
aacccacttctccgcggcaagacgtgagaagaaaagcggagacgctgcttttccccgcctctctccctcccacgcccctctctctggttaggctgcttcctggacagctagttggtgtgtgcttgaactaacctcacgctgaaaaagaggggcttttatagagctgcggcggagaaaagagacaaaaggagccctcctatctatcctgggctggttaggatgacgtgccatcattcagggcggtgcgctttgctgtcccatttagcaaggattcctattcatattcattgtggggccgccctgggacacctctgctccgaaccgctaggagcccccaggcacaaaaccctctgattgacacactcaccgctccagcttacgccttcctgatttt

SEQ ID NO: 232476 - DNA, 783 bp, Homo sapiens
  chr6:137816492-137817275
  hyper
ggacggtccgcgcccgaagctccgccgggcctcctctggccgctgtgctgacgtgccccgagctccgggaactcagcggcaccccggcctgcgcgggtgggtccaccaggctggggccgccgtacggcgtcggacagggaaatcagaagctcataataaactatctgatgtcggggtggtggggcgggggggtggggtgcgtgggcaaagaagcacgggggaagggaaacaacgaaaggacctagaaagccccttgtgcgtgcccgggcactgcggttcagcgcagagtcgtttctgggaataaagaggaggtcggagtttggagccttcggtgcgagtgcggaggtgggcgtagatctttcttcccccttgctgtgtttttgtgatcaagactttagctcagcagcacgaggggcgggaaggcagaaatcccgggaagggagagagccccaggagtggtctctagaagaacccggacaccgcccctctcccggcttggtggaacgggaaacaaacgctagctagtgactgagagtctcggtggaagtgtgaaatcgaatcaatcgcggaacctcgggcacttggggcctcttgcgccgctgagtcacttcgaagaacaggatgcccccctttcccttgactcaaaccgagcggtcagtgggagagggatgcgcgcccaggtccggagtttgcacgctctgaggctgtgccccactgacagtcacgctgcgaaggcagctctggccaataccagaaggatgggcaaacgcaacattggcatgg

SEQ ID NO: 232477 - DNA, 124 bp, Homo sapiens
  chr6:137817737-137817861
  hyper
ccccgccctgcggacggtgcacaggtctggcccccgccgtcctcctgagccacctccctgaccctaggtcgtcggcggcgtctgtccttcccacacccagactgaaaacgctgcacctgagttt

SEQ ID NO: 232478 - DNA, 1351 bp, Homo sapiens
  chr6:137818092-137819443
  hyper
cggggctggaagtccggggccagggttctgggagtccaaaccagaagccactctccttcagcacagcctttcagccgagagggggctgacgcctgccgcagccggttccgagggggctgcgatgggccgggaaggggcgactgggcctttgcccgaacagaccaggacattcccttccttcttccctaagggttttcagctccagtaacagaggtgcctgaaatgggagatctgcggggaccaggccgggactccctggctccgaggccgggacgtggcgcgccctccgctcctcggtcaccctctgctttttcgaaggtccgtaatgcgtgagtgtgggtggtccaaggttcagggcctccttccagtaagtacttttagaagctagttcccccacttcccatccgttgcggggcttgacaactagacgaggggagtgagtaaaggtgccacaactttgcttaccgtaaaatgggttaatactcgccggggcccaaaaggctgagtcgccccgcacgtcttgcttcgtggagtctcttttcgacccccgccaccgcagctcagttcctcggattgagccctgaacccgagaaggagcaggcccggagctcaggagggcaggcacacggatttctttctgagggctgactaccaacgcccaccccagacttgtacggaaggagagagtaaaggagtcgccgcctggccaaggctgcagcagcctacagaggctcagccggagacgcaccatgaccttggccctggccgagacccctttcggagggctcagaccggcgaggagccggagcgagcgaccctgctgcggtggctcgggctgcgctctctcgggccacaccccgcgccctcgcggctggggcgggctgcgccgcggaggcggggatcgttctccggcaacaggtgcgtcccaaggcaggcaggctacttccctccaagcctgtcttggctctgagaagagcctggagtttctcagccttcctacaacatatgaaaacagcgggtcggcgcgtggaccggggcagaagagccgtcctgctgtacccgcgcgcccagggcgctccgcggggaccgcgcactcgggaagctgtgctgtgctcaacacccccctgtgcctcccagatcaccagggatcgtctcttacctgacacccagtgcgcgccgctcggtgcccgacgcccactgctccgcagccttagccaccgagttcctctccagcagctgccggctctgcctgaggccgcggcgattttggctcaggagcgaacccccacccccacccccgcaagagtccagtagcaaatgtcgctagctgacctgccgaagagctactgtg

SEQ ID NO: 232479 - DNA, 161 bp, Homo sapiens; identical to SEQ ID NO: 200670
  chr6:138132643-138132804
  hyper

SEQ ID NO: 232480 - DNA, 193 bp, Homo sapiens
  chr6:138188397-138188590
  hyper
agtctgcagtcttcgtggcgggccaagcgagcttggagcccgcgggggcggagcggtgagagcggccgccaagagagatcacacccccagccgaccctgccagcgagcgagcccgaccccaggcgtccatggagcgtcgcctccgcccggtccctgccccgacccccgcctgcggcgcgctcctgccttgacc

SEQ ID NO: 232481 - DNA, 86 bp, Homo sapiens
  chr6:138428363-138428449
  hyper
agactgcaaccagccgcggccggccagcgcgatgatgtcgaaggcgatggcgctgagtaggagcaggggcaggatccagcggcagc

SEQ ID NO: 232482 - DNA, 527 bp, Homo sapiens
  chr6:138428798-138429325
  hyper
ctggcctctccaggcgcgtgttttgtcttcctggcgcaccaacatatacacttgtttatctgcacagcgccagcctaatatctgacccctgatgtcgcatcgtggggcggtggtcagcagtgccatatctgagttttcagcagtgtgagatgggtgttctaattgcacctgtggataaaggctgcactcctttggacgcgtgcacccaaacccagaagcccgtccctgacccctgctgacacaggtgatcccttcctcctaggctccgcctttgcaccttggaccgtggctccccgggtactcttatctctttgcatgctgttctttcctgctgggttgccagattttggaaagcggaggcgatgctgaatttatctgtgtatccttagtgtccggcaccgtgtttggatctcaaggggagctcagtgaatttgatgaatgaacatgtaatttaacaaatgctcgcttcctttcggaaaggcttcatctggcttccccagataatttcatgtcgcctctgctgcagt

SEQ ID NO: 232483 - DNA, 1299 bp, Homo sapiens
  chr6:138482425-138483724
  hyper
gctttggattcaggacgtgtttggagtctaactcttgttggtctgggaagtaacccagcctctctgggcctggtttccttgggcatatcaagctctaccccagccccaccgcagcccaccgcccgccgcgtgttgaaagcttgactggagtttccctgcaggcaggggcacagtgtgtgcaacgctgcatcgcccgagcctggcacagggagtggcccaaaaaagctgttagtgactgaacgcaagaattttccggttagcagacgacgggatgcagcgggcgcggcgcctgcaccacgctgggggtcccggtgtccgggctgggccgctccgactccgcccgcggccaccgtcggctcagggggtgcgaagaccgcggcgaggcccctccccgcctgcctcccgccgcccgccgcggaccaggcgctccctcccggcggctggcgagccagctccggacatccgtccccacctttccgctaagcgcggcgcccgcggggcctgcctcggcggtcaggtcagcggcctccagcctcactctccggccccagcccgcagccgccgccgagcggagcgcacctgacccaggcgggcggggcggggcggcgggcggggcgcggggctgacgtggcccgcggcatggagcgggcgtgattcatcagcatccgcgccggggcggcatgggggcgcgcgcggcggccgcctaggcgcccagggccaggcagcggcggcttccccggcccggctcgcccgcgcttctctccctgtgggcggcggcccggcgcctggaaggtcaagatggaagaaatcctgaggaagctgcagaaggaggcgtccgggagcaagtacaaagccatcaaggagagctgcacctgggccctgggtaagcgtccggcacctgctcgccgcggcgggagggccgcgcggccggggctgaacccgcgcctccgcgcgtggggctttcgcggagcgtcggtcatgggtgccgttctggcgattgcgagagtcgcctcgggaaattgatgtgggatttgagagtcttggctcgggcgtggacatcagccgcctcccctccggtctctttcactctccgaaaccttcctcgggaaccgctgtcctccctgcctggcggcccccttctcctggtcccggcgctggggacgatgcttccccatcgccgagttaggcaggacccggagccggtgcgaatcctggggcctgacagcgaagcgcctctggggaaaagggaagttaaaccaacaaccccgatgtcgaatccttggcgagtggaaccaggaa

SEQ ID NO: 232484 - DNA, 128 bp, Homo sapiens
  chr6:138724516-138724644
  hyper
cattgccaatggtcccggctgcctcttctgttcacaggggcctactccccttcacccttgggggatgtcaccattgcttttcacgtggccaccctcctgtccgttggctttcgcgtggggagtgcctg

SEQ ID NO: 232485 - DNA, 357 bp, Homo sapiens
  chr6:138725857-138726214
  hyper
ctatgctacgcaaacgagaaaccccggtcatttagctctaccctccccgctacccccagtgcaggtcccatctcaatttcttgtctttgcggggtggtggggcggggaggaactggttacgtcccagaacgcgcggtggaaccctccgaaccgagggggtgtaatagatgcttgtctgaaagtgtgaatcgagtccccagcgtgtggggttggggccgctgcggtccctaatcgcaaggaggggaacctcgtggaggggaacctcccagacctaaggagcggggacctcaggccggaccccggggcggtgcagcccctagacaggacggctccaggtcgacccgagatcatggcacc

SEQ ID NO: 232486 - DNA, 324 bp, Homo sapiens
  chr6:138914348-138914672
  hyper
ttccagcactgacacggaggcagtcaggagcactgctaggactagaatcccgttgtccttgccccagtccaggctctgcccactctcccatgcttcaggtctggctctgaagttcgtgattccccgttcatagtcttcaagtacatcagtgagtcacgtttccgtttcctctcactgttccaaatgctgggctttggtagcacagagttcattcattcacaatcatgctaattcactcatacagagagagagtgctgacgcacttaggaattatgacttaacatgcaattctcaaatcagtgaggccaacggctaactaaactt

SEQ ID NO: 232487 - DNA, 162 bp, Homo sapiens
  chr6:139013361-139013523
  hyper
caattcccaccctccgcgcccactctctcgaggtagccaagaccctccaggagtccgaaagtcacagagcgctctgcgcccctgccacctgcccagcctcccgctggggtccggcagtccccactggagaccccgacatcgcggggctccgcggcccccgcg

SEQ ID NO: 232488 - DNA, 81 bp, Homo sapiens
  chr6:139013763-139013844
  hyper
ctgcgccagcaggcagcccagggcatgcgagctgacctgctccagcgagcggaagagtggcgcgcccgcagccccggcccc

SEQ ID NO: 232489 - DNA, 218 bp, Homo sapiens
  chr6:139094519-139094737
  hyper
gccgcgagaagtccgggcaaccaatcggaaacaaccaaggaacagttgcatggcgacactctggttccgccttcgggcatgctcgaacagcattctgggaattgtagttcggggggggaatctaacactcaccgaggggcggagtagcttccggaaagggtactgcatttcccgtttctacctccactgcacccgcttattgcgtcttgctcctgggt

SEQ ID NO: 232490 - DNA, 81 bp, Homo sapiens
  chr6:139309544-139309625
  hyper
gccgccctctgcgcggagatctcagcagcaagacccccggaaaggggggtgcagtgggaaacagccggcagctcattaaga

SEQ ID NO: 232491 - DNA, 236 bp, Homo sapiens
  chr6:139349617-139349853
  hyper
tccatcaggaaatcgacgcccaggatcagatgcagatcctgggatccttggctctgagtagcacggtggaaaagtgaggtaatccaggctctgggcccgttttcctaggagcccagggcgcttcacctgtctgcagtcagcccctttcttggacgtctcctcccctgagtttcctcctcataggcttgtccctgggagtgtgggcggcccctttcttgagcgcagaaacacttact

SEQ ID NO: 232492 - DNA, 294 bp, Homo sapiens
  chr6:139350905-139351199
  hyper
aagggctgggaaaacgtgcccagcccgagtgtgtaaagttggttcctgattccggacatacctattccagtaggctttatttccttggatattagaaaatctccatgcattgcctccaaacttttgaaaaataacaatgccctgagggtccttaaatacattctaaagtgtgtattggtggtgagtttcgggttctgcccagtcctccgactttccgcttcctttgtgtttcccacgcacaaagccgaaatcgattctgcgacaattagagtgcctggccgtcatctacctcgc

SEQ ID NO: 232493 - DNA, 251 bp, Homo sapiens
  chr6:139694251-139694502
  hyper
ccggggtttcgatcgagtcaacagctcactctgctgggctgctgtttgcacacgaagtccgtcataaaatcaaactcgttttgccccagccagagttcgggcagctccttgatgcggtccaaacccatttctatcaccaaggacataagaacttcctcgtcgatgaaatcagtgtctatgacattgggcggcagcattgcagcggggacgtgggccacggaggcgggcatgttgccgctgccgctgccgcc

SEQ ID NO: 232494 - DNA, 104 bp, Homo sapiens
  chr6:139694964-139695068
  hyper
gtggtgatgggggctcgggaactgccccatgcccatgcggtgggcagggtgatggtgcagcccattggtgccgtcggggaagcgcccgtggttcatggccatca

SEQ ID NO: 232495 - DNA, 63 bp, Homo sapiens
  chr6:139695308-139695371
  hyper
ccctgcgatcgggcggggggacccgagcccacaccccctttgctccccgaagtggcctaataa

SEQ ID NO: 232496 - DNA, 447 bp, Homo sapiens
  chr6:139695584-139696031
  hyper
ggcgggctcgtcgcgtccaggaccggctcagcagcacatagaggggaccttcctggcgtgcaaagcgcttcgctgtcgcgatgtcggcgccgaggtctcgcagcggccgctggggcagattcggagccgttcccttttatttcccctccgttgccctcacagctcggcaggaccgcccggcagctgccaacaatgagctgtgtttcttagggctttggccacagttaatataggcatttcggaaaggcggagcgagagcctccagggcgggcggcgccaagacgcggattccggaacaccgcgaacaccctggaccgggtcccggagccgcgtccccgccgcccgcggcacgtgctgcagaggctgcggggcccgggggccgcccagtcgccccgtcgccccccgactctggtttcttcccggcccagaaacgcgaggttggctcag

SEQ ID NO: 232497 - DNA, 183 bp, Homo sapiens
  chr6:142410084-142410267
  hyper
agtggtttgttctcgcggttatctagcggaaaacagcctttcaggaacaaggagctgtcccttggggatcagtagaagcacctgccggactcttcgcccagagaagcagaagtcatcctggcgctgtccagcgggccgcagctgaaatcccgggaactaggcggggccacctgcaacctgctt

SEQ ID NO: 232498 - DNA, 264 bp, Homo sapiens
  chr6:142468183-142468447
  hyper
cagagagcgctagcgccatgcgcggcataagcgccaaaatgctcgggtcttctgtgggttctaaccgccgagagccaagcaccctgaggttgtcccagctggggatccgtagttgacttgacgtcgctgagcaacggaagagtgggcagcatttgctctgaacgctcgtgcgcgctaccgcccagacggaagcggaagtgccggtggagcgcgagtaggaagtggtgagttcggagtagagatggccgcgcttgcaccgctgcc

SEQ ID NO: 232499 - DNA, 272 bp, Homo sapiens
  chr6:142622891-142623163
  hyper
agctgcgccttcgggacagccccagccgcggagcgcccagaccagggcagccggagtcgggtcatacgccgcacgccgccggggccgccgcacctgagcccagctccagtcacgccggaagcgcgggcggagcgcacgggtccggggagagtcgcctgcgcccgcgagggggacccaagtacctagggtggtggccgagtcccgcctcccgccagcgggggcgaggacctgcgacgcgcacccctgcctggcccggtctcctcagcaccagc

SEQ ID NO: 232500 - DNA, 105 bp, Homo sapiens
  chr6:142623343-142623448
  hyper
gtcccgccgcggcgcagggctggggcgcctgggttccccctgggtggagcagcggcagcagagcgggaaagtggtggaggatgatcttgcggccaaaggggacct

SEQ ID NO: 232501 - DNA, 1037 bp, Homo sapiens
  chr6:143247636-143248673
  hyper
ggctttgtgaaaagaaagagcgtatattctatccgggcaatgacaaacggactcaggcctcctgaggtcagcgctcctgggcaccatcaggccccacttcgggagcccccggtgctccgggcccacctgactgggcgtcctctgagtcagggaggtgccagtgctgtggtccccgcgagcccaactgtcccctgacccccgggcttttccgcaccgtggagtcccccgacacgctggggccagtgaacccgggccggggcgcgcgttctccctcccggaccagctcccggcgctgggcccgcggccgagaaactaggtctgggccggccctgcggcggccgccgggcgcggcgagccccactttctcccggcaggaaggggggaggccgagagcatttcctgttgtgcagctgagccctgcggagacgtcattgcattcatgctccctcgggtgtcagcggacggggggccaaagttcaagccgcgtccagggcaggcagcgcgcggcggcgcggcggcgcggggcgggcggccagggctcccctctcccgctggcgctcccggcgcctccgtccccggccggcccagcgctgctaccggaggccagccctggggctccgcggggaagagctgctcttcctcccggaggaaaccgagctcgcaagcccagcgctcccagccgcagactgcaggctgccctcctccaccgcctggatttcccacggggaggaaaaggcgtgcgtttccaggtgtttggaggacgcactggccgggcgcactttcctcagcgtaattttgaacgcagtttccctaaagatgactcttttttccactaggattatttccaagtcatcaaaagtgaaaaatcacgtaagtgttgttgcagttgttttcccctcgttttctatctcctttccaattgtgaattccgtaaataactgtcagacataaaacaggaaaaggaacatttcttcactgcagagctccagtaaggtgaaagtaggcaagaaggccccctgagacgtttctaaaagcat

SEQ ID NO: 232502 - DNA, 93 bp, Homo sapiens
  chr6:143266222-143266315
  hyper
cctcccccgctacctgacaacgggccgccgccggccgccgcagccgcagcggtggccgggccgtgcgcgccggtgcacgtcgctcattagtaa

SEQ ID NO: 232503 - DNA, 173 bp, Homo sapiens
  chr6:143267435-143267608
  hyper
cccgggctgtggacgcaccgggttattcctggcagcgcctccccgaacagaagttactaggaggagtgcgcggcgagggcggacggggggagaggcggagggagggagggaggaagagggagagactcagccaacgacgtcatcggatcccccagcgcgtcccagggagggag

SEQ ID NO: 232504 - DNA, 35 bp, Homo sapiens
  chr6:143268449-143268484
  hyper
caccggggctctctcgggccgttaccctgcctatg

SEQ ID NO: 232505 - DNA, 396 bp, Homo sapiens
  chr6:143268758-143269154
  hyper
gatttgacctggcgcgacccggctttctggccggggttccccctgagcaggtgactccgtgggaggggtggaaatgagtctctggaattccgggccaaagacaataactgtggttctgcttttaaagcaggtatttcaccagcaactgcggaatgttttgtgtctccagtttcaaatttcgcggaaagggaccaaatgtgaggacatataaaatatccccttctcttttcattaaaaatgagtgcattacaaaggaagggcagccccttaatgcctgcgagaatagcgctgctggtttcgtttttgttttgttttgttttgtttttcattctgacccacaatcagtgtatttttgaggtccctatgcaatggcgacggtgccgtgaagggcaactc

SEQ ID NO: 232506 - DNA, 458 bp, Homo sapiens
  chr6:143771538-143771996
  hyper
ctacagaaagtttcgaggcagtaaagccagttgttcacccagaacatctgactgccataaaaattatggtgacgagaaagaacgtttgctcaaatgccggggtcgggttgagggctggagaaaggtcccaccccgcagcatctacctcccgggctcctcaccatgtgcatcgcctcctccatccacttttcggtctcctctgccgacaccgagcacgcgccgcttgcagctggcttgggtgccgccttcgcctccatacccagccaccactcagctacagagcccgcggcagaggaggagcgcgggcagcggaacgcggcgggcccgggaccccgtttccgggggtagtctaatgaaaaggcactcgggagctatttctgaacggacctgggcttgtcggaccagtgagcggcggcggctgcgcggcggcagcggcagaaagcgtagctgctttgctg

SEQ ID NO: 232507 - DNA, 314 bp, Homo sapiens
  chr6:144164206-144164520
  hyper
cccctctggtctccgtagagggagctataaaaggttcgtccacaagcagaaacccctctgtggcgcctcaacgttaaggacccccacgattccctttgcccggcgggagactaaaggccggaaaagtacagcccgcccaggggtgggagccgagctagccccacctcccggtggcttctcgcgatcgtggagacgcagcgagcctatgtaacttccggtcgcgacccatcagctcctcggcgattggtccgtttccacggccggctgggtgacgttatcgccgggtcctggggctgcacgtgtggtgaggccta

SEQ ID NO: 232508 - DNA, 358 bp, Homo sapiens; identical to SEQ ID NO: 200685
  chr6:144384552-144384910
  hyper

SEQ ID NO: 232509 - DNA, 155 bp, Homo sapiens
  chr6:144605317-144605472
  hyper
ttaatctttactgccgcgtaaattaactcaaatattaagccagcaataaaccggcgctccagtatcaaccatccttttctctgttaatacgaactaggaactcaggttgctgttttctttcccctcccacgtgtgctgatcgtgtaaaagaatca

SEQ ID NO: 232510 - DNA, 96 bp, Homo sapiens
  chr6:144605682-144605778
  hyper
ttcaatattaacaacgacactagagaaataatgtaaaataaatatacggttggaactaggggtaaaaaaaaaatcagcaacgtcagcaaactgaga

SEQ ID NO: 232511 - DNA, 262 bp, Homo sapiens
  chr6:144607118-144607380
  hyper
cttttgcgtgccctttcctcggggcctcagtttagctccccgcggtgcgagagagaatgccggaggcgtggagagctcgggcgtggaggtccttgggatccgtactagttgtgaacgatccaaacttatctgaccagctctgtgctgcctccctgctcccctaatcttcctccccgccggggtgacagagtcgccctccgtgcatcgcgcggtgcagggcgctgggccagtgatttgcaagaggggacgtggcctcttagga

SEQ ID NO: 232512 - DNA, 352 bp, Homo sapiens
  chr6:146136237-146136589
  hyper
cgcgccgctagtcgaaggagcagcagccccgatcccttgactctggggcactgctttccctttagctcatttttggaggaaatgggtgcgcccttgctcgacctttggtgattgccgccacaggccttcccgccggctaactcagcgtgcccaagtcccgtgacttagtgccaggacggtgctgtgacccgttatcccctgtcgggttttacctccccccgggagagctcagccctggatcccggcgggcggcggagcctctctggagcccggacgggacagcccaccagggtctgcttctgtgaggggccgaggcgtcattccgcgaaggtaattagctggggaggggact

SEQ ID NO: 232513 - DNA, 304 bp, Homo sapiens
  chr6:146285325-146285629
  hyper
tgcaccaggcctgcgctcctctacagacccagcagatcacgggcacgcattcgccacccaccgaacatgggcttgaggtgggcacgagcgctttttgccggaacgtgtaggggtcccccgggagacccagaaaccacagcgcctagctgccgggcgcgcgctgtagcgtggggtcaaggcgaacgcgctcgtcagagcaccccgccccctttctcctgcgctggcttcatgagtctcttctgcgcaagttcacactgttaaaaacttgctgaggatacagtggagtctcgcgatagctctgccc

SEQ ID NO: 232514 - DNA, 683 bp, Homo sapiens
  chr6:146348676-146349359
  hyper
tccctctatcaaacgactgatttttatacatgagataatagacaagccttgggtgacctgtttttttttttcttccctccccctctttttcccttgcggtaaaatagtgctgaagaaagagggcactagtgtacagcccagatcgcatccttgcaccgtctggattagagctgaggcgtctgcaagccgagcgtggccacggtcctctggccccgggaccatagcgctgtctaccccgactcaggtactcaggtatgtctcaagtccatgtcctccaaacagactcaggtgagcggacacttcctccggtgaaacccacccacaacggcagacaaagtcccagtctatcagattttcctccgggtcccaggcgcattctcgcttatgtatttcttttcgtcctgtatcctcaggaagagtcgggaccaatgggtgcctgggttttctttctcctttttctgcctcacctcctgtgctctcctcgcccgctcccatagcccccttttcgtcgactctcaccttgagaaaaggagcaggggaggaacgggagagggagccaacttcagccccgcaggcggctgagatttggcgcctctgtccccaagcgggtgggtttggatatatacctgcacaagcggtgcaaggtgatgagaatgagggcggaggggcggtggggactcgag

SEQ ID NO: 232515 - DNA, 263 bp, Homo sapiens
  chr6:146349419-146349682
  hyper
taaagaactcagaggagggaggttgaaagagcaaagcgggtcagggaattgcaactcactggtcaaagcgtcccttgcaggccctgccagggaatgtctggctggaccgagcactgtccagggtcctgaaggcggcagggctcaggctgccgcggcgagagcaacccggaagctcccctccgttccctttctagcaactatgcaaaccccaaagcaagcgcaggaccccccctaacccgtccacccaccgcgggaaacaagtt

SEQ ID NO: 232516 - DNA, 466 bp, Homo sapiens
  chr6:146755455-146755921
  hyper
gtggtcagcaacttcagtaccgcgatcccggattttcacgcggtgctggcaggccccggtggtcccgggaacgggctgcggtccctgtacccgcccccgccacctccgcagcacctgcagatgctgccgctgcagctgagcacctttggggaggagctggtctccccgcccgcggacgacgacgacgacagcgagaggtttaagctcctccaggagtacgtgtatgagcacgagcgggaagggaacacggaagaagacgaactggaagaggaggaggaggacctgcaggcggccagcaaactgaccccggatgattcgcctgcgctgacgcctccgtcgcctttccgcgactcggtggcctcgggcagctcggtgcccagctcccccgtgtccgagtcggtgctctgcacccctcccaacgtatcctacgcctctgtcattctgcgggactacaagcaaagctctt

SEQ ID NO: 232517 - DNA, 1891 bp, Homo sapiens
  chr6:147828685-147830576
  hyper
atgatggggaaactcgattgattttgttacctcctagagggaaaatgccgtgggcggagatgtctgagcgtcccttccaacacgagctgggtggtgctctattgattttcacgcgatccccgggcgggagcgagaggataggctcggattcccgggctccaggaccgaacgcctggcagtgtccccgggggcaaagccaccccgggagcccgtgcagtatactaggtggggggcccggagagaaagcatagcgccgacgagggggaggggccgggcagaaaggagggtggggtaccgggtgggacacactgacctaggagaaagtacaacccaccccaaactttcgcagacccgggagcttaggaagggagagccaggaagacagcagcctctcctgccgcccaacgtgcccagctgcagcgaggaggggcggcgcgcaagccggctggacccgggcggtccccacgttgcgcccaccctccgggccaaaacgccgccgctcgggtcactgagtggccgcccacggaagaagtcagatcgccgggctctgggctgcgtacgggatccgaggaagggggattcaaacgcggatccggaaggaagggacactgaaccccgcagcgtccccagcgccgtggggcggcgggacgtgtccttgggctgccagcgggcgcggaagctggagtccggcagggtcgggaagaagtgagcacagacttccacgggtagaagagtcagattaaacagaaatgtgaaaagcaacccagggcagccaacggagcccagcagcgtagaagccaccggcttcccgccgggaggactacagtgactgacactcgcgaagactaggcgctcccagcggccgcgggtctgcgtggagaagtcgcctcgcggcgcggagcgcgccagcggcggcggcggctgccagagcgcgagatgcggcgcgcagccgccggaccgtcccggctgggaaaactcgcgggcggcactgcgcagcgctgacccggcgcaggtccgaggggtgtgccccggcccctcccgtctccgccccctcccgcgccagtcgcgcgcccctccccgcggcggcagcgtcggcggcgcatccaggggcggcgcggagccttgctcagcccagcagccagtgcctgcgagctccgctgctgcttggggaattcactttgctgcttgttcgcttctcccttcctcaggcttcttctgatggttttccgtctcctgcccgagcctttcctttaaaaggaaaactttactgcgatacccttttccccttggaggagaggattaaaagttccaagaactggtgccgcccgtgccatttgggcgctgggaaggtgctcggcggcggggttcccggtcccaccatgtgcaccaacatagtttacgagtggctcaaagcgctgcagcttccgcagtacgcggagtccttcgtggataacggctacgatgacctggaggtgtgcaagcagatcggggacccggacctggatgccatcggggtgctggcgcccgcgcaccgccgccgtatcctggaggccgtgcgccggctgcgggagcaggacgccaacgccgccggcctctacttcacgcttgagccgcagccggcgccccccgggccgcccgccgacgccgtccccaccggccgccggggggagccgtgcggcggcccggcccagggcacccgcggggactctcgcggccacacgaccgccccccgcagcagggagctggtgagctaccccaaactgaagctgaagatcatgatcagggataagctcgtccgtgacggcatccacctgagcaagcccccgtactcccgcaaggtaaggaggtgccgtccgggcggcccggggcgcgcggcgggaggggacacagc

SEQ ID NO: 232518 - DNA, 1019 bp, Homo sapiens
  chr6:148663339-148664358
  hyper
ccaaacaatggctcgtgcccaagctttcacacttgttttgcagagaagtcttggctggcagaggcaggatttgtaattccttgggtcgcttgacttcacgaggggcgaggtatgcattgtagcgacacggactacttgtgaagcctttgggcgggagtcgcttaaagattaactttctcgggtttccgttaccaaaagcgtttccgtgaatagcgtgattggaaacttgtgcgggccggagaccgcggcgcggctgctctttcaacaggcgatttgttctcctgtccgaggctcatttccatgcaaagagcctgacatcagagcaccttttgttgctaaacgctttctttagcctcgagggagagagtcatgtggagctggaagagctcattttgaagagaggggtcccggggagctccctccaagatctagaggctccgcggccacccctgccgggtcctgccaagacttgctagaaggaacgagtcgcgtgccttagttagttggttcccgtcacaggaagaaacgcctttgcagtgggtttaattgcttctgggccgagcgaattccccgccgtacaactcagtggtgcggactttgcctcctgctaccctgttgctgcgccgagcggggtgggaaagtttctggagttgtcagtcgcgcagcccgtggccacctagacccgaggtgcgggcgcctgcgaagggcccccgcggggtggccggggccgccggggcatgcagcgcgggggcgcggctcggtgacgccgcgggcggggacccggcatccgggcaggctgcgcgcgggtgcggggcgagggcgccgcggggactgggacgcacggcccgcgcgcgggacacggccatggaggacgcgggagcagctggcccggggccggagcctgagcccgagcccgagccggagcccgagcccgcgccggagccggaaccggagcccaagccgggtgctggcacatccgaggcgttctcccgactctggaccgacgtgatgggtatcct

SEQ ID NO: 232519 - DNA, 277 bp, Homo sapiens
  chr6:149067613-149067890
  hyper
agttcaggcgctgcgcctggccctctggggcgtgtttgaccataactcgcaccgcttgctcttttcccatttcagcaaagtcttgagcctgtattctagtaccttttatcagccttgggtaagcagctcgcacggggtatataaggagaatcaactttctgaactgaaaaaaatgtaaatagtaaagtcagtcgtgcttcttcctgccggtgactgtttacaagagggaagtcagcggggcccccaagaggtcgctggtggcgcaggaaccgcatcc

SEQ ID NO: 232520 - DNA, 352 bp, Homo sapiens
  chr6:149068102-149068454
  hyper
cccctgtcaaggaggtggagcgaggggatggtgtccgcctcctgttcctccctgccgttttttagagaagcctgaaccgggacaaaacacgccgagacctacagacacaaagccggggggtccacgctggcgctggaggcgagccccggcggccgcaagcgagcccgaggcgcggcggggcgcggggcgtggggacgctagcgggcgccggacgggcgcggcgccccgtcacgggcagcgccccgaaccggggccggacacctcggccgctcgggccgcggcggcggggaccatgccgaagaaagtctcctgagcccggcaacttcggcccctccccgcccccacccggctg

SEQ ID NO: 232521 - DNA, 1089 bp, Homo sapiens
  chr6:149068749-149069838
  hyper
tccctcctctatcagctcagcgggggaccccctcgcttcctgctcgacctgcggcagtacttgggtaaggaagctgggcaggcgctagggcggcgccgacagcgcaaagttgtgcggcggggagagggtcgcggcggggacttctcgcgctgccaccgcgcgccgccgccgccccgggtctctccaggtgctaagcccgtgagcatctgtgccgcggtcgggagcgccttcttcctcccgcgcgtccgactgtcctcaccgaggcgggggcgccgctgggttgcgctgccggcaggtaccccggggcgaggcaccgctcaccttccccccgccccacctccgccacccggatccggactggggcggagtggatgggtgtgtggggtgtgccggagtgtgtgtatcttcaggcctggcggcgcggggagtggcgaagggaagggaaggtcctcttcgttgcattgttagtgaccgcagttcagtcccgtcccgcgccccggggagtgtgggtgggtttagccctttgccaccgtccgctctgagaattctgtcccgcagatcccccgcctgcccgccggccctagtggctccgcgctgtccccgggctggcttgtcccttggctgccgctgcccaccccgccgcccgcagctagcctggcgcggggaacgggttgcatccaggggtttggggatgcccgagggcgctggtcagcctggccagcagtgtcgcccccagtaacccgaggatcctcggcgctgtgtgcgtctcaagctcaagtcaaaacttgtgtgtgtgtgtgtgtgtgtgtgtgtgtgtgtgtgtgtgtgtgtgtgtgtgtggtttattaggagagaggccgcctgtctttagcagaagtaaggaaggggtttgacgggagggaaagagccgctccagcgagaaggcgtgaccccgcagctccctcgtctcggctgcgggagccaggggtgccagggacaggcgagcgcaagcccaggtcgcaaggacgatgctggcactcgcgttcgagccaagggaggatgcagatccctcccaagtctgtggccagaagaggtcgtgcgggggtgaag

SEQ ID NO: 232522 - DNA, 189 bp, Homo sapiens
  chr6:149637867-149638056
  hyper
ggacttctaggaacgtgcaattaaaataaaatcgaaacaacgaaaccctcgcagcatttagatttcttttttccccctcaactgctcaagaaaagtcagaagccgacactttttccaagtctcgaagttgccagttgtgaggctcccaagacgtctcccgcacaccctagggacgattctgcacgggtc

SEQ ID NO: 232523 - DNA, 48 bp, Homo sapiens
  chr6:149867345-149867393
  hyper
cccccggcgcggccgttttgaaaatcctggtccgcccttggcgatttt

SEQ ID NO: 232524 - DNA, 51 bp, Homo sapiens
  chr6:149887282-149887333
  hyper
tctaatgaggggccgtaccttccaagatttcactccgcccctcgacgccgc

SEQ ID NO: 232525 - DNA, 235 bp, Homo sapiens
  chr6:149969554-149969789
  hyper
ggccctggaaaatcgggggtccccagagcaccgccagagtgaaaactcacctgcggcggcccaagctcctcgggaaaccgcccaacgccaggcacaggggattggcggagtggagatcccggcagcgaggaaggagggcctgacccagtccagcccactttgctctccgctcacggccccagtactgcccagttcaatcgtcaacaccacctgccggcgcggctcctgctcgccg

SEQ ID NO: 232526 - DNA, 580 bp, Homo sapiens
  chr6:150039176-150039756
  hyper
ccaccgccgccgccgccgccattttgccttccactcagtgtcgccgccgccgcactccgctgcaggtttcccggatgtgggcatttcccggcgtcgcttgcgcgggggccgaggactgggggcttttgcccgcccggctgctgcgagggagcgcgcagcctgcggcctccgggcttcgttgcgtcgcccgcagctctgatcgttcgtgagcgtcgccccacgtcgctcccgcctgcccctgcccatacgactcgcccgcgcccgtgggttaaggctgtctcccgcccagcctacttggttgattcaatccttttccccattgatctatttctctggaccgagtagggatgtgcatttcacggagctacgttctcagaagggaacaactgagttgctctgggaaacctccctgtggacctcagaattccagatttttggcgctttgaaataaaattttattcttgcttagcgttctttccccgaacaagccggtgagcttccagcatctgtattttctgaatccggcagataagaaatgcttgagccaggaccgattgattagcagcggtttagagatctt

SEQ ID NO: 232527 - DNA, 31 bp, Homo sapiens; identical to SEQ ID NO: 200700
  chr6:150071940-150071971
  hyper

SEQ ID NO: 232528 - DNA, 135 bp, Homo sapiens; identical to SEQ ID NO: 200701
  chr6:150072001-150072136
  hyper

SEQ ID NO: 232529 - DNA, 91 bp, Homo sapiens
  chr6:150185355-150185446
  hyper
tagccggcccagccgggcaccgctccttgccctcgccggagactgcccagcgccctgcgcctctccgccccggcctgcggcgcgctgggtg

SEQ ID NO: 232530 - DNA, 146 bp, Homo sapiens
  chr6:150243889-150244035
  hyper
tagcctctgggaacggacccggcgggaaggagacgcggagggaaactgagcgggggcgcagtccggggtgatcgcacgggtccttccagaagcctcccctcctctgaagcccacagtccacagccccccacggttggcctccgccc

SEQ ID NO: 232531 - DNA, 465 bp, Homo sapiens
  chr6:150246806-150247271
  hyper
gggtgccccgctcccggacgatgcccctgggcttccagatccagagcctcgggacgaaactgtttcaggaagacccggaaggactcgccggtcgcggcaagggacaggcggttcctgagacaggaggagccaggaaatgcggggcctggtggggtgaggagcacggggttcctccttcatcctcgcggggactttgccaccggctcagtgtggaggcctcaccgtcccgcccggatccgtggggctccgacagtgtggcccctgcgaggaccccccccatcctcctcgccctggggctgctgcgggagggcgcccgggcagcactaggtcctgagtgtccagggtccggcaggggcttcccgttgtcgcctccctgaccccgccgcttgcggtccagggctgctggtttctccgctggtctgggaggccctagcatggacgtcgtgaggcggagaaaaccttggg

SEQ ID NO: 232532 - DNA, 648 bp, Homo sapiens
  chr6:150259501-150260149
  hyper
aggttttctctgcctcaagacgtccatgctcggggcccccagcccagtggagaaaccaggagccctggaccgcgagcggcggggtcggggaggcgacaacgggaagcccctgttggatcctgggcactcaggacctagtgcgccatgggcgccctcccgcagcagccccagggcaaggaggatgggggtcctcgtgggggccacactgtcggatccccagggatccgagcgggactgtgacgtctccacactgagccggtggcaaagtcgccgcgaggatgaaggaggaacctcgtgctcttcaccccaccaggccccgcatttcctgtctcctgccacggttccttgtcgcgaccggcgagtcctcccaggtcttcgaaaggccgttttgtccggaggctgtggacccggaggcccgggagcatcggcgggcagcgtggcacccactcggcggtctcaaccgggcaggacccgggtccggagctcgggcgaagcgggcgtcctgggaggagcgcgcagaacccggagaggacgcagcagggtgaaaactgaaaccgcatatgcgaactgtctccgaaagtcatctgcggttgaaatcagaaatcacctataatatcccctttgtgacaacaccgttgggtaaatatc

SEQ ID NO: 232533 - DNA, 800 bp, Homo sapiens
  chr6:150262703-150263503
  hyper
cggactgtaatcacgtccactgggaactggcgcagtagtggaggggacgcgatcaggcccgtggctgcgcccagagcatgataagccagggacctcgcggcgcaggcggagggagggagagcgtcgcggacccaggcggggacagggagacgccgccgccgctgaatattcctctgcaagtttcttcaccttcaataaaaaaatgttgtgatgattaaatgagtctgtcgtggaaggaaccgtgtcttggcaggagccgggcggacacccagacaccaacccgaagggggttgggacaaaggggagggacgcccgggaaggggagggacaccgtcagggcagccaatcatatttctagccgcgtgacgctatgacccgcttgacgctatgacagcgggaaacggggggcgcgcccgtacatagggaggctttaaaaccttgaggtgattcatcttccaggctctccttccatcaagtctctcatccctagcgctctgggtccttaatggcagcagccgccgctaccaagatccttctgtgcctcccgcttctgctcctgctgtccggctggtcccgggctgggcgagccggtgagttcgtggatggagcctaagccgggcggggaccaagcctggagggctgtgaactgccgcgggtttcagaggaggggaggcttctagaaggacgggggagatctcccctaactgcgcccccgttcagttccggtcggcggctccttcctgctgggtgcagtccccgaggctgcttcttgcccgggaagaggcgaaaaggagcggggt

SEQ ID NO: 232534 - DNA, 617 bp, Homo sapiens
  chr6:150284552-150285169
  hyper
atcatgattgatcacggtagccctctagggctttctttcttttctttttttttttttccagaagtcataaagggatatagaatatactcaaagaccacctcatgcttttagtggagaggcaaaaaaggttcgctccggaatggggaagcggctgcgccctggacggagaggggcggggacttcgcgactgcaggcggagggagggcgggtgtcgctggcgcaggcggtgacagggagacaccgccgccactgagtattcctatgcaagtttcttcatcttcctgtgcatcagtgtttacactggggtaatgataaatgctgtgttgaaaaattatttgatggggccatggaaggaacggaaggaacggcgtcctggcccgctcggggcccgcgcacgccgccaccaagccgcgggggcgggtcggaggggagagttgcgtcagccaggccgctgtcagatgacgagcccggggcgtgacggggtggagcatccccaaaaaagtgcatgcctaggatcccgcccagtgtatccctgcgcgcggcgggccgggctgggcagctttataaacagccgtggtgtgagcctcgaagggaaccatcagcgcctcctgtccacg

SEQ ID NO: 232535 - DNA, 1127 bp, Homo sapiens
  chr6:150285392-150286519
  hyper
gcggtctccccgaacgtcgcggtccctccgaacgtcgcggtctccccgaacatcgcggtgcccccgaacatcgctgtctccccgaacatcgcgatctccccgaacatcgtgatctccccagacatgcccagctgaaggcactcagttcccctcggtggctcctttccgccgggtccgcttcctgcggctgctgcttgcccctcaggccaggaggtttctggaaggaccggtgctgtctccccgaacatcgtggtctccccgaacatcgcggcctctccgaacatcgccctctctccgagcaacgcgatctccccgaacatcgcggtctccccgaaaatcgcgatctccccgaacattgccatctcaccgaacatcgcgatctcgccgaacatgcccggctgaaggcactcagttcccctccgcggctcctttccgccgggtctgattcctgcggctgctgcttgccccgcaggccaggaggcttctggtagcaccggcgcgatgcccccgaacatcgcgttctaccccaacatcgcgatccctccgaacatcgtgatcccccccgaacatcgccgtccccccgagtaacgcggtctccccgaacatcgcggtccccccgaacatcgcggtacccccgaacatcgccgtctccccgtacattgcgatcccccgaaacattgcgatctccccgaacatcgcgatctcgccgaacatgcccggctgaaggcactcagttcccctccgcggctcctttcctccgggtccgcttcctgcggctgctgcttgccccataggccaggaggcttctgggtggaccagcgcgatctccccgaatatcgcggtctacccgaacatcgcggcctccccgaacatcgcggtctccccgaacatcgcgatcccccagaacatcgcggcctccccgaacatcgcggtctccccgaacatcgcgatcccccagaacatcgcggtctacccgaacatcgcggcctccccgaacatcgcggtctccccgaacatcgcgatcccccagaacatcgcggtctccccgaacatcgctgtctccccgaacgtgcctggctgaaggcactcagttcccctccggggctcctttccgccgagtccgcttc

SEQ ID NO: 232536 - DNA, 319 bp, Homo sapiens
  chr6:150311248-150311567
  hyper
tctggtctcgtttccgccactgtgttttctcgggccgggagaagcagtcccagggacgcgacaggggcagaaggagccctgcgtggggaattgagaagggtgcggcgcggtcagaaagatccgtcctccgcgacgccctctcctctttctccgacccattcctggaactcaccggctcgcgccgtccagggacagtcctgcagcagaagcagagccagaatgcaatgaatcaacgtggggccctcagccagcgcctttgggaccgggacctggcgacggaatgccgaggacaccggtgttcgccgcgcaggggaaactg

SEQ ID NO: 232537 - DNA, 600 bp, Homo sapiens
  chr6:150311809-150312409
  hyper
gtgtctgtgggtgatgaaatcgggtcggagtcgctctaaagtcatttttgtctcttgcgcgcctcagggaggatattaaaggcttttgtggatttcaaccgctaaagcctttcctcaaagttcattgcgaggggtttcagttccgcccggcagcatccctcagggttctgcgcgctcccgtggcaccgtctgcgcccgagctccggtcccgtcccgattgcctgatgccccgcagggagcgcccagcggccgccgatgtcccaccagcaggcaccgggcgcctagcgggacccgcgggcggaactgcctttggaagacgcgtgagaactccaccccatcgcggcaggggacagttattatctccgagcttgaggtgaggggaaatcagaggcggctgatggtttcctcctacagcctggtgctgggcgcggggaggactttacacccagctcctgccgagacgtgaccttacagctggggtccttggggctccaaaagtgcggcttccgcgcggatcccattcctgcttgctttgaggctgctggtgagcggcgcctgcgcaggggaagttgtgtgcccgagttgcttacttgtgtttta

SEQ ID NO: 232538 - DNA, 236 bp, Homo sapiens
  chr6:150326375-150326611
  hyper
tagtgaattggaccgctccgccccgtccagccccgttccgccccgccgcaggctgggatccaaggggcgtgatccgacggctgccttgtttgggcatgctccaccccgccctgctccggggctcgtcacgtgacagcggccccggcgggcgaaccctccccctccacctcggccccgcggcttggtggcggcgtcaccgggctccgcgcggggcaggacacggtgccttccatgac

SEQ ID NO: 232539 - DNA, 70 bp, Homo sapiens
  chr6:150336633-150336703
  hyper
aggtccctaaacgccggttggaccgcgaccccagccggtgcggggctcttggcagcgcttggggaagtga

SEQ ID NO: 232540 - DNA, 721 bp, Homo sapiens
  chr6:150358686-150359407
  hyper
gggctacgagagtccggggacgggcaatctgggcagagtcgcacgaggctgctgcagtgatgaggcactggttctagaaatttacccaacggtgttgtcataggggggacattacaggtgattgctgatttcaaccacagatgactttcggggaaagttctctcctgggggtttctgtttctaccccgccgcgtcctctccgagttctgcgcgctcctcccagggcgcccgctgtccccgagctctggacccgggtcctgcccagtggagaccgcggagttggtgccccgcttgcggccgatgctcccgggcctccgagtccacagcgtccggacaaaacggcctttggaagacctgggaggactcgccggtagcggcaagggaaggagccaggaaatgcgggggtcggtggggtgaggagcacggggttcctacttcatcctcgcggaaactttgccaccggctcagtgtggagacctcaccgtcccgcttggatccgtggggctccggcagtgtggcctccgcgaggacccccatcctccttgccctggggatgctgcgggagggcgcccgggccgcactaggtcctgagtgtccagggtccggcaggggcttcccgttgtcgcctccccgaccccgccgctcgcggtccagggctcctggtttctccactgggctgggggcccggagcatggacgtcgtgaggcggagaaaaccttgg

SEQ ID NO: 232541 - DNA, 598 bp, Homo sapiens
  chr6:150463460-150464058
  hyper
ccttgcctgagcgccgtcacgctttctgccctttggatacgaagatatccgaatgctgtgcccatgattaagcagacgcttagtaaggaaagaaaacattggtctggaaataatttctcaagcgccgtgactgccttattgcacaaacatcgcctcttcgatgtttctcacaatccagagaggaagtggcatccatcgtggcatgaataggaatgtgtgtttggagccgtggggcggggctggaggggaggggacgctacccagccaacagaggagacggtggggctaggaaaacctcctgggggagcctgcggcgcggtcctttcctgtgtccccttcgctgcgggtcctgcccggggccgcgccaggtggaggccccgagaggcggcgcgtttcctgcgctccgggattgcgggagaagcgtgagtccctgtctccgagactagaggccacggacacccgcgcaggagcatcccctggcaccccgccccacgcccgtccttccggagtctacacatcggcgacctcccgtgtctaggcgcacacatttcccgccccgcggagactcccacgccccgggccctctctgccgcaggcg

SEQ ID NO: 232542 - DNA, 332 bp, Homo sapiens; identical to SEQ ID NO: 200705
  chr6:150920422-150920754
  hyper

SEQ ID NO: 232543 - DNA, 82 bp, Homo sapiens; identical to SEQ ID NO: 200706
  chr6:150920982-150921064
  hyper

SEQ ID NO: 232544 - DNA, 546 bp, Homo sapiens
  chr6:150921497-150922043
  hyper
cggctgcaacatcagcgcgcagaggagtttctgcgagcacccgggagttgtagccaccgcttccccacccccgactcagcaggacagccccagaacgggaccccacagccagtcagctgggtcagctccccagcagcgaagccgggagcccgaggacccggggacgcgcggtgggggcggcggccgagctgctgcggcgctcagggcttgggggcgcccccgttctgcagatgcgcttttcagggggtggggagtcaagagcctgtggctcttccgtcacggggtaaacggtaacacctgggcggccgcgactctgcgagcgttctggcctcggcgggcggcggggaaccgcagtgatgcccgagctcgccccttttgtgtcctcgcggtgagccccgttccgaagccggaagcttgggaacgctctaactgggagaacggcgctcggctggtcaattcattccgctcctcggaaacaatgagctggatccttgacttgaatgtgctggcggagcggggtttgtaagccggcgtttcatccagctc

SEQ ID NO: 232545 - DNA, 70 bp, Homo sapiens
  chr6:150962776-150962846
  hyper
gtggtgctgtggaacgtgtggatgaataaatcactgtttggtagtaagtgtaaaacgttttattggaagc

SEQ ID NO: 232546 - DNA, 35 bp, Homo sapiens
  chr6:151562631-151562666
  hyper
tccgggtactcttccctggacgcagtgctgaaacg

SEQ ID NO: 232547 - DNA, 997 bp, Homo sapiens
  chr6:151814960-151815957
  hyper
cattcactgcagagtcccaccgggaggaccgaccgttatccccgccgactccccccaggtcgccctggcagtttcggccgctcagttgcaggccctcgccacggaggccacgctcgggggttcggggtccaccccggcctcctgcggccgggccaccctactcgcgcgcagccgcgcgccgccgcgtccccgcggtgtttacccgttgcccgaggagacacccgcgccacccgccggctcccggcgccgccgcttcctcagggccggttccgggtccgagcgcgcccccgggctcgggtcgtcatgagcctggactgcaccagccatatcgcgctgggtgccgcttcgccagcgcccgaggtacggtcccagccgccggccgcgcgcgggggtggccctggggatagacgacccaggaggggccgaggcgcccctgatttgcacccttttcctcccggaggcgtgggcagaatcagagcagctctgtgcccgcgagggctgtggcctgggactgccagggcgctgatttcaggaggggatgggcaggaccggagtttgcggagcgcgtctgaattttaggttgtgccactctgcttctctgaccatttaaaccggtgacattcgaaagactgtggccgggcagttcctccccgccacccctgggagcaaagaattccttcatttaactttccctgcttagctactgaagtgtgcttcggagcaatttctggaaaatctgatgtggcaggaggagggccagcccggagtagagtcaccggccctttcgttgcgaagtaatccagaaacgttggtaattcagttgttcctgaatgcatctactcatttactcccaggagttacttaggtactggggactttcaggtattagatgtaccaatgcgcgcgcgcacacacacacgaacatgcgcgcatacacagacgctcgtgcacacacgcgaacaggcacatacgcgaacaaacacgggcgcgcacacac

SEQ ID NO: 232548 - DNA, 405 bp, Homo sapiens
  chr6:152622719-152623124
  hyper
tctcagtattattgcgaaattataaacaaatacagggtagacctctgacatgttaagtaattcagctgtctcgagcacatagtttcattttaactgtcattgtttacagtgtcaaagattggcccggcccaacggtagtcaaagagacttaaggaatctgttcctccctctgaatctgcaagatcgaaggctggtccctgaaatcagccacggagagggaacatggagccactcgccaggctccagtcaaagagcaaagccgcggggacccactggatccttaccatgaccacagaggggtgggccgaaggcgtggggaggagctccccatccaggtcctctgtcccttccgccagcccctcgacctcggtcaccgtcagcagcatggtggcgtgcttggctttc

SEQ ID NO: 232549 - DNA, 57 bp, Homo sapiens
  chr6:153022495-153022552
  hyper
tgtggagaaaagaacgtcttggctagagattctgtgtgtggtcgtttcagggacata

SEQ ID NO: 232550 - DNA, 193 bp, Homo sapiens
  chr6:153304117-153304310
  hyper
caggtggaggaaccgctccgggggcagctgagcaacctgcctgcttcacagacctgtatctcttaaaaggcgccagctggtacttttaaaatctttgaatttggtgcctaaatccgcgcggtccaatgagacgcgtcgcttgcatgcgcgcaccaataggagggcagtgggtgggggcgccctcgtccgcgcc

SEQ ID NO: 232551 - DNA, 79 bp, Homo sapiens; identical to SEQ ID NO: 200713
  chr6:153304958-153305037
  hyper

SEQ ID NO: 232552 - DNA, 264 bp, Homo sapiens; identical to SEQ ID NO: 200714
  chr6:153323865-153324129
  hyper

SEQ ID NO: 232553 - DNA, 575 bp, Homo sapiens
  chr6:153450985-153451560
  hyper
ggtcaatcgtccccgggcgacaggggttctcccacgtgaaccgacgtcccgggctccgggcgaggcgcagggctcagggcgcagggcgggtcccgtacgcagggcgggcgcgcgggcatctttgtggccaggcgaccccggctcgctctcccggagcccagggactcccgaggctggcgcgggctgcccgcgacaaggtgccagcagcctcgggctcgcgaggagcagctcccacccgcggcttccgagtccagctctgtccctccgccatcccctagtcctccggcatttattcagggagacagggaggcagagagaagaggagaaagcggccgtgtctgcacccagcctctgccgcagcactcgatgagggacagcagggaggctggcggggaggcagagattaaactatgattccatcgatcacggaaagaccaccatcacctacagcaaaggaggctccgatgcgcccacccgggcagcgactcgcggttggtgggcgttcctcgtcctcgccccctcggtggctgtggaatccaccccgcgccgcacacgccaggactccctttcctttg

SEQ ID NO: 232554 - DNA, 1130 bp, Homo sapiens
  chr6:153451760-153452890
  hyper
cagcacccaaggtgatcagtcgattggacactgttgatggcacattctcctcgttcccaaccaaccgcacaaaacccgcaacacctcgcgtccccgcggggtctcccgcgcccctggcccggccctcccggccgcccccagcaggcgccccgctctccgcgggaactctgggacctggccgagcgttccccggcgggcaggacactcgcccggttccctgcagcagctgagggcggcgagcggaccgcgtccaggcagcgacgcgggattcaacttcccggacccgcggcgcggcccccgctcccgctcagggcgccgcggccacagctgagaccccagcgccgcgcagccgcccccgccggggcatgggcggtcgcgctctccgccccctccttccttcacctcccccctaccttgaaaaaaatccatccattggtgcaaagcagacattttgatgtcatttacttagcaccgcttgttttggaggcagcgtcttacccggtcgcctggaggtgtgggcagcgcgccgatgggtccgggggagcggggctgggcggctcggtcctctagcggagccggtttgctgccatccgcccaacttcagcacccagcgggcgaggagagagggagagcggcgaggatgcagaggagggggagggggaggagggagcggtgggcggggagggagcgagagccgctcggcagcgcgcatgcgcctcgcgggccggcgcagcccctcgcccggcgcggccggaggggcagcttcccagcccctgcgcgcggccgcgagagtcccggccccgccccctccccgggcggcccccggccccgcccgacctcgcgcgctcgcctgggcgcggcgcccaccgtgcggaggggctcggccgggactctcggcttcggtgacgcccgtccggagcttcgcgggaggcccggagtcccgagagcttccctgggtgacagcggctctccgcccgggcccctgcaactccactcgcccgtagcccgcgcgctgctgtcctgggctgcgcgggagccttgcacccaggagccggcctgccaggcacagcagcctgcctgctccgggtcccggaggaagcattccctgcgtgggggttcaaggaagtgtg

SEQ ID NO: 232555 - DNA, 549 bp, Homo sapiens
  chr6:154360330-154360879
  hyper
ctactccttggatcgctttgcgcaaaatccaccccttttccctcctccctcccttccagcctccgaatcccgcatggcccacgctcccctcctgcagcggtgcggggcaggtgatgagcctctgtgaactactaaggtgggagggggctatacgcagaggagaatgtcagatgctcagctcggtcccctccgcctgacgctcctctctgtctcagccaggactggtttctgtaagaaacagcaggagctgtggcagcggcgaaaggaagcggctgaggcgcttggaacccgaaaagtctcggtgctcctggctacctcgcacagcggtgcccgcccggccgtcagtaccatggacagcagcgctgcccccacgaacgccagcaattgcactgatgccttggcgtactcaagttgctccccagcacccagccccggttcctgggtcaacttgtcccacttagatggcaacctgtccgacccatgcggtccgaaccgcaccgacctgggcgggagagacagcctgtgccctccgaccggcagtccctccat

SEQ ID NO: 232556 - DNA, 820 bp, Homo sapiens
  chr6:154830547-154831367
  hyper
cctgaaaatgcagcgccaccggggatactggcgcctcccggagcaaaagtcactgcctcccggggagtcctggctcgaggtttctccctggcgcaaatgctatggtgttggcttttgcgcggccctctcgccttctccaacaaaaacagacaggctcggcggacccgccggagtctccctctacctgtccgacagccctgtcacgcctgcggacggctctgggcaggcggcatggacgaggtcccgcgggagtcacccacacaaaggcaccttgtgcctctgcactcgggcccccgggtcgccgggcaccgcaccggggccaggcagggagagcgccccccggcccgagtgccgagtcccgagatcggcatccccagccctcaaccgccacagaaaggccacccctactccctggtttaaagatagggctcccctcggcttgccacaatccgcaccctggaaaggaagagctcggagcaggtacgagagataggagcgcacaggccactcggcagaagtttgcattgtcaccgggctgtgccctcaccgcttctcgccgggaggaagggccaagtaccctcttccccagctcctcgtccgccccatccccgaggctggaggactccggacccccccaaggcccgcgcacctctagtccagtccaccacttgtttggggctccacttggtcacgggttccatggtaaaccgcttcgcctctcgctgggctggagagtcgcagataaagtgctgctgcctgcgctccggtgccccttcccgggagggcgcgcccgcggctgctcccctgcgcccgagcgact

SEQ ID NO: 232557 - DNA, 46 bp, Homo sapiens
  chr6:154831607-154831653
  hyper
ggatctctcgaggcgcgatcggctctccctcggccggtcttctcgc

SEQ ID NO: 232558 - DNA, 412 bp, Homo sapiens
  chr6:155635391-155635803
  hyper
ctggggagacatccggggagcactgctaagccatccacctgtcagcctcaagtccaggaggaaattctgtgatagctgcttcgctgcttgcagtcttaacaacttaatgatttctcgaatcgtgggcaacggagggagacggcaagtgctgagttttccggaggcagccatgatacgcggcaagcaccatccaaccctacctcacccaggaccttcaccgccgctccgaaagaaacgcgcaggggaggaacctgcgagacctaaggcccgcctcggagtcagccccattggtcagacctatcccaccggaagcgatgaccgcggacaggaaattcccggcgtgctgagagcgcatgcgctaagtcctgccgcgagaagggcaggctgggtggtcggcggcttccgcctgtga

SEQ ID NO: 232559 - DNA, 341 bp, Homo sapiens
  chr6:157098324-157098665
  hyper
gcggccgccgagccgccccggccccggccccggccccagccttagcccaagcccggctgggtcccgcgaggctgcgccggggcgggcggcggcggcccggggacgagtccagtccgcgttttgcgagtgcgcgggagtaatgcgagcgaagtggataatagttgctcgagctcgcccgctgcctctcaagccatgctgggcccgataggctcagctagtcgtgtatttacccatatccgggctagagaggaaaagagaaaagtttcatttaaacctgaactaaaaactttcaccatgaaagcacacagcaggagcaggcccagagcgtaaggcgtgcccgg

SEQ ID NO: 232560 - DNA, 1201 bp, Homo sapiens
  chr6:157556765-157557966
  hyper
aaagcattcctcagcgcttggaacttgcgagctgatggcttttggtggagcccaggaggggcgctgtggggcacagacgtgtgcggggccggcagctgcggagagagcagcgcaccccagccttcaattccccgccgaagatgggactctgcccagagccgaggcccctggctgctgccccgctcccttgcggccgcagtgacactcagagccagattcctcagacaatcttcactcctccgtggtggctgccttgggaggcgttgcggggtgaaggaagtcgcagctggtcccaagcagtggggagggcaggacagggagtaagacaccgccttcctggggtgcacacggaggaggggcgctgcccaggagcggaggggaggggagcggagcgcggagaggagaccggtgccagacttcacccgcctagctctcggaacccccgggggccgcgctcggctccgcctgggggctaccggttctgggccaggagaagaagtggcatccgcggggcagggcgggcggtgacggccggctcaggtggcggccccaccccagcgcccttcagcaggcctgggtcggtcggcctcggaccccgtaggcgccggcggagctggcggcagggacccgacagctctgccgcggactccgcaggggacatcccccaccctggcggcccacccaggcggagcgcggcggggaccgtgcatctagcgcgccctggtgacctgcgggccgaggcgggctgtggggcttggccccgcgactcagccttccgggcccacagcggccctgacccgggaagtgcggaggtttggccgccttcaacagcacctgccaggccactgggagcagcgggggagaagtgggctcgcacaccgacggcctcccgggttcggcggggacgacccgagctaggagcccgcgggggccgtgggagctgctccgccgaggtggacccggggcgcccgcacccctcaccttctttccgtggggtccggggccagggacgcagcgggggacggcgggcatcagccgggcagcgcccgagccgtccctggccgggtccccacacctgcgtgctcgggcatccccagggtcgggggcgcggtgaatcgtggtccccgcagcccggggcccgccaggcccgcggagtcagcccaccctggcgaggggcccaggcacccgcatttaaccagtc

SEQ ID NO: 232561 - DNA, 40 bp, Homo sapiens
  chr6:157744526-157744566
  hyper
tccatgtttaggtcgcctctagtgcgtccgtccccaactg

SEQ ID NO: 232562 - DNA, 84 bp, Homo sapiens
  chr6:157745202-157745286
  hyper
cggcaacgttgaccgctagcaagcttggtcttccgctgggaggctggtttgcccattctgtaaatggccgtggagaggaggagg

SEQ ID NO: 232563 - DNA, 37 bp, Homo sapiens
  chr6:157802482-157802519
  hyper
tgggaggggttgccggtgccgcgcgcggccgcccagt

SEQ ID NO: 232564 - DNA, 59 bp, Homo sapiens
  chr6:158244642-158244701
  hyper
ctgggcatgggtgcggcgggcagtgcagacagaccaccaggatcgcaccgggggacggc

SEQ ID NO: 232565 - DNA, 155 bp, Homo sapiens; identical to SEQ ID NO: 200721
  chr6:158402898-158403053
  hyper

SEQ ID NO: 232566 - DNA, 153 bp, Homo sapiens
  chr6:158430537-158430690
  hyper
ctggcaagaggagtcgaggaagggggctgaggaggtagaagggagggctttcctcaaaaggccagaaattcgtggccagccaaaggggaagcaaagacattctcgtgtaggaaaacttacaggaaatgcaactaaaagcgtgggagacaggaa

SEQ ID NO: 232567 - DNA, 715 bp, Homo sapiens
  chr6:158588748-158589463
  hyper
aaaatgaccgttgccgagtttagagctctctcagcattcaatctattccatctctggggttagagagggagcaggaagcggtggtctgcaaggctcagaagtgactggtgaggccctttcctcctcctcctcatctctccgtgactaccgagcccgggaagacggaccggcaggtgcactccccaaggcctcgacagcagccagagaaaggcagcgacagggaaagacgagtcaggctcgcgaccaccagagagagaggccctcacgcccagccgagcgtcagctggtcggtccggtccgcgcgccagacggcggtgctcggccgtgcccggtccctgccctccccattctccgctccccaccgcgcccagctgcgccgacgcccccgtccgcccccacaccacccctgccttcacgtcctacctgccggcaggcggactcagcccgtgcccaactgctcgtcggaccccgttgtctggggagccctactctttccgcggctcccggccgggaccctccacccggcggctggcggctcgtgaccccgccccctcggcccgctctgggcccgcctcccgccggctggctccacccacaatagcgtccctagcgcgatggcgtatcggcgcaggcgcactctgccggcaacgccgaggcgcttctgcatctgtgggccgaggtgtgtggcgagcgtccgagcggctggggaaagtgg

SEQ ID NO: 232568 - DNA, 52 bp, Homo sapiens
  chr6:158958525-158958577
  hyper
gagagcggtggggactgcagaccctggcgccggcccccgcccccttcctctc

SEQ ID NO: 232569 - DNA, 42 bp, Homo sapiens
  chr6:159421501-159421543
  hyper
gtctctagtattgcggggtggggctgcgcttaaaaacgcaga

SEQ ID NO: 232570 - DNA, 300 bp, Homo sapiens
  chr6:159589686-159589986
  hyper
ggcggacagcagcacgcggcgtccaggacccggccttcctagagcttaggtcactgtagcctccaggggcgctccgagtccatctggagggccgcgaggcttccaggctggaaggaggaatagggagaaggaggaatagggagacctggggcagtgttacaattacagaaaagggagaggcgaggtccgctgagtccttggcctgggcaacaaggcacactgaaaactgggttccttttcgacccgcatcgtgcgcgccctagaaatgacagccagacggagcagggtctaaggacgctg

SEQ ID NO: 232571 - DNA, 86 bp, Homo sapiens
  chr6:159590346-159590432
  hyper
ccccgccggccctggccccggccccgcacaccggcagggggcgcccgagcgcagctaaaaggctcggcgggaggtcggcggcctca

SEQ ID NO: 232572 - DNA, 689 bp, Homo sapiens
  chr6:159654647-159655336
  hyper
tgacccaggccgggcggccccgccccacgtcgcagggccgctcccactcctcctcggacccttacacggcgagctccagagggatgctccccacggccctccagaaccaggacgaggatgcccagggcagctacgacgacgacagcacagaagtcgaggcccaggatgtgcgggcccccgcgcacgccgcgcgcgccaaggaggcagctgcgtcccttcccaagcaccagcaggtggagtctcccacaggcgcaggggcaggtggcgaccacaggtcccagcgcggacatgcggcctcccccgccaggcccagccgacccggcggcccccagtcccgcgcccgggtacccagcagggcagcgccggggaagtcggagcctccttccaagcggcccctgtcctccaagtcccagcagtcggtctcagccgaggacgacgaggaggaggacgcgggattttttaaaggcgggaaagaagaccttctgtcttcctctgtgccaaagtggccctcttcctccactcccaggggcggcaaagacgccgatgggagcctcgccaaggaagagagggagcctgccatcgcgcttgcccctcgcggagggagcctggctcctgtgaagcgacctctccccccacctccaggcagctcccccagggcctcccacgtcccttcccgactgccgcctcgc

SEQ ID NO: 232573 - DNA, 58 bp, Homo sapiens
  chr6:160112589-160112647
  hyper
aaaaacatgactatcgattatcttccttgtgcaaaccactaacgaataaattaaaaag

SEQ ID NO: 232574 - DNA, 40 bp, Homo sapiens
  chr6:160182804-160182844
  hyper
cgctctgtaaatgcgtccgaggtccgcggttctgcccgca

SEQ ID NO: 232575 - DNA, 196 bp, Homo sapiens
  chr6:160209889-160210085
  hyper
tgcactcgagtggcgtttcctgggctaactctactgtaagaagctgtcaacccggatacggctggacgccggacgcccgacctcgactgcagctgcgggcggacagggcaccgggctcatccgagggcgcgcggatggacctactctttttctggtaaatggtcctaaaataaaacctggcgtttaacatggacac

SEQ ID NO: 232576 - DNA, 137 bp, Homo sapiens
  chr6:160389587-160389724
  hyper
tgtaggaagcccacgcttgggaaataacattcccacagaaggtctgagaggctctgacgggccaaggttgtaaacccccatgatttgactccacgggcagttaaagtgtgttcccaccccccacggatccgctgcca

SEQ ID NO: 232577 - DNA, 93 bp, Homo sapiens
  chr6:160389964-160390057
  hyper
gtcccgcgcgctgcgctcacgtgacccgggcctgggaggagccggggcgggcgggggtcacctgaacaagggagtcacgtgagcggggggcgg

SEQ ID NO: 232578 - DNA, 160 bp, Homo sapiens
  chr6:160402853-160403013
  hyper
atcaacttagatgtcgtgtttgacttagggcttccagccggatccctctccatacaccgggcttccttccagaccctgcatacctctcagggaaaaccaaaggctgacgtttggcatttccctgcttctatttatttgtatttgtcggccctgtatcttt

SEQ ID NO: 232579 - DNA, 1353 bp, Homo sapiens
  chr6:160769014-160770367
  hyper
gttccgggagtggtcgggtgaccctggaactttcttcttctggagcccgacctggggctgactgcagagcaggctgctggcagggaccaaaaggagctccgcgccaggccggaggctgcgcccgtcactcgcggtcccggccgggtccctggcgcgtagtcaggccgcaccgcccgagccccaccgcgcgcccaccccggccgggtgcgtccggctcgcggccgtccctcccgcgacctgtggcccggggctgctgcgggcgcccggggaagagaggcgggggccgcggggggcaggaggagcggctgcggccggcacagcgccagggcgagtgaggcgggtggcgcgggggaggcggcggagtaaagagaggccgccggctgggtccgcgggtcactccgaggcgcgggctgcgggcggcgggcggcgggcgcaccatgccctccttcgacgaggcgctgcagcgggtgggcgagttcgggcgcttccagaggcgcgtgtttttgctgctgtgcctgacgggcgtcaccttcgccttcctcttcgtcggcgtggtcttcctgggcacgcagcccgaccactactggtgccgcgggccaagtgccgcggcgctggccgagcgctgcggctggagcccggaggaggagtggaaccgcacggcgcccgcctcccgcggcccagagccccccgagcgccgcggccgctgccagcgctacctcctggaggcggccaacgacagcgcctccgccactagcgctctcagctgcgcggacccactcgccgccttccccaaccgctcggctccccttgtgccgtgccgcggcggctggcgctacgcccaggcccactccaccatcgtcagcgaggtaagggcgccccggccctttggaagccggcgggagaggacgatgctggctcccaggcggacaagccgcgtgtgagacgctggccgccaggggaggtcggtggagacggggaccggtcggctacctctggggacagacaggattcagcgcacccttggaagtgccgcgtcgtaaatgctgggaaaagcctttcgttatctgcctgagcccgtgagttaatgcacagatactttggtttcgggtgtgaacaaaaactttcttcgaagccgagttgtaaacgcctggcgcacgcctgctcaggagtcaaagacccagcaccgcgttccttatctttgaggtgtgcgggcgccgtcattggaaattatggttaggtgcgcgatagggaacttcagtctctggggtgagcgacgttggcagttccggattcgcttatggtctccagggtcaaaggaaagggcgaaccaacgtttgaaggcagcagcagctt

SEQ ID NO: 232580 - DNA, 557 bp, Homo sapiens
  chr6:161188081-161188638
  hyper
agccggcgggtggacggagcgagatcgcgccctggaacacggagctggcgagaaggagaaaagcccagctggcggcgtaggggcgagggtcctgcctttcccggcggcctcgccctggccatcctggccctgcgggaaggggtcagcccacccgagcctcgtccacccctcgtccacccctccgcctcccgccccggcaccacgccgcgcccgcgtccccgcccagtgcccgcgcctttgcgggccccggtcctgcggggcccctcgcgcactccagaagcatcagtatcctccgggcggccacgggccagctgcggctcccaccctggcgaccctggattgctctccccattctcagcctcaccccccactccttccaccccatattttgccgcctcgaaggacatgaaccatctgctggctgaaggcgcttggacctgaaaccagcgacaggttttggcagctgcacgctcactcccagggaggcgagggcgcccggcgaagtgtggggtctgccgccccctgccggcttggctgacgttcgcttctgtttccac

SEQ ID NO: 232581 - DNA, 80 bp, Homo sapiens; identical to SEQ ID NO: 200735
  chr6:161413419-161413499
  hyper

SEQ ID NO: 232582 - DNA, 214 bp, Homo sapiens
  chr6:163148704-163148918
  hyper
actgggtaggtggcggctgcgggccaggaacaggcccatgcgcgcagcggcgccagccgcgcctcccaccagcggctctcctgggttaaatcctccaggcctccccgcccccgcgcccggccctaggaatgcgcacgcgcggagggcgcggcccagggcctgctgggagtcgtagttctaacgcgtagtttctcctcacgcctcctgcccccag

SEQ ID NO: 232583 - DNA, 2241 bp, Homo sapiens
  chr6:163834161-163836402
  hyper
gatttagggactgccgacttctatagatcaaggacttcattggtgcagctgaggaaattcttccaaacaagtctaaatgttggaaatccaccaaactgcagagaaagacctcttgcctccgtattctttcttcatctgtaaaaatgttgacttctgcttttcagactacgcgcacagcctctttatttcctactgcggcttcattccctcacggaacactgacgccatcgcgaaggaagcatttcgagcacgactgacgctccccttattatttgctaagccgctgcgctcgggtctggctacgatttgctttcagaataacgggaaggtgcaacaagatcgcttccctagaggcgcgtcgcccgcgtggcccggaccccccacgcccgcccgccgccccgtgggtgcgcacgcgtgtccgcgcaggcttcccgcctggcgagtgcaaggctcctctccgccgtgctgctttccagcctctcagcaaatcacgaacaccgaaagaagccacggcggcgacgggaggggcgtcgcgcgtgcttccctcggcgacaaagcgggagccgggcgcgccggccgagggcgcccggcgcagagtcccgcagaggcggacgccgcggcacgcgcctcgaaaagcctcaaactcttatcctcggctctcccgccccacctccgccccgcagccaagacccgcgccgtggcgggcccgacggccaaggaaagcccaccagccctccgcaccgtgggcgacgggccaagacccggccctaaacggccagacccagcccctagtcggctgccgcccccgccccacgcaggcgcgctccggggccctcccctcccccaccgcgcgctcgcggggcccgacgggggcggagcgaccctcggaaggggcgtggcgaccgggctcgacgcgcgcacgcgctctggagccccacggctacgtgtcgggccacgtgatgcccaccccgaaagtcccccgtgaagcaacaggacgttaaaaaaaaatttctcttctgcggggtggataagaggttctgaaaaaactatagtaacgggaggcgaggcggaggcagcgctggcgcgtcccgctggaattcctctcgcctgccgcgccagccccgaccgcgcccgcagccccacccgccccgtgccgtggaaagccccgcgccccccccgcggccgtcggccccgcagcccacacccacccgccccgggcgccccgcacggcggcgacccagtccttgcgcccaggcccgccgagcgccgcagtccgtcacactcccgttgcccccgtcgcccgccccgccggggaggcagggaggagggggcgcggcgccggcggctgccccggtcgcggggcggcgggcagcaggcagcgggagcgcgccggccgggacccgctaacggccgccctgcgcggccccgcccgccgcccgcccccggccctccccgcgccgctgcccctccccccgccgccgccgctgctgccgccgccgctggcagcgccgcctgaactgaggcgaactccgccgccaagtgagtgaggaggaggaggaggagaaggaggaggaggaagaggaggagcgcagtcggagcgcggcggcagcggcagaggcgccgcggcggggaccagcccagagagaccccccgagcccgcggcacaggcggcggcggcgctgagcgggctcgaccagccgagcgagcggcggccccggctcctcctcgtccggcgccagcagcccgcgccccgcgcccgcactcggccagccgagacccgcctcccgcccgcccgccggcctcgtgagggacgcgccgagccgggcggccgagagcggcggcggctgggagcgcgtcgggcccgggcggaaagtgcctgcggggggcgggcgagcgcgcggtgccggccgccccggggctcggcgcgggagccagagcgggagccggcgcggagcgggacgccgggtcccgagcggcccgcggccggggctcgcccccgcccctccctcctctccggcggcggcggcggcggcggcgggcggagtgagctgcggagcctggaatatggtcggggaaatggaaacgaaggagaagccgaagcccaccccagattacctgatgcagctgatgaacgacaagaagctcatgagcagcctgcccaacttctgcgggatcttcaaccacctcgagcggctgctggacgaaggtgagcgtctccagggccccggccccggcccgacc

SEQ ID NO: 232584 - DNA, 703 bp, Homo sapiens
  chr6:163836642-163837345
  hyper
agccctgcggcccctctagcttcggcggtcacatttccgagaggtcggcgggggctgcgcggactcggtggtcctcgccgagccctcccgagagcaggcccacgccgcgccgccggcctggaggacgcgtgtgcccggcgcgggccccgctcctccgctcggcctcccgagcctgctctgcgcggacccccaccgccccgcgttcgggagctctcccctcccgtgaggactaaagcggggtttcgtggttggggagttggtgcagctgttcaatactaagtggaagtcagtgtggggctcgttagtttaaagaaattccgtaggagaccgaaattatgctggcgtagccgacaaggaggactaagtgacggcgaaaagcacttttttcccttttgtttggggaagcgagaactgttagggagttgaacttcacttttcgggggtggggggggggggggtggagtgcgaaataacgcgatgacagatcggagcgcagcctgagttagaagaacttgggcggagggtttgctcccggggacgcagccgcctgagtttgtaggacagggtttcgagacgtttggaaagggcgaaataaaattgagccaaagtttccaaaaagctgtatggagcgctgtggggagtgaagaatgacaagaagattaatgttgaccaactttggaatttccttaagaagttctcatag

SEQ ID NO: 232585 - DNA, 284 bp, Homo sapiens
  chr6:163837525-163837809
  hyper
agatgaacaatggagtttagatttttcgcaagaatttcgagattttaaaaatagagtcggggaacaggagtttgaagcttggggagttggaatgtcactagagaacaaaaggccggaaatgtttccatgataaaaaatggttaaagaaaaatcccaggagttctgttgtcttgaaagtcatagaaacaacttaaaagtagaaaatggttaggtgttacggctttctcgtcgttttgcttccgtatgttaaacatacagcactcaccaacgttgaaatgggcatt

SEQ ID NO: 232586 - DNA, 120 bp, Homo sapiens
  chr6:164377731-164377851
  hyper
ctttcataatgcggcgtcctagtggccagatgacatttctggctcgtcacttgttgagccatcttaaccttgaaccagctttgagtccttcacagtcagtgctagcggacagagccccct

SEQ ID NO: 232587 - DNA, 205 bp, Homo sapiens; identical to SEQ ID NO: 200742
  chr6:165722844-165723049
  hyper

SEQ ID NO: 232588 - DNA, 1830 bp, Homo sapiens
  chr6:166073937-166075767
  hyper
agccggagcccgcacgggtgtacgagaggccgctgaccacgcggccgccgtggactcgcccgtgcccgggaagcggggttgcaaggagcggccgatcccggcgcgaatacgctcgccagcccgggggctgcaccccaaaggtgcctgagcgggcggtgagcccggagcagcttcggccgcagggaggggctcaacctcgggtgccctggagacccgggtcggccaaagcctgggaatgagccgcagttgggagcgggaaaccgaaacagcaatcctggaagagcgtcggcccagagaaggcgccgcggaaacgcggctcctgagcgaggcgcagacaaaggctcgggtgcacacgcggtggacggtggctccggagccgcgctctgggccgcgggaagccgcacccgccccgactggcgccggagtcgggcgggggcccatgggcgcgacctcctgcacccggaggtgctcctacccggccccgccgcggtcttcccgtcctcaccctgctccccctccatccgcgaccgcgacgcccccctcctctgcgcaccgggcgcctcctctttcctcactgtctcccgcctgcctgcttccttctagcgaacccctgccttgacttttctgctcaatcttgtcccccacccccgtgacatgcctttctgccacctctgcctcagcgcgctctcggccccgcgcccgcgggtggcgaggaggagtggccacgccacagtgggcccgggggcgcatcctgcgagtcggaggcggcggcgcctttctcttccaccctagcgacctattgtccttcccttttctctaccaccccggaccccagagaagcccgggaccaacaggacgcggcccggggtgggggtgcgtcccctgggtggaggtgcaaccgtttccaccccgccagtccatgctctggatgccggtcactgcgcggggtgggaggccgggcgcccactccgagtcctggagaacggcggtgccatcacagttggaagcgcggggttctgaggccctggcctccctcaccccggctacagggacccggtgggctggacccccaagtggaaggaagcgcatctgctccagccaagtggccacaggctcaagagggaggaacctaagtggtcacaaagttgagtataaatacgcgccggacaagtgtggccagaaacggcacgaggggcggagaaggaggcggcaggtcccgctcgcaacgtccaagctcccgccgccctcccgagccgcccttcccccgagcgctcgcggagcctgggaaaccccggcgtccctgcgcggccgaacgctcccgcgctccgccaggggcaccggctcctgcccctccagagaagccccctgggcgctccacgcccgggcacgggcacctcgctcgacacccgcttcccacccagcaggccaagccccccacctgcccccaggggatgaggagccgccccacctccggggaacggggagcaggccacttactggggctcaggaagcactcggtcagccttcggaagcagctcgcattattagaaggtccatcttccatgtcggagccgaagagcagcgcggccgcggcggcgagggcgaagctggcgccctggggacgccgcggagtttggccgccgccgcctgggccggcgccggggaagccgggggagcccgcgcggcgggcggcctggccaagggggagccggggcggcggcggcggccggggaccggcacgggctggaagcagcaagccctggagcgcaggcgagaggaagagccgccgccgcccgccgccgctgccaccgccgccgcggtgactactgc

SEQ ID NO: 232589 - DNA, 2273 bp, Homo sapiens
  chr6:166076011-166078284
  hyper
ggccgcgacccagccgcagccgccgccgcgcgcagagagggcgccggggcccccagcggggctggggcggcctgcggaggagaggggcgggcgcgggggcgcggcgcgctccgcccggccacggccaggccactcgggggccgggcccgggcccgccgcgctccccccgccggccgcgctgagccggggttccgggcggagtttgccggggccgcagcccggctcgtccccggccgctggcaggggaccctgggggcggggagcaagaggctcctcgaggctggccatggttcctccccgggccgcggaggggcaggccgcgggcgggaggggcgcggcgggccggggctcggtgggctccgcccccgcaggacctgcccacccctgccggccgcccgaaccgctgcctggtcctcctctccggtcttcggcttccctcccagtctagtcttcacattgtgctcggcttgggttgcgggaggacccgggcctgggggccaggccccggcgacggcgcctggctaccctcaggcgcgcacaatcggcgtcctcccgggccggggctagggacggcggagaccctccctgcaggcgtggcgtggtgtgtgcgcgctccggcggctgagcctcggcggcttctcgaaagcagcggagaaaagcgccgcagtgccgctgcccgtggaggcggtggtggcggcggcggcagaagacgcccactggcggagcaggcgctccccacgccgccgccgccgccgccgccttccgcgcccacgtagcgcgccccgcgggactcggcccctgcgccaggctcccgcacccgagtgatcctctgtgcgccgcctgcacccggggccggggcgggcggacagagcaaccgctgcgtctctgccctgccttgtcacatctgggtccggtgtttcggattctaaatcctgagtcctgcagctgctccagctgtgcgctgctgggcgagccacgtcggcctgcccgttgcccgagccagggaatcctcctggtagcgggccagcagctccgacccagctgtgctcagtcagagttcccgggagagagttccaactcggacctttggttggagtttaaatcaactcgcagtgtttcccataaactagggtttgaaatacggttcctccccaggactccctttcgcatactcactttaaaacgaacttcgtgtgcacaagcccagtttgccttggttggggttagagaacggaaagggcaaactgtggccaaaaatgagcaagactgtgcgatcattgccccaaaccctgagaccgccttgccatatgcggctctcttggacacccccacccccttccgtagccatgaatccaggcagttgccactgaagggaaatgagccgcccaatgggcgctcagaactaggagccgccagaagtttggggaagttggagcgcaagagcgcacacagatgcacaggtgtccgcgttcgggcaggcacgcgcggcggggccaccatggcgcgctgggtccgaggaggggcggtggctgtgctgttccacggtggcacgggctgtccggactgcctggacgaggtcaccttccccggagtggagcacacgcgccaaagctcagctttcacgaagggcaaaacggtcacccaagcgccaggcgtgcgctacagtgcagcaactgggttgacccagggccctgggctcccggtgtgccccgggtcccggggccatttctcgccctccacgttttcttctttctatccagtttcacatgtttattttgaagcgtgctccagattcctcactagtcgatgctttccccgactcccatccaaactccccccaatggaaaataacacttttgtatttgcaccaagctgagcagttgggatgcaaaggacatgctggggctcccctcccccagtaaagtccacagacgtctccgcgattgccgggcagattctgagtgtcgcgtgtaacgggcatcagacttggcactcactaggtcagaatccctacatttgtggaagaagaaaatgattcctgtgactcttaccttaggggcgctgcccttgtttctgaattttttcggcaaagaaaaaaactgcaatggttgagccaggctgccggcagcctcccggcttgacgcttctccagccgtgcagagtccactccggttactttgctgcgagtccggagtttgtgctttcgcgactggaccaggcagcaagggtctgagggctgcccacacatttagggaagtcgagtttctcctcaa

SEQ ID NO: 232590 - DNA, 163 bp, Homo sapiens
  chr6:166188884-166189047
  hyper
cttccttagcaacccgcttaacaccgtgactttgaaatcatccgctattttggcagcaggatgaatgtttgctggtcgtgaacttttcaaaggtcatcagctggaaacaagcctgcccacttcctttgcctaccccgccactgcctgtcgtacccatccatca

SEQ ID NO: 232591 - DNA, 616 bp, Homo sapiens
  chr6:166218158-166218774
  hyper
agagcgcgtggtcgcgaaggggaagagcagaggcaccggctcggctgcaggtgggagggtgtccgggtgaggggtgagcgcggggtcggggagcggcggcgggggactgggcgacggccccggggccgggccgcgggcggagactgacaggcgtgggcggcgacagctgcagctccgaagctcccagcgtggagtcacgcgccagcgcgcggaggggagtggggcgtggggcaagcagaggggcgcacggaggggagcatggagggacgtggggagcatggagagacgtgggggcgcacggagggacggcggggcctggagcgagcataggggcgcacggaggggcatctgggcgtggggcgagcacaggggcgcacggagaggagcatggagggacatggggcgtacggaggggcagcggggcctggggtcgagcagaggggcgcatggaggggagcatggagggacgtggggcgcgcggaggggcggcggggcgtgggacgcgcggttcttcctcgcgaagttggagaggcctcgggtcgcagggcacccactgtgcgccctggacgaagcctaccctggaggcagcggctccgagggacgccggaaggaacgg

SEQ ID NO: 232592 - DNA, 707 bp, Homo sapiens
  chr6:166267537-166268244
  hyper
ctgcgctggacccagacagacgcgcggggtcctagggaagagcccaggcagggggaagcccgtgggcggtgagaccctcccgtgccacgggcgcagcgcagcgctggctggggccgacggggcgcaccggcggacggtgatgaacccggagacccggcagccaggctgggctgcagcagcctttgcctggacgtcagggtggagcccgggaatcgcccctgcgccgggtgacggaggagaaaggggcccgcaggaggcaggagggagcgcctggcacagggacccagggactcgagcaggtggtccctggggaacggggagtgaggccggaaggagagaaagccaagaccaggtgcgttttggaaattgctgctgtgagccgcaagacgttcgcaggctctgctgcgagcccccaggacgtcccccggtgtccacctccgggcggctctcgcggccagacaaggagccctgaggggcggcctcaaggagcgcccaggccgctgagctcccagggcggcacagagggagcccgggggtccccagctctggcctcgccgtcttgtcttgctggaggtgaggggagcgggtggcgaaggtgcaggagcgggcttggctccagccatctctgaggagcgtaggccaagccgagcccgcagaagccccagaggcctggcctgagcccgggagggacgcggggtccgggagga

SEQ ID NO: 232593 - DNA, 199 bp, Homo sapiens
  chr6:166298467-166298666
  hyper
actgaattccgcctagactgcggtgcggccttcatgtgcacgcccctgccgccgtttaccgccaggtggcagcgtagaccaagtaaggaagccggcccacccagagctgggaactacaggggtgtgctttgtggctttcagactcacaaagattccagatgaacatgatgtctctttttaaaatcgatttgaaacgcag

SEQ ID NO: 232594 - DNA, 1502 bp, Homo sapiens
  chr6:166400480-166401982
  hyper
gtggcggcagaggcgaggatcaaaagagcagggggtcctgtccccactgagaactggagaagggcggctggctcgggaggaaggaagttgcggtgcacacaccatcccttctccaggccgcctcgggaggcacctgcgggtctggcgcggcagccgctgcggtttgcagctggcgcgcagccctcgctgggaacttggagctctcaaactcctcggatcaagcgttagccccgaggctgtcagttggcgctggggcgggctgcagtctctctcccctcctctgcaaacccttgagtcttcggctttatatactcccttttcttctttctcgagtccactcatcaccctttcccccaaacagtcacctccacaagcacaacacaccacacacgcgcacacgttttcttattgccaaaaagggtggagggaaaggacaggaagtttttttaagtacacgcacacacacacaaagattgggactaagtttttctggactctcaagggttaaataataggtaaaagaactgtcaacttacccgccaaagtatgctgacgcgcatatctgctttccgcttcatttcgagttcataaatttaaaaagagacagtgagagaaagaaaaagaaaaaaaaaggcaaggcgccgggagcacagtgggtccagggttccatggagaactgcgcaaagcaagttgccaagaaagcccgctggccaagttcgggacctgtccaccacgctcgcgcgctccgctcagcaggcagattccaaaggcttggggcactctggggtgcgcgccgatcttctcgcaaaaggcgagtgtgtggggttcctccttccctcctttccatctgggggtctcggggaaagctgcacccagcgccttgggcgcccatgaagaccagtccatctcagctcaagctcccagcagcagcaacttcggactcagacctctctctttagaacatgagtgcttgtgtgtgcgtgcgtgtgtgtgtgtgtgtgtgtccgagtgcacttcacatttgggggtgcttgtgctctcaggaacgactctcccggctgcccggaacttagagagtttccctttaagccggagatgctgctcggacacccccccgcgtccaacaggaggcgatgacgtctgtagcctcgttgccagaacagtccccaggctaccgctgccgttcattgacaggagcgggcgctcggacgtcagcagccggacctttggcaaggctgctcccgcggagacggctcccacccccgcacctgccagcccgcccccccggggggtggtcacgaaatcaaagccaccagaggaggggcccggggaggtgctggggctgggggagggggatgactcggatctgccctctttgtcctggagcaccggagtatataaatagtgcagtctccagccagactctctcccagtcttgcacgcccccgcagtccccccaacccgacccccgccccttgtcactacgtgtcgggctcgctctg

SEQ ID NO: 232595 - DNA, 141 bp, Homo sapiens
  chr6:166402762-166402903
  hyper
gtcgctgaagtgaacctaaggaagtttgctaccccaagacccgggcttcgcgccaggtgacaacagacgtctgggagtgtggtgacacctgcgcagagtccctggtggttcaacctgtccgagaaggttgcaagaagatgc

SEQ ID NO: 232596 - DNA, 227 bp, Homo sapiens; identical to SEQ ID NO: 200747
  chr6:166419579-166419806
  hyper

SEQ ID NO: 232597 - DNA, 454 bp, Homo sapiens
  chr6:166421892-166422346
  hyper
gggaggccaggtcccgttttgaggagaggagatgcgcccaagcgggggcggaggagcgggtcgcgccgctgacattcgccaaggacaggatggggtgggcgcccgccggtggccgactccgccccgcctctcaggggtgcgagtcatcagcgcagcggcggatcctggcccagggagccaccggcccaccctcgcgcccaggagccggactcggagacgtccacctggtggagagacgcgagggagccatgcagacaggggctgctccgtggagagcccgggaagcctgcggggcgccggaggggtgggtcccgggacagaccagtgaccatccgcctcctgcgtagcgctgcccccaggagaggaaaacccatcggaggttgtgctgtgtgcgttctccaagagggaagctcagtatgagcactcccttcgtccccttaaggaggaccgcaca

SEQ ID NO: 232598 - DNA, 1335 bp, Homo sapiens
  chr6:166579761-166581096
  hyper
tttaaatttaaatgcgactttgccatcaaggctgatatcttttccacccccaggagagtttagggctagacaacggaagttccccaaaagctccagtccttcaaaggggagtgctcccgctccccgttcgccaggcgtggatgttatcagcttagtataaacagcgctaaaggccttattagagaaggctgtggcagtttctccagggcagacgtcgcctcccgttcaagcagcgtcccttcccacaacccccgtgcagaaggcgcagcgcggccccctcctcgctggtcccagacctggcgggctcctcacacctacctggccccctccgttgagcttgttggtgagcttgactttgctgaaggagacgggagccttcatccagtgggccccgaagttgggcgagtcggggtggatgtagacgcagctgggcgcctgcggctccggcttgccccccggcacccattccccgttcacgtacttccagcggtggttgtccgccgccacgaagtccagcaggaaggagtacatggcgttggggtccaggccagacacgttcaccttcagcaccggaaacatcctcctggaaaacacggggcgggcgcaggaggaccccgacactgaccaggtaggccggaggcagaagctgggcacagaggcctcagttatttcggggcacagaggagccccctggggaacgtccgagggtgactcccaagctcccccttccccgagccctgccaggtccaggtggcctcctcaccatctccacggcctcgggagggaggggaggagaggacctggcgaagggtttcagtgcaggaggccacatcccgcggggacaggcggggaccagggcgcgcctcgcgggtcccgggatgcctccgaggtcgggacaccgaagtgcgcgttcctcctccccaagcttccgcggagaaagccccagaagaggggcttgtagaaatgcactcgagggagttaaccagagcgggaacaaacacaaagccctcctccaggagaaaaagggttcgacctccgggaacttgccaggtcccccaggctgcccaggcgctggagagcgcggcgcgcgcgggctccggacgcgcacccacctgccgttcttggtcacgatcatctcattggtgagctccttgaagcgcagccacagctcgctctcctccaggcccacgcgcagttcgcgctctgtggggtcgcccttctcgctgcccgcctgcagctcattctccacggcgctcagcaggtggtccactcggtactgcaggctctttcccgcgctctcggtgccaggggagctcatcctcccgtccggctccc

SEQ ID NO: 232599 - DNA, 140 bp, Homo sapiens
  chr6:166581516-166581656
  hyper
cacgcctgtttcatgtaaatccggggccccagccctgcgagccccggcccagcccctacacccccgcccttctccaaatgtttgcacctccatcaaagcggcggggcaagccccggaggaaggtaagctggacgccccgg

SEQ ID NO: 232600 - DNA, 1120 bp, Homo sapiens
  chr6:166582316-166583436
  hyper
cccgcccggcccagcgccaagcggtgtcggcagcggttgttttattacctttcggtgagaacttacgcgaggagagcgaaggagaggtgacaatgagcaggaaatagttcagtggggtctctttaaacagtaacattcctcctaaaacgggagcccaggaagggggaaggaggcagaagctcccccttccaaggcctggctttgcgcttctgcacacctcgcccattcgctggacgagggcctgcctcgggtagcagcctctgtttcccggtctcctgagcgggcaccccagccccaacccctctagagaaagcctgcgcatcgggtggggcagcgagttcagaggagtcttgcgccctagcaagggggctttcccgcggacatggtatctgcgccccgcgctaagtctcccctgccccctgccccctgcccctcgcccctcgcccagccgggctcgctccggggtcgggaattgctggggaagccgaaggagggatccccgcccgggactcgagggatcgacccgcctcgcggtatgcggagggctgccaggagccagtcccggggaagggtgcctgccgcccgtgggggacagggctccttctctcccttctccaacttacaccgacgagtcaggaagccggagcgtctagtccctgtccgcatttctcagtgtcttttgatgtctgggatgcatggatattcccagggggctgacccgaggtggggaagtttccttctagaaagaggcaccaaaaggacctcatttgctcctgacgccggaccctcctgacacgccttcactggctcatcgggtcctgggctttgggggagagcgtggtgcgtgttactctccttactccgggtattaaaatgtctaagaggtcatcgctttggcccaaggcctcccgaggataagataaaagggaaaagtggaggggaggtgaaggaggaacgagggtgggtcccaggcaattgagggcctcggaaccctaggcacgggagcgaaacctctcctgcggcttcagggcaaaggagtcccgaaggctggatccctcccctgcgctcggacggcgtcgcggccgcttttcccacagtcgggaagcgccaaagaagactg

SEQ ID NO: 232601 - DNA, 111 bp, Homo sapiens
  chr6:166667258-166667369
  hyper
tctgaatccgcttcctaggaaagcgccccctcccattttaaaccgttctcaggtggttttttctggaagcagcagtggtttgtccagcaaggattaactctttgccttttc

SEQ ID NO: 232602 - DNA, 1045 bp, Homo sapiens
  chr6:166721134-166722179
  hyper
aggggaagggcctgcggggccgcgccagcagctgcttctccagatgacgcttctggatgaccaggacggcctcgggggtgagattcaggcagaagcgcgcagcggagtctggacaaggccccgcccccgaggaggtgcccgcggcggtggtccccgtccccgccgaggtcgccgcataggtggtcctcgctgggctgtggccggagcctgccggccggggcggggcgcacgtggctggggcccgcgcgcggctgggcaaggcctggggggagacgcccggaggggccggcggctgcgtcctgtccaggccggggccgcgccgggccggcggcctcttgagcgtggcggagggccaggagctggagaggagcccctcgggccgctgtgggggcctcttcttcttgtcccccgcggcgcagggcctccggggtaactggcgcgcggcttgggcccccggggcgggggcgggcggcggcggcatgggcgggaagggcatagtgcagccgagccgccggatcctcagcccctggaaagagaggcgggcgctcagccactgtgcgcggagcgggtccccgcagtccgggcggcccctccacacccacctgcgtccagccgcggcctctccggcttcctcacatcccagcgaccaaacccggggactcaaagagaggcgctcccaccctcccctcctcctgggggtgctcccgggactggaccctgcaggaaccgcctcccgccgtccgactgtgggcgagtcgcggcgcccccgggtccccacagctgagacgcgggccgggccggcaggaggaggagcccagcgcgctcgctaaggacgcggccctgccaggccccgggctgtgcccggctggtgtcacgaccgactgttgaatgggagcaaagtgccaggacagcggagggcggagcgcgcgccaggcatcccggggctcccccagctggcgctccggtggtccgaggttaatgtagtccgtcgaaagccaggagcattcccctgggggagccggcagccttccggagtcacaggtgg

SEQ ID NO: 232603 - DNA, 85 bp, Homo sapiens
  chr6:166755972-166756057
  hyper
cctgttacagggccgtagcggccgccactctgttgcctgcccctgacgcccaccaggaaaccccgaacccgaaaccccacagacc

SEQ ID NO: 232604 - DNA, 326 bp, Homo sapiens
  chr6:166797106-166797432
  hyper
ctcaggagggagccgcagcgtcggaggaggaaagcatttaagaatagcacaaagccttaggctcgaggaagcgtgactgcttacgtgttgaaaataaaggttctgtaagtcccaccgcgggtgcatattgaaaagaaagggatcattagcacgcgaccctcgcctaggagtatataaaccgcagcacgactttcggatcacaaaggcagagaaaagaacacattgaaggcttttgctcacttttccaagttgtttcgtttcgttttgtttctaatgtggacgatcatttaaaatgcctctggtggccgggcgcggtgactgacgcc

SEQ ID NO: 232605 - DNA, 954 bp, Homo sapiens
  chr6:167039796-167040750
  hyper
atctgtatcagcctcggcgctgcgaggatattgcatcaggctctttactcctgaacgccgttttagacgcctaagcagattgtgctgctgcctgttcttccccgttctgtgaattctacactgacttcaagtgcacgaatgagctacaagataaggtggaacctgccggccgggcacggcagacagcacctgatcagcgcctcggagggcggagctggggggcttctccactcgggactttgagggacccccgcggagcgctccgcgccactcggcggtctagctgcagagaaagcccctcctcacccggggctccctgtggcccacaggggaccatcccacaccccgtgcagccagcggcggagaaaccagctggaaatgcagtgggggtggagttgcccccgcgaggacccacggaccgcccaattactacggagtcccagcgataacgtttggagccgtttggttcgattttcggaaccggaccagctttccagtaacttgaactccctgacgggtctcggggtccacccaggggtggcgaggcgggctcgggcgaccacggcccgctcagtgcccggcacctgcgcgccccgagggcggccgcattacctcgagccggctcaggctggagctcttggagcgcgacttcctgcgcaggtacacagagaagaacctgcgcacggcgaacttcttcatgctcaggtccatcgccccgcgcccagcccggagcagccgcagggccgggggacgcgcatccccggcatcccaggcgcggggctcaggtccgcgggcgggcacgcgtggccagggagcccggcacggcggccatgggcgcggggcgtggggcgcgagctgcggtcacaaagggcaggccgcgccggccaccgcggccggggccacaatcgctccctccgcctccttctccgcctcccctgcgagtaccagcgccgg

SEQ ID NO: 232606 - DNA, 69 bp, Homo sapiens
  chr6:167276365-167276434
  hyper
cagctgctttcctgcggagcgttcaggagactcgggcacctctggaagcgctgcggactgagctgcccg

SEQ ID NO: 232607 - DNA, 576 bp, Homo sapiens
  chr6:167764613-167765189
  hyper
gagccccgcaggcccgtggccccctgcctggttctcccgcctctgcaagcctagccttcaggactccgcctcgcccccctcttttctgttcggagactcacggggccgtctgtctggaccacgtgtgcacatttctgaccacgattcctccgcacaccagctacaggcaccgcagcgctggggacggcacagctgaactgtgctggcagcgaaggggcctcacggggacggctcagctccctgagggcgcaacccacctggtccgggggcgggggggggggtgaggaataaacttccgcggttttcagtgacccagtttgttgcatggcacatgttggaaaggtgaatctgaccgcgttgaccgcgttacttcagagatgcgctgtgagctgctttgtgccgcgaaatgacctgtttacccgacagcgccctctgcagcccagcgccggaacgggctttttcatgatgttcctgcgttgtgtttacagcctccctgcgaggggttcgcacgcacaggcggacctcgttttgttgcgccttgctctattgtgcctcgcagatactgcacttgttttt

SEQ ID NO: 232608 - DNA, 776 bp, Homo sapiens
  chr6:168226538-168227314
  hyper
ccggccctgcgctccgtacctgtgccgccacgcccaccggtcccctgctgagcctagcaccgcccatttagacccagcaccacccgtccggaccgaacctagcaccgcccgtccggacccagcagcgcccatttggatactgcaccgcccgtccagacccagaaccgcccgtccggacccagtaccacccatcggacccagcgccgcccatttagacccagcaccgccagtccgaaccgaacctagcaccgcccatgggacccatcgcccgttcggacccagcaccgcccgtccagatccagcactgcacccccatttggatccagcaccgcccgtccagacccggacccgccagtccggaccgaacccagcaccgcccatcggatccggcgccgcccatttagacctagcaccacccatccgaaccgaacctagcaccgcccatcggacccaccgcccgtctggacccagcaccgcccgtctggaaccagcaccgcccgtccacagatccatcaccacccatttggacccagcaccgcccgtccccgcccgtccggaccgaacgcagcaccgcccatcggacccagcagcgcccatttagacctagcaccgcccgtccgaaccgaacatagcaccgcccatcggacccatcaccgcccgtccagatccagcaccgcccatttggatccagcaccgcccgtccggactctgcaccgcgcgtccggacccaacacagcaccacccatcggacccagcactgcccatttagatccagc

SEQ ID NO: 232609 - DNA, 33 bp, Homo sapiens; identical to SEQ ID NO: 200754
  chr6:168228539-168228572
  hyper

SEQ ID NO: 232610 - DNA, 47 bp, Homo sapiens
  chr6:168720647-168720694
  hyper
gaggggcaaagaggcgcaagtggaacaaaggcggagaaaggcttgtt

SEQ ID NO: 232611 - DNA, 779 bp, Homo sapiens
  chr6:168841440-168842219
  hyper
ctgggctgatcctgcgcggaccgggcctggaccctggggcgtgaggagggcgcggtgcgtcccgtggttgtgcttggaagccccccgagggtgcgcgcgcgtgggtatgagtgcgtgcgtgtgcctgggtgtgcgtgtgtgtaagtgtgcacgtgtgtgtgtgagagtgcgcgcggggaaggaggcacagagacagcccggacaggccactgcgcagccctggtggcccccgctccacctctcgctccgcagacccgcgccagggaggcctctgggccgcagcgggcaccggagcggagcgggcgcggcagcgggcgctgggaggtggggctgggggaggagagggggagggagagaggcgggcgggaggggaggatccgggaagctccggggtatttgacaggagcgagggcggacgcaaagaacgcggaggacctctgggtgcctgcaggggagctgctccagccgggccgccgggagcggtggggagagcatcgcggagccgcccctccacgcgcccgcccagccgcgctcgcccactgggctctcccggctgcagtgccagggcgcaggacgcggccgatctcccgctcccgccacctccgccaccatgctgctcccccagctctgctggctgccgctgctcgctgggctgctcccgccggtgcccgctcagaagttctcggcgctcacggtaagcccgggcccgcgggacctggagctcaagtggtgccgcctcttgcagccggccgggttcgggtccccgcgccccgctccag

SEQ ID NO: 232612 - DNA, 418 bp, Homo sapiens
  chr6:168842477-168842895
  hyper
ggagctgcgggtgcgctcgggtgtcccgcactcactgctgggcctgagcctgtggggaaccaggtctgggagcgccggcgccgccccgcggactgtcccaaggccaagacagacccgccgggactgggcgcccacctcgcccacggggacccggcctggagcgtgttctcccgaccgctttgggctcgtgcgccgcgcggatcccgggcctctcgccggctgaaggggctgccagtcgtgggccccactcgtgggtctgactctcccagagaccctcgtaagtgagccgaggaagaagcagatgaggttacagatgattcttcacgggcctgagtgttattagagaagcgctttcttcccttctcaggacagaactggaggcaggcggcggctccccgctctgcggggcctctgggtt

SEQ ID NO: 232613 - DNA, 224 bp, Homo sapiens; identical to SEQ ID NO: 200756
  chr6:169613106-169613330
  hyper

SEQ ID NO: 232614 - DNA, 168 bp, Homo sapiens
  chr6:169653482-169653650
  hyper
ctgaaaacataaagcgtttacccgggttcccaggcaggtatatacattgaaatagcagcagccacaaccctcagagaggaaggggtgcccggctggtgaaagcacagccacggaggaaaagctgaggagcggccacgtgccttgctcttcaagcgggcagtagaaaca

SEQ ID NO: 232615 - DNA, 198 bp, Homo sapiens
  chr6:169653852-169654050
  hyper
tcagtgttccggaccgagtcagaaaggcgcaggctctgctggagcgagagaccggccctgcagtgcaggatgctccggtggacgtggccgagcggctcccgggcagcgcggctttatatgccgcttctcctgtgcagggctgtcaatcagacacacgaggaagcacgtttaattcattccttcgaaggaatgacatca

SEQ ID NO: 232616 - DNA, 205 bp, Homo sapiens
  chr6:170125201-170125406
  hyper
tattactgatctcgggctgcaccagggcacttgtaggaccgcactaaaaacagcggaaagtgaggagccaagcctgggtccggggcggcccgccgtacagctggcctcacggattccactgcctgcgcctgcagatgacttgttctggagagtagagaatgttctcggatttaaagtacaatccggtttcctttccattcattat

SEQ ID NO: 232617 - DNA, 339 bp, Homo sapiens
  chr6:170151379-170151718
  hyper
tcacttaaacggtcggacatagccgtctcgggcccctagcagtctccgcactcactgcctccttctcgaacatgctaggcctcctttctttcctaggcgtcaccggagcctgctgaggggtctggttcggggtctggatggggctcgacttcacgcctcggcctcgcttctccatctcgctctgttctccaagacgcccaccgcctccccttcaccgccggcggtcaaacgccctagccagtcccgcgagggcggaagtctcccacctgcgcctcgtacggtaggaagtgcccgccagggctccaaagcgcctggaggaggggcgcgcaggcgcctgcg

SEQ ID NO: 232618 - DNA, 946 bp, Homo sapiens
  chr6:170598159-170599105
  hyper
aggatggggtggaagaggcccgagggcccttgtcatttttcttgggggatgggcacgctccgggtggtagcggtcgcgctgcgcgggtaatcgcgccaccaacgcgtctaggagtcgggaaaccagaaccttcccacgtgaaggggcgcctctgactggagacctggcacagaggccggatacggaaatctcccgggcgcgctcggcctctcctcctcgccccagcgcggtcccctcctgcaggccgcggggccccggggcgaggtgtccgcgctgctgggctggagtcctggggccgccgctaggcagatcgcagcgcccacctgcgcctcgcggggtccccgaggtcccgccaccgagcgcccaaggcgggatcccagcgcgtcctgcagcccgcccagcttcagggccggcccggcgcgcgcaggtgcggcactcaccggccaggtgaagccgaaggggaagcggatggggttgctgaacgcggagtcggcgcccccgccgtcgggcagactgaaggagtcgacgcccagcacgggggtgacggcgctgccgtaggtgcagggcggctcgggggacacgctggcctggtagtgcttgaggcacacgcggaagaaggtccggcaggcgcacggcggtggccccgcgcccccgcggcagcagttgcggttccccagcagccccttcttgttgacgaactcctgcagcttcagttcgaacaccccagagctccagacctgcacgggggagggcgggggcgtgaggacgcgggtcccgcccgagctagggggcgtgaggcctgggtggggggtgtgcggagagcctggaagggctcaggggccgagcgcgctcgctgcacggccggcgctggggtcgtcgcccccgggattcatcttccgggccgtggctggcgcggcccgtgccgctgtccgcccctccccgcgcg

SEQ ID NO: 232619 - DNA, 441 bp, Homo sapiens
  chr6:170599640-170600081
  hyper
agagctgcagagcttcctcccgagccgattagaaagccgcggtctggaaatcccacgggcaaggcgataatccggggccagcggcgcgcgctgaggggacggtcggcggcggcgggtgtgcgcggcggcccctgcggatcgcggcccggtgtcactcggcggcggcggtcgttccgggagcactccgggctccgatctccggtgtcacagcaaagatccgcgtctttccgatgaatccagccaatgccatccagtacacacgcgcaggaccggaggggccgggccgtgggaggaggctctgcgccgcggctgcccgggttcccctgcgctctgccctcggccgggtcgggtctccgcgggtgcgcgcagaggatctggctctcgccggcgcctgccgcccttatattcagccggccgcccgcatggctaatgagatgcaaa

SEQ ID NO: 232620 - DNA, 155 bp, Homo sapiens
  chr6:170604989-170605144
  hyper
atttgcatgagaacgggcgggtcgcgtggctcagctggcggccccggcgcagatgacggctcggcagcgggcccccgccccctcctctgcgccgcggctccttcccctggaacccgcggatcatctgctggggctgtcccgcgccccatctccat

SEQ ID NO: 232621 - DNA, 136 bp, Homo sapiens
  chr6:170615733-170615869
  hyper
cccgcccaacccacgacgcgggcgctcctcactctcgcaacggtcacgcagaccccgcctctgcgaacccggccaagtcccgagcggaagcgccttgagcggaagcggaagtgaacgaggcggctgtggcggtggc

SEQ ID NO: 232622 - DNA, 43 bp, Homo sapiens; identical to SEQ ID NO: 200760
  chr6:170862217-170862260
  hyper

SEQ ID NO: 232623 - DNA, 323 bp, Homo sapiens
  chr6:170863273-170863596
  hyper
gatggctgtggcacggcggccccgccccggaactcctcaagagcttcgcccctccttacctatggaaacacaggaagtgacctatgctcacacttctcatggcctcggccctagtgggagcaactcgctgaagccgagggcagaactggcggaagtgacattatcaacgcgcgccaggggttcagtgaggtcgggcaggttcgctgtggcgggcgcctgggccgccggctgtttaacttcgcttccgctggcccatagtgatctttgcagtgacccaggtaacagattgtactcttttctgacggttcgggcgaaggccacca

SEQ ID NO: 232624 - DNA, 99 bp, Homo sapiens
  chr6:170893981-170894080
  hyper
gcctgcgggtggccgccagggaggcagagccctcccgcaaaccttccctgctggtgtccacctcagggtgtgggaaacctgtgcgctggccgagtgcta

SEQ ID NO: 232625 - DNA, 214 bp, Homo sapiens
  chr7:193809-194023
  hyper
tgggggctggcaggtgcccacccccaagggagccgtgagcccaaggcatggtgtagagaggttcaggggccccagagggccgccccccatggaagaggccgggcagggagtgtggtgcgggaggaggcagccgcctacctcagggcgctgcctttgtctccagaataacctcctccttgggaggggctgccggctggtccgggagctgtgccct

SEQ ID NO: 232626 - DNA, 101 bp, Homo sapiens
  chr7:362170-362271
  hyper
cgccttccaggagctcggtgcacctgctgtcccgcaggtgaggccgaggctgcacggccgcgccacgccaccaggtggcagcagagcgccagggatgggcc

SEQ ID NO: 232627 - DNA, 472 bp, Homo sapiens
  chr7:372708-373180
  hyper
ggagagggctccttcgtctccacgtggcctcgggccctgcaggtcccccgagggcgcagccgccagcagggggcgcctttctctaacctcccggggaagcgcaggtgccgcccgcacctcagacagcgctgccgcccgcgcccgccctgcgccgttccgtttgctccggtgtcccccagcttgggagcggggccccccagccctggtttgaggcatgacgttggtaggaagagccccttccgtggagcgcggggcccgccggggaggcggccctggagccccctcctcccacccgcccaggattgacagtccctgcctcgggcgccctctgacccccgcgctcaccgagagaggacgaggccccagacaggttgggccgcgatgcaggtggccctgggctcaggtcccagcaccggggttcctgctgaacgagctccgcccttgcccagggaggggccggcggggggggacc

SEQ ID NO: 232628 - DNA, 213 bp, Homo sapiens
  chr7:402448-402661
  hyper
cctggtgctgttcagctcttcgaacacacataaccgtatcctccgtgactgtcagaagttgtatttcttcctttccgatctcgttagctttcatttccttttcctgccttggcccggacctgcggaaggacgctggtgaaatggtgctggaacgcaccgccccttggtcccgatatcaaagcaaaagcttccgggggtgcttctgctgtgggt

SEQ ID NO: 232629 - DNA, 754 bp, Homo sapiens
  chr7:556557-557311
  hyper
attacagagggggccgggccctgacccgggggccgcctccgcccgcccgcccgtcggaccgggagccgcgcctgcccttggggcctcgctccgcgggctgcccgcccggcgcacgggccagggctctgcgcccagggtctgggccggatcctgccgctcccccggcccgagggcaggcgcggggcccgcacacctggcggaggccgcggctgaactttgtgtgacacacgcggcgttttccttaaaggcgaaaacaatcccggggcgagcgagcagccctcggccgccgctgggagagaaagtggagactggaagagaaactcctgactcatccgcccgggcgcttatggctggggattggattctgacctttcggtgcgctcctgcgcggcgccccgcccggccccagctcggggcgcacaggccgcccgcccgcgccctccccgcgcgcggagggaaggggcgcgatttacctacggagtctatctccaggagtcgctggaggtcccggatgctgtggatctgactgcgggccagcctctcgatcacctcgcgggggatctcggcttcctgcaagcagaggccacacggtcagcgcccgcggccccgaccccgccggcacgcgcccccggccgccaggagcgccgccgccccgggcccgaggagaccccgcgagcgccggccgcagtccccgccccagcccccgcggagccctcgccccggccctggaaccagaagccgggggtggggctgg

SEQ ID NO: 232630 - DNA, 248 bp, Homo sapiens
  chr7:557626-557874
  hyper
cacaaacacacgcacgcgcgcgcagacacacacacgcgcacacacatctcactcacacactcgccccaccccgggctccggcccagccgcggccctagcgccgactaagacgcccaaatccagccggcggccgggagaagaagcctccagggaaagcgagggttaaacttccacctcgcgcagctctccgtgccctgcggagaccaccctcacctctggcctcccccactcccctccccgatttttaa

SEQ ID NO: 232631 - DNA, 543 bp, Homo sapiens
  chr7:560260-560803
  hyper
cggtgagggtcccccgggttctgagcctcccgcgtcgggatccgtggggcgcacagagcgccacctccggccgaggcgcagctcagagcgcgatgcgggggaggaacgcgcgcggaggccgaggtctgagcgtggctagacggctcccacgccgagaaagggcgggtgcgcctgggctggatggatttcgcctccctagaccaggagggattggaccctgactacaggtccaggtgctcgtcagtgccctgccagggggtctacgcgtcctggtaccgggtccagcggggtggcgtgctgtgcagaccccgaggctagacggcctaggcccctggagcccaggagacgcttccttgggtgagcagcggagaatcccgcccggcccagccgtcacccccaaccctgtcgattaaacccctgcccccgtcgcggtcgccctccctccagacaaaggccgttaaggcgcagccccgcgggcggtctttcatccccagctaggccagctctagcatttcaaaggccgaatccggagagcgcttcggg

SEQ ID NO: 232632 - DNA, 346 bp, Homo sapiens
  chr7:561093-561439
  hyper
gcatggcttctggaaagagccggactcgcagggccaggacgcaggccggaccccggcctcattcttcggccagttatcccggagtggcgcgcatcctgtcttcctgggcctcggactgctcgcgcgcagagggggcccgaggacacctctgtggggttagaggactcggtaagacggtgtggaaggcaaggaggaaggtcgcgttgtattggggatggggtacccgtccctcccagcttgagggatcctgggggtcctcgccgcctctgagggcctagatggctgcttccctcggctcccctgcccggcctggagctacgggtgcgcccagctagagtttagggcc

SEQ ID NO: 232633 - DNA, 708 bp, Homo sapiens
  chr7:751751-752459
  hyper
tggccaggccaggccggcaccgcaccgcggggcgcaggaccccagccccccgccacgccgcccccggagtgcccagaccgccgggaaggcgcccacccagagaccccgcgccccccgccccaaacccggcctcagcgccggcgaggaccctcccgggacccctgaccgggagccccaggcccggccccgccccgcgcgccccactcccggcggggccgaacccttccaaatgtccgcatccccggggggcctcccaggcccggggctcccggcgcagaccccagcccggccccgcgtacctggatgcgcggcgcccgaggccaggaggcggctgcgcggggacgcggggcgcggggacggctggcgagcgagcgagcgggtccccgcactgcagcggcgccgccctccacgcccgcccccgcgccgcgcgcagctgctgcacccccaacgccgcccgcgcgggcctgcagcccgtctccccccgaccgcctccccgcggggcccccaaccccggcccccacccccggctctccccgcccccgccccatcccccaccggcgcaggttcaggccatcgctgccaggaccccccgctgtcgccgccccccgccccctccactcagactctgagtcgcccactccagccggtgcaggccgcggggccgcctctgatggcctgggcaccccccactcccgccccgttcacgac

SEQ ID NO: 232634 - DNA, 197 bp, Homo sapiens
  chr7:852642-852839
  hyper
actgaaaccacagcaggggccgccctcactcaccgcaggggacaaccacccaccaaaaaccatttcctctgcggatgcttcccgcccaaagaaggaaccagaagcaggcaggatggggaagcagctggtggagaagccaaattgtttccttaagagaaagggatttacgggaggtggaggttgcagtgagccaagat

SEQ ID NO: 232635 - DNA, 317 bp, Homo sapiens
  chr7:852899-853216
  hyper
aaaaagagagagagatacggatttcctgagcctccaggaggtcggctgggtaattttccttcgtccgactctctccctggccattgcgtagccacctcatccagatggcacgaagcctccgggctcgggtttctgactcgtctcccaggagccggtttctgtttaccgctgaaaggcacgcctgctgccaaatttgaggtgtgagctcaccgagaaaaaagcactgtgctcccccgggagctttgcaaaacgggccgctgctgccctccgttctgcagcagagatggtggccttgaagacagcgagcctgcctacgg

SEQ ID NO: 232636 - DNA, 99 bp, Homo sapiens
  chr7:915758-915857
  hyper
gcgtggggagggtcccaccccgggacgcttcctgctcggggtcagccgccgccgcagcctgtttacgcgcagcgccccgccaggcagtttcgtgccacc

SEQ ID NO: 232637 - DNA, 257 bp, Homo sapiens
  chr7:1105259-1105516
  hyper
cgacacagcggcgacgagggccgggtctgggagggcgtgggccagggaggggcgacggaggcggtctcccttgccggggtgctggtgacacagcggctgcacctgtcagaacacgccagggtggagacaggagatctgtgtgcttcccgagtacagatcacggctcagcatctcatgggaaagggacagggctctcttcaggacacgcagtaagatttcaagtgcgggcacttttaatactccgcgatccaaaggca

SEQ ID NO: 232638 - DNA, 290 bp, Homo sapiens
  chr7:1126564-1126854
  hyper
aagacccacccctccgcctggagagccggggctggcggtgcctgaggaccccttcggcctggacagcccacgcgggcttggggggcctcgctctgccctcatggggcggccatcggttcccgaagcggcgagtgaaaattcaaatggccagtagggggcgcactcggaagtggccgccccgcatgaggcagttcagcggccccgagagtccggggagggaggtttattctccgcctgcacgagactgtgaaatccgcaaccatgagcaggagaggcggccctggtgggga

SEQ ID NO: 232639 - DNA, 902 bp, Homo sapiens
  chr7:1263476-1264378
  hyper
cctctcccatgagcagtagtcgaagaggctgcacggaggtcccggcctccgtgagggcggtgggttggagagggcgcctggggcctcaggaccctgctccctcccgggattgtgggtttcctgccccaagggtttcgcggcgtgggcatgagcgctggcatctgcgcgccctgaggttcggccgctgcgtggccttctccgggaggtggggggaatccgaagaggtcccaccccaggttcggttcccggcttcctggtctttgtttaccaggctccgaggaggacctgcctctctcctcccgcagccctgggccccccactcgacagtttcacatccagggagggacaaagggggacgcggccggattagctttcgcagcgcgcggtgcgttcccggggtgcagctgcttcggggcccctgccaaggctccggcttctgcaggcgggactcgggctcgggccaccaccgcgagcactttcctggccagctccgttcccgccccatcgggccgggccgggccgagctgagcggggcgcggagaccgcggcggacggtggggagagcgcgcgcgcgtccatccgatttcaggcctttgttgccggagcctcgtgccgatgggttaatggggcagaagagatcggtgaagggcgacagaagcggcctttgaaagagggtgtcagcgcggggcagcgagacaaaggccaaaacacacacgggcggagagggacagatggggacgggcgagggaaaacaattaggccgcaagtgcgggggcggggcgcggctccatcgttttccagttaaccaggcctggccggcgcgggccccacgccccaggctggagcggtgccgaagcgcagagcagaccggcttctgctgcgtgcgcgagtcctgcaccccg

SEQ ID NO: 232640 - DNA, 300 bp, Homo sapiens
  chr7:1265099-1265399
  hyper
taacaagagctgcgtcctggcggctgaccgtagccaccccgtgtctccctgcgggatgacctgagagcgtttcctggaagccgcgcagcccctctcccggcctccaccatcggggccgctcaccctctggggactctggccccgggaccccgggatccaggcccggtgcgcgcggctccggccccgagcgcgctgtccaggctggatccccaccaggcggcgctgcgcccctccgagcccgcccggccgcgctctgcaaaccgatgctgtttaattaacgtgcaaattgagtagattaaa

SEQ ID NO: 232641 - DNA, 56 bp, Homo sapiens
  chr7:1265621-1265677
  hyper
acaggaacttgcacggctccggcgccggcgccgctgcagcccgcgtggcccgggcc

SEQ ID NO: 232642 - DNA, 56 bp, Homo sapiens
  chr7:1268389-1268445
  hyper
cttcaagcattgataattttcggcatattaagcacgttttagcaaaggtgataagt

SEQ ID NO: 232643 - DNA, 415 bp, Homo sapiens
  chr7:1269777-1270192
  hyper
tcccaggaccgcgtgtcgagggctgcttcccatgcagttgtttggaggaacagggcccgcgagggagggggcgggggcgggggaggggcgggggagggcgcgggggagggcgtgggggaggggcgcggggaagggcgcgggggagggggagggggcggggggaccctttaaagcgaccgctccagcggcagcaactgacaaggaggcgattatgaaattttgatgttgaaaatggggggcggggtgggggggtgggggccgagagcagaagccgagcgactccccgcggcgccgccgcagccgagggcctctgaagagctctcgagccgggcgggggtcgtcccggccgcccccaccgtcattaaaggcccctctcaaacactcgaggaggttttcggagcgcgagccggcccga

SEQ ID NO: 232644 - DNA, 373 bp, Homo sapiens
  chr7:1270795-1271168
  hyper
gggctccccaaattccaggccgcctctcggtctcctggattggctgggcctggtcctcaaccctgcgccgtcccctcctctcccgcaaggagagacaagagggtcattgaagtcggagtcagcgtggatcggcccgtccacgaccttcagttaggaacagggccagactgtgggtccagtcgcagggacaggcagtcgtgtggcaggacggggtggccttgcgcccgccaacccaagcattcccctcctgagcgtttccggcaccccccaccctccccggcccaggcacgggcacctgacccggagggacgcagagatgcgcacggtcccggcctgcccttccctctcacgcgggctagggcttggaggcctg

SEQ ID NO: 232645 - DNA, 1704 bp, Homo sapiens
  chr7:1272152-1273856
  hyper
gggcggggaggcggcggctggcgggaggcgcgggctcggggccggccccgagtgaagtggggggctagctgggggcccctgccccgggcccaggcaccagcccgcgcctgcccggccctgggcggcccctccctccctccctccctccctccggctccccccgcccccagcccgtcttgttgtgacagttcctgatactgtttattgaggtgcatgtcaggtataattagcaatcgatatggaaaacgtttccctgcacccagcacgcctctgacgtcagagccgattagcgcttcttattggtcccaaattccccgggccgcggctaattatcgggagcttgatgttgataagtaaagcgccggagtgcgggcgaagcatgtgtggggctccgggtccctgtctccgccgccgccgcccgcgcctcccgccgctggcccgccccggccccggcccgcgcccccgcgccccgccaccggccccgccggccccccgcgcgagatgatggacggccgcctcctggaacacccgcatgcccagttcgggggctcgctgggcggcgtggtgggcttcccctacccgctgggccaccaccacgtgtacgagctggccgggcaccagctgcagtcggccgccgccgccgcctcggtgcccttctccatcgacggcctgctcgggggctcgtgcgccgccgccgcctcggtggtcaaccccacgccgctgctgccagccgcctgcggggtcggcggggacggccagcccttcaagctgtcaggtaggcgcggcgggcgggagggcggggaggagtgcggctgggggcgggggccctggtccggccgaggcgctggggggcccggggctggcgaaggagagccggctcctaggcggccgtctctgcgcccccccccccggatccaggcggccagcgggtagcgggagggaggggtgggggtcgggcctgggccggtggctgagccgcgctgcgtcctgtgactgcccgcagactcgggggacccggacaaggagagcccgggctgcaagcggcggcgcacccgcaccaacttcaccggctggcagctggaggagctggagaaggcgttcaacgagagccactatcccgacgtgttcatgcgcgaggcgctggcgctgcgcctagacctggtcgagtcccgagttcaggtaaagacccggcgtcgctcccggatctgccatccggaccccaggctctgggcgcgccgggacgcctttgttccaggtggcgagatatcgtccccttgccgcgggcccgcttcgcgctcgcctgctggggaagagtggaggggtgggggttctggggctcggcccctcacggacagcggggtgggtaactgccccccaaaagcctgggcggcttgagaagggccggcggcagcacccgagtcaccagaacagcggctgcgtccgaaccgggaagcggcgtggtgggttggcggaggccgggccaagtgaggtctccaggcaggggcgaggaggggaggaggggccggcttggctccgacccggaggagagagggaaggggacccccccccgcccccgcaccgcctcaaccttccgcgcgaggctctgtcacccagcctggagcgaacgagtctgtttaccttgcgcctgcaaaatattcagatggaaacatgtatttattcatcgctttgcagaagggaacagct

SEQ ID NO: 232646 - DNA, 2246 bp, Homo sapiens
  chr7:1274418-1276664
  hyper
aaaggcggttacagcgttgggggagggctcggcttcatgctggagacctccccatggacaaggctccctgcgacaaggctgggcctgctattgtgcaagtctctgtgtggccgcgacaaagaatccgtattaacgcgccctcctggggagggcaggactgcccgagcttccgcggggctcagacggatttgactgtgtgtgtttggtggctggcggttgagtgagggtgtagcgctgccgtccccggatgtcctgtgtggctccccaggacaaggactgcagagaggatggaagagacgcgatgggcccagcctctccttccggcctggtggtcgcctcttgcctccccacctgccttggccggtggcccaggccaaggaccgcaggtttgggaaggctccgttggcgccctggcccagggtttgcggaaagaaggctgtgttagctgtgccctgggagggaggctgcagaggcccacccaagtacggctccccaggcccttccggacgagaagcacccatatttcccttcaagggattccgcccccacccccgaaatgtgggctttgacacagtctccaaggggccgaagacaggtgtggagggcggctgtggctcagcggtccaacggcaggatggtcagcgccaggccgggcgggctgcttagaacacgagccgtgagcggccaggaagggtgaacaggggccttgctctctagcctccggaccaggaacccgacgctctccgtccggggccagaccggccccccaagtaaggggcggctcccaggtccccgaggtgagaagccagagcgggaagctggccgagaggccccgtctacgcgccttccgggtggaaaaggcgctcgctggaacctgcagctccagtggcaaagcccagctcagggcccgctcggccgcgcggcttcactcctgccccggccgagcggaggttgtgcaggcccctctggggggagcggggaggtcctcggccccggcggccagcccgccgcctgattgtggcttcctctcccctatccggctgctctaggtctggttccaaaaccgccgggccaagtggaggaagaaggagaacacgaaaaagggcccggggcggccggcgcacaactcgcacccgaccacgtgcagcggcgagcccatggacccggaggagatcgcgcgcaaggagctggagaagatggagaagaagaagcgcaagcacgagaagaagctgctgaagagccagggccgccacttgcactcgcccggcggcctgtccctgcacagcgcgcccagctccgacagcgacagcggcggcggcggcctgtctccggagccgcccgagccgccgccgcccgccgccaagggccccggagcgcacgcctcgggcgccgcggggaccgcgcccgcccctcccggcgagccgcctgcacccggcacctgcgaccccgccttctacccgagccaaagaagcggcgccggcccacagccgcgcccaggtcgccctgcggacaaggacgcggcctcgtgcgggccaggggccgctgtggcggcggtggagcgcggcgccgcggggctgcccaaggccagcccattcagcgtggagagcctcctgtccgactcgccgccgcgccggaaagccgcttccaacgccgccgccgccgccgccgcggggctggacttcgcgcccgggctgccgtgcgcgccgcggaccctgatcggcaagggccacttcctcctctaccccatcacgcagccgctcggcttcctggtgccgcaggccgcgctcaagggcggcgcgggcctggagccggcgcccaaggacgcgccgcccgcgcccgccgtgccgcccgcgccgcctgcccaggccagtttcggggccttctcggggcccggcggcgccccggactcggccttcgcgcgtcgcagccccgacgccgtcgcctccccgggggccccagccccggccccggcgcctttccgggacctcgcctcggcagcggctaccgagggcggcggcggggactgcgcggacgcggggaccgccggccccgcgcccccgccgcccgcgccgtcgcccaggcccggccctcggcctcccagccccgccgaggagccggccacctgcggggttcccgagcctggcgcggcggccggacccagcccgccggagggcgaggagctggacatggactgaggccgcggcggccgggagaggcgcgtagccggcccgcggccgctcgctcag

SEQ ID NO: 232647 - DNA, 240 bp, Homo sapiens
  chr7:1277066-1277306
  hyper
ttcccgggggtctgcgcttaatgcgtccttttgtgtgcgtgtgtgtctgtgttttctgattcaacacatttatgcatctgcggctcccggtccccgcccgccccggcgctccccctcctaccccgcgccgcacacgcacgctcacatccgccgcgcgcccccgcgcgcactggcacacgccggggcgcgcggcgcggggtgacggagccgggggctgcgagggccgggccgctgggctcc

SEQ ID NO: 232648 - DNA, 329 bp, Homo sapiens
  chr7:1277520-1277849
  hyper
cggagatggggaatcgtggggcggaattttcatgagctgcactctttgtcagcgctcttgtagccggctatattaagatagatgcccaatgatatccctcattgttctgtcgcttatattgatgttgctgcgttatcagcctattgatcatgtgtcgcctgtaataggacaggcgccgccaacgcgactctttacaaaagccgtgcacatttgttctaatagggtccgggtccccaggggacccttcggggacttcaggacatctgcagcgaagaaatattagcaaacttggctggagcctgcagccagccccgcgcccccgcccctgc

SEQ ID NO: 232649 - DNA, 391 bp, Homo sapiens
  chr7:1278131-1278522
  hyper
ctttcctcctcgcgcgggcgcaaatgaatttcggagcccgagtccctttaataatatttacataattttcgctcagtgactctgatatttgctctctaggagaccgagcttataggaaaaataattagatcaaaagaaaagtgagagggggaaggaagagcaggggagggggcgggatccacgggaaggagacctctgcgctggttgcccaactctgggacaggccgcccccagtggaagccaggagttgtcggggaggggacgcggggttcccatggaggtcgcaggagctcggccgcagagcctggccctctgcccctacccctgcttcctggggtcctgcagcctgggcctccccacaggccggccagggccgcgtcccagcagcgcg

SEQ ID NO: 232650 - DNA, 99 bp, Homo sapiens
  chr7:1279053-1279152
  hyper
tttttgctctattatgcatccgacgccatcatttttctttctaattacggaggtgtcaggtcgagctgtcatgcaggcgctgattttcaatttaactga

SEQ ID NO: 232651 - DNA, 1311 bp, Homo sapiens
  chr7:1280222-1281533
  hyper
tttgctagtcaatcggttagatgcagactggtttaattttgttgataaatcggttcgttgggggtggggacggggcgggggctgtggggagtggggagtgaggagagaagggtgttgtttctttgctgatttatttttaacccgaggttgtacaagcccctgacagtttggataaattagccaggcctcgcagtctcctaatgagagggtattatttcggcacctcggaaggagcgtgaaaaatgagagagactccatccggaggtgtcggatcgattcaggatcagggtgtaaattatatacaactaaatatccagccgcccataccgctgcttaatacggagcttagaaatgcaacattaaacaaagattatgagagatcgacgcctctggaccgagcccaattcactgctcagccgggtcagcccctgccccgcgggccgaggatggggagggggcgcgcaaggagtgaaaacggcgagtttgggatgagagccagggccaggaggggagcctcgccctcgctactccttccctttcttctaaagccagggagctccccgcccagcattgcccgttccttcctccccgccagggcccagagaaatccgggctccagcaccgggcctcagtttcccggaagcggacttgggccccgatcccgggccctctccgcccttcccaggtctcaggcgtcgctgcgtggaggaggcgcgcgtggctcccggcgccgatgtcccggcccggaaccctgcccgccgctgcgactccggggcgggggtgggtcagcctcgggggcggccggggtgggcgtggaggtggacgcggggccgcatattgggcgcttggttctgtttatctcacttagcggtggagggactggagggaaggggcggcccgaagggaggccttggtggggcccagcggctccctggcgcaccccggacacggtggccacgaggagccggggctgtggccgagggctgcccgcaccccgagacccttcctcgtgggcccctctgcccggggcgccgcccagagggggcccggacggaaccccccgcgcggggaaccaccgggccgggcagagctggcgtgagtatggagggggcgcgtggggacagaaaccccgagctgggaggagcggggcgcggggctggccagtctgcggctctctgggccccgctgggcgtcctcccttcctcccggccgctctctccttgcctttccggggtctccccgcgcccggcgcccctcgcccagccgtgactccctttcctctcggccgcccgactccgcgcgcccctctcg

SEQ ID NO: 232652 - DNA, 840 bp, Homo sapiens
  chr7:1281814-1282654
  hyper
tggggactttcaataactatcgataatctcatctgcacagaaccccccgcctctccgcgttatcggaaagtttgcagcgtttcccgagcagcgcgggcaaggccggacctgcggtggagccggcacctgccgctccgcccgggattagggagctcccggcttgtggggggtgcgggcggccggtggtccagctcgcccgccccggccgagacgctgggcccggcccccacaggctgcgcctgacgggaccggcgggaggcctttgttcgcagcccggaggccccaggctccaaaccacactcgggctgcggggagcgagcgcgggcgttgccgctaattgctgctaattttgttccattaactttatttactcttgaaccccttaattgttttccacttatttttagtaattttataatgcactaataaccaccccccccccagcctgcggacgcctcccgcctcctcctccccgctccctcctcgcttcccctccctgagcgcgacctcccaggcttcccagccactggccgcgggctccgcgtggcgctggcctccgggcacacagagaagccgcggggtgagcgagagctcggcctggggccacgggtgccggtgggtccccccgggattccgcggggagggcagctggctaggaccaggaccagtgtctccgcgccggaggccagagggtttctgcttgcaggcgttcctgcagtaggagggcgcgcagaggcccagagaggggaagggacttgcctaagatcacacagcgtcccagaggccttactgggcaggggagggggtggcccggccgggccctcgcgcgccggcttctgc

SEQ ID NO: 232653 - DNA, 374 bp, Homo sapiens
  chr7:1283686-1284060
  hyper
cctccgaccccagccgacacgctaccaggcctgcaccatagaagtgggctctgagagtgttcccaagccctgggggagggggactccccagagatcgtgtccccgacccctccttccgggcccactgctgccatcccaaacccagccccccagcgtaactcgcaccctcatcccctttcccgaggaatccaaactccggtttaatgagtcgtgaagtgtgagaacttccggagcccgcagcgcccctgatgccaattccagatgtgtgagttgggaggggcgggcctcccggcccgtgagcacccagccgctgccttcagagcgaagcatccagcacccaggttccagcgatcgggggcctgaattggaaacag

SEQ ID NO: 232654 - DNA, 1483 bp, Homo sapiens
  chr7:1286170-1287653
  hyper
acgtggagaggccaccagtccggtcctggggcggcggcggcctacagggccgggtcttccttctgcagatgccggttcgagccgcggcccgatcccgatcccgggaagaaacgctccgtggctcgcccagggttaagagccgcggtgacaacccgtttttgtttgagaagcggtgggtggaagccacgaatcccacacgacatctggggaccaaacgcccagagtctggaggatgatttgggagaggaaggaagatggggtcagggtagggacacggctgggaaacggcccctcccggcgcctccccgaccccagggcagggcccgggaccacacagacccccgcaggccggcggccggagccctggcagccgggccgccccgagatgacgatttcgttatttattcacttatttattcatttataaagtgtttacttagctcggtgcagatgtaacatctcatttacagcgtggcctccgggcatagaaacaattggcaacaaaagagtaactccggagaattagagaaaaaacccacgcaacaacaacacgagtcgggggcggggtgagcgctccggagaggcgctggtggggcggcggggcggggggtgctccgagccgagcagcccgacggacgcacccaggccagggctgcggagacccccgggcccgcgtgggagcagcgcgcggtccctccccaggaggcggtggaggccgaagggagtcgccgggtacccggctcaggccgtgtctgagcgccagggatgcgcagaaatgggagcctggccgcgcctctgcagcggccttggaggagcctctggagcgggccccgcgggcgcgtggggtgggacctgctggagacccgcaggcggcggcggccaagcagggtcaggcggttggcaccacaggtcgcgccctcggctgcagtcggggcagctccagggggccgcgtacctcccgcttcacggctacgcgtgggggcggctccgtcctggcctcaccagcctccccggagcccctgccggtccccagcctgggggctcaggggtcccgttgggcgtgtgtcccgcccgggccccggtgtggggggcgcgcagtcctcagggccgcctccctcccgcccccagcacagcgccccccagctctcagccggtccttgcggccgcgggatcccagccccagcagcgggaaactgaggcccgcagcaccgatgcgcgtaaggcagctcggatggggtcagaggggcgggaaggcggaaggcgggccgcaccccccggaccctcaggacctggagcgcgtggagggcgtggaccaccccggatcccccaccaccgggcgtgtctgccaagggtgtcattgggcgccgcgcagaaggggcttccgaggacccgcccctcccccgcagccgtcagggcgctgacggaggcagctgcgcctgtttaactgggagccggttgcttggcaacccgaggcggctcatta

SEQ ID NO: 232655 - DNA, 157 bp, Homo sapiens
  chr7:1289294-1289451
  hyper
tggcactggaaagcacccaccgggacccctgcacccaggcacggagacactgcagaccctggcagggtccgggacaggcccagggctggagggaggggttcgagacaggccacccttcctggggcagcccccctccgcttcctcccacagctctatt

SEQ ID NO: 232656 - DNA, 32 bp, Homo sapiens
  chr7:1409281-1409313
  hyper
ccacccaccgcaggccccgctcaccgcagacc

SEQ ID NO: 232657 - DNA, 80 bp, Homo sapiens
  chr7:1499513-1499593
  hyper
ccgcccgacaggccccgccccacgccgcctggcccctccccaggccccgccccgccgctgagggccgagacccccaaccg

SEQ ID NO: 232658 - DNA, 186 bp, Homo sapiens
  chr7:1546635-1546821
  hyper
tgttgacattcacacgtacctgtggccccatcccccatccctttcaaccctgtaacgaacattcccaaaccacccctgacttgtccccaggccgccagggcgccactttctgtccctggagaggcgctgtttgctcttctggagtctgtgtgaatgaaagcacacagtgcacgctccctggccagc

SEQ ID NO: 232659 - DNA, 458 bp, Homo sapiens; identical to SEQ ID NO: 200786
  chr7:1571091-1571549
  hyper

SEQ ID NO: 232660 - DNA, 400 bp, Homo sapiens
  chr7:1572209-1572609
  hyper
aacccgggagccagcgtttaccgagggtcagggttgtcggggcgccagcctttgtgtgcacccgggaggctgctgttaagggagaccgtcttccgggccacttcgctgtctacaaggcgtgtgctttcacccacggggctcagcgatggctgcgtttgtttacagtctctggcaaagctgtttgccacccagacggagaagaagttgtgcctgttcttgtcccagctgtttctgagtctaaaggtttctggagtggactttctgggtttcgggtccagtccacacgggaaatggaaatctggccagctgagagagggctccgtgtggccgcctttcaacagtaaacagtgactcaccgctccgtccccaccctccctgctctccgcgaatggaagatgcc

SEQ ID NO: 232661 - DNA, 94 bp, Homo sapiens
  chr7:1609779-1609873
  hyper
gcggctcgggttccgcgctgccggcagggcttgggggcgccttagagccgaaccccgttttttcaggaaagggcgctgcgaccacccccgtccc

SEQ ID NO: 232662 - DNA, 160 bp, Homo sapiens
  chr7:1703853-1704013
  hyper
ccccaggccgggctcggcccgctctgtctccctgttccctggaggtctgggcgcccccgcgcagggactaagggctggacagccgcaggcaggggctccgtccttggcctccacccttcgtgtccagcaatcccgggagcaggcggcggcacttcctcca

SEQ ID NO: 232663 - DNA, 143 bp, Homo sapiens
  chr7:1704193-1704336
  hyper
ccatcctcggggcgcgctgtctgcggcctcccgcgccacccccacccctgtcccgggacctcctccgggaaagacacccggggagcagccccctcccctccagtagtcccctcccctcccctctccctgccctcttgacggtg

SEQ ID NO: 232664 - DNA, 325 bp, Homo sapiens
  chr7:1707336-1707661
  hyper
ccgccccgttaactccgggactccgccgccctccaggttccaacctcccagcttcaccgccgcgtcctctccccggttctgggtctgggggaggggcagggggcgtggagcgcggcgttgggccccggacagatgtcctcgcggcggcggcgccggcgtccgggtaacagcaggccgccaatcggcgcggccacgggggaggggcgacccggccgggactccggggactcggtcgcagccggacggcgcagcctccgctcggggtggggggggggggcggccgcgaggactcgacccctgccgtgcagcccggcctccagtcctc

SEQ ID NO: 232665 - DNA, 41 bp, Homo sapiens
  chr7:1709519-1709560
  hyper
ccctccaccttttagatgtgggcggggagggccggggacgg

SEQ ID NO: 232666 - DNA, 74 bp, Homo sapiens
  chr7:1710442-1710516
  hyper
cctccctgctgggccgccctccccccgacgctgcgagcctcctcgctccgcgcggggaccgtccagtcacgcac

SEQ ID NO: 232667 - DNA, 46 bp, Homo sapiens
  chr7:2018721-2018767
  hyper
caaccctgagaaagaggggccatccacaggtgaaaactggaacccc

SEQ ID NO: 232668 - DNA, 50 bp, Homo sapiens
  chr7:2027579-2027629
  hyper
cctacagcctagggaggaggctgagctggcaggaagtcaggcaggcccct

SEQ ID NO: 232669 - DNA, 359 bp, Homo sapiens
  chr7:2443784-2444143
  hyper
ctccccggccccgccgaccgcagccctggagcctgcagacgccagcagcaccggcaggtcgctcagggtatcccttaaatgacctctcactccagaagccgcagccctgcccctctgggagaggaaaccgtgcatttagtccgggaacagtgggacttagacctcctctgcgggctcccggccaccgagacaccgccggcaaagccttggctcgggcagaggctccgtctggcaggcagcacaacaagccatagtgtttccagcattattaaattatttagttcataagcggggctgtggggactcggaagccccggggtgaataggaatgtgagttgcaggcgcggtgctggacgcag

SEQ ID NO: 232670 - DNA, 319 bp, Homo sapiens
  chr7:2517234-2517553
  hyper
ctccatgggtgctgccgctggggcctgtgcccggacgtcctggtaggagggtgggactgctgaggccgggaggggcctcaaggtggtcgtgactgtccgccagccccctgggtggtgcagagcagtgcggagcctgcggctgtggagcccgtctctcctgcctggctcgtagcagggctggccgtggccctgcagggggcagccctgggcagcagaggatgagcgtgcctgccctccccggccacatccgcgtccccatcctgcctggccgtcctggggcccagcaagccgcaggtccctcctacgtgcctcccccaga

SEQ ID NO: 232671 - DNA, 462 bp, Homo sapiens
  chr7:2558444-2558906
  hyper
acaccctgctcaggcgacccttggccacttccgggcccctcgcccctcaccctcggctgccggcgcgcattcctgccgcccccgctcgtgcgaggggcgggcccgggcccgtgggaagggccggggatgggggccgtgtgccggggaggcggggtggggagggcgcacagctgggccgcatctggcccgagcgcaaggagaccaaatgggacagaaggcggcctttcatccggcgagggaagtggcggccttcgtttctcctcgccatggggcgcctgaggatttcggggagccaaccctcccgacggagggccaggatcgaggaaatcagccagggaggaaggagtggaatttggttctggtgctttctcgttagaacctcgtgtccccacctgcggcacaggtggccaagctcttgctctgtacaaataacggctcccctgaaccgagcgctcgggaaga

SEQ ID NO: 232672 - DNA, 167 bp, Homo sapiens; identical to SEQ ID NO: 200792
  chr7:2559952-2560119
  hyper

SEQ ID NO: 232673 - DNA, 268 bp, Homo sapiens
  chr7:2561982-2562250
  hyper
gctggggggagggtcggttggtcagcaggggccgcgctgagatgggcctggagtccaggatgaagagcctggcctttggcccagaggttccccgcccctcccaggagcagccaggctgccgcgctgccaccacagcggccacaattgctggggagaacttggcatcctgtgtttctttgaatcgcggctccaggaacaatgctgcttcctgtgggtgtcccccggcccccgcccccgtccaccctcatccacccggctcttcctcctg

SEQ ID NO: 232674 - DNA, 81 bp, Homo sapiens
  chr7:2595523-2595604
  hyper
aagcgtcctgatccgtgcaccaaagcccttggtcatttagcttcaggttctcaaattaagtcctccgcggccgcgctgtgg

SEQ ID NO: 232675 - DNA, 430 bp, Homo sapiens
  chr7:3018094-3018524
  hyper
gtgagtgggagaagaggggacggcgggacagaggccttgtgacagaaaagggaacaagaactcagggttttacgttgtacccacaggtgcagagctgagaaaaggaaagagaaatgaagaacggcaactcggagggaggagacggtgggggtggcgcgggcaccgggtgcaggctgagaaagcgagagggcggtccggccagggggtgggggtgctgcaaccagctctggtcacgccccttctcctgagagctcccaggactgcaggcaacttgctgaagaacttgggtaatttcccggaggccggctcacctgtttccagcccatcagtgatcttgaaacttacaaatactcagactcacactttccgcctatccgtgcaaggtaagaggagccaaacacatctcgaaatgcaccgatttttcttcttc

SEQ ID NO: 232676 - DNA, 480 bp, Homo sapiens
  chr7:3082719-3083199
  hyper
tagtacagtccccgcggggggctgtcctctcccatctcccagctccacacccacttttggtgcggctgcccttcctccctgagccaggccccaccttcccaggagcctctgagtcaggctgggctgtggtctgcaaacttccgggcctttcaggtgtcagaaaagtttctcttcctccctctggggcaggtgcaccaaggggctgcagcctcctgacccccgattttttcctgtccagtaggaggaggtgggggctttgctgggcggtgatactcagagacgctcaaagagacacggaggagaggcacacgaggtggaaagtgagggagaaaaagggttggaagggaaaaaggggagaggagagtgagagagagaaggggggcagggggacagagatggagagggaaggatacccccagcatcgcgggaccagcgggagccactcccatcccccgacgccccccccgccaccgtgtcatc

SEQ ID NO: 232677 - DNA, 141 bp, Homo sapiens
  chr7:3340124-3340265
  hyper
gccccacaggctcccgggtcccgccctgggagaccctcccactggccgaccctgccccaagactcgcccactccacggtgggaaacctgcaatgtgtccctccctaccccgccctcctccagcgccggccaaaagtgacct

SEQ ID NO: 232678 - DNA, 392 bp, Homo sapiens
  chr7:3341645-3342037
  hyper
ctagggagcccaggggctcctccacgccagactcggaggagagggaaacggagccccgtagagcctgcaccccgtctgctactttgcgttttattttttttataccgcagtagcacaaacaaaaatttttaagttgaggacccatttctcagctccttaaaaggatgcccgagtccccttcccattgcatggatgaaaaaggggctggtctgtacctgagtcttcgcaccgcagggtctggtttccggtgagtgacatccagaagacttggaaatatcaagtgccagtcgctgtgaaaagccttttccagcccctccccagggcctcgtcctctccccagcccccgcctgctcctgactcccccaagtcccaaagcccgaccccaagtgggt

SEQ ID NO: 232679 - DNA, 147 bp, Homo sapiens
  chr7:4784755-4784902
  hyper
cgggaggtgggagcggggccaggccagaagagctggctgcctgcaaggctgtcccctcccagtgccgccccgcccccgcggtgcctgccttcctaatttggtgtgcattcgcctcgccagtcctcattggccgtggagtggctggct

SEQ ID NO: 232680 - DNA, 1281 bp, Homo sapiens
  chr7:4922242-4923523
  hyper
agcaggagggaaaacgaagcgcagactttacacactcagctctctcccctccttccatgaatcctatctttacagccccagcccgagccacgctttcaaatgcaaacataattcaatcagatttaattctgacctgctagctgctggagaggagaccgacttgccccccagcaaaagggactttcaagactggttcctgtctggaatgcacaagaggtggcctatattaaccgcgggacacgagcaatcagattcttctgtgcaattcagattagccaaacacttgacaggcgacagggcagggcaggatggtccgcagccccgccagggccctgccaaccccaccaacaggctcctcctgcgaggccccaggagctcggctcagcatctgttatcttggatgcagtatttgtcgaggggctggaaatggtacataaatagccgggaaacaatgctttgagctggcgcacgagtggggatcgggctgcaaccgggacggggtatgtgcaggggacgtctcgccggcccaggtgggagagcgcgcggaaccctgcgccccgctcccccgctgcgccccgctcccccgctgcgcgccccggacgaagctccccctccagggcacagccgggaaaactgagggccgagagtcccctggagttgggggtccggggcccacgcggacagccaggctcaggagctctcgggggtcggcagcgcggacccccggatccccgcaggctgggccgcccttgcccgcgctagccggcctccgggtaccgccccccggtccaggccggggcccgacagccagtcggttcccatggcaactgggcaaacctgccctccgcgccccgaccagcggccgggagtgtccccgagcgcgccccgcggcctccgcgccccaggtccccggcagcggccgagcagcgccccttacgagccacccccggttccgcagtcactcctcgcgcaccccacactcacctccggcacaacccgccgcgccgccacgttcccgcgctgctcccacccgccgttggctggggccggcgcccagacccgcgcgtgccgcggcgcctcctgccggcggcgcaacgggcggggcggggcctcaaggggacggggccacaaagggtggggcgggggagaacaggtgggctggagctgggcctcggcgcccaataggcagaaagaaagcctcgaggaggcggggtctccaggagaggggcggggccaacctgctagaaaaggcgggctgtgctctggcgcctcctgccggcc

SEQ ID NO: 232681 - DNA, 155 bp, Homo sapiens
  chr7:4998289-4998444
  hyper
cttaatcctcacggcgacccaggacacggggactcgcataacccccgttttgcaaacgtggaaatgaggttcagagaagtgaagcgacttgcccaatggcacccagcgaggaggcgcgggcgccccggttactccatcccagcgagaagacgagg

SEQ ID NO: 232682 - DNA, 67 bp, Homo sapiens
  chr7:4998744-4998811
  hyper
cgcggcgggggccaaggggacctggtcggcgcccggagccggagccggagcccgagccggagctgga

SEQ ID NO: 232683 - DNA, 203 bp, Homo sapiens; identical to SEQ ID NO: 200798
  chr7:5085238-5085441
  hyper

SEQ ID NO: 232684 - DNA, 83 bp, Homo sapiens
  chr7:5125291-5125374
  hyper
aggaccgggggacatcgcaggcaacataaatgcccttgtgggttacaatctaataaggaagatgttcaatcatcttattaaaa

SEQ ID NO: 232685 - DNA, 42 bp, Homo sapiens
  chr7:5229794-5229836
  hyper
agggcggggcctccgcagtgcgactgcgccgctcgaggccgt

SEQ ID NO: 232686 - DNA, 158 bp, Homo sapiens
  chr7:5230315-5230473
  hyper
tggcctggagctgcggtcccggagcgggagaggtggtggagagggggctgctttcaccctcttgcggggaggccccctggcttcagacttaactacttctcgcaaagttggggccgaactttggggcttgacttgtcttggccgcctgtggagcgctg

SEQ ID NO: 232687 - DNA, 2943 bp, Homo sapiens
  chr7:5458489-5461432
  hyper
taatgggattagcacgggcttggctctgggcgttggcctggggtccgaggtctccttgcggctactcgaagtgggggagggggacagccagaaccagcaccggcccccacctttccctcccgggtgagcacggggttcaagggggcggcagctgtcctcctgctgtttcctccccgacctcagcctcggcgtgcagaagtcaggcagctcccagcgagcgcagaaggtgcgcagaggcagggctccgaggctacctcccgctgggcttccgaggctggtggcttggccttccctccacctcagcctcaccatccagcaaatgggcattaggccgtctgactgctgcgtcagattaggcgcggccctggcactgtgcatgcatgcatgagtagtagcttgttttcaccgcttcgcattagggcactttgccttgccaggccggagccagatcgcaggcggggagtgcgcgacgccccttcccagcctcgaaaaagccaagcgcaggcccagccagccagagagacccgggtaccgattcccaggcttggggggggcccccctgccaccactccgggctggaccaaatgacccaaaagacacacgcatgcacacacacacacatcacggtggacttgtggggagcgcaaaaggggacagctcagatggtctctgtaccccagggccgccccccaagttcttcctcgggggtcccccgcgcccctccctcgccacaacacgccactagagaacaaacccttgccccggtcacagaccccgggcggaatacgcccccagctccggagggacacaagcaggtccgggggccaagacctggttcttgcgccccggctggcggggatctccgagctcccggcccccgggcgcgcgcccctcccccgcccggcgcctcacaaaggccctttgtcccgccgagcccccgggactccagttcctgaaaagttccaggagaaaaatcaaagagagagcaaaatcggcgagctccgccgagcgggcggggcaaggccgaggtggcagctcctgagagaccccaaggaagaggggagcatcgagggctactctggaaattgcaaaaatccgaaactgcaattcgaacaggaggtggatttttttttttttttaagtcgagacttgggacgccaagcacaaaagccagggacagcccgggaaggagggaccaggtgtcctggggcggccgccgggcaggtctggaggtccccgagtctccttcccacccctctggctgcagcggccgcggactgactggagggagagtctcccgccccggcgcagcgcccgcccgggtaccgtccccaccgcgcctgggcagcccgtctcgggaaatggtggaggccgcgggaccttctcggccacctcctccagcagctcgatgtgagacccagggttttcccctccgccgcctgggccctgcccgacccgctctcttctttccccctaggttcgggaccgcgatggtccggtttcggtgtccctgccgcacctccgcaccctctttcgcgctggaaaacaaggggtccccgagggccggggtcgccgccctcctaccggggtgcaggttcccagggccgccgttctcccggggaagaaaggggcatcccgcccgccccgaggccagggtcccaaggctggggtcaccgtactcccgcatcccccggcgtactcccgcatcccccggcgctcggtaactgccagggacccggctcggcgcgagtggtggagctgggaacagaacccaggagggcccacgagcgccaaaagtagcgtttgccaagaaaaagattcgagctcggggagcgggtgtctcgcggggtgcgggggccggtttgttcttttctcgcccagattttgaaaactccagcccaggctcgtgccgccggggccccggggattggaatcgcccccggtggctcgggctaccacaccggctttcggctcacgagggccaagcacgctacggaaaaggtagccgagccgcgcgacactctccaccgccttggctccgggaccaggagtttcccagccctgggagccgagtctgcccgcacccccgtggccgaccgaaggagagtcgccgagccccggccgcgagtgcacaggaggacccggccgagtggatctccctgggaagacaggaggggacgggcacggcgcggggcacttacccgggtgcggatggagattcaggccggccatgtacttcccgggcggcagcgggccgggcaagcccgaggcgggcaagcgtccggcagtggccgcgcccacgcggtggctgtccatggccaggccggacagcagcggcggcgggggaccgtgcacggaccgctggggcccgaagtctcggccatccatcctccgcgggagtgccgcgatcagccccccacccggcccgcaggcctagctcagtgggacctaaaagttcggcctcggcgtagtcccagagtcctcgggcggcgggggctccgcggcgtgcatggcggcggccagcggggcttgcgctcggcggcgggcccgcggcccggggcgcacaggcggccggcggtggggcccctccgggcggccaggcggagctgcgcgaggcggcgcacacggcgtcttggcggggaggagacaggccgcggaagaaatagaaagggggaaagaaaaaagggaaaaaaaaataaagtaacaagtttcagaaagtcgcctcgcccttcaggatcggggggtgccgactgagtggccagaaatgaaatcgggagtagcccctttccactgaaaaatgaaatccaaactccttccgccggcggcttcaggctcccgggacctggctcggaaaagtgaccggcggcggtggcgcgctgcgccccagcccggactctgcctcggcggctgccgggtcctcccgaaaccggggagggctcctcg

SEQ ID NO: 232688 - DNA, 65 bp, Homo sapiens
  chr7:5462090-5462155
  hyper
atttgtcctttgccgattctcgtgaggatgggagggggtcttggagcccacccttccctcgatct

SEQ ID NO: 232689 - DNA, 93 bp, Homo sapiens
  chr7:5463270-5463363
  hyper
gcgccaactcctccgccctcccgcggcccggctcccgcagcccccggaaaagccagctttcctcccgccgagctccccgctttttaataaaat

SEQ ID NO: 232690 - DNA, 3441 bp, Homo sapiens
  chr7:5464580-5468021
  hyper
tgggggcctctctcgccttccatccgccgcgccccctccagggagggcgagaccgggaaaaaaataaaatctgttgagctcagaggaagtagccgccaagcccaaaaagtgcttggctggccacggcggccgtagggggaagggagccccaatcccccagactttgtacttttattttgcgctttcagcaaaatcctttctgggttgagtagccgtgagctgcccgcggccgacctacctgaccgggggcgcagggagtgcggaccacgccagcaggactgtcctgggggcccccgcaccctctctctgcagccccccgagcccggctaggcattacgtaccctggaaaggaagcttggaggggcagaaatccttccaatgctgcctcgaagagcaactgcagtgataagattttaattaaaacaagagaagcccgctctttcgccccgcgctgcggactcagcgttttcgcattgcccgttctgttttttttaaatcaatttttaaggcaactttttgggaggggggaaaaatgagcgagttagtgcccattcgttctattttcttttctccacttttagaaaaaagtggggggaggcttcgagaacgaacgggggggtgtctaatttaattccaggataaatttgaggaaaaaagttcagcctcttgagggcagtttcaagttgcccttcctggagcttcctgcgttagtttctaggctgccctcttttggaagctgtagctccgctggggaggagggaggagtgagaaggaaagaaaggaacaaaaatagccggagccgaggggaacaagccacggtgtccgcgtttggagctgggcgtgcgggtctcagtggcggcctcggcattcggggcggcgggaggcgcccggtgcatccccgggacggccaggagcaaagacggagaggagaggggggttagagaaaggaggtattgtgtctgtgtgccttaggggaggaggggactgcaggaatcgaataaacgcagtcgagctgcgcggggctgctggaagcccaggcgggggaagggggccgtgtgtgggggcgcagagcgcccttgagccttacgcagaggtcttgtgtgttcctagttaagccctcccacgcccgaggccccatcgcttcctctccaccctctttacccaccaatattccaagcccagatcctaattccccaccgcattaccccgccctggatttggggaatgtttttctttattttaatatagctcaaggaaaaaatacgtatatcttgagagatttggggtggggaaaacaaaagccttgcggagtagaaaaaacaaaggcttatttttataaatgtttaatgttttcaccccctggatgctccgagacgccgtaattgtgacggcggggtacgtgtgccataaatcatttagttgctaataaaaattctgcctgtttgccctggatttgccaatggcgtttgcatttttcaagtgtgcgcctcggcggtgtgacgaacccagccggtatttcattagggccgcggttcggggcagaggaggtcccctccccgcctgggctttgtgcgcccagcccccttgcaccggcccttccatacctgcccccggcacccactccatatttgcgcggccctgcagccaccggagtccggccggggagcagggcctggggacgcggtggtggtggtggctcccagttcctggccaccaggcggggcggccaggacgcatcctgcccacgcggttttccagggctgccgcgtgcttgggggcgcgggcgggccacgcggagaggccacctgcccgggccaatctgtacgctccgtgatcttcgcccgctccccggccccgcgccctggtgtccctgcagtcgctgagtaaacagcgactgggagccatcttggggcggaggaccgatcccaagcgaagtagtagtggctgcagcccgggtgcccccattcgtaaaggggagcctctaggacatccctaactaggcttcagggtccagggaaacgccctccccagtatggcgggccacattgaaatgtaaaaaccaggcctgggcgctgtggccatagggcacaggccataggccaccaggtccagccgccatcttccgcgccccacccccattccatcccctccccctccccaccccctcatacttttgtttacccagcgggataggtggccaaaaactgtggacgcaattgagtgaaagtgcgtgtgtgtgtgtgtgtgtgtgtgtgtgcgcgcgcgcgcgcgcgtgtctgtgtgtgtgtgtgtttgactgggtagaaaatcggctgggggctgggggggtcttccttgtagccctaagccgcagctgcgggagaagctgccctggctagccgaggcccggcccagcgtgcttctccgcggccagcctgggccaccggagccgaggccttccctgtgttcctaggccgctggctccggcctccgctccctggacgcctcccgactgacaaaattctccgtctttgttttaaaaccaaaggacaggccaaccttgagcccggccgtcacccctgtcgcgcttttgttggcgcaggctcggccccctacaccgggctggtgcagctcccgcgatcagacggtctctctcaattcggcgttgaacccggttcttcccaaattctggtattgctggccgcttggacacgttctccccttatccctcccccagcggggaaagaaaaagccaggatcctttccttggcgcggccacccgagccactccacccgtcgcgccaaccgcctttccaggtggggaccaaagcccccactctccgctggcatctcattgaagggcacccccccgagggattgccagcttctgctgccagctgagaggccgtgtggctgggcgtcttaagcgccggtttccgcaggtcccgtgtctggcgggcgcggctaaaacccggagaggctgtgcccgggaaagccacgttcgccgtcccctcgctgcgacaggcccagccgcgatacagcgccaagtctaggtcgggccaacccagccaggagctgcccggacctgcctgaaagaccagggacgcggcgccagcgccccacaccccaccgagaccagggcgcaaggcgggcagaattcggactgatgcgccaggcccagccccgatggattccagctcctctcggccccgcctccggccctggcctcttcctccagccggggtcgggtcctccactccactgtttggctgggaaaggaccgagacgcgctcagtgcacagggggccggctgcggccataaatctccgggcgggccctccttcccgctgctcacgccggggtgctccgggccggtctcgtgtcccgggccacgccgcgcaccctgctcaccccatcacggcctggggacccggagactgcgcagggaaccacgccaggagc

SEQ ID NO: 232691 - DNA, 139 bp, Homo sapiens
  chr7:5526319-5526458
  hyper
gccgatacccagtcgtgtgtgaaggtgagtctgtcagagacaggagggtgatggccatcaaaaaaggcagcgcggtcaccagcaacaggtcaccggcgacaggtcagcagccacgacaccggccggccctgcaggctga

SEQ ID NO: 232692 - DNA, 40 bp, Homo sapiens
  chr7:5595231-5595271
  hyper
aagccagctcctcatagacgcacacgaacccttctgcaag

SEQ ID NO: 232693 - DNA, 120 bp, Homo sapiens
  chr7:5595699-5595819
  hyper
ataaatgcagctgcgccctcccgccccaccccactggggagcgtgagtcagctcggtccaggcgaggctgggaagccgagccttggctctcatgtggctccacccgcctggctctggggc

SEQ ID NO: 232694 - DNA, 141 bp, Homo sapiens
  chr7:5602625-5602766
  hyper
ctctcggaacctccgtccctgcaaccgattttagggtggggatggggtgggggctgagtctgccctcaaaacggggctcaaggctcttggcttggagcaggcagggttggccctgtccgggcccccggagtgactcagccc

SEQ ID NO: 232695 - DNA, 291 bp, Homo sapiens
  chr7:5603111-5603402
  hyper
tcagggcaagaaccgctctctggcccctgcacctgggagaggtggggtgctggaccgagggcgaagtaacagcgtcctgagggcccatccccaaatcgccttccttagggaagccggaacaaacgatgcagcggggcggccctggatctgttccttcctaagagctggagcaggtacagccccatcctagaccccagcaacccgcgcgccctccctcgcaccatctcccctacctggttggttgggttgtggggttccaggcgaccgccaggtggcgcaaccgacgcgcct

SEQ ID NO: 232696 - DNA, 73 bp, Homo sapiens
  chr7:5635669-5635742
  hyper
gggtacttgggggccgaggttggggctcctctggcctcagatcttggggtccttatctcgtttctatgtcagc

SEQ ID NO: 232697 - DNA, 148 bp, Homo sapiens
  chr7:6098848-6098996
  hyper
ccttcactgggggcggggctgtagcagactccgccctttatcagacaagaagagttgggcgtgtccggccccggcgtacccccggcgcatgcgctctggtgggctcgtctaccggcggctgggtttcaggggcgcccaggtgaaccct

SEQ ID NO: 232698 - DNA, 61 bp, Homo sapiens
  chr7:6144353-6144414
  hyper
cgctctggtgacgcgcgacgtctgccttcgcccacggctcttgggcgacgacccctcccac

SEQ ID NO: 232699 - DNA, 123 bp, Homo sapiens
  chr7:6388587-6388710
  hyper
ccgcgcagcctgacgtcacaaagccagccacgcgcctgcgcggcccacaggccccgcccctggacacgcccttgccacctttctttttggcaggtaagacgcgcatgcgcgggagaggaggcg

SEQ ID NO: 232700 - DNA, 35 bp, Homo sapiens
  chr7:6414182-6414217
  hyper
tttgggtggtggccgctgccgggcatcggcttcca

SEQ ID NO: 232701 - DNA, 60 bp, Homo sapiens; identical to SEQ ID NO: 200810
  chr7:6523872-6523932
  hyper

SEQ ID NO: 232702 - DNA, 469 bp, Homo sapiens
  chr7:6543022-6543491
  hyper
gcggcccccgaaggcgcgcgggaccccagcagccctggccacagcgacagcccctgtggagccggccgaggcctcggggcggggttgtggtcgcggcacctgcaggacgaactggtccggctcgctgaggcggccgggcgcctcgcggaaggcctggtagcgctgctcctcgtcggcgtcgggcgcgaagagcagcagctgcgcgagatgtgcgggctccaggcgccggggctccatgctcatcagcacctggcgcagctccgcggggctcagcttcaggtgtgccaagaggatggctgcgggcggggcggggcggtgagctgggcggggccggagcggggccggatgggacccaagacggagagggcagggcagaggcggggagagggcggacacggggcggggcctaggggagaggacggggccttgaggctggaaggacaagaaacgcggacggggacaagaggct

SEQ ID NO: 232703 - DNA, 418 bp, Homo sapiens
  chr7:6566084-6566502
  hyper
ccgggtctcggtcccgagcccacccgcagggaggcgcccgctgccagtgcctgtgagccccgcgtacctgcgcgcgcccccggggccggcgaggccgcccaccagcaaggaggccctgcgcgggggcggctcatcggggcggcgcggcggggcgctggcgcgcgtggacaccaggaggcgctccggccgctcctcgctgcggctccggcgcagtcgctgcgcgccctgggcccggcgtgcgcggcacagcttgcccaggaggccctgagacaccacctcgtcgaagcgcgcccggtgcttcttggggatgaagatcctgccggcgaggacggcggagtcggggcgcgttcccggaccccggatctctgcaaaccgcggcccgaaggcgcgtcctcgcgggcgccgccctaggctctcc

SEQ ID NO: 232704 - DNA, 32 bp, Homo sapiens
  chr7:6655103-6655135
  hyper
ctgcggctgcctagagcggcggcggcgacggc

SEQ ID NO: 232705 - DNA, 90 bp, Homo sapiens
  chr7:6677419-6677509
  hyper
gctgggccgcggccgcccccaggacacacccatccaggaggggctgtcatcgtctaggtctctgcaggaggaggcggctccggacgcccc

SEQ ID NO: 232706 - DNA, 402 bp, Homo sapiens
  chr7:6703627-6704029
  hyper
cggggctgaccgtgcgcttcgcctgcggggtcgtgctggggcggcgggtgagcctggggggctgcagagcgggcgcggggcgcgtccgaacagtcgcagccccgagcccctgggaccgccttccccgcggaggcttgggctcagcgcctggggcggaggtggggcgggggcggtccgcccgcagcagggggtgccggggccgcctccgggtttcctccgctggatgcggcggtggtgcgctgtcggcccggcgggtgcggcgggtgtggggtcacgggtgtcgcgcgccgccctgggccctcctccgaggtgcctcgcgtggggcccgtgccagggcccgctgagtcggggccgctcgtgggccgcctggctgccgcctggggcctccggccgctgcgtccc

SEQ ID NO: 232707 - DNA, 68 bp, Homo sapiens
  chr7:7222007-7222075
  hyper
aaaatctactgctcgtgcaagatccgacttcccagaccccttcgcattagggcggagcgtgcacccgg

SEQ ID NO: 232708 - DNA, 257 bp, Homo sapiens
  chr7:7606359-7606616
  hyper
cagcctaggaacccggggatccggcctgtggacccacgggcagggcctgcggggtgcaccggcgctttcgggcggaaggcggggcctcccggccagtgaccccgccccgaggcgcctcccgggcggggaagggcggggctcgcgctgggaaactccccttccaaggccgaggcgccgctgcgcgtcctccaggcgtggtggtggggtcgtgggtcccagcccagtggtccaggtcacgggccgcacggccgcggccg

SEQ ID NO: 232709 - DNA, 246 bp, Homo sapiens
  chr7:8008152-8008398
  hyper
actttcctagtctcgcacttacctcaaggctgtcaacttttacgctcctccctgcgcgcacagcccccacctcacgctgccacccctcacgccccgccttcaaagtaggaggcaccattgtcattggacactgcttctctcactcctattccagaaccaatcactcgagttctagtggggagcgcctaagccaatggaaatgctcgctgcggcagctgccgggtcctgggcgctgggaggcggtgc

SEQ ID NO: 232710 - DNA, 618 bp, Homo sapiens; identical to SEQ ID NO: 200812
  chr7:8009322-8009940
  hyper

SEQ ID NO: 232711 - DNA, 156 bp, Homo sapiens
  chr7:8301294-8301450
  hyper
caagtcaaccctggacgcaagtccctgcccaccagggagctcggggtcctggggccggagccgccgggaaggcgaggcgcgcggtgggtgggtggggtgggctggcatgggtgccggtgctcccagcgctggggccggagcgcggaacgcttccct

SEQ ID NO: 232712 - DNA, 538 bp, Homo sapiens
  chr7:8301668-8302206
  hyper
ctgcttcctgcagcccgcccggcgcgcccccgccccgaccccggagggcaggtacctcggagccccggcccccaggagcctcccggccgcggtcggagcgtccctccggatcactcatccgacgtcagcgtcagccgaaggcgagggaaaggggcggggggagcgcaggaaccggcccttcctgcggcggccgccaccagccggaatagcaaccggcggagcccgtgcgcaccgcagcgcagcgcagcggccggggggtgcgggcgccctcgccgcccggctacctaccgccgcctgggcgccgccgctgcctcccttccccgcttctaccctccagcagacgcccgccggagcgacccctcccagggtgaccgggggaaggtgggtggcgttgacctcaccttgcttggggagggtcggggactcggggagtgagtttctctctctctactccccggggtctctcctcgacccccatctcctggggtatcccccgctcggatccgccgcccagagtgaccccgcccctgctctccgg

SEQ ID NO: 232713 - DNA, 2434 bp, Homo sapiens
  chr7:8473065-8475499
  hyper
aagacagagacagccagagtcggagcacagaggccgagtctgggagacgctggttgagtgggaggtgtcagtagcgagggaggtggtgacggctcgaagcatcccccgtcctcctcctcccccttcacgctcagcccagccggcggcgaggagtccagaggccaaggtcgcccagtcctctcggctgtctcgagctgaatggctggcagtctgcggctcccccgcctccggcccggcagccacaggtcggaggcgcccggcgtcggcgctcgaggccggcaggggcgccctgcaccctcccgcgcccttccccgccctacgcgactcccggctgctcttcccgccactcccctgggctttgcgatcttccctacgccccccgggaagggggcgctgcggccaccgaagacaccgcgggagccacttgtccctgtgggcccagcccgcgagagcctgagagccggatctgtttacacagggtactaattagtctttgaggaatcattcacccacgtgccaaagtaattgtccgtgtcaggaaggtaggcgtgccaagccgcggctctgcggagaaaccacgaccaccgcggccgccggaaacccaaagcgctccagagcgtccccgggtggccgggcagcaccagggacagcgcccgggactccactggggaccggctcctgggcttcccagcgtcgcgggtagaggtacagctgctccgtgtgccgcaggctccagattctcgccaccccacccctccctcagaaactcggactgctctcgtctgccgtgtggttctcttttcttccgaaaggccagtgtcttatctctccacttcaagtccagaggacttgctcagtctcctccccttaagtcatttccaccatcctcaggcagctgtgggaagccgagagtcctggactgttcgtccgggtgccagcgctggcagtcccagtccgtccggtgcagcagcccggcgcattcccctctctccctccctcttgctctccctccctttctgtcttcctctctttcctcctctactgctccctccctctcttgcctcttaagtttcctgcaccgtgaatccaactgtgccaagccttggctcccgcgaaccaatcctgagcgcgacccgggcactgggacggcgactccgccaaagctggacgaggcagccggacccgtctgcgctcgagcatggagacggagcgcctgggagggcacgtccggggcgctggagacgccaggcccgagtagcttctccatggagcctgcccagagcggtcccttctcgcaggattcgccccaagtcctgtgcggtacgtaccctttgcctccgctgttcccggagggtacacctgggagcggggtggtgggcacgaggaagggacggcagggaggggcgctggttaggaaagagaacaagcctggcaggtgaccctcacagctcggaggaggcttcttctctagaagttagcgaccggctgtaccctttggctcgaaaaaagtagtgctagagatgtgactgtgagcattcgtgggtatctctgtgtgcgccaggggttcgaatgggtaaactgatccctgctttcctgtatgcaaattgcattctctttccccacccccacttcaccgaacgtgttgaggtacctagcacctaatcgcggtcagttctacctacctcttcctctcaccgcgcccccctcgctcaatctctctctctccctttatctttcccctctatctctctctgctggtgtgtacgtgtgtgagcactgccagggctggcgaagaaccagccgccgcctttagtccgagccgccgggccacccaacacaagggcaggtctcgctgccggagaagcctgggctccgaaccagcctgcacgcggctcagtgtgctccgccgcctgggaactcgcacccgaggagcgcagggggcaaggagcccctcaccctccctctcgtccgcccgcccgcctccccagctgcggaccgcgcgcttgctggtctcaggcgctggatttactcgcttttcaatttttcgtaccctccctcccttttttttttggtcccccactccccgctacgaccccctttccccgcttgattgtcaagcctaaccttgcccgcgtagtcatgggatgtctaattttatttgcatctaggctgctgagagcgctccttgctctgtaaagtggatgtcaggtggatctatgtttctgaaggaacaaagactcaaagaaggcaccgccaaggaagtttgagacgcgggagaatgcaggctgcgtgctggtacgtgcttttcctcctgcagcccaccgtctacttggtaagtcttggaaggttcggggctttcgcatttttaccccggccgggaggcaaggaaactggggacacgcgggagaagggttacgccgccagttcagtgaga

SEQ ID NO: 232714 - DNA, 701 bp, Homo sapiens
  chr7:8476378-8477079
  hyper
ctaggggtgaggtgcgctaaagcagcccgaactctctgatgggctacacctctgattggaggtgatactggcgctcctcaatcccaagagccttagatagaacccataagcctgaaagaattgccatccctacaattgacagcgtttctcggccgttgccctggtgcatgtggctgcaaagctgcgagttgtgtgaattctgtgtatgtgagtgacacgtatatatatgtgtgtgtgaatgtgtatttaaccgatttcagcttcaatccaagaaccctcaatgttgcctgtctttgcccctttatcgcctgaccgtagcagccgcggacgccagagggcgctgcgcatcagcgtcctcgcccacaggacaccttggggtaaacaggtgaaagccagggcagccaatccaaaagaacagcctttctgactctgtcaccgaagtctgtgcctttacccgctggaacgcaggcggaatgcaaaaagtgtccttcccatttcccatcttcaatcattttcacccccacctgtgttcagtaagcccactgacattgagagaccatggatggagggcagaaagtttggccagaagaaatatagaatttttttattgagagatggggggagggaatgcaaagtgaaagcgacgggggcgggggggaggtaattttaaggattcccttgaccatcgtaacccgcttgcc

SEQ ID NO: 232715 - DNA, 348 bp, Homo sapiens
  chr7:8479986-8480334
  hyper
gagaagctgactttagtattcggagagaaccaggattgctccaactttctcagcggtattttttcggaaagccattaaattcgtggctcctctgtgcgaagttgatttctatttggctttgaattgttgacggctatttcttccttaatgaaagtgttgtctgggtgaaaaatatatcaggtggctgggaaattggttgatttttttttgagataggtgcccagtgtcctatttttctatctgaggaaagattttctgcagactacagaaattgacagcattgtccgggtaataaccgtcgtcgacaatattttcgaaagggcatttgagtgccgaaagcatttggat

SEQ ID NO: 232716 - DNA, 2327 bp, Homo sapiens
  chr7:8480572-8482899
  hyper
aacactcttcttgcgctcctgtaaagcaagtgatggaagctctgaaagtttgcctgctctcaagtgggaagttaggaagtgtgcgttctttctgatttttttaaaaataaaaagtgtctagctttgattcgattcaggaaagctcctcttgggcaaccattgtccgttaggggcttcagatctcattttaagaccttaacagtcctcgccgttctaattaaggaaaggcaggcgagcctgccagccgagagcggttgggtcagcggcttcatggtgcagccgagtctcaaagcgggtctgcactctcgcctccctctgcattctcttagccactatttgcctggtcccgtcgcgtgtgtgcaggaagtttcagtcttgatttatccactagtcaagttcccgaccagctctttttctggatgtcagcactaaccccctcccggagcttggtaaacacagcgcgcgcatttttctgcctcagattggcatgttgacgactctgcttgaaggaatgtgacaataaagtgggaaaccaaagcttggcaagcacttaatcaaggataaaaaggttccgttgtaaggatgtcactcaatttattgtgaaagtcgaatgaattacgtttaatgaaagtgctccccagatgaatattaccagcaatttcctgagttggctctgtcagctcgagatgaggaaatgccaacccagatcagaaaagagcgcccgtctcaattactatgcaagctttccaagagcggctttttattgagataatatattttggcggcttcttcaaacccctccgcgcgcccaagagcgcgtttgcgcattttccaagtttgccctgccctcgcgggttggtggctgttgtttaaacttctgatgagcgcgctgcgtttctgctacgggatgaaaacctaattacctcctctgcaaagagctttccctagtatattttattgattgcggaggtgggagccggcagggggtctgtgggggtgggcggggaggggattctcttgctccggtgccctctgttgccgaaagttccttaggcgtctagtcaggggttcggggtggtggaaagcgagatggcgttgggagccagggcgttgggacggcacaagcagtggggtcccaggagcagcaagacagtagctcctctcgggccacggcttacgaaaagctttcctagctccttcttcctataaattaatgagggtattttactcgttcaagccggaaatacgatggggagggggagacacaggccgcatccagagcgcatcgcctcatctgcatgagaatggagaaccgggaggcttttcttgtactgtttctttctcccacaataagacaaattgctgcttagaaaaactgagtgtttccttagaaactggcttgcgggagctctgcgcgtccccgctgaacctgcctctggccgcgcctcgccatcacccccgccgccctaatggattctgaagcgaaggatcctagctgccgcggctaagggcgcagggggaggccgcgcgtcctcgccacaccggaaggagagggcatccggctcacacatcccaccctatgtcttagaccccgtcctcacacattgactttaaaaggccattttccttcgtcttctacaagaagcaagaaacttttttcgacgtaggcttcataccctcccttcggaaactcagtccgctgaccaaagccgcagtgttcaggccccggggtttcccagccgtagtggccgccgccacagctgcgcgctttattgtctgctttcagtcgcaggtgacctcgagcgatctcgacaggtttatggaaacacagatgcagccctctcgcgtccggagcccaagtccccatgcaaaagcgctgtttctgggtaattttcgtcgacgccaccaagcttcggtgcttttgggacagcgggctggatagcggcagttctcgggagaataggccgcgggctataagatttgatcgcgggcaggcgggcgtggggcacgccagggccgggagagcgactcttcagcaccacggccagcgccacaggctccgccccgcctggtgccagcagtagggcctgcctcccccgctgccgctccggctgggtccttaaagtcgagttagcactctcggtttccgcagatacctcctcaaggcccgctcgcgactgtgacgacccgcctaccccttccagctattcggggggcagctagctcccgtctctaggtccccagcatgacctgcggtcagaaactcttgcttgcacccctctccattaccacactcagtggttgcggcgtcacgtgatcaccacgga

SEQ ID NO: 232717 - DNA, 436 bp, Homo sapiens
  chr7:8483148-8483584
  hyper
tggagccacccaggcgccttccaggctaaggcgcctttagcggcgcgcaggggtgagggagagggtggggagagtcctaattattatgaatttctaaaggcgcagtaattattcacggggagcaggacaaaccatggctaggcagggaaatcgatatatttgctatcgaaagttcctggctcgcctttaatgcagacgaatgggggatgcagcctcattattttccgtggttaggctcgccagcgtggggcctgatgcagcgtgaaatctatcatcattagacccgggatggagcggcgggggggagtttctctttacttaccaaaccgcaacaacaaacaaacaacgacgaacaaccgccccctacaaacactcattctcacacaacgttgccctacctccctcgccgcttgccctggccgctgttgcacactcc

SEQ ID NO: 232718 - DNA, 162 bp, Homo sapiens
  chr7:8483824-8483986
  hyper
gtattaaaggagcagagatctggcatgtagtgctccattaacccgtagcataagttagctcggacataaggcaagccctcgagaagggaacgaatcagaaggtgaaaagagcggtcggaaggtgaggaagagaaggtttaggcgcaacgcctcggaggtatt

SEQ ID NO: 232719 - DNA, 138 bp, Homo sapiens
  chr7:10979885-10980023
  hyper
cccctcatatgttcgtcctgacctggtcggaccatcatcattccacttcatagtgaaatgccttcattgccgtgccatgcatatttctgaggggaatttttttggtcgaaacgaggactcttcgattgaccagacagg

SEQ ID NO: 232720 - DNA, 69 bp, Homo sapiens
  chr7:10980264-10980333
  hyper
aggtcagcggctgcggtttgagaagactgcagctgcttcctgtgttacgctgtcgcagacaagcagaag

SEQ ID NO: 232721 - DNA, 107 bp, Homo sapiens
  chr7:11870585-11870692
  hyper
tttttaatgcagagagaaagcgaacccgcagaaaaggggttggtaattcctcactccgtattgttttcctgcctgtcacggcccccgccagaaactccaagcatttt

SEQ ID NO: 232722 - DNA, 810 bp, Homo sapiens
  chr7:11871119-11871929
  hyper
atcatggaagtgcgcgttgccctcattacagagctgcgagagaaatattccagctactcactgttgcctcttagttgttatgcttttctttcctaattgcatcggacatgacctatttgcttcctaagaaatcatactttttaccttaggataccagcataaccaagccatccaaaagcaccggggtccctacagaagcccaccagctccttaatgtggccccagatgtgaagatggggaaagggtaactccgtcccacttaccagtcttccacagatagagggtgggcgcctccgcctcgccctgcgccgcagccctgccggcgcccgggcgtagcagcagcagcaggagcagcggcagcggcagcggcagcggcagcagctgcaggacgccccggcgcggccccgcagcgccccggctcccggacgcccagcgcctggcttgcagccccatgccgcctgcagccactccagggtccagagccgtagcacgctcggcagggaatttttctccgctcttggaacgtcttttcaaagagtacagaaagcaaagctctttcctgctattgttcgcttcagatgagaaggagggagagcgcgtctaacaccagggaacaatagcgtccgcggtggtggccgtggccgctgccgccgccgccgccgcctctggcggggatgctgctgccgctgccattcctcgcagaatggcaggtcccggcggctccggaggcaactgtcctcagggggccccagctgactgagcaggtctgctaggtctgggaggcagcgcagcccccgccagctggagggg

SEQ ID NO: 232723 - DNA, 513 bp, Homo sapiens
  chr7:12151165-12151678
  hyper
gcccagggatctgggcagagcgtgggagggcctgtggggcctggggttctctctgcgcacgaaatccggggcgggcactatgtgattcgagcccgctgcgccctgggctcctcgtgtcgcccgcggggaaaggaggagggagactgctcacatggcccacttcgcggcctgagatggagtgcgcgcagggcgtcagggcagagggaggcggggattcaggataaagagcggcctgatgcccagagccgggtgcccggacctcctgcctcctgcttctgatccctgcaagccgcccaccctgcgatcgccgggtcccgccctgacaatgccctgccgccagttccagccccagtgcagccgtcgccggtcctgtgcgcctctggtggcgcgtgcgccctgtccttccctgcccaagagggagaaccctcagtgccccagcctcagctctgcgcacagcggtcccctgcatgtccgcactcctgttctgtactgcacgctcgccagagcacagag

SEQ ID NO: 232724 - DNA, 233 bp, Homo sapiens
  chr7:12250503-12250736
  hyper
agcggcgtgtgtacggaccagtttattccattcctaaggaccagactgtcagcgacaactcgcattgcgtgagcgaggaggctgctcagctgaaagctgaggcagatggtgcacatttataccctttgcaaaaggaaatggtctgatatgggaaataggaggagcgactgttcctaggtaattcgtggctacagtggacactttgaagtctgggggacgcgaaggtaatgaaa

SEQ ID NO: 232725 - DNA, 910 bp, Homo sapiens
  chr7:12442874-12443784
  hyper
ttggaggtggaattcgtgcagtatggaattcaactctgttctgagaattcaggtccacttgcggctagcataccttgcagatccggcgaaagtttcttacagtaaattacaatgacctcaaagagcaggataacagcaggaaacaaccaaaaacagaaccaagggtcgtagagtaagaggaggcaacaaccgcatgtgcgcaaaagaaaagtgtagagttttcaagctggaaattgaccttttcaaagacagcagagggacagagaggaggcgggtgaggaacaaacatcgcttgctgccttaaaacgcacagggacgctccccaagtcgtccaaaaagtctagcctagtccctctaccgcccacgcggcgccactgcgcgcccacccccgcgcgccctacctcgcttaccttccccccaggccaggaacatcagcgcgatcaccagcacgcaggctccgccaggcatcgctgcttccgcaggtggggcgaaaggcgtcgcagagcccgggccgcgggtgccaggaggatggggccacagcagcccctcgggcctcctttcttggattttctcagtctgttgctgcttggaacagggaagctccgcgtcctcgttctggggtgcacccagtcctttcgtgggatagagccttcgcgtaatccgtctgcgactcctcccttcccattttggctgctggctgacctgaaagccacgcccaacctgtccccatagcccagcgtgtaccggcagtggctccgccgccttggatgtcaccgtgcagtcgcacagccaggagtcaagctacagggatgtagctctccgcccgctgcgtcttgctgttctaacagaggctgtatgaaaacttggtaatcctagaaactgctcagatggacctcgcataaaagaagcc

SEQ ID NO: 232726 - DNA, 784 bp, Homo sapiens
  chr7:12610063-12610847
  hyper
ccgttaatgttcttcgtctattgctagagaaaatgtctttccttggaggaggcattggcacgagttactataaactccctctgaatctcaagacttctgggacgccgattccgctcctggcctggggcaaggcgtgggagcttggaagccagcgctgcgctccccgtgggaagcgatcgtctcctctgtcaactcgcgcctgggcacttagcccctcccgtttcagggcgccgcctccccggatggcaaacactataaagtggcggcgaataaggttcctcctgctgctctcggtttagtccaagatcagcgatatcacgcgtcccccggagcatcgcgtgcaggagccatggcgcgggagctataccacgaagagttcgcccgggcgggcaagcaggcggggctgcaggtctggaggattgagaagctggagctggtgcccgtgccccagagcgctcacggcgacttctacgtcggggatgcctacctggtgctgcacacggccaagacgagccgaggcttcacctaccacctgcacttctggctcggtaagggacggcgggcggcgggaccccgacgcaccaaggccggcgaggggagggcgtaggggtctgagatttgcaggcgtgggagtaaaggggaccgcaaactgagctagccactcgcgcccccacggggctgcctttggggccggccactttctccctaccgaagtcaactcgccggctgcaaacgcggggctcaggcgttgtccgcaattgacttacctcgcaggctttgacct

SEQ ID NO: 232727 - DNA, 1160 bp, Homo sapiens; identical to SEQ ID NO: 200824
  chr7:12726287-12727447
  hyper

SEQ ID NO: 232728 - DNA, 2522 bp, Homo sapiens
  chr7:14028676-14031198
  hyper
tgctgctgctcttcgcaaatctcagctcagtattttatattttgagcatttagctggagatttcctcaggatctggacttctatcaacctagaggggaacaagatggcttttaggcttaaaaaaaaatcatgaatgaagctcttgaatttgcatagctaattaccctccgacagtcccattcacaaaaataaccctccctacaccgcctccttcacctggatccaaagagagccaacagagttcacaatttacatattttcggtagtagcaaaaatccgaacaagaggcgatgtatttatttacactctcgatgtttccctgcgcggtcggtgtaccccgggcagctctgattcgcaaacgtgtgcaaaactagcaatggcgatcaacgagacttgctttgcacctaacgggactaaagagacggagacacctctttcatcaggatagtttttgcgacccacaaccatgcaattatctggagagacataaaaagttgttggaaagacccacctgaaggccacgctaggcgaaaggctgcaaaaacttccctccaaatttaataaaaacattaattatagcccagcacttcccccttggaagccgaaagcgcctctgacagagctcaattcggtggtttttcctctacttctcctccaggggcctccaatccaaactgatggatcgctgcctcccattggctccgcgtctctttcacaagatcagatttcgggctgtcaatcaggcggcttgctgccccttcccgcgggtctccctcgcccctctgccctagggggtgctcggccggtaggcgctgggtcctcagcctggaagcgccacggagagactcgatttcctctgtaacccgctgcttattgttaaggcgcctggggatactgaaaccgtgtgtttcgagtcgccagttcccattattggggtgttaggtccactattgggctggtttccttaaagtactgttgtgcggttctggtatacccttagagccgcgatccacaaagcccgtaccgccttattcagctgccctcccctcaggatctccaacctctctactcttgccctgactaggagctcacctcgctctctatcctcattcccactcagcttttggcccaatttattttcccgtttttcaaaacccaccatcaccattatggtttatcgaaacattttttaaacagtcatcctcaactaaaattagatcctatcgttcgtgggacagaaacataaagaatctataaggaaggcacctaggagatgcagaattgctgattagcagaggttgtgatgggaggacaacagagcaagctaggtgaaaaagtataagtcaaaatggtccctacgtgtgcactgggaaaaggtacttccagtccactgtggctgtggggaggaggagggagtgcttggggttgctcgtatatcctagaacccgcacgtttcctgagcttttgttatgtatacacggaggcggagggtgtcacttactgtacttgacgctttcacttcctctccagcttttaaacagccagagcccagggttgggggcgagcggtgagatggctcgggtttcaaggacaataactaggacgttaagcagtgagggctgcatctctgaagccacttgccctgatcctcctatgggactcagaacagtaaagcgtcactttaaggagccagtgtccaacagcggacgggaggccgcggggataggaccagggactcaatgctgttgaaattcatttgtgaccagaactagtgaccaaaagacgtttccggcagctgttccgcccgttaggaaacgtgctgcagttctcaatttctatttgaaagtttccttccttaaatagaacgttatggagacacattaaaatggagtgtaagagcgcacagcactcaaccccggacctgggcaggagaaagatctacttaaaaaagaagcaaacaaacaaacaatcaacacttattactgggaaaacaaccaataactatggacagcaaagacagaccccgcgcattcccggaaactactaaatcggagttcacaacgcgcgcacctataagcattttgagcgggaactgcattttaaccccggccaaggagagattccaggaagcgcctgggccccgaggctgaacagtgaagctcatgggtactatctgagggtgcaaccaagcagggggtcaataacaagggtcctccaccaccctgcactcctggaataacccagcgcctgtaatctgagcaacagtttccaaagaccttctctgcagcccgagcctgacgggtatccagggtaaccgcgagggggcggagcttcgggttaggtcccggcgaggttcttcccgcagccaataacgagccgtaaatccccagcccattgttgtttattgctgacccctcagcgctccgctaggagattggccgctttagggaagggggcggagtcccgcccgccccaacagccacctttcgtctccattcacaaaattccggcccttcttggtc

SEQ ID NO: 232729 - DNA, 696 bp, Homo sapiens
  chr7:15725485-15726181
  hyper
tcgagggtgcctggcgcgcccttacctgagctgtcgcttttcctcttgccgccgcttcgcttctccgcctccgcaggtgacagtgcctggcggccgtagtcccccggcgcgcacgcggccccagtcggggtgctggagcccaagctggaagagttggagcacaggacgggcgggctgctccccaactctgggggccctccagagtcgggctggaggcagaggctgtgccgagccgcactcggtggggaagacatctgcgggaggtgccagttggtttgcagagcctggtgctgctgctgctgatggtggtgatggtggtggtggtggtggtggtggtggtgccccctgtgatgctggctggcaaacatgccctcttcgttggggtatcccgcgattatgcaagatgaggaagaagtagagagctcggggtaagacatatggtcagatcttccatggagggcgagagaggattgggagaacgggtgcaagccttgcgccgtggcgtgagggctgcgcaggcagccaaagagcgggtgttccatagcatgcaagtttcgggttccaggcagaagacttcacggcggttccaaaggccaccaccctctgtcactttttcactggaaaccgtgtgattttttttttaacctcccaaagcaatagcggtgcacttctgcagagctcggataatcccggtcc

SEQ ID NO: 232730 - DNA, 771 bp, Homo sapiens
  chr7:15726407-15727178
  hyper
tcccgctcagcctgcgccacgcgctcccagttccacttcctatctcctgctggacggacgtagagcgtccacgcccgcccagcactgccggctgccaggactacaagcggcacgccaacgtctaagtcccgcccgggagggcagcagctctgccctccagactctggaggcctgggcgcggcgcacaccacccccaacctagcaccctgattcctacctactcactttcctctcggggaaacgtgacttgtcagtgtcatttgggaactgtcacctgcagaaaagctagggatacgcctatcctttcaggaacacgaaagaagtaatagggttaaaggaaaagaccagagctagtttggcgcaccctcgaagtttttcaaactttgcatcttcccgtgccccgggcgccgcagcgcgcctaggttttcgcagctggtttctgtcggtgggttgttaataggctgggacgccagatctgaggttgcggggatgagcaccatggcctggaaaaggcggttctcagtgcagaaagaagacggacctggttgggtgggtgggaggaaggcgtgagtctgaaagggttgcagatgcctgctccctggcatcctcacgtgcgatgccaggtggaggctcccttccccctctttcccggtcccgctcaatttcctagccacttgtccaccaagaagaacttttcctgggtcaagaatatttccaagcgattgtgtcccggtcatatgagatgtgtagattgcacgcgcatttctagcc

SEQ ID NO: 232731 - DNA, 58 bp, Homo sapiens
  chr7:15727422-15727480
  hyper
tgctacttgcttggcgggcgacagggtccgctgggggcagagtcgtttacacacaagt

SEQ ID NO: 232732 - DNA, 858 bp, Homo sapiens
  chr7:16460420-16461278
  hyper
taatcggcgccacacgacgggccttccccacaacctcatctgcttggggacgtaaagggctctgtgggggagctgcagctttcgtgcccatctgttaaaggccagaacttcccatctctgaaatgcgggagggaacagagctcaagcttgaataactgagcgcggcccggcagtcccccaagtgaaggtgctagcgctagagcagcggcagggcggggagcgggaggccgggccccagggaaccgcggggcgcgcccggcgccgcattacctctccagggcctgtagggtgtagctgatgagcggcctctccaggatggggcagaattgcttcggggtggggacccccatcctctccccgcaccccccggcaggcaacacagctgccacggcttgcgggtggcgcccgggctcggtcccggccacgctctgcagggaggcggaagccgtgtggtccgcgccgcgctgaccactcaggcaaggacccggctccgccggcctggcgctgcccggcggcccggcctccatggctgcgggcggaacggcgagccccgctagcctcgggccgatgcgaccccgcgctgctcccaccctcggccggggtcgcggggcgaagggcagaccacggagagggacgcagagcgcgcaagcagaaggcgcccccctcagccgtcggagccccgctgttgctgccccgcaggggacgatcccgacagctacggcagcagctgaggctgccgatctgccctcgcggctcggctgcggcctccgcacccggtcccagcgcctgcgggagggctgacttgcccgctctgcgcttcccccgggcaggcccagctgtcgccgcaagtggaaatgt

SEQ ID NO: 232733 - DNA, 499 bp, Homo sapiens
  chr7:16685459-16685958
  hyper
gagccgcaggaggcggtagcgagagatcgccattggagcaacctgggaggacaaaaccaaatgcagaaagctggaggggggaattaaattcctcctacacgttccgctcccctatcctgtccggttcaaatatttcgccacatgtaatattgaaaattctacagctggcagttatgtgctcagcgacggctttctggggcatgcagaggccccaggttgtcgccgtacccccaccattcccccgggagtggcgcagtctgggcgggggcggtctaggagacgggggcggtacgggaggcggggctgcgccgggttccgtgtgtctatgtcaatgtgtctgtccttcactcctccattgtctgccgccactgctgctgctgctgctgctgccgctgctgctgcacgaatcgccgcagcccccagccttgcgcgtcgtcgctacctcctcggacaggtgagaagcagcccaggtgaggcaaggggcgccgtgagggttgcg

SEQ ID NO: 232734 - DNA, 533 bp, Homo sapiens
  chr7:17339332-17339865
  hyper
gttaggttagaggacggtcttaattctcattcttcgtagagtttggtaaggcgagatgttttaaagagctaaacacatgctgacttttacgaaggggctgagtgcctctaaaggtactttttggtccccaccaactggctttgtgttgcgctcatatttacttatttggcagcaattttgtagcgctcatcgtgaccatatcggtaaagtggatagaagtggtagcaggtgggagtggatgcaacggacaggatacggtggaggatttgtattcttcagacatctttttcggaagcttgcttatcacttttggggtggctttagggtctgtaaaataaaagatttagaactgcatttgagagaggttttcattcttaacatctacctctaattcttttccccttcaaagttttcttctagttgagtgagtacaaacttgcttttgtcgttgtcggttgattttggtggaatatttgtgtgagatggccaattttttgtgtgtgtcagaaaaaactatccgtgctcaaaacatt

SEQ ID NO: 232735 - DNA, 150 bp, Homo sapiens
  chr7:18126726-18126876
  hyper
cattctcttctcctcctcgaaagatggctgtttggagaagggggagaagttaagaggtcgccagcgcggagcgaaggagggcgcgatagcctcagcaggagcgggcggaggtgagtggcaccacggcagagtccccggctggtgcttgag

SEQ ID NO: 232736 - DNA, 678 bp, Homo sapiens
  chr7:19145880-19146558
  hyper
ttgagaaacgcgtccgcggcagctactgagggtctgccccacctttagcttcaggttgacaactgccttcagcgcgttctcagctcagctggccctatgggtcccctaaaatcgcccgagcgtccgccctgtctgacctgcccccctgccgcggcgcacatttcagcttttcagcttcacggtggagctcgcagtaattgagtcgcgagggttatttttcctggcctcacctcgcggtcctgagcctgcagggagctttcggaaagacatcgccccctccccctgagtccccggcagcttctgaacgctgcgcgggtctccgccccgcgggaaccaggattgcgatccgttcctcggcggctagaggttgaggccggaggctgacaccaccagggacccaacggagggtttattctgcccagcttcacatctgggggtcaaatcgcattaaagccaaaccaccaacggggcagggagcaggtggttaactgcacaaaataaagttacagaaaaaacctcgttttgcaggcgagtgacttagtttccctctgtagctttgccgtcataaaaagcaagtccctcccctctcctgagctggaaggcggggaaaggttatcagcggctccagatggacgcccgtaggcagggtcagtttaggaagaccggcaggcaggcgta

SEQ ID NO: 232737 - DNA, 1077 bp, Homo sapiens
  chr7:19146829-19147906
  hyper
aaggggtaaggggcacttttcgctgtaaatttcctatacaaatctcaaaatttttcttagcattgtcaactaccttcttggagacaggctacagcgcttctaaacccaatacgcttttctggagtcctcggaacagctggccggggcttttagcacacgggacgggaccttcgcctttgcctgtttttttttcgaccaggagaagcaggtgcgagagtctggggcttaggaggtggaaggcggggaaagagaatccactaggtcctcgtgtagagaacaacagtcgctccttagatattactccaggacggaaacctgattgcaaaccgctgttccttcgaaacttgcaaaacccggaacagaaaactcccgcccagccaattttagctctcgctgaactctcccgcctgcgttacgtttgcacagcaactctttgtaaatgtccgagtcctctcggaggaaagatcgttagggcgacgagaacattaagaggggacctggagggcagatatcctcgatcccaagagagcaactttgtcgcctcagaaaacacgccaacttccctcctgctctttccttggtcaactcagaatcaaccgattgtattgaaatctcctgaaatcccgaacagggattggcccagtcggcttctgaaaccgaggccggggaatggcaggaatggggggcagagaggatcggaaagaagagtccttcccccacagacattcccagctgggacacgagctcgctcgcagcgcgtttatggaaagagggggcgctgggaaccgcgctggcggcgagcagactccagggtcgagattattcgacacgtgtcttttattcctcacaatccatttcttacgggtgatttatgaacgaatctctttgatcagggacggttttatctgtccactgctacagatgacagatgcggctgctaaaatgcctggtccccgctgcctaaaaggttgctcccccccttcccaaatgctgttgctttttctctggcggtccccaccccctgcttcttcgttctccttccctacccccaaccccgtttgctgtcttagttgcaat

SEQ ID NO: 232738 - DNA, 302 bp, Homo sapiens
  chr7:19152058-19152360
  hyper
tgtctccggaaattcgaggttgggcctttgcctgaatctgttgctattgctccccttgctaccgctgacacttggcaccgccgcctcctagcagcggccagacgcggggctgggggccttccacgcaaaccgaaggagatacggacatcgtcattctccccaccgcgcgagccgggcccgccacccacgcaggggagaccgtgcccgtgcccctctcccgcgcctgccgcaggtgagaccctcgctccccacggagttctgtttgggtttccgtggcgtttgttccccgcaggtttgtttat

SEQ ID NO: 232739 - DNA, 419 bp, Homo sapiens
  chr7:19155958-19156377
  hyper
ggagaacaaaaattgaaagccgaaagaaagggtggcgctgacaaaacggtccttacccgtgaccctgggtgtctctgtctcccctcctgtcacgcacactcacgcgcacacacacccctcaccagggcgcatccccctggagactgctctccctagcggggtcagaccggccttccggggacgctgggggcgcgaggcaacggtgccaagtgaggtgggaaggctgagcggagagtgggagaggggaggaaatcgaggtggactgggaaccgcggcctggccggcctgccgtctgccacctgagaggcgaaggggtgcagcggcgcggtccttacctaggtctccggccctgctgagggggtggggggctccgcctgctagtgggacgcggacatggaccaggccccctccatcctcca

SEQ ID NO: 232740 - DNA, 675 bp, Homo sapiens
  chr7:19157457-19158132
  hyper
cgacctggcccgggcggccggcccctccacccgcctcctagccgccctcccccttccctccccgtcgccttcctccggcgggcgcggggcgatttccttccccgccggagcgtgcgggcagcgcccccgaaccctagcgcagcccaggaagcggtcggaggagactgtcctggccgcggtggcagccccatccggagtggctgtgacagcagcaatggcaacagcttctacacagtgggtgatgtctcatctcgcccaagagccctctaggtccgtggggccgatttgggattgctggggctgggggggtggtgtggcgcggggtgggggggcatgccaagaaaagtgtcaaccgcggagcccacccaatggtcaggtagacgaaccccttggagttccaaaggccaaaccgcggcggcccagcccggaggtcctgggcgtttctgaagacgtggccgcgccgcgggggctgaggatttgcgtcccggcctgctctctcgcccttctgggccctcctttcccctctacaacgacccagtctgacgctccccaacatccaaaggactacgcctcggaaggtgctcgaaagaggcagaagttcactcttcggtggaaggaaacccagtccatgggaaaggcagcagagccagaggggggcagcgcagcgcctttgct

SEQ ID NO: 232741 - DNA, 139 bp, Homo sapiens
  chr7:19158649-19158788
  hyper
cgagttttgtgcaccgcgctggagtaccctgcacataaggtccgctcatgggcttctcagtacggactcgccggcgggaacaattaattgagcaaagcgcccctttctgggctggagcaaggttcgcggctgcagatat

SEQ ID NO: 232742 - DNA, 1387 bp, Homo sapiens
  chr7:19183519-19184906
  hyper
gcggtggctggtggcgaagctgcagggcgcccaaggccccctgcggcccaggagtgacccgagtgcactcgccccttactctggcctggggcctgaagaaggcactggaacacggaagctgatgctgcactttagatgcaaagcgtagatttgcactctggctaaggcactgaatgaacaccactgtggccctgggacaaggagctgtggtccgtctgggatcaactaggtggcgaaggggagggagaaaggaagagagagggcttgcgcgcgggagagaggaagggacgggagggagagggaatggaagacaggaagggtgtcccttctcagaggtcgcactttgtcagcagttcctctcgactgctctgccttccatttttcctttcctcagttcctggacaagcctcggaggaccaggcagaaccctctggctagcagaaaagctcgcacccccgcacccttgcggcgtctgcttcagaccctccacgcaggcgcccgctggagcgcctgctggggatggcgtaccaccgacccttcaggctttttaaaaacgtaagaatttctactttattatctctatgaaaaaaaaaatgtaaagaagagaggttagattttatagaagctccaaagtctgccatttgcgaggagggttcacttcccacccacccagcccacggaagctcttaggagcagcctgaacggccccgactcagcctcacgctctctgacttccccgctcgcccctgaccccgacttcacttagggcggtcgcgtagatatgaactctacagcagccactctgctcagcgcatgtggggatcttacaatctcgaccccgacctccagaagaccagacgttctgtcttggggcctccctcccggccctttagcctcacccagtgcccggtcctgacacaccccagcactaccagacgaggaagggcagactctccacaccaggctcagccgctttccttcttctcacagctctccaagagctcggtcatgaaggagatatagacgatggccaggcggagggtctcgatccgggacagccttttctcgtaagcaaacgtgggcaccttcctccgcagctggtcaaaggcctcgttgaggttgaacatccgcttcctttcgcggatgttggcggcctggcgctgggcgtaggtgatcacccttttcctcttggggcggcctaatagggagacacctcttccgcgctcctcttcctcctcctcttctccgtccccctggtccacttcgcactcctcttcttctgggtccccctcttcaaaccgcgccatcctcctgggtcttccctctcggagcgcaagggctgggtcccccaaggagaccccgggtgcgaagtcgcagaggagagggc

SEQ ID NO: 232743 - DNA, 304 bp, Homo sapiens
  chr7:20369105-20369409
  hyper
aatcctgtgcaccccgttgtgcggtccacacctgaaagggggagtttcgatgttgtggtttattaaccaggtactttccattcactcagtcaacagaaagaaagagagagaccgcgcctcctactttttttttttttttttttttaactacaaataaggagacggaaactattaaataagaaggggggaaactcccgcatatttcaccttgacctggctggactggtctgctgcctctaagaggcgggtgttgtattaaaatgagaggtcaaactcctcgaatgggaatcgctcctgcccctag

SEQ ID NO: 232744 - DNA, 272 bp, Homo sapiens; identical to SEQ ID NO: 200841
  chr7:20370484-20370756
  hyper

SEQ ID NO: 232745 - DNA, 318 bp, Homo sapiens
  chr7:20816219-20816537
  hyper
ggcacaatagggtgagagaacgcggcattccagcgcttcccagctttccggaccccggagagagggggtgggggtgtgggctcacatcgccggctggcttgagggaggagagtggtggcggctccggaggtggacgtgtcaattatatcctggagctccgggaagccagattgcttctaccggcggctgcaggggcttgcaagcgaagataggcggccctccttccttccccactgtgggggattggggtcagtggagcccgtggatttagccacgaggggacatgactggagccctgtcacgcgcaggtgtgcgtct

SEQ ID NO: 232746 - DNA, 70 bp, Homo sapiens
  chr7:20817281-20817351
  hyper
ccacctatggaggacgctgcactttgacgtcgctggggagaggaggcgggtgcgagtgaacacaaagcag

SEQ ID NO: 232747 - DNA, 454 bp, Homo sapiens
  chr7:20817831-20818285
  hyper
ggccgcggtgcctttgtgtgcggtgggcgcggcgatgggctgctccggcccgcagcccgaggggagcggcgggcccgggccggggccagggctcgcggggagaccccagaccaccacctcactcttcgctgctacgtgcaagcggaccgtgcggatcgccagttcggaaccctccccgggagggccccggggtctttctcaatgtactgggcacttcgaggagctgggaagaggaaagcggagggtagcgtttagaaagggagggaaatcctcccaggctcaaaacctctcgcagaattcattcgaaaagagaacgaagggaactttgggcaggccggacctcggctcagcgccctgcgagagaagcagaggtcgctgccagcgtttcctcccgcgcagcaagaaattggtgcctgagaagcaaagttgaggaatgggctttttaaaagcggca

SEQ ID NO: 232748 - DNA, 417 bp, Homo sapiens
  chr7:20823256-20823673
  hyper
actctacaaactctgggtctcgggctgccaaaagtcacccccaccaagccccgacagcctgagtaggacgtccggcgatgcccaggggcctggcagggtgctccgaagccgaggtgctcagtacagcggctctggaaccaagcagccgtctgcccgggcggcgctgttctgcccaggcctccagcctctccctctccaccgctccgctcaggcttgtcagccgagccgctcctgcccgcgcgaggcccgctgtctaccaggcactggattagtccagctctacctccagtggccgttccctctaaaagttacgcccttcacaacctggggggtggaggaggggaggacaaggaagagagaacgagaaataaaggcccgacgaggcgcgggttccggctgcaacgggttcaggcagcg

SEQ ID NO: 232749 - DNA, 2172 bp, Homo sapiens
  chr7:20823877-20826049
  hyper
gtcggggagaggggcgggcgcagggtgggcgtcactctaggccgttgcggtgcccgggctcggggggctgcagcagctctggggagtggcagggcgggctgcccgcggcgctgtgctcgctgtcggtgtcgctgcccttcttgccgccgctgcccgagcccgccgagccgccgccgccgccgccgccactgtgcgtcttcacgtgcttgctgaggtggtcgctgcgcatgaagcgcttgttgcaaactggacaggcgaagcgcttctcgccggtgtgggtccgcaggtgccgctgcagctcgtcggagcgcgtgaagcgcttgccgcagaaaagccagttgcacacgaagggccgctcgcccgtgtgccagcgcaggtgcgccttgaggtgcgaagtcttgccgtacaccttgccgcagcccgggatgtggcagctgtgcaggcccttgcgccgcaagctcgccccggcagggcccagccgctctgcctcctggcagttggggcagtcgcaggtggcgcggccggagtagcggcgagctgaggagcgcggggagccccccagcggcgccgaaggcccagcgctcaacatggagccccccgcgccggccagcggcgacggggccgagtccgggtaggagccgggtagcactggcttgaagccgtccatgaggtgctgcccggcggggctgagcaggtgcgaggaggcgccgctgctgaaggccgagtgactcaggcccgagtaatccgagttgtagcctccgagcggcgagtgcagcgaggtttggagccccccggcggcagggtgcagcgagccgggcagcgcagccgcgctgttcgggttctgcacgtcgatccagccggcccccacgtcccaccagctggaggcgccggccgagcccacctcgcccgcagcacccaggcccgggtgcgagggcttaaaccacgactcgtacgggtgcgccatgcccacccgcgggtagatgccctgcagcccgtccacagaggtgtgcaccttggagatgaacaccggctggtgggagccgtcctgcgagtgcgcggaggagccgccgccgccgcccccgccgccgccgccgctgcccccggaaactccgggggcctggaaaacagagtagtcgttggcgaagggcgagctggaggcggcggctgcggcggcggcggcggcggctgcggcgctgctggaggtgagggagaaggcgctggagccaggcgagccgccgcagctgaacgagtcggacaccagggccgcggcagccgcggctgctgccgcggccgccgcagccgccgaggacgagccgccgttcctggaggccccggacacgccgaagcttgagagactggaacccactacgttgcagctggcggaagaagaggacgaggagcgtttccaggggtggaagcctttgccgaaggaagaagagctgtccgagagggaggagggagacgggctggggctgcctatcttattacaggtagcggcaagcatggccagaggagtcgatcccaacctcggttcttcctgcgaggaggagaggagaaggagtgggggaggggaggtgggcaaagggccggtgggggaggaaaggaagaaatgtgcatcagtccttcggtagcctccaaagcgccccactgcaccccatctctcgctgcggcgcgccgccaccaactcacctggcacccccaacagccccggcgcccggccgcttcctactctacaggaggggacaagtttggctgccggcgtctgattcgggagcaagcaccacgctaaagaagagtttgacaagtattctcacctaaaacaacactctcttgcacacaaagccccagacacttcgtaacaaacaagcaaaaagtccagattggagaggaaggaagttttctttgccgagaagcctgggggaaaaccattggattgcttttaagagcgcttccctgtaatccggagagctttgaaaaacctgttcgggtccccagaaacccatcctgggttgtttctcccaggccaaaagaaatcaaactgtagggctcactctttcttcctgcttttctttctttctttttttaaaagcatatctacagtagtaaaaacgagacgagttcaacgtacctgcgagacaaggcgggctgcagaatttttttttaagggttagg

SEQ ID NO: 232750 - DNA, 308 bp, Homo sapiens
  chr7:20826229-20826537
  hyper
ctccccctttttcttttctccaaactcacttgtatttaaagaaaaaaaaaaaaagctctcaatagagagactgatagcccgtggcctggccggggcgactttaaccccctccaatcggcaataaaaggaaactaattaaaccagcaagagaaaatcctgagactcacccctagaagtgaagttgccatcacacaaaagtgccctcctcctctcagaggatcttttttatattgataaatcagaggcagtgttttttttagaggtgtgcaatacaatgatcagttccgcccattccaccacaattgtag

SEQ ID NO: 232751 - DNA, 153 bp, Homo sapiens
  chr7:20826717-20826870
  hyper
tcgcgtgtatgagtgtgtgtgtaacaatgtaactgtgtgcgagtgtgaccaggcgtaggagaggacagtgcggagactggagggaggggggatgggggtgtgacaccgtaacagtgacagtgtggtaaaggcggggagtggagagagtgcaga

SEQ ID NO: 232752 - DNA, 243 bp, Homo sapiens
  chr7:20827407-20827650
  hyper
aagggttatttttagggatgcgttgggacgtggatgcgcgcctgcgcgcccatgagttgtttctttgatgccgtggctttttttttttttttttttttttttttccctgaggtggaattctgctttagaagtgcacgtctcactctaggggaggaggtgtgtgtgtcccgtggtgttgagtaaatttcaatacaaaaggattagatagagaagagagtaagcgagggtcgttttttctttggg

SEQ ID NO: 232753 - DNA, 108 bp, Homo sapiens
  chr7:20828444-20828552
  hyper
tttctttctctgagggctgacgcttaccataaatgtcgtgtttctccctgcaagccgctctgaatgattttagcgtgttgagaaggcgtgacaggccagcccagaagg

SEQ ID NO: 232754 - DNA, 615 bp, Homo sapiens
  chr7:20830547-20831162
  hyper
aaaatgcacacaaactgtagcgcgtacctctgcagggtacgtttaaacccggctcttagcatctcggtttctagagcgttggcagggacatgcagctctggaagctgaccggcgggtgcccgcgggagacagagcgaacgcagtgctggcactgcgtccctggcctgcgcctctcccagaatgggaagacgacccccaaccccttgactagtgtgcggggtcctcgcacgcggacgtgttggctactaaataaagcgtgaagagggatcgctgggtagctgagcgccgccggcggccgccgggagcagcgagctgagccaggttgggtgggggtgtttcctcgtcgagagctctctggtcaaagtttccttcccgctggaaaacaaaaacaaaaacaaaaaacaaaccaaaaccaaaacaaacaaaaaaaaaaaacctggctaggcgtggacctgtgaattcctgaggggtgccccttagcagtccatttctctttcgtgtggttttactaagaagttacctaacatttcctgggaagagaggtaatacaagcccctcgctggtggcagattgttgagccgtaggtgggaagagatcagtcggccagagcccaga

SEQ ID NO: 232755 - DNA, 606 bp, Homo sapiens
  chr7:20833039-20833645
  hyper
ggccataatggccacgttatttcggcccagtgaacacgaacaaaatcgcgtgctttagaatcattcgactctgagtccaggaaaagcagggggtgtggtggcagtgggggtggctagggaggggtgtatatgagtgggggagccgatttcatctcggatcgcaggaagagaacttgctcaaaagaatttttccccagcaaaagtggtataatttacagcgcaacttaataatccgaggggcaatgcaaaagccctttgcgttgtaaaccgcttctaattacctgccagagcaattagctgactatcacgaagaaattagatcgctcaatgtagcataaataatgcgaataattttgtaagaagaatggaaagcgagacctggtgtttctttataaggaaataacacctcgtactgtaagagccctccatgaacacatattaatgtctaggcatgcatggcaatgagtccgagcaggagccctctggctgcggttcagcactttttccgtttacgtatgcggggtgaaagtcggcttccaggcgttcgatctccagccttccagctcacagtaattaacacatagcgacttcaatgggaaaacctgt

SEQ ID NO: 232756 - DNA, 77 bp, Homo sapiens
  chr7:20834300-20834377
  hyper
ccgctttcctgtgccgcccaagggaaatgggtctctcttgagcccgtctttctctagtaaacgaggtgggtcatacg

SEQ ID NO: 232757 - DNA, 391 bp, Homo sapiens
  chr7:20836774-20837165
  hyper
tgaggaaggaaattacaagccgatgctgattgacttttgaaaggcctggcacgtcccagtctatataataactcagttggaggaagaacctcgaggaccgagtgtctccagatcacttaatgcatcggcatccaccacgctcggctcatgggcagggcccccgaggctgccaccaacccacggagccttgaggagctgcgcttccccgcgatggtccaacgaacttcggaagtgctcctgcttccggtttcacgtatacctgggatgcgttgccatacaggtttgtcccgttttaatgctttgacccatctaagatacgaggacaggagactggagaagtaaacgaaaggcaatggccgaggggtaaggcggggaacacagcaggaaaagg

SEQ ID NO: 232758 - DNA, 115 bp, Homo sapiens; identical to SEQ ID NO: 200853
  chr7:20838169-20838284
  hyper

SEQ ID NO: 232759 - DNA, 296 bp, Homo sapiens
  chr7:21293815-21294111
  hyper
cccagccctcagccccctaacgtagcagagttccttggcaaacgacagagtgccctctgttgatggaaaaagtaatgcgcagcggaggatacagagagaagctttcctactagaagtcgcagagctgcccgttagccgatacacatttgtgatgtaaaaatcacattttaaattataaaaatattgatttaatgaatattgagagagtacagatgattgcaaattcagacacaattgttggaattatgtatttagatagatacacacataaacacgctagttattcagtttctaca

SEQ ID NO: 232760 - DNA, 1151 bp, Homo sapiens
  chr7:21582475-21583626
  hyper
ctgggggctcagacccaccccggacacgcggcttctcggccgtgttcgggacctagagcccgagggcctctcccctcggccttggccttggcgtatactgggcggtggcgcggtgcgctcactccgcccccagcgggctggggcggggacaccgtcccccgggaaacgggacgcgctgcttgtcccaggccttcgcttcggcctgcgaggctacagctgtgcgcagtggcgcggctgctaagtagcagcaggtgggagactagggtctgcgctcgcggcgaccgcggaggagggtgggcgcctgcggaggtgtcctcgctcacttcggggggcccagagtctcgggtgaggagccagccggcctcgcgttccctcggacggttgcccaatggcagcccaggtggcagcccgggaggcgcgagacttcagagaagccccgacccttcgcctaacctcgggggccggcctggaggcagtgggcgctgtggagctcgaggaggaggaggagaacgaggaggaggcggcggccaggagagcgcggagtttcgcccaagacgcgcgggtgcgcttcctcggcggccgcctggcgatgatgctggggttcacggaggagaaatggagccagtatttggaaagcgaggacaaccggcaggttcttggggagtttctggaaagcaccagcccggcttgccttgtgtttagcttcgccgcctcggggcgccttgcggcttcccaggaggtaagaggcgacgggcaaggggacctgcccatccaacaaaactacccaggggagacagcccagtcgctcccctttggattcccgcggggcgctcactcgggcactttaacaaacttggcttgaagtccccatcctgaggcccgcaggactcctccccacgtgcacccactctgcagttcagcagctgcaggttagtttcctaagtcagcagtttgtatctgaccgagaatcccgcgttgagcctgttcgaccaggataacccaagaacaccagcgctttctttagctgcttgggtgttaggcgccaggtgggctttctgtgccaaaaaacttgcgtttcagttgctcttgggtcactctggagtcacatcctttaaaaaatggggtgtttggcagagcgcatgtaactcgtc

SEQ ID NO: 232761 - DNA, 216 bp, Homo sapiens
  chr7:21984772-21984988
  hyper
agttaggcccttaacgcgtaattggggtcgtgctgtgcatatgatttgggatcttgcagcttgtttaactcggcccaatgacgttaccatttcccccaaatggttactaattccttgaaaacgtttacaaaagttctagaataaacactaaagttattatttttaaactccattatccaagttggactggtctggcgatcgactgttaaaaaaaaa

SEQ ID NO: 232762 - DNA, 51 bp, Homo sapiens
  chr7:22143358-22143409
  hyper
acagcctcaaagcccagtgtcgggcagtttggatctgagtcaagcagtaat

SEQ ID NO: 232763 - DNA, 732 bp, Homo sapiens
  chr7:22589357-22590089
  hyper
gaggaaaatatgtacggctgtagcccgtccatttctcatcctgggatagcgaggggtttccggaggaggcgtcagcggtgggaagtgggagaaagcgagcaaaaggggcgggggcgaaggagcggactcgcctgctgccgcgggggcgggaatccgcaagccagcctgggagaagggacagaacagcggctgatccttccctgggctagggaaggaaaataaactgtgctggcctcggagtgggggatggagaggggcgatggcgctgcatctgcaggacgttgcaagggctaggagcgggcaagactagtgtcggcaggaaggtagtggtggtgatggcgggggtgtgtggcaaacagagcccgagcgaaagcctgagaaggttctggttgccccccagcctactttagtccctaaccctccagcggggcgaggagggagcgcatcggagaggtacctgtgcgatgggcagcggtgcttggcacctgagcgtaggtacgatactcagcaaggcacctgggtgggacataggagaaggaaatctccaccccaaccccccaaaacaccgcccagaagtgggcggtgaggcccagtgccgcagccccagggaaatggcagtgacacaggtggcagccaccttcagagcgccaggcccccgccagcacatctgcaggtagcagctttggccacaggaaggcgcatctgcactgccgggttcgcaaaagcggggcg

SEQ ID NO: 232764 - DNA, 33 bp, Homo sapiens
  chr7:22894667-22894700
  hyper
ttattacagcacagggcccgcttccaacgttta

SEQ ID NO: 232765 - DNA, 458 bp, Homo sapiens
  chr7:23287317-23287775
  hyper
agagccgcagaggcctgagacgtgggccgcgccccggcccaggagaccccgcggccgcgccctaaccctcagtctcccgactgcgactgcgacccgggaaaacgcctacgtttttggaaaggaagtcccatcacagggagctgacccggtgtcagcgcgcagcacgttcccggcccgcagtgcgccgcgcgtcctcctagcagcccgcggagcccggcactgtgatggtcccgcttcccacacgaggccacgggccacagagtgggcaaggaactcgccccaagccacacagcgggtaagttgaggaggcagccttccatcccgacctctgtccttcctgcccgggtttggggttggacaggctcgggctccccgccagcctaggggctgggtctccagtggctttgctccatttcctcatttccttcaaaacgaggagttttcgtttcctcatttgc

SEQ ID NO: 232766 - DNA, 1102 bp, Homo sapiens
  chr7:23507576-23508678
  hyper
ccagcgtttacgcacgcgttccaatacccctggcgagctcacagggcagaggcaaattcctctccactcggccgcgcccacggcctcccaaccccggacagagaaggaaaggagggacccccgcgtgtccgcagctgctttcgcctctcctgctcctggaggggtgggggaatcatccgctgcttcccaagccctgcaaaccccccaaactgcttgttgggacccatttcccgtaggagcaatttgacccgctcggaccgaggacattcagctgtgagctttcgagagattttgtaaccaataaccataatcccgcggcagaggccacagaaaagctttcaattcctgcccagcatcatcaacacacacacccccgccataaacttaaaagcaaggattaaagaccggaacaccacgccacacggcagggggtaagcaccagaggacaagaagttctcagctgagtctctccacccaataacggagtgagaacagaatcggggcaaacagaagcagcagctcacctttgcctttttgggaccgagtgctcaacttctatgggtttcccgtgcagttctattttacctgcggacacacaagaagtgagacggtcggccgagttcagcggctctccctgcccgaagacccgcacagcccaagcggcgacacaaatggcctcctgaggccctcgaagggcccccgaggcccggacgcggctccaggcggagggagaagccgaccccctcgagcggcgtgggcatttaactcgcagatggttggggagcagggtccgctggcgggcccactacttgggtatcagtccagtctccaagcctcccccacccacccctgggggccaccaacaccacgaggcccgcaagagggacgcggcccaccctctcaccgccctggacacgctccacagggcagactcggggcagggggctcccctggctttcttcaggagggggcgccctggccctgccctctgcttcagcccagacccgccgggaacactcagcggtgggcttgaggaagacagggagtggcgagaaagggtcggggacggcaggggagaccacgaacgggagaactggcagag

SEQ ID NO: 232767 - DNA, 96 bp, Homo sapiens
  chr7:23509758-23509854
  hyper
acgagaaaaaacgaaaaattaaaaccacccacggtgatggatggatccagctggttttgttcccctcgtcttctcgcctttaaaatacacaaacac

SEQ ID NO: 232768 - DNA, 621 bp, Homo sapiens
  chr7:23510068-23510689
  hyper
acccctttggcttcggccagcggactgtgaaaatatcacactacgtgaggcaggcgccgcctccccataaaaaacccagaagggtgactggcaggagggaggggagaggaggaggaggaggagggaggaaggcgcaggaggcggaaaaaatccgctccgagtgtccggctttttgaatgagccacgtgttcaaactacaaatcaacgtctcacgtgaggaatcccagagcctcaattagagtgggtttcggagaaaaaagcgagcgagaggaagagggggaggggaaacgagattgggagagggactctgagaagggggaggaggaagaaggaaaatgctaaaggaaccgcagccggcaccaagcggggcgctgacggtcacaactcgagtttgtaaagggttatctggtctgggcggatcctgggagggagggctggaatattgatttttttttttttaatgaggaaatgggcagaggtactaacaggcagttcctcagcgctagttaccgtagttttaatcattcgatttttcaaaataggttattaacaacaaaaccagagtcacaatcccgaactcgcctggtggctttaatggcattagaagtgtaaccccagcaa

SEQ ID NO: 232769 - DNA, 416 bp, Homo sapiens
  chr7:23514280-23514696
  hyper
aggtaacgctgaggaagggtggaaagcagttctgcgtccgtgggtggagcccgccccttggctgaccgcatggtgcccgcacggtcccttcccttcccccagcgtccagcgcccggaggttctggatttgcgccatgctcagcagctggagtcacatcttcgtttccctgcccatttccaacatcttagagttgatgcgtccttttttacttaaaacaactacaaccaaccatgttctcaggtaccagaacttttctgggcttctagagaaatcgactcgccctgcccgctcccttcctaaacccctttgtggtccacagggttgttttaagcaaaatcaaacaacccctccaaaaaaagcaaacgaaaaattccgggtaaaatcaactatgctgagaccacgttttcgttgaagc

SEQ ID NO: 232770 - DNA, 299 bp, Homo sapiens; identical to SEQ ID NO: 200868
  chr7:23570648-23570947
  hyper

SEQ ID NO: 232771 - DNA, 149 bp, Homo sapiens
  chr7:23636896-23637045
  hyper
gcggctggaagcacgtgccgccgcttcctcattctgggactacatcccccacaatgccgcgcgccgcgggcggctggcccccgagtgcgggaagggccggcagggaggcggagcggaagccgagtgcgagggacgagcggagtaaaatc

SEQ ID NO: 232772 - DNA, 159 bp, Homo sapiens
  chr7:23719538-23719697
  hyper
caagaagactcgccggtccagggaagggagaggggaataggtgcaaggtttgtggagggcggcaaactgcactccatgtggcgcgaggctgcgcttgcggagatccgggttctggtgcctggcgccggcagccagtaggggcgcgcgtcctgcgcagtt

SEQ ID NO: 232773 - DNA, 45 bp, Homo sapiens
  chr7:24323183-24323228
  hyper
cctgaaaccacgggcgggggtggggtggggagcgcagctttggga

SEQ ID NO: 232774 - DNA, 74 bp, Homo sapiens
  chr7:24323408-24323482
  hyper
gttggtagtcctgttggcaggagacaagaatcgtctgggctgctcctatctctggcaggactagacggggcgtg

SEQ ID NO: 232775 - DNA, 55 bp, Homo sapiens
  chr7:24323662-24323717
  hyper
ctcgtgcggctgcggttccagccccctccccccgccactcaggggcgggaagtgg

SEQ ID NO: 232776 - DNA, 218 bp, Homo sapiens
  chr7:24324317-24324535
  hyper
tgccacctccctggattcttgggctccaaatctctttggagcaattctggcccagggagcaattctctttccccttccccaccgcagtcgtcaccccgaggtgatctctgctgtcagcgttgatcccctgaagctaggcagaccagaagtaacagagaagaaacttttcttcccagacaagagtttgggcaagaagggagaaaagtgacccagcagga

SEQ ID NO: 232777 - DNA, 275 bp, Homo sapiens
  chr7:24324715-24324990
  hyper
gttctctctgcgggactgggacgagagcggattgggggtcgcgtgtggtagcaggaggaggagcgcggggggcagaggagggaggtgctgcgcgtgggtgctctgaatccccaagcccgtccgttgagccttctgtgcctgcagatgctaggtaacaagcgactggggctgtccggactgaccctcgccctgtccctgctcgtgtgcctgggtgcgctggccgaggcgtacccctccaagccggacaacccgggcgaggacgcaccagcggagga

SEQ ID NO: 232778 - DNA, 302 bp, Homo sapiens
  chr7:24612554-24612856
  hyper
agaaaggtcagggcggagcctgttttatgccccgaggagtatcttgcccacccgtaaatgctgacagacagctgcgacttcggcccaggagacccggcggggactgggtccgaccagccctctctcgcgggcgcaggtccgggacccctgaagcgagccggccgggcgcagagcgcagtcagtctgggcgctcagaagctgggagggggctccacctgggcgcccagccgcggcgggaggggcggggcccggctttccggaggcggtggcacctcctcgcgcccgagcgcgcgctccccgac

SEQ ID NO: 232779 - DNA, 891 bp, Homo sapiens
  chr7:24613106-24613997
  hyper
agatggggctgctcggcggcgcctgtggctgagggagagcagcggcggcggggagcgaccgggagcggcggcagcggcggcgcggaggcggctgaggtgcgagccggtgagttaactggacccccacgccgctcgggtaacggtcgcgccgcgcgccgggccggccgggggcgccctgttgctcggcgcggcgcgccacgcggggaccctggcccgccccgcccccctcggcacctgggcttcggcgggcgcggggaagagggaccggcaggcggcggcggcggcgccgcggtcggggaggctgctggccgcccccagcccggcccgcgcggaaggggcgctcggccgggctcctgcctctctggctgcgggcggctgggcgggccggagctcggcaacgtgtctggcccatgctgcttgccgccgctccccacgcgctccccggcgcggccccgactggggctagggccgcagacgcgcggggccccttcgggcgcggggcttgggtgcctacacctctgcggcgggagtcgcggtggagcctgaatggagagccggcctgggggcggcgttgctgtgactgacacctccggggtctgtcccgagagggggtgattccgccggctcccggttctctcccgagctcggagttggtaggggaggaggctttctccaactaccgccgctacttccgaggtacgagactccagttgtttggccaaagtggctgtgggccgagcacaggctgccgcgggggcgttcgctgctgagatcgtgctcgcggattctcggtacgtttgtctgaaaccaaataggtgctggggcttttttattttggctgggtggagggtcagcaggggagtcgattgaggtatccgaccgtgtggtgac

SEQ ID NO: 232780 - DNA, 659 bp, Homo sapiens
  chr7:25019060-25019719
  hyper
ttgtctcagtctctccggcgcgccccatcccgcggatgtggtaaagcttcgcgctcgccccaatttaccaggcttcctgagcctctagccccggcgtagcgcctccccgctgcccaggacagctccgcgcgccgcgtcctcccgcacctgcgccgcggcccctgcgctcggctcctcctggcggtcaatcctctgagccgtccctcgagggaaggtgtcctggggtgggtgagacccgggtcctccttccccgggagctgcagccggcacccaagctcccaggcttgggtctgccccagggccggagcctccccgggcgactcggacagaccccggtccggcagagaaccgcggcgccccgcaaacagcagcccttccgagcccgcgccgccgccaggccccccgacacccaggccccatttaggcgggcgccccgccactcacctgagcgctgtgcagccggagacgctccctagttccccggggccgggctccggggttagcgcacagaaccgggagaaggcaaccccggcttctccggtacccccgcaacgtgcagctgacagctcccgcaccggccgcaggagtcgggggcggggatggccacttgcagacagactgcggggccggagccgcgctgcgcaccggccgcgaagcgc

SEQ ID NO: 232781 - DNA, 181 bp, Homo sapiens
  chr7:25020079-25020260
  hyper
tcccggtggcccagctcggtgcctgcgcgcggtaggcgttcggtaaatgttcctctagtggcttttccgggccagggaaggaggaaaaagtgagggcagcgcgggaggggcaggtttacggagaaggctccaggggacccttgcggtcgcacaggctaggagaactcgacctcccgagaaa

SEQ ID NO: 232782 - DNA, 96 bp, Homo sapiens
  chr7:25165221-25165317
  hyper
cgcttggttggtgcgttgccctgctaaagtatcagttcttgggcgtggtgatgtaatgagctttgagcagggcgttttgccggtccaggaaaagac

SEQ ID NO: 232783 - DNA, 371 bp, Homo sapiens
  chr7:25219529-25219900
  hyper
aggccgagcctcacgggctgtcactgccctgcaagcggtgcctcgggggtctggacatacctgggacatgagcctgggggcgctgcgggaccgcgcctcccctcccctccccgcagctggcggccttcgcgggccgaggaattttgaggtcgtccgcacctacggcccggtggagctggcaggcaggggcgggggcgggagaaggacggcgggcaggccggggtggggtggggctgggggcgcttgtgacggtggccgtgaccgcggcattaggtgatgcgtccttgaggggctgggggcttccgggcggcgagcggggcgcagtaggaggctcttagagacctcggaggaaaccagcccagcgctacggg

SEQ ID NO: 232784 - DNA, 44 bp, Homo sapiens
  chr7:25892575-25892619
  hyper
ccccgcgccccagcgcagtcgtccccacgcgccgggatcgccaa

SEQ ID NO: 232785 - DNA, 379 bp, Homo sapiens; identical to SEQ ID NO: 200879
  chr7:25894658-25895037
  hyper

SEQ ID NO: 232786 - DNA, 261 bp, Homo sapiens
  chr7:25896368-25896629
  hyper
ttctagttctacttccttcccggttagccagctgctggagagccccctcagtaaattccttccagatcgacctcagtgtgggtgagagcgcagtctgtgaccaccagcgcttctgactcagcggaaaacgccggcaaacaggactacacctcaccgcggcggcaaaagcggcctcagctccagcactcacagccaccactttcaccgtcgccccgccaccaccaccttcgctgcctcaaccctgagagagacacacacaca

SEQ ID NO: 232787 - DNA, 680 bp, Homo sapiens
  chr7:25896689-25897369
  hyper
tctccctgctgtcaatcatacatgcgcgccatagcgcgcatgcgcactggtggactccagcccccaccgatcctacgccctgtctctgcgtctgggaccagacgcaccaataagagagcggattcgggggcgggccacaaggaagtagccaatgagagcgcggttggaagccagggctagagaggagtaaatccttctgtcgtccccgttctgccgcccccgcgatgatttatgcgtcctttttattatttgtaacactttgggaagttattaaaaggaagatctactgcttcctccttttgggttaaactggatggcaatgtttgtcactggcccttattagagaagagtgtggcgaggtggagggccgttggacgctgggtttgtttgtgtgggtcttgttttttattacaagacacattatccttttaattacaagctgtagacagggccaacttcgaaggtcttcgtggcggagtgatcttggatcattcagggggctgaaacccgatgccttctgactttcgcgtccgtactcttggcgttgggaggagcctctcaggaaggtgttgcaacctttggttgtaccagaaggaaataagcaaactcccatcacccccacccccattccccgccctaacacggagtaaacttcggcctttttccgcttggatgctcat

SEQ ID NO: 232788 - DNA, 153 bp, Homo sapiens
  chr7:25897850-25898003
  hyper
atcgcactttcaaacgtaaaacgcaattccaagaagactgggatgtagggagtatgcgatgcctctgttcaataggtcactgtcaggaacttcagtttctggtgttcagatatttgtatttgaaattaagaaaatcaacgcaggaggggttgc

SEQ ID NO: 232789 - DNA, 35 bp, Homo sapiens
  chr7:25898316-25898351
  hyper
gctgagtgggcgcacggatgcgcgagaatccgcgt

SEQ ID NO: 232790 - DNA, 448 bp, Homo sapiens
  chr7:25900061-25900509
  hyper
caacttgatccatgcgtttccactttggtttctgaaccgaaggaggagtgccggcaagggagcgcccgcagtcctgcggtacagggctggcgcagcctctgagtgcgtgtgtgaactctgccaggaagctgtgagagccagcccaggattcagtgaccctgtttcccaacccacaaggacaagtacatggttttctctcttatcaattccagccccgcgcaaccaagtgaaagcaaatgcactggaccgcttcggaattaaaatgaattgctaaaaccacggaccgctctgtccggggcccagacctgtctcaactcgtggtatttacattcctagagcccgtgcggaggaacacgtcgaggcacgggtggccgcagcacccggcctccaggcctagagtgaaaaattttttaagatctggttctctccccgccgcctctgtggaggg

SEQ ID NO: 232791 - DNA, 797 bp, Homo sapiens
  chr7:25901791-25902588
  hyper
aaacaccagccaatcagaagcgtttccggaagacactctacacctctccgcctcttcataaatatttaaaccgcttctttctagatttgtcatttaaatctactagggaatgtgcctcaagggctcatctttcactgggtcgctcacacagaggtggggcgagagggaggaggcgcattagccctgcgctctcatttgcttaaacggccttcttacgtcatcgtaagcctaagccaatccgtgaagtgcactttgacaagctacccgcccctaatttgtcctttcaccgccagcctaagccaatagtgtggctgcatgtaaatgagaaaccgcgagcatctccccccgcccccggctccgcccaatttcccacctcttcccggagcgcacagacgccagctgagtgggaggggcctagctgcgggcggagcacggaggaggaagggcacgaggaagaggcggagcgggccgaggcgcgcggagctgggtttgctgagtgcttccttcctcggccccacctcccgccgggcaggatgccgtttgatcattggctggtttaataaagagggcgtgtttattttgcataaatagtgggcgggcacccagggctgctttgtaactcgagaacccggtgtcccgcctgtctcccggggggtatgggcgggtctcccgccagcctcgccagactgagccaagggcctgaaggaaataaatggctttctgaaaaaattcgtcttaattcgcccttttgagagaattctgtttctaaatgcatttttttcgttggttcttacaag

SEQ ID NO: 232792 - DNA, 181 bp, Homo sapiens
  chr7:25935087-25935268
  hyper
gagggtgtagttcgcggcatttgtgattccggctgggtctccggtgcggaaatgaaactcgccccctgctggcccgccccggcgctttcagagggaaggggagccaggacgcccgcggggatggctgcccagctgcgagtcacacacgagcgtcgcccacgcccggcgcccccgcactgcc

SEQ ID NO: 232793 - DNA, 65 bp, Homo sapiens
  chr7:25989915-25989980
  hyper
accctcacctccctcggtagttatttaaacttttgccagcagctaactcactctaacttgtggca

SEQ ID NO: 232794 - DNA, 122 bp, Homo sapiens
  chr7:25990340-25990462
  hyper
cttctccccctcccggcacccccttttccctgcagcataagcgaccactctgtcccccatcctagcagaccccctccccccacataccgcacctgaacagctgttgcgcgcgtgcaacaggt

SEQ ID NO: 232795 - DNA, 59 bp, Homo sapiens
  chr7:25990762-25990821
  hyper
tccatcttgacttttgccgacgtggaaattttgggtttggagacgacctgcgctcttat

SEQ ID NO: 232796 - DNA, 464 bp, Homo sapiens
  chr7:26192424-26192888
  hyper
gtccctcgcaccagcgtggatgcatggctggtgcacagcgtggctgccgggagcgcggacgaggcccacgggctgctcggcgccgccgccgcctcgtccaccggaggagccggcgccagcgtggacggcggcagccaggctgtgcaggggggcggcggggacccccgagcggctcggagtggccccttggacgccggggaagaggagaaggcacccgcggaaccgacggctcaggtgccggacgctggcggatgtgcgagcgaggtaggtgcagagcgggaagcgagcgaagtgcggcgtctacgccgccgggagcccccgaggcttgtgtcggatctgagcaggggccactctcgctgtgtcctggcacccttagcccctggtctttgcaggttcgcagatgctgctgctctgattccgaatgaagggctactagtgctgtcgctgtggtttttaggtgttta

SEQ ID NO: 232797 - DNA, 252 bp, Homo sapiens
  chr7:26240889-26241141
  hyper
cacccctggcccgcgtctgtggaactgacccctggtgtacaggagagttcgctgctgaaagtggtcccaaaggggtactagtttttaagctcccaactccccctcccccagcgtctggaggattccacaccctcgcaccgcaggggcgaggaagtgggcggagtccggttttggcgccagccgctgaggctgccaagcagaaaagccaccgctgaggagactccggtcactgtcctcgccccgcctccccct

SEQ ID NO: 232798 - DNA, 162 bp, Homo sapiens
  chr7:26331325-26331487
  hyper
aggtggcgaattccgaagggtgccgctggagcacctccagcctcaacgtccggactaatgggggcatttcctccctaactcaatttcaggaagcaggaggctagctctgcagggtgggggcgcacctgggctgggctgcgcggaggcggcggaagcactagg

SEQ ID NO: 232799 - DNA, 792 bp, Homo sapiens
  chr7:26415726-26416518
  hyper
tttgccccccaccccactggcggtggcgctcccgcggctgcaccctcggccgcctgttggttgcggcgcctccgcggcccgcgcgcatcccccgcgctgcgtcccgcacacgcgcgctcccgccgcgtcccgcccgggccgctccgctggcggcggcgactgggctgcaggtagcgagccagccggcctcggtccggtaacccatggcaaccgccctggtaacccatggcaactgcgcggcggaaagaaaaaaaagaaccgtggtggggcggggggcggcgggcggtgaatgggaacaacgaccgcaaagagacagcgatttaccgcgcgggcctgcggctcccggccgcacctgctgcagacggcccgcgaggccccttcccgcgctacggtgacgattctggctgctggggaaaagagcaataagcagaaagccctcgtgcagaggggatccgggcggtgcacttggtgtgggaggctgccttaaacgccgatgaccctcccggcctccgcgtgtcccggcttccagggccccgccaggctggagagcgcgcgtggagagggccttgccgcctgggggttggttgaggggcggccgcgccggggccggggctggactccaggctttgttctgcagacgctcgcgcccggccggaggaggggctacaccgtgctgccccggccccatggggcccggcccccgagggtccccgcgagcggacgcggtggggccgggcaaactctacgtgccctaaattttgtcatctgcacacgcatcgcacacattagtta

SEQ ID NO: 232800 - DNA, 55 bp, Homo sapiens
  chr7:26904456-26904511
  hyper
tcacctgatccagcgtccggagcgccttacagccattttcggtactggtgccatc

SEQ ID NO: 232801 - DNA, 135 bp, Homo sapiens
  chr7:27135162-27135297
  hyper
gtacccaccacttacgtctgcttcctgatttaacgcgtaggggctgtaaggcgcactgaagttctgtgagccatagcttggaccacaacttgagtgggagtaggacacccccaggttcccggaagtctggtaggt

SEQ ID NO: 232802 - DNA, 88 bp, Homo sapiens
  chr7:27135477-27135565
  hyper
gccactgctaagtatggggtattccaggaaggagttcattcttgcattgtccatctgtcactgagtgacctggtcctgcgaagcccgg

SEQ ID NO: 232803 - DNA, 50 bp, Homo sapiens
  chr7:27136885-27136935
  hyper
gggcggtggacaaatggctgatggtggacgggacactttaccccaacgac

SEQ ID NO: 232804 - DNA, 1055 bp, Homo sapiens
  chr7:27190214-27191269
  hyper
aggactacaggtagtctctccgattgcagaatcccaaagccagagtgttccctgaaccagcgtgcgcccccagaacgccttgggacgcgcagtttggacagaagcagccatgacgtgccaggcggcctgtgcaaccagtctccatggtgctggagtgggggtgggggaggacccgagtctataacggcgtccagctccggtcaggggtagccgaggcggggagatttcccggccatataggctctgggtgatcgccccccaggtccccttgcgtccccctctaccctgcttgctgggaaatctctgaggggccagtacagcagtcgcgccaggctgcaagaggcgggctgcagctggcgccggtcccggcgacggccacggcgtggcagcagcgagcgccagcacggtcgcaataaataatcggcccgcggcagccgcagtcaggaaggcggcggacctaggatgcaaatgcgccgctttatccgccccgagcgcacgcagagcacgggctaacgtcctaaacatccacagccccttcctatttatcgaatccataccaagatattgtctcaagttggggaaacaacaacccaaacaaaaaacaaacaaaaagaacctcggactcttttcttgtcgctgtccgaggagttctcggggcaaatctggtctgatgtgcacttaggccgagctacagttcgagccaccgcgctacgcaaagccaccgccagcagcacgctctgcgcttcctcccgggcagctccaccatcctctccccgctcgcggaaggtggggagtgcggtcgccagtccgttgcgccaaggtggattggggggtccccctatcgcccagactcggtttgcgtccttccttcaaccttagctgcgggaccctgccacgcgcgctaacagcattatgtcctctgcaccgaaacttcccaccaagtaacacccaattaatcccatcctctcctccaacacagaattccacccacgcacctattccccctcccagcgcttcagacacctctctcatcgaaaaaccgggcgaagggaagc

SEQ ID NO: 232805 - DNA, 275 bp, Homo sapiens
  chr7:27192143-27192418
  hyper
gagcccggctggaaggcagagctccgaagcaggcaggacggagcggagcaaaagaatgcggctctattctcgcaagggaaattataaaaaagttcatgttcacggttctcatccacatgaccgacagcggccaatggaagggccgaacaactcataaagttgtattgcaaagttgtaaattttcataaacaacaacggatttatgaccctttccccatcactgagaggaggcagctcttacaccggcgccatcttaccaccgaggccgccccgac

SEQ ID NO: 232806 - DNA, 1417 bp, Homo sapiens
  chr7:27195457-27196874
  hyper
gagaaagagagacagaatagcgaacaaacttaatgttaaaattccaagacaaatggagttaaataaatttacgaggatcgaacccattaattgggccataaaaagttttatgagcctcatttacatacaatgctatgggctccacgcaatggcgcctccgctccaattaaaaccagaaaggctgcgccgggagtcacggggctaccggctcgcaacagcctggctccgctcttccggccccgcgccccgcgctccgcgctccccagcgctgcgctccccgctcccggtcccgctccgccagcctggcccgcctagcgactgcgcctacctgaagaccgcatccaggggtagatgcggaaattggcctcagccgcgccatgcagcgcgccctcgtccgtcttgtcgcaggcgcctttggcgaggtcactgcagagcccggggatgttttggtcgtaggaggcgcagggcaggttgccgtaggcgtcggcgcccaggccgtagccggacgcaaaggggctctgataaagggggctgttgacattgtataagcccggaacggtcgaggcgaaggcgccggcgcccgccccgtagccgcttctctgtgagttgggagcaaaggagcaagaagtcggctcggcattttggaacagagaagcccccgccgtatatttgctaaaaagcgcgttcacataatacgaagaactcataattttgacctgtgatttgttgtccggcagctttcagtgtcggttttacgaggtagagtgatatatgataacattacacccccagatttacaccaaaccccattttcttttggacggagctcgccgcagcacgtgaccgcccacatgaccgcctccgccaatctcagcagtcctcacaggtggtctcgctccgcagggcccgcagccgcctagaatggaagggcaagaggctcaaatatgcggccaaagaatccgcccgcgcccggcgggcctggcgcgtcccgcggaaaaagacctggaggctccgcgggagcgcccagctggcggccaacctccgcactggggtctgcggacgccaggcggcccggccccacgcagcaccccccaccccgcccccccgccgactcctgctagtgagccctggaccaagcttgggatcctccccatccctctcctgtccgcctgcccagaccctggaagggtctctgtcccccgcaacagcctgccccgcggtggccttgtgggcaggactcagctatgagcagatcgactctgcccaagtcttctctcacccaggtccagtgggcgacaggccggacttagactcggatccagacggggaaggcgcagcatctcttgcagctgcagagagattgccaccgcaaactggagccatgtggttcgaataaagtcaacgtctcccagcttcc

SEQ ID NO: 232807 - DNA, 2175 bp, Homo sapiens
  chr7:27203935-27206110
  hyper
gggcgccctaaggccgctgatcacgtctgtggcttatttgaataatctgtcatggggacccttgtggcccgggtcgcccgcagcctcatcttggcaggatttacgccgccactggccgaaggcaagaagtggaaggaatcggccgtctcccccagcgtcccagctccggctgccctggctgccgccgctcacggacaatctagttgtacaaaaggctctctgggctgcactgctttcgaagaacggcccaaagtatctcggtcctgggcctgggcagccaaggagaggggcggccagtcttggctcgtcccgaagtgcccgccccgccccctctcgctgcagcagccgcctcctctcccgtagccctgcgggccgctcttcactgctctccagacttggggccctatctgaggcgtcccaaacaccaacttctggctcctggccccaactcgagaggcttccagcgaggacgaaggcaggctcgagagaaacctggcgggccagcagatccgggaggccggcgtggaggcggcggcggatttgaagggaggagacacttactgggatcgatggggggcttgtctccgccgctctcattctcagcattgttttcagagaaggcgccttcgctgggttgtttttctctatcaactggaggagaaccacaagcatagtcagtcagggacaaagtgtgagtgtcaagcgtgggacagtcaccccttctggccgacagcggttcaggtttaatgccataaggccggctggagggcaagcccgcgaaggagagcgcaccgggcgtgggctccagccaggagcgcatgtacctgccgtccggcgccgccgccgccacgggcgcctgggggtgcacgtaggggtggtggtgatggtggtggtacaccgcagcgggtacagcgttggcgcccgccgcgtgcactgggttccacgaggcgccaaacaccgtcgccttggactggaagctgcacgggctgaagtcggggtgctcggccagcgtcgccgcctgccggggaggctggcccagggtccccggcgcatagcggccaacgctcagctcatccgcggcgtcggcgcccagcaggaacgagtccacgtagtagttgcccagggccccagtggtggccatcaccgtgcccagcgcctggcccgcccggcccgacccacggaaattatgaaactgcagatttcatgtaacaacttggtggcaccgggggggaagtacagtcacctaataagttgccggcgcccgcgcccccattggccgtgcgcgtcacgtgcccgtccagcagaacaataacgcgtaaatcactccgcacgctattaatggtccgatgttttgcagtcataatttttatagcaaaagccatatgtttttatgtaaagggatcgtgccgctctacgatggggtttgttttaattgtggccaacgacgattaaaagatcaaatctagccttgtctctgtactctcccgtctccccccccatacacacacttcttaagcggactattttatatcacaattaatcacgccatcaagaaggcgcgggtcccgcgtgcgagtgcggccagcggagcccctcacataaaattagacaataattgaagccataaaaaagcagccaaatcgcattgtcgctctactgtatttaaatctatatttatgatatttcataaggagttattgtttcagaagccacacaggctggcgggaagtcggaaacgaccaacagattcgtttgcctcgccgtggctcccagctgtaaaaatttacgaggacttggaaaggttagactgttgtgtttggttggcgagctccctgtaaataatccctgcggtccccgggagaggcgagtttacccgcggccgccctcgaaaagtcaaattcaacgcaggatccgtcccaaacggagccgccgccggccctaccagggcactccaggcagggaccggccgctcagggagtaccgcgggtgtaggtccccacagctacccgcctggagcgaggggcgcccgggcaacccttaaattcgcctttgctacgaggaccccacggaggagctggccaggagggagcggccagccgccaccagggcgaaggttttgagggcctggttggttgtgcggcgcgctcggtccccggccctcgaccccacgcacac

SEQ ID NO: 232808 - DNA, 976 bp, Homo sapiens
  chr7:27208943-27209919
  hyper
aggggaaagccggccggctggcaaagcgctgcggagaaagacacgaggctcctgagcagggaaagccgaggttgccaccgcaggcctggcacgaccagggccgtgatgccccgcccggcccgacccccgcgcgcagaggtacctggagacgatttcaactgaagtaatgaaggcagtgtcgtgctgtcgagagaaaggtggatcccaacaacaggaaactacctaaatcaccgaccagttctggtgctgcccgcgaagggctgcctcgcccgccgccgccgccgcctccgccgctgccgccgccgccaaggagagaaccctgccatcgcgcctggcccggcccagcccagcccctaggcaacctgcgcccgccagtgcaacagagtgccccaggcggccgcaaatgcgtcaaggaaggggaagccacaggccccagtaaggtattcctgggagggagagggaggaaaagagagggaggaaaggcagggagagaggaataaaggcggggagcaggcgagacgagagcagctccgagaagcagtgtgcgcgccgctttcccaaatcttgcagcccagcgagccggcgccaagaggcggtagccgtggaaggctcgaaagcgccagggacggtacagatcccggctccctgtctggccccggcctcccgcctctcgctctccccctctccctcctagctgcccgcccgccggggcgcgcgctcctgcgccccctccccttagcccccgccccccccactctggcaagcaggaaacgcgtggccctaaggagtgccgccaggtgggggaggccgtactgggggagggggaggcccccatgcagtccagcccgggtccacctaaccgctgcctccagcggctagagatgcgctgtgggccaggcctgctccccgattcagattgagggtcatctgtgacccagacacccgcaaaataaccggcctctgcaagcctccctgg

SEQ ID NO: 232809 - DNA, 529 bp, Homo sapiens
  chr7:27212396-27212925
  hyper
gctctcagctcagggccccccgcttccaggccggatttgccttttcttcttcccgcaacgaagattcccgcccctcagcaactttgaaaaaagcatgggggatcgtaaactcgaacttcgccggttaatgggcttatttattggcgctggcggctgcttattttggatgccttacaaacatccgcgctatctgcgggcgagctactttccctccctccccctccccccgcgtgggccgcgccgcgcaggctgggcagggaccagggctctgggtcctcccggccacaggaaagagcgcacaggagggggcctgctcgctggtgtcctcgtccctagtcagggggagctgaggccagcgccgaggacgtcttgctgtggggcgctaagccggacatgaattttactgcgtccccacgcccaaatattaaaaagcaagttcacaaggtcagcctgcctgcagcttgggccaaggccggccggctgctgcgcgggctcctagttttctgatccttctcctccttgtgtctgc

SEQ ID NO: 232810 - DNA, 341 bp, Homo sapiens
  chr7:27213945-27214286
  hyper
aatacgattagcaatccccccgcaccgcggcgggcgcccgcagccaatcccgagccagagtttccgcgcgaccactcccagtttggtttcgtaggcgcggggccgctctccgagggcgccctcagagcccgcgattgatataaatatgtaatctgtattgatgggccaggagacgcaccccgacaccttggcccgaaggccgggagctgtgggggctgccccaacgtggctggtggggggcctggccattgggctcgccccgcccctacccggacgtgagccccataccggggtcccttagaagggcccttgggccccgcgcagttaacaagtggggtgtt

SEQ ID NO: 232811 - DNA, 503 bp, Homo sapiens
  chr7:27219324-27219827
  hyper
gcgaggcctagcgaatgcgcgttgctttaaattaccataccaatcacttcttgagggtgagtcccctttttctgttatgaaggggagcgggacaagtgaaataatgtaccgtgctgctcttagtatcagaagcgaacaaaggccaagaatcatgctggggttcccggctccccggcggctttgacattgatcggaagtgcgccatctcgtggcggctgcgcgcctaggttgggccggagttccagccccgagccgagagacggaaaccagctccgggcagagagagaaggagagaggagaggatgtgcccagcccgctgctattgagatctcatttttacatctaagaaatcgctgcaaaaccccagccgggtttatagcggcgcattccaaatatgcaaattggccggccccggacgggtttacgaccacattgtcacagccatcggaggatgggcttttatagggctcagaaatcaaacccgcgcccgcccgccgcccgcc

SEQ ID NO: 232812 - DNA, 940 bp, Homo sapiens
  chr7:27222996-27223936
  hyper
actaaacaaacagccgcctgcggacatttcaccttccagcacctgggctgccccttcccaaggcagtaaaggcggctccagtcccagtctttcccggctgcggccaagactgggcagtccttaacatctggggcggctgccgggtctttgtcagcctgagtcctggccaccagcttctgcctccccggccagccttccggctccgccgaggtggggaggtggcggcggaagccccctaccctaggccttcgctgagcaccacggccacacggccatcctgcacacggcagagcagcggctctatcttaggtagggtgaagggaaagggggcttcccgaagctgcgggcaggctctacttgctccccctttaaaaaaaaaaaaaaaaaaaaaaaaaagacccacaagacaaaaaaaaaatcgcttttgacagattgaataacaattgtgaataacatgcagttgggcagaaggaggcacgtaattgccaccacgccagaggaaaatggcttcctttggacaaaaaggccaactttgggttaatttgttcttttaatatattgctagagctaagcgggctactttatctgttaaacgcgctcctagcgccgtcgttaaacagcgacgcctttgaatcccggccgggactggagtcccggcgcaacacatggcttttataaaaatctccggattacctcgctatcaaaagctcccgaagcccttgcagggggaatttacaggcgcccacctccggctccccagcctggagctggccccgagcggggtcgagctgctgggcttgggagctgagaagggaaaaaagggaaaaggggagttgtttttttttgcaggcatgccttggccggtgggtatttcacggccaatttcagcactcgccacgtgatcccgccttttataacaaagttttgttgggggaaacct

SEQ ID NO: 232813 - DNA, 927 bp, Homo sapiens
  chr7:27224656-27225583
  hyper
tggggcagaaaagaagggaggctggagaaatctggacccgagacgtagtaagtacaacttggcaaatacatgttagaggagcagggaccacgctcatcaaaatccattattgggctaccttgggctctccgcagtagccgagcttaacatgattctccactgcagctgcctctttgaagcggatccgtgaagtagaaatttggagacgtaagctgacgtggaaatctatccccatccttagcagggaggtgctggtcatgtgacccgatgttgaaattgacaagctgctagctagtccgggccttttccccccccctttccttttttttttttcctcctctcccctccctcccggcttcctttctttgtagccacctcaggggaagcaacagatcgtcactcggtgttctcaccgaaagcacgtaatcgccggtgtaactcatgttggctggggggcctcccggcgcgcgcggagaggctggggtgcgcccccatgcagcatgcttgtgctcaattgcagggtcctcgttctcgagtgtgcagagggcggtgagagctcaactctcgtccccacctcccacccgcagctccccgggtgggtgagggatgccctggactggggatagccaggtgggagtccgtcgctgtgtggcctgtggtctcggagtctgttctcctggagtctcgcatttgcacccccttcttcgcagtccccctcccatagacttgctctgggaagcgcctctgcctccgaccctagccggaaccccttcggggccagagtttgaagccgtggatgtgcctgcctggtggcttgtccgatttgcacggtgacttgattacactctctcattcatggtcacttccgaagcgctttagtgccttccgtccctaaaccgccaacagccagaacggcttctccccgcg

SEQ ID NO: 232814 - DNA, 1380 bp, Homo sapiens
  chr7:27227348-27228728
  hyper
tgcggggctcgccccgcccctgggtgaaggcaaacaaattcttgcacttgtattagggcttttaagaccataattgaacccgggggcgtctaggaaaaccgaaaacagttctagacagacctgcggttttatagcagttttggcagtcaacttcagcttgtgcctgagcagacggggttgtggtggcccgccagcgggggatgccaggccacctcccccagcggcacgcagcccctctcttaattagatcggttttcccctggtgtccgggagagcggtcccggcagaaaggtcggtatgggggtgtgcgctgttccgcataaccactgcctcccatgtcctcctcgagggccgaaccgagagggtgctggcagggctggatcccacgggtgtccgcaggagacaaaggcgaattccggagaaaaggctggggctgagaaaggcgctccgggagcggctggcagggcaattcggcaggctgcaccgaagccgagtgcccggagggacttgccgcccggaagggggtgtgtgggggcgctgccgtgaagatggatgagggaaaaggtttttgatatcagcagaagggaaaacgcctggagtggccgaacacttttagttgcccagcaggaataggagacgggtactcagctccccaaggctgcgcaatatcccagctttgcccgctcctgccctcgtgttcggaatatgctggcggtgtgaatgtgaaggtttctccaggcaggcggctggggcgaggggtgggcgcagctctgaggatcagaccaaatctaggggaaaaaggggaggcagaccttcgggtccttggttttgactttgctctgagcctatgattgactcttccgctttgcaggaggtccaacagccgagcttagcccaccgggctctgggaaagacccgactgaggctaaagccgccccggaaggccaagtccgagttccatttcttgaagaggccggcgcgcgtaaggctgtgacattggccctggcgactggcttcccaggagctgttctttctcaggagctccacagcgcgggccatctccagaaaactgtcttcagagtgtatttccttttatcgtcaacccagagccccaccgcggctaatgcaagaggccaaaaaatgtttggaggaagaaaaacaaaggcaggaagtggcggcggcctgacggtgcgtgtgtgtctgcagagaagggagggagccggctcagtctcttcttgtttttccaaacttcaaggtccaggcagccctctgcagggccgggccccattgctccccgcgcggcattggaggtggccgcccggagaggagaaggccaacgcctgcgccaggcttgtcaggcggaaacggctaacaaggaga

SEQ ID NO: 232815 - DNA, 959 bp, Homo sapiens
  chr7:27232196-27233155
  hyper
gtaccactctgggtgccaaccgggacctgccggtgccacggtcccgtgcgccgggtcccggcctcgggctgcgggcggcttcggggcctacagcccagcggcgcggagcgtggcagaggcgcggggcgcagcgcagcccgaggctgcctcccgcccgggcggacggcgcggccgctggggtgcacagcgtagccccgcgtgcccggctcgctctccgttccctcggatagctcccaccgctcggctccgggctcagaaagcggaagtatttggtagagaaaaacacggtttcttttcagctcgtctcaaaatcccttttagagaaaatgctcctgtcaagttttatttcccgttgcaaaccaccttccacgctgccaagaattaagaccgggagagattaaatacccgattattctcctggggagggcggggcggggccgggaagtgggcacccacaccaaacattccttgaagtaggcttgtcctgatccagccgcgcccggggagccccacgaaggcccgcgcggcctgcggtgacgtcagcctgcagttgcggggccactcacccgcacagacacggcccttgctgttccgcgccgggacctccgccagccgtcctgccgcagccccgactggcccgcgtgccgtcagagggaggcccgctttacaccggcctgagcctccattttgagtagggggttcttgtagaagcgtggagggtttggggccgcgcctctgtccccgaggggcgcgacatcaggtagctctccgagttcacaccccagtacctgggggaggacctatgtcgccgcataaccgcccgcagaggtttggaaatctctgagacccgttgtaattatttctgcccagtggatccggctcttcagcgtcacgagagccgggcagaaatgaaatcaactgtggcaaggccttggctgctttcacggaggagtttttct

SEQ ID NO: 232816 - DNA, 202 bp, Homo sapiens
  chr7:27237358-27237560
  hyper
tttacctgagcagacgcttaacatgcaaagggaatggcgacctaagaaggacaagcagatgtttacaatggcctcttgcgtttgtaaccaacttccagattattaccatctaacgcagtgtcctaaaatgtaacgatcacttaaatacttacaagatttcagtaactgcgtaacttatctgaaattgcgtattttgggggtt

SEQ ID NO: 232817 - DNA, 606 bp, Homo sapiens
  chr7:27237763-27238369
  hyper
aacgagttctgaagcgtttcttcaagttgccttcttgctctatttttaatccattaactagtggttttcagtttgttgatgacttttttctctttaaccctcctgttctggaaccagattgtgacctgccgctcagagagattcgtcgtggctgatatccgcctccgtttgtccttagtaatgaatttattcgtggcgtattcccgttcaagttcttttaattgcaccttggtataaggcacgcgcttctttctccccctcctataggagctggcatccgagggatgggagaccacgtctagaagacaagggagaaggcaagttacacagggatcggaccccagccagggcataggcgacagctcgatctgagccacccgccttgcagcgcccggctgctctttgccacccgctgtacaatcctgtcttctgctaaagcctagagggtcagtggggaaggtagttagttctgaactgaaatgaaatcacccagggctccagtgacttccccaacccggccatcctgcaggagcagcgcgtaggcagcctcgagtgatagcctggtccaacggcccacaccttagcgccaggctcaaggtacaacac

SEQ ID NO: 232818 - DNA, 1804 bp, Homo sapiens
  chr7:27238584-27240388
  hyper
agccagggaccagctcaactcgaggcagtgcaggcagacccagccagccatgctcgggctcccaggggtgcagagccgctagggcagaccaggaagagaacagaaacgcacccgggatcgcccgggtgcgagcggagaagaagctggagcagagccggaagaccagggctgggaataggtcgtcatttaccgggcagagtggacttccagaggtggggaggctgcgcctgctctttggggcagtacatttggccgttccagccgttgggcagcgcccagggctggtagctttccatgggaagacccaagggttcgtggcgcgactcgccggggcccccgaggcccggcaccactggcatatccaggtagccaggcatgggctgatggtggtggtaaggcccggctgcgtagccctggtggtagaaggcgaactccttagcgcgggagctgaactcctcggcagctgggccggcggtatccatgtacttgtccgcgaaggcggcggcggcggcggccgaggcgggctgcgcgcacgacttgatggcgttggggtgcgggcccatgcgggcgcacgggtagtagccgctgccgaagtagccatagggcagcgccgcgggccccgacgagctctgcgccgctgccgagcaggggctgcattgcttggcggcctctgcgcccgccgggcccgccgggccgggacctcccgaggacgacgcggcggcggcggcggcggctgcagcggcagccgcggcagcagcggcggcagccgacgggggcgcctccccgggggcgctgctgtaggcggacgcggctcctggcgccaagggcgccgggtgcgccatcaggttgcggcactggttggccgcggccgccgccgcagccgcggccgccgccgccaccgagaagttgccccctgccgccgcagccgccgggtgggggaagcccccgcccccggccccggcagccgccgccgctgcagccgctgctgcagccgccgccgccccttccatgttcttgttgagctcgtcggccaccaggccgccgccgttgtcgtagagaaacatgacggtgggctcgatccagcgggggtggaggagcacggaggctgtcatagcccgagccgcatggagaagaccccagtggcgctgttttaaaaagcccccaagaagtgaagagcgcgcggcgcggggccggggcccgagcgaggggggcggatcgcgccccgcggggtcgcgccaggcggccgcccattggcccggcccccccgctccgcccacggcgtatgcaaagcgggcggctccgactccagctctgcacggtgcacccgtcgtccccgccgcggcccgcgccgtccccagcgccagccgcgcggccgcgcaccattcacccgggggagaggcggaggaacgtgcgggtggggcagggaaggaaggcggccccatctccgccccccttcccttcctttatcccagtggggcccagacccgcgcaaccaggcggggaggggaggtgggcgcgcgattgggttgcgatctggagcagtggggacaggtcaggtaattctgccggcggtcagggatgggagagtggggaggacgggaccagcctagctcagaatgggtgtttcttggagcctctgggactgttttctttccaggaaccggcgcgtatttctgcagtgagaccacaggacggacatcggcgccttcggcttcgatggagttgcgattttgctctttccagggaaacagtggcagggtgtttgctgcttatcggttcctgcggatatgcctgggtcccagga

SEQ ID NO: 232819 - DNA, 221 bp, Homo sapiens
  chr7:27240997-27241218
  hyper
aaccaagcagcgacccgtcttgtagctgccatgttttgtcgaggggttctgggggtcctgctgctttagagccacatacttccacttcctgattcactactgtgagctggtcagatgcctagaagaggaacaagcgttcaaagtgaaagtgggcacattaccggaatagtgctggggagagtgctggattcttttccaccccaggcggactggtgagaagc

SEQ ID NO: 232820 - DNA, 855 bp, Homo sapiens
  chr7:27244540-27245395
  hyper
ctcctcagagctggcgcaaactccgtcctccaaaactcggctctgggaggcctaagtgactccgaagccggcggcagccgcggcagcggccgtggtggtggaagagctcttttccccgacagtgccactgatcgctcttcactggagctggaaacagccttcgcggaaaggaccggagcatgcgttagaagcagagggagcttggtgaagggctcggctggaaggaggaaacgccttctcgcagtgcgcggccagcccgcgggggacaccggcttgctggactgcaggggcccgtgccacccaggaagtgacctgcgggtcactcagccggggcgctgggcgagcgcgggacggcccggagaattccgtgcggctgcgacgggaaaaggacgaggggtctctgtacccgacgctgccactggcccaaaggaattttacccgcgagcgcccaccccaccctagcttgatgcttacgcccgcaacaaaacaggaaaccaggactgggcagtgcattctttaagtcaacaaatacactgaagacttcgagcgtttgaaggaaggagggggtttgcacgtaagcctggccccgccgggctcggctttctcgctgagaaagcggcgcaggcagccaggcggcctgggcccgcgggggtccatctcgccctagactcctaagaactcccacggccctgttcccagctgcgaattcttaatgcacaacgcgacggagggaaggaaattcaccagcgcagcgacgaggaaggggaactcaggaccccttcaagtacacactgaggtgtgatcagagttttatgggcactttatatgctgtaatcataacgatgtgtgtgcctt

SEQ ID NO: 232821 - DNA, 43 bp, Homo sapiens
  chr7:27245734-27245777
  hyper
tcaaggaacagccgcggttcctttgtcccgcggctccagcccc

SEQ ID NO: 232822 - DNA, 335 bp, Homo sapiens
  chr7:27250161-27250496
  hyper
tcggaactcaagggcgctgtctctgctcctcgggccgagactcggtttcccctgccgctttttgaagtctagcattcctctgtgaaagctggcttttccctttttttcctatactccccttcccgccctgcgctctaaatcctggctctggaaatccaccagaatcaaatgctggctccctgcgggcccgcgtcggagcggctcacgccattggaatctttttatgacctttgatgtgtttaaataacatggcaagtctgagcacacacctcggattaaactttaatcggctgcagtcaaggtcgcccaggtggtaaaagcgtttcctccgacgt

SEQ ID NO: 232823 - DNA, 692 bp, Homo sapiens
  chr7:27252473-27253165
  hyper
gaggacatagaaagcggttgttatttattccaggcaccatcacaaaaggcttccaaaaatatcgagccgagatattttattgtccagcctgtctgcagcctgtaattatgcgttcaagatgtttaatgtgtgcaaatgcattagccgctttcgctggtgaaaaccctagctgggggcggggtagaggcaagtctggagataattatgtcgtacagtcgcaaacattattccgttcttactgtaaacggccccggccacctttacgagaaaccaggaaacttctgagagttactagcagcgtttacgcgggcaaactgagttctttttctttctctcccggattgttcgaagtatctatcgggcggcttcgatgccaggttcagaggcgcgccagggagagggcgccccgcagaggagcgcagcggagaggcctacgcaggtccccggtgcccgcggccctcggaggccgggccctgcgtcttggccaggcactgggtggcagctgaggctggtggcccggagccctcgcggccgcgggcaggccccttcttgggcagggtcgggcactcccgctgtccagggctcttcggcaccctccttccaatcaggtcgctctcccctgctccccagactcaactcctccgaagctgctccaggttgaaatgtgaccgctaggccgactccctgggccc

SEQ ID NO: 232824 - DNA, 895 bp, Homo sapiens
  chr7:27264696-27265591
  hyper
tgccttcaaaaaggttttgccgttttgttttttgtttgttttaacgttccaccaatggttttcgggtgacggtgtccttgcacgatgtagtccgtcttcaaagttcttttacacaacgtgaattatattgaaattgggctacttcatagagcttcgcctcagtggaggacagcctggaataggtgagggggtctcgaaaggaataccaggccggggagtactggcaagtgtcggaggggaagggcaggtcggggagaggatccccaggggctgggtgtctgcagggctccccgtaactcagaggggccggcggccgccgcccgaagcctgagcttttctcagcagatggagaattcatttttaacccccaggaaggaatgggctgagacatcagaccaccgctcctagagggtcaaatttcctccccataaatccaaaacattctctttagggagttccctccgtggcgcgcaaacccgggaagccgcgcgccctggggtttcttggcgggccgtgcgcgcagcctgaaccgccaaagtcgcgtcatcccgcatttgcctgcacccaggagtttgcaacccgcagagcccgcagaggccaccgccaagagtgcgcgccttggcgccccgtcggcctctacttcctcggatctgagccagcgccgctaatccgcaggctgcagcagaacctgtcgccagcttggagagtccctcgcgctgccctggcttcccggtccgcgggcgactcgcgctgctcccgggtttgtcgggaccccaggagggcgctcaagcctgtcggcccctacttgtgtgtagagaataggcccgggtacaccacctcagaaatgcagaggaagccggggacactgaagcccgggtggttgcagtgaggctga

SEQ ID NO: 232825 - DNA, 716 bp, Homo sapiens
  chr7:27274930-27275646
  hyper
ctgtctagagaagccgaggttaagtggctctgacctatcacccatcccgcttagggtccagctcagagagcgggcgcatagggcctggtggaacaggctgccctctggggatgggggattggggccgctgctccgggcagagccgcgggatccgagccagcaaggatgctgggactcgccgcgacttccgcctctggcgatcggcagtggggggcgcaccaagacagcagttcgggagctgcgctttgtcaccgaggcggcgaggggcggagggcgcagaaaggggccgcggagaaaggacaaggcggccgaccagctcccaggatggaaagggaccctcaaggggctccaggcagcacctggggcaaggggagggactgatactcccggccggagcccaacctgtggcgcgtgcttcagtcctgagccagcggctccctggcttctgggctggcatccgtcctaccctcctcccgctgcaacacgcccctgatagccgctcccccaccctctgaaactcacccgcacagactcaccgccaggcttctgggctgggatcgcgcagtccctccacgtcgcggcgccctgaggcccctcccggtgagccacccggccttcgtgccttgctccccggataccaacctcacctggctcccgcgcgtcgctcaccgcccgcggggacagcggccgcatccgcccaacccacttgggaaggg

SEQ ID NO: 232826 - DNA, 470 bp, Homo sapiens
  chr7:27279687-27280157
  hyper
ttttgtcttctttcctttaaaaacccaaccgctcttaatgtgaggttgatgaaaggatgcttttggaagaagtgacatttggttaaaacgttttccccctaatgcgccggtggaaaggggcgggggtgggtgtggttccctaggctcctaagactggccagtcagctttgaaagagcggggcagaagtcgggagagggctggggaaggctttgggctgaggggatgtgtccctgaagcttcagatctggagcccaagggaggcaacctccctctgaaaagccggtcctcagctccatccagccctctccgcgggatgtaagccctgctccgtagggcccgacccaggaagcagactaagtggcactccttgatctctcactcctactcggctttcatctcacccagaagaaaagcggatcaaacagaggattcccattgaatgcagagctgggggcggggtggggagcca

SEQ ID NO: 232827 - DNA, 1838 bp, Homo sapiens
  chr7:27281858-27283696
  hyper
gaatacatttttccgtagcttgtaaaaagacttttcagccagtttgaggttagctgccaggggcagacagttgtaataatgccgacagaattgaggcttgtaagccgggcttcacacttctaaaatgcagttatggattctttcatcggtgttagatcaaggcaccaagttaagaaaacaaaagtcaaaacaacaataaaagaaaaaatcaaaagcttatttaattaccgagtcccgctgcccctgcggaactcgccgcgcgcgttaagctctcttttctttctgcggaattccatttgcatcccctctgcctgggtgtctccctctctcagtgtgtgtgtctctctgtctgttttcacactctcctccccaatcgagcgaggcccacacctggcgcatcactgccgagccattagctgcgggtttcctttcatcttcgctgtggcagacgtttctatttatccacttgcgctcgccgagtggcgtcaccagcggtactgtaatgacgattgcagcaggaggatgacagcttagaaagaagagggcaatggggcttcctcccagaggcggtgcggcacagaggagcgctcgcttcacaaggtgaccctagctcccaccgccaccgccgcggtcgcggtccagaccgcgctccagcagctccgcgccctcccaggcacccggcctttctttctccctcttgcaaccaagatccgtccggccgctggagacccagggagccggggttaggaactcacttggggctttcccctcccccaccggagagccccgggatggagagccgaaaggacatggttgtgtttctggatgggggtcagcttggcactctggttggcaagagagtctcaaatttgtccgaagccgtgggcagcccgctgccggagccgcccgagaaaatggtgccccgtggttgcctgagccctcgggccgtccctccggccacccgggagcgcggcgggggaggcccggaggaggagccggtagatggactcgcaggcagcgcggcggggccgggcgccgagccccaggtagctggggcggccatgctcggcccaggacccccggccccctcagtcgacagcctctccggacaggggcaacccagtagctcggacaccgagtcggatttctatgaagaaatcgaggtgagctgcaccccggactgcgccaccgggaacgccgagtaccagcacagcaaaggtagccaccgtgcccctccgctccccgggcctcccactgcgcccacccttcacttcggcgcaggccaggaggaagacactcccttcccctagggcaggatggctggggggacccacctgagcaactctctctgctatctgcgttctggcgggggtctcctactgtgttctggcattggcgggactgagggtgacagcagtgccttgagtgcggggtgctgagggggcggatgcaagtcctggacttgggggattcgaagctcaccccaagcacccagtgtttcaactgctcggggaatgcttcaattgctcggggaagacactttccccaggcgagggcaagatcaaacgccgatccgggcagtttgtggctggcagggtgtaagaggcatggaggcgcggaagccaggagtccataaaggaccgtaaaattgcggcccacttgggcagcccgggtgctgcagccctccgaccagtttgcacgtcggtcagaggtccaaattaccttgtcacttcccgggcttcgcggcgccaggtcggaaatggtcccaatggtctaattgcctttggtctccggttgcatttgaaaaggcagagatcgggtcctccccccttcccctt

SEQ ID NO: 232828 - DNA, 1655 bp, Homo sapiens
  chr7:27284595-27286250
  hyper
ctacagccccacttcaatggcgtttgtgtgtctgtgtctgtacacgcctgtgctctggactcgctgtgcagggtccggctccgaggcgctggtcggcagtccgaacggagggagcgagacccccaagagcaacggcggcagtggtgggggcggctcgcaaggcaccctggcgtgcagcgccagtgaccagatgcgtcgttaccgcaccgccttcacccgagagcagattgcgcggctggagaaggaattctaccgggagaactacgtatccaggccgcggagatgtgagctggcggccgccctaaacctgccggaaaccaccatcaaggtatgcggggtccaggctggggaggcgggtgtgcacctatttagcgggaagtaaatgccaactgccaactccctgaaacgcaggccaggaatctgggcctggggtctccctgcccggcgcgtgcagattgaccctcgtgacagctcctaggcaggcattgctgccatgtggctgactctgtccctttcctggttaaatagacaaggggtgggcgtgggggaaggggatagagtgcctgtgcgggtgacaaggaagtttctggggacacgctctctgcggccgcagaccaattgagtccatgtcctttcactgctcctcccatacacacactggcctctggcaccccgggggcctggccacctgggcagaaggaaggagggagcgggctggagtcactccccaaacctctctcggagggattccagctccaggtggtggtggtggggtcggtctctacccggctggtgtctgctttggctgttcctgccctgcgaacactgtccccggagcgggaccagactactggcctctgagcatcgggccaagtccagctactgaacctgctccgctcctctccccaggtgtggttccagaaccggcgcatgaaggacaagcggcagcgcctggccatgacgtggccgcacccggcggaccccgccttctacacttacatgatgagccatgcggcggccgcgggcggcctgccctaccccttcccatcgcacctgcccctgccctactactcgccggtgggcctgggcgccgcatccgccgcctccgccgccgcctcgcccttcagcggctcgctgcgcccgctcgacacgttccgcgtgctgtcgcagccctacccgcggcccgaactgctgtgcgccttccgccacccgccgctctaccccgggcccgcgcacggactgggcgcctctgccggcggcccctgctcctgcctcgcctgtcacagcggcccggccaacgggctggcgccccgggctgccgccgcctcggacttcacctgtgcctccacctcccgctcggactccttcctcaccttcgcgccctcggtgctcagcaaggcctcctccgtcgcgctggaccagagggaggaggtgcccctcactagataaggggccgccggctggctgccggctccatgacgcccgtggggtcaccccccggccccgggactcagccagcctcgctcctcgctcctcgctcctcgcccctaggacgccaagggggaaaggagagggcggaaaaggaccagcgggatccggccgcaagaattggaaagcctaggaagtggcggtggctggcgcgtttggggagcagg

SEQ ID NO: 232829 - DNA, 349 bp, Homo sapiens
  chr7:27288913-27289262
  hyper
ttgcaggagggaaaacggaggctccaggtctacacagctattagtggccgatgtagctatgagctccgggctcccacttcctcttctcttaccctgttctggggcacagattctgaggtaacccccagtgaagcctgacacctcactcccgactcacgctttcccagggctcttcaatcccggccagccggcagggcctgggagcgcggtccagcgcccagcccagattcgcccagttgggcaaggctggccaccccgcagcccgagtgtgcaccggcccccggcaattgctggcttgttagcgtgtgattgattgccttattaaagcgtgttcttgtaagtgtgacca

SEQ ID NO: 232830 - DNA, 78 bp, Homo sapiens
  chr7:27289789-27289867
  hyper
attattccccaactgcggaaacaccagccaccatatgtccgccggagaataagcgtgagtgtcgcggtggacagttgc

SEQ ID NO: 232831 - DNA, 1165 bp, Homo sapiens
  chr7:27290941-27292106
  hyper
ttgtgaaagtcatatccttgcgtcttcatcgagattatttatagcgcagtgagcgctgctgaaaggtatacgctgttaacagggacaattacttaaagggaagcgtttgtaaaatggaaaacaaatgccggggttggtaacaaatgggatcaaaagcagccattccaatctggctccccgagggaaaggagcgggcgtggccctgtaggattaggggcgcttctgacctccccaagacccaggtgaggccgagggtccccggcgcgccagcctgcgccgtggctgtggctgcggtggcgactcgggccgggcctcgctctcgccggcttcaggttcccgcctccctcgcgcaggcagcgggcgcgtgtggcccgggctgggcaagccgaggaacagcgagcccccggacgctgactgcaggacgtcccagtttgtgcccgggtctccgtccctccccgtacggggctcgtacccccgggcctgggtctgacccacagggcgctgaggcctttgtagctgaagtcggaaggcctcgttgcgagcgcggcacaggttgctggtagcttctggactctggaggcttggccttccttctaagccgatggcggggaaagaacctcgtttccacagcttccccgacccccgccgcttgccatttggggacgggaagcgcgcccgggtcgcttcacgtccctctgggccggagccctttccatggctggctcctctgggggcccttgggcctgtgagcagcgtctacttccctcagagaagaatcctttccttcccccatcgaagtgtccctttctgtatcctgaaataacccctcctgggtgaggccagttcccctctgtcgccctcctcccgcaggcgtccgggagcctcgtgaggaccccgtgcagttgagtccaggcgacaggtgcctccccaggtgtctacttgccctccctcaacctgtttagggaaagaccagaacgatgtgcgcggggaggtggttttgtttctcccgaaactggcgctcttgggtaaaaccgcgtgccgcgtctacgcgggctctgttagtgtgcgtgtcccagaagagtgggccttctaggcggcactctttggagaagtaagtgaggtgaactcagaacagagaagcgggaacgatcgtttgatgtgccga

SEQ ID NO: 232832 - DNA, 114 bp, Homo sapiens
  chr7:27702686-27702800
  hyper
ttttgaacagtgacgccaggcgccctggcgctgcccccaagctcgtgcctcatttacagcctgcgggcgggagtctccttgtttaccaaagcagagggcgtgtgggaggcgggg

SEQ ID NO: 232833 - DNA, 113 bp, Homo sapiens
  chr7:27779469-27779582
  hyper
gccctttccacatcgctggtgagttacttaaacctcctgtgtgtttccccctttcgtatgtcaaaataataacataaaatcagaatgtaaatccagacgcattgttttgctgc

SEQ ID NO: 232834 - DNA, 1997 bp, Homo sapiens
  chr7:28448714-28450711
  hyper
gccgtgtcacacggcgctgggctctgcaagctgttgcttgcgcagtcgcccccgccgctgccgctcccgggcgggtgcaccagggtccgcgcgggcggggcggggtcggggcgggaccggggcggggcctgccccctcgacgcgccggccccgcccctcgctccgtccctccccagcggaccgcaatgatttagaagttcaggaatcccacgtgacgtcaccgggggggtgatgtaatgcactctaaatagaatgtattgtaatctttgctcagtccaacgtggtcccttcacccgggctccgctcttgccttctccacacttgtttggtaagttcctaaaaatacggctcggccacttctggggcttttgcatttagccacttttgttgcacttgccgcaggagccatctcgggagtgtacttgtttgcaggggttggttctcggcagcagccgcgaggttacttggtccagtgggcaggtcacagggcaaggagtagggaagatgcgatgcatttttttctggagggtgatctgtgtttgtaaacattttggcggaccagagggaagtccggccccgagtgctggtagactgtggaattcggctgtgtcctgaggccaccctagagaccccgcgccgcgtgagtgccggagcgctcggtggccgccgcgccgcgcgcctggagggatgctaacgtggagccggcgccgagtccgcccggcgtgcgtgcgtgtgtgggagcgcgcgagtcccctgacgcggggaccagttatgaatcgggggtgtgtgtttgcctccagagacctggcaaggtgcggagccctccagaagtgcggtcaagcggcagcggagacggcgagccaggaacctccccccgcgtccccagcttcccagcgtggcggcggaacccccggagaaagtttgcaaacttccagcgggcgcggcgaggacgccgggtcacctagggggcgggtgggcgcgcgcgcagggggctcgctctccccggtgcggagctgcagctgccacctctcccgccgggctgccggctgcagcgggtgggcgcgcgcccggggaggggaggtcgccctcggagggcgcttggctttcgctccaggcgctccgggctggagagcggcgaggctccgtccgctccagtccactcctccggccgcctcctgcctccgctgctttcttgctggcatcgttacctcttcccggccgctgccccaaatgacagctccggctcgagctttggcggcgcccaggcaattcccaagacctggcggcggagtctccccctgcggcagattctcggcagaatcacttgaacttttcacgaagttcttagaggggcaagatgcgaaggaaggaaccaaggagatgttttctctcagcagctgcatcccgcttcttctttgccatagatttatttttaaggggcgtctggtagataaagccctagaccttgtccacactctcacccccatccccaactttccctggaccggtgccgcccccacttgatgcttgctcaaggccggggactggagcgggctacttgtatatttcgttgtcagtctgcagaatgtgtttgatttttatttttccctccttctctgacatgtgtcaaggaataaagactggatacaggtccattacgtcattctgcaggccagtaagtgtttgattaacggcttgagctcctcaagggttcaggagcttagaatgctgacaaagcaactctgctttgcatccccctaccctccccacaacacactcgtgcaatcgccggctccctgggcatctttattgccctctcttcccagcccctccctctccaccactcccccgtctacaccgttatcactctagccccgcccccgcctttttacagctttccctggggcgagcacggtccctggagtgtgggtaaaagcttctggggtctgaggggaccactgtacctgatcagcgcgcaatccgcccttttgtattat

SEQ ID NO: 232835 - DNA, 59 bp, Homo sapiens; identical to SEQ ID NO: 200910
  chr7:28725632-28725691
  hyper

SEQ ID NO: 232836 - DNA, 2884 bp, Homo sapiens
  chr7:28995379-28998263
  hyper
tcccgagaagtcggcggacacgccggtgcccatggagcgcaggggccgtcgggtggagtacatgtgccgaacgtggaccggggccccgcccttccgcctagcccgcagtttcctacgcagccagcgagacgcccaggccgccaaggccaggagcaccagcagcgcgttgaccgtcagcagggccaaggtcagcagctggtagtcgacgccgccccggctcccggcctccggtagggtgaccagccccgcgcagtggtcccggggagccacagggcagacacggcccccaagcacgccctccacgcacaccaggtagggggtgtccccgcgcagctcgcgcagcgtggccgagtcgctgctctcaggcaggtagacgaagcggtggaacttgggctgctggccaaagcggtcaaagagcaggcggaagcgcgcgccgcccagcggccggggactgcggtgctcgcgcacggcccagcgcaccgaggcgctgtctgcgcccaccgcctccaccgtcaggttgcacagaatgaacttgttgaagtcgcatgggtcggacaccagcggcggcagcccggccccaccgtcggactgggcggcacgctcctggtgctccgtgcccagacgatgcttcgtcgcgcgctgccaggggtcgccggcgggcgatggcgcagagccaggagaggccgttggggtgggctccgcgagggcgggatctgcccgagtcggacggccccgctggggcttcttgtgcaggtctagggactgtggagccgggcccgcggcggcagcgacggaggggctgggctgctggaggcccgggccccgccgactcagccttagggcgctgcggttgcctaccagctccctggcggccccatcccaggccaccccagctagaaatcgcccctgctgctggagctgcggctgcggcggcagctcctccgcgagacctgcaggtggcgtcatctcctcccctgcggccgtgggtaggggctgccgcctgcggtcagcggtcagggaagctgagggcgagggatccgcgcaggatccattttgcagctgctggtcatccaggtaatccaggtatttgcctcgcagggccggggggtggcgacactgcacgaagacagtgaggagccggccctgcgagtgccagtcgcccatccagcgcttcaggcctcgcagccggcagtcgcaggtccagccgttgccgtctagatccagccgataaagggctgggctggcggcgaagatgtccccggatagggcgctgagcgcgttgttgcgcaggctgagctcgcgcagccggcccaggtggccgaaggtggccgggtgcagggcggacagctcattgccgctcaggtccagcgcctccaggctgtgcagaggctccagcagcgcagttggcagctggctcagccgattaccctccaggcgcagctcgcgcagggcctccaagccccaaaaggcctcaggcgcgaggtgcgtgagctggttgcccctgagcgagagcaggccgagacgtggcaggtgctggaagatgcgcggcccgaggtgctgcaggttgttggccgagaggatgagggaggagagggagcgcagcggtgcgaaggtggccgcgtggcgcagggagggctgtagctcgttggcagagaggttgaggaagcgcagcttgcctagctgggcgaaggcgttcttgcccagaaagcggatccggttggactccagatgtaggtagagcaggttgcccaagggagcgaagaccgcgtccggcagcgcccccagggcgttcccgtccagccgcagcttgactagactctccaggccctcgaaggagccgcggcttaggcggctgatctcgttcccgttggcgtagaggatgcgcagcttgcgcagcggggccagcgtgcccggggcgagcgcctgcaagaggttgttccccaggtacagctcttccagccgcgagagcttctcgaaggtcttggggtgcagagagcggatctggttgtactgcaggtccagccgtctgagctgccccagacggtggaagtcgaaggccgtgatgttggttatgaagttgccgccgaggctgtaggtgagcacgtcgtgggggctcggccagcgagctggtcttgggcactacgcggagccccctgttggtgcacaggagatgctggggatgctggcagtcgcagcgctccgggcacacgggctcggcagcggcgggagcgcgaggcagccgcacaccacgagcaggaggcgcaaggcgcgggcagcctccatcgcctcccgccctgcgtgcagcggccggatcgtcctcttggcccgccggctctgtgtctcctctgcattccccttagcctggccagagtcgctaaatggcctctttcggacttcgcagcgccgtccagcccctcctccgtcctttgtccggaggccggcccgggtctctgcaggcgggcttcgcccggccaagtcaggcggcgcggggcgctctgcagaccccgggtactacttgttgcatttctgtataaaactgtttctccgggtgcgcgtcggcgggcgggaggagggagcaagacccggcgctttttgtttgcagctgagtccggagagctggattccctggcgcggattctcccagccgagtggattccccagctgcaggcgggagccgttccaagagcttcgcggggcgcggcttggcagcagagccccggctgctcggcccccgcagacggcaccttctcgctcgcggtcccggacggggagggcggctccagtgcaatagctcggggagcacgcgggctgcgtccggaagggacccaagtctgcgagcggagagcaaacggggcggaaattcgttcttcccacactctgcccg

SEQ ID NO: 232837 - DNA, 219 bp, Homo sapiens
  chr7:29185640-29185859
  hyper
acatccccaaaacacgcgttgagggagtaagggaaagtgtcctgcacccgccaccctcccgcgctaagagcggcagaggaccccacagcttcgtacttccccggaggagctcctggagtaggagacggcttctagcctggaagaaccccgggtgcgacagttgtgccaggaaacttcaagagtattccctcggctgggcgcacgcagtacatccccaat

SEQ ID NO: 232838 - DNA, 2137 bp, Homo sapiens
  chr7:29602676-29604813
  hyper
aaaaaaaaaaagtactcttatgtgaccaggagtgcaatccccggttcacttcctgcagtggctcagggctggatttacactgccctcgttgggtggctgtccatggacttccaggcctgaaagaaggaaattcacatcctcactgagtcgtgttaagagtctcagactggcaggttgtggtggttaagaccgtagaagctagagtcaggccccctgggttccaaccctgctctgccacgtaccagacaggcaaacctgagcaaccattttcccgtgctagggtttcctcgcctgtcgagtgagaataataataataacaatacctacctcctagggttgctgtgagaaataaatgacaatccacagaaagcgcctgcaacggcgcctggctggcaaacagcggacttgttaattacagcctttcaactaagggcgcctgaaactcgcaaacattttgctcgggtgtggattcgctcccgttagttacaaacttgggatcccgggacccggaaagcaagggggaaaaataaatcgcgatggggccaagggacagctgctgcggcaacttttacccagcggagcccacctacagcctcagcctccgggtctcaggtctccgccgtttcttctcaaggagtcggtcgggggagcggcactgcacagcttttctccaatcagacacctcaaggctggcgcctgatccaatctcctcccctggagggtgggaacgcgaagttcctacctgcacctgtggcagcggtgaccgcctcctgggttattttcttttctcccccagctgccccagggttctggtttcccgaatcacttggcaaataaccagcaggtgggcagatgtcttttttgcgttcctacggacgcgtaggcaagttcgatgcgccggagtgaacagccagggtcccatctctcagccggctcccgggcggtgctagcagggaagagggacgcgccggcgaatgaaacactactagcccggaaagccgccctggaccttccacccgggcagcgagtctggcggcccctcgccgccgccccctccgaccagaacagactgcgctgcgagccccgggcttccgccgcagcgcgcagcaattggaggtgccagaggagaccagcagcagcacttgatttagctgggctgcgggaattccgacctgtacactttccagaagcctgatctctccaagtccgcgcccagggactcgagccccggcttccaggttgacccgagcgcgcccccttcgtgctctcggccgcgttcaccgcgcgaggcctccgggtcctgttaagcccgagcaggtgagcgactgggggtggttcggcgtccgccgagacagagcctggccccgggggtcaccctggggtgctgcctggtacctcccaggtacccgcctcccggagccctaagagaggctgaaaaccacggacgctccaggactccgttttctgtacttttgagtaatttgccatcttttccttgcgcaattcgtacaaagcccttccgtgctcacaaagttgatgattgtgaagaagaaaatgtaggttagaggagaggaagcagcatcaggacaccttaccaccactgttagtaaatgacttgggggtacgggttgcttttccgatctgcaaagtaggagggaatgggatgtttgcagacgcagttgctaattgtgcctgagggcgtgggtgccttttgtaccgaaagaacttttggccgttttttcttgtattgttttcaagtcgctgcccgagtgtgtcctcagggcatcctggggaggagccggtgttgcggtttcggggcgcagccgaggccgccccgccgcctcccgtaggcgatcagacttcctctccctggcggttccgggaggagaacctcctacaacaaacaccgccgaagtttccctctccagcgcgatcgccaatcccaggagcgcccggcgcgtgggctgggaaggagccgagcggaaacctggaagtgagccgcggcgcaggcgaatcctgccgttgctggtggcagcgcccaagagaccccgcacagaaagtgggctgggagtctcgcttgctgtacccgcacctaagtgctcagaagcggcctttcgctctgcagagggggggtctt

SEQ ID NO: 232839 - DNA, 828 bp, Homo sapiens
  chr7:29845968-29846796
  hyper
ccgggaggcgcgcccgccgacttgggacccgcctccagggtcccagagcgaccccgcccgccggggccgtgtccctgccgcggggcggcggcggctcccaggcaggagcctgcgagcaggtgggggcggcggccccgcctccgcgtcccggcagcaccagagccggtggccggggagcgagccgggcgcaccgagcgcagctcggcggtagcggcgccgcttggagcacgggcgctgcgggacggagcccggagccggaggcggcggcggcggagacgtcggccggagctcgagtccagtccagcccccggctccgccacctgcaggtagcggcttcccgcgcgggtgcgggtcggtgcccgagggtggaaggaacgggcggtgtggcggccgccgccctggtcggtcccggagcagagtggcccggcccgggacagagatcctgagggcgtgggagggccggggaacccccgccgggctgcagccccgggcccaggaggttgtcgacgtgccgcgcggcgctcacgccccccacccgcaccctgccacgccgccccggccgggccgggccgggccgggcggaaacaaaccgcggggtggggagcgaggtcaccacggggttgcttggtgacttctccggactggactccccggtgagcagcccctggcaccgaggccgcctcggcctggtccttcgcgacgctctctcttctccgcttcgcccccggaacaaaaggctggggtctcgctggggagggggctgtcgcgggaagggctggggcggagtaaaagagagctaggaaattgcagagccggaggtggcttggg

SEQ ID NO: 232840 - DNA, 155 bp, Homo sapiens
  chr7:29847070-29847225
  hyper
ggagggcgggcacccggccgccctggacctggaggagcgccgcccgggccccgtgggcaggcaggcaccggctctcaggaacagcgcctttggagggtggcgtgccagccgcgtgggtgtgcccgtggcgggcgccggggcggcgtggggaccgt

SEQ ID NO: 232841 - DNA, 45 bp, Homo sapiens
  chr7:30029449-30029494
  hyper
ctggcccgactcacgtgaccgcgggcccaccctccgcctccccca

SEQ ID NO: 232842 - DNA, 217 bp, Homo sapiens
  chr7:30065744-30065961
  hyper
tcaaaggcctcgctcgctatataaaactggctttaaacaatttcctttcccaaagaaggaaataagatatttcggttttgtaaaagaggcaaaaccaggtacaggccacctttcctgctggagagctggcataagtgagtggattcttaattactattttacctgcggggcataattacttacgtggagtgaaataaggagccgtccttttctaagt

SEQ ID NO: 232843 - DNA, 304 bp, Homo sapiens
  chr7:30066334-30066638
  hyper
ctggctcttataacgcggccgcctgggaatagcagcctcccattggctattggtgctgtccttcaggcagctctcaagccaatgacgctgcaacgatggaatttacagcccggtagagccgggcagctgccaagcggcggatcatcccttgtggtcctagagcccggtggatttcagcattcaaccagcgtggattttgggagaggggcggggcgcagagccaaccggaaactcctccggctgatttatctctgtgaagaaccctgctgagagacgtaggaagagtcccggggccctatgaaat

SEQ ID NO: 232844 - DNA, 107 bp, Homo sapiens
  chr7:30067778-30067885
  hyper
gaccctcaaacggcgggcaccatttacagtcagaactgcgctccacacttgtctcaggggcctccctcctcccgtcgcctagtccgcagtccgcgtctcgggactca

SEQ ID NO: 232845 - DNA, 38 bp, Homo sapiens
  chr7:30174217-30174255
  hyper
accaggtattgggcgctcgcaccgcttccaggtaaccc

SEQ ID NO: 232846 - DNA, 602 bp, Homo sapiens
  chr7:30721275-30721877
  hyper
tcccctttttgggctgtcaccgcatggagcacgggaattgtgggcaaatcactggcttactgagattagacgctgtattgggggtagaagcagaaggcgcgcccccaacactgtaaggggtccttaacgcccgcggtccgcggtaccgcggccgtcagcagctttgtaccgctgggtccggaatcctctttactccctaaaccgccttctcaggaggccggtgtagagcaggcagcgagggccgggggcactcacgggtcgtgttgtacttgacgccgttgaagtactcggggcacggcctctccacgagggctccggcagcgctgcggggccagcacgttccgatctggtccaaggtcgtgttgcagtaggagtagggacctggcggcgggagagagcgcagtagggctcagaggggcccgcagggacgcggggctctcggagcgcggggtcaggggcgcacccagcgcgcgagagaaggagcccgcgcagcctccgaccgctcgcctcccgcctaccctcggggtccaggggtggcccccagccgtccaagagcagctcttcagccagcgccaggctgcagttggcctccagcaggctgt

SEQ ID NO: 232847 - DNA, 157 bp, Homo sapiens
  chr7:31091704-31091861
  hyper
ggctccacctcagcgcccccgacccccgccgctgggatttcccgccgcagctcctgctccagtctgtgctgcgggtggggtcgggttgagcagcccggcgccccccaccgcgccccccaccgcaccgccctcgatctaaccccgcccccgggcgctc

SEQ ID NO: 232848 - DNA, 272 bp, Homo sapiens
  chr7:31092761-31093033
  hyper
atccgcacggggtttgaggggtgggcaagcaatgtgctaggtgggggttggggtaggggccagtgtagaatgcccctctgtggtgacacatccgggattgttcaaaagagtgtcgtcttcgtttcccgtggcgcggaggggctggggttggggatgccagggcttcagtggtccccagaagaaacgccctgcggggtctgtggggaaacgcaccggccttcccaggttgaagtgggcccgctgagacccctgcctgccgctttagaggcaga

SEQ ID NO: 232849 - DNA, 385 bp, Homo sapiens
  chr7:31232602-31232987
  hyper
ctgcatctgagagcactccacgcagattttcttggccggctccagctggaagccttcggtgtctccttttgtgtgcgcgggagcctggctgcggattgccgcgctgcccctagaggtcagtctgatccagggattgtctcgaatccgcgcagctctggacccgaaaggagaggctcagggagaggataatgcggttgccaagtgccaggcttggcctgggtgagaacccggggctgcgcgagcacggtggcctcggtgcgtcccccggctgtccccgccgcgctgggcggccctgccgcaagttctctctactttctcaacacgggtttgccaaagtcagaaaaggttgggatttttcttcaacgtgatatgactggggttagct

SEQ ID NO: 232850 - DNA, 625 bp, Homo sapiens
  chr7:31375702-31376327
  hyper
gtagaggggacagacggctgtctagtttgggcaaatttccctctacctggggcgtgggggcgcagttcctcctctctttcgggccttttcccccgccctctggggtttgaatgaacaggtgctaacacaccagcttagaagggcgcgttcagcacccgcgccagcagctgctcggcacctttgcccctcggtggcggctgccttgcgcaccaaaggcccaggggcgtaaaactggaggcgtagagggagagggagacgctgtcctttgcagaatggggcgcgggcctcgcagcctcggctcaggaagtcccgccagccgtgggaggagcagggcagggtcagctctcggctgcacttgggcaagagatagctggagctatcgccgcctgcgccgcgtccctgcttgtggcacaaggggcgggtgaaggggcaaccccctttctccctctccgagcgagtgcggggcagagcctccaggcccgcgcgcggcggtgcgctcgccgctctccatgccacccagcccctttcttgggcaggccaggtcagtgtgggcgccgcggcccgggttcgcagggcgcagtcccccggcccccagggcgcccactgcgggcgggacacgggcagt

SEQ ID NO: 232851 - DNA, 179 bp, Homo sapiens
  chr7:31528306-31528485
  hyper
tgtttctaactgagatgtaccgaaccgtgaaaggatgtgggctggacatactaactccaaggagcccgggtatcattgtagtccatgtcaatggcgccccctggtgttcgggggcgcagcagccctgtgcgagtcctgcagcaggccctcctggcccatccactcggtataccccactt

SEQ ID NO: 232852 - DNA, 642 bp, Homo sapiens
  chr7:32110361-32111003
  hyper
acagaagcgatcagcgcgcagctaaagggtttggaggtgaaaaggagggctgggtggggaggagagaaagtgagaagggagagaaaagcggcggctgagcaaagcgggagccggcgcgggcggtggggcctgacccggacgccgcgcacccggctccgccccgcgcccagcgccccgctcactccctggccgcgcctgccttcgcgcccctctgttttctctcacttaccagcagctctgctgacaagcgagaaaactgacaagtgagaaaagtcgtctgtcagcgcccgggctggtgtctgggctgtcaccgcgggcgcggagggaggggcgcgcgggcaccgccgtctgccgggcacacgctgggctccgaccccggccgggcacactcacccccgcagggcagccgcggccaccaccgacctgcggagctgcgtgggcttccggaaccctcacctcaacaagagctcggctccgcgcgcaagtaggagggaagggaaatccttatcctcccggggccagggcacgcagaagccgcgaggcttcgcggaggttgggcctggaggtcccccacagcctcactctcgcacccgccacagaaccggatccattttgaaatattgaagcgactgatggggacga

SEQ ID NO: 232853 - DNA, 161 bp, Homo sapiens
  chr7:32337796-32337957
  hyper
ggcctaggtgtttctatcagtgtccccgtgtctggatgttcctgccgctctgtctgtgtgtctctatcatgtccacatcttcctgtcgctttctgtctccctctctcggcactatcttcatctctccatcgcagcgtctccagccctatttccacccctcc

SEQ ID NO: 232854 - DNA, 47 bp, Homo sapiens
  chr7:32338917-32338964
  hyper
aagtttactccaaacaaggaagtcgggaaaatcgccacgcccacttc

SEQ ID NO: 232855 - DNA, 405 bp, Homo sapiens
  chr7:32467304-32467709
  hyper
tgtaaaagaagttatggacacgaggacgagaaacgggaaatcctgcgggagatagcgctttctcttttcccccagaaagtctccaggcagcagctctgtgagatccttaagcaaggtaaggaaactcacccgctgcgctgcggcttcgtggccagcagggctgggacatactcgcctcacgcttcagcaccggggacagctcctgcctcgccaacttcggcagctcttctcgatgtctcgccgcgggctgtgcctcacaggctacgggaggggagagtgtctccccacgccggggtcccggcctctgggttttagggagcgcgaatgggtctccgacagcaacgggagcagccggtggcgcctcaggctgcggtggcaacgagcccgactgcactacggctttgc

SEQ ID NO: 232856 - DNA, 330 bp, Homo sapiens
  chr7:32467739-32468069
  hyper
ccatctcagcgggccgggccggacccaggtgagcggccctggctccccgaggaatccacggccctcgcctgccgaaggcttactccctcctggtgccggggcgcccccagctgtctgctccgcctctgaccctgcgggctgcagcgaaggctgcgcgcccacccgcgggggaccggaacggagggtaatgcgggcggtgtccgcgcccgcctaacagtctggggtggatgggacttggggagtcgctatatagaggctgtccggaggctttactggaaattgaggggaggaaggggcgtggcattaggcgagggatacttttttctccac

SEQ ID NO: 232857 - DNA, 40 bp, Homo sapiens
  chr7:32468314-32468354
  hyper
cggggagtcagctccgctagttctccgcgggagagcaagc

SEQ ID NO: 232858 - DNA, 291 bp, Homo sapiens
  chr7:32767520-32767811
  hyper
ctgtgaaattaatctcgcagggggagcgaagccacggttgcgggggagcgaagccacggttgccgggaagcgcgggccacccctccctccctctcattcttcgtcctcccctcgcgcgccacccgtttttcctctttctccgttaataacggctgggtggctgggggaggagggaaggtggctccggcggagtctgggcgggcgcctcccactcagccgccagtcgccgtgggagccggaggatggcggcggtaacagcggccgccggagaggaggcggtggggaggcccg

SEQ ID NO: 232859 - DNA, 111 bp, Homo sapiens
  chr7:32768484-32768595
  hyper
ctcgcaggactcggtgcacagcagccctgaggatggcggcggcggcggccagcaccggccggtgggcgggagccccggcgggccgcgcctggtgatcggctccttaccagc

SEQ ID NO: 232860 - DNA, 118 bp, Homo sapiens
  chr7:32981766-32981884
  hyper
tggagccacgggagcgcaaggcctcccaagtcagggcccgaattccgcgtggtgccaaacggcagctggctccctgaatgcccaccctgaaccctggtaaaaaataaaaaaaacaaca

SEQ ID NO: 232861 - DNA, 427 bp, Homo sapiens
  chr7:32982544-32982971
  hyper
cgggcccgctgcagttcctgatccagcggctcccgcggccaccacgcgcccccagccctcgcatcctcgcgccccggccaggacgacatcgcggcacctgcggcgcggctctggctgcggccaagagggcacttcctccgtgcggcgccccttcccgccgccgccccgcgactcgcccgggaggggccccgaagtcccggcctcggccgccagatgcccgcctgcccgcggccggccccaagtcagtgcgcagagccccagagcccagccgccggtgggcggggagcgcccgctggcggcggctggagccgaggcggggcggggccctggttgggagcctggggaagcttccaggagcttcagggttcccgccaggccacactcatctccctgcccctttgaggttcccgaccgaggcaaggggtct

SEQ ID NO: 232862 - DNA, 196 bp, Homo sapiens
  chr7:32996871-32997067
  hyper
tcggggacacgccctctctaggcccagacttggtccccactggagttcccagcccccctccccgctgcggcacgcacattcccaatgccgggcggggcagggcgcagcaggcccgccctcggcgcgcggccaggctgggctcctcccctggagctgcggccgggagggcgggcggccggggagacggggtggcggc

SEQ ID NO: 232863 - DNA, 82 bp, Homo sapiens
  chr7:33943416-33943498
  hyper
cccttctcttatttttcccacgtcacagcaacgtgctcgcatcagctcctcggtgtgtcgcgatgttggcaatgttgcacta

SEQ ID NO: 232864 - DNA, 464 bp, Homo sapiens
  chr7:33943730-33944194
  hyper
gacagctagctgatcgtcaggtcccaacacttgccaagcgtccctcactcccacctcgcgccttcgtactttggttacaaaaatcatctctctgcgattgcaccccttttgagtagagggtgccactgcgtggggaggaggcggcgattcagcagggggatcacaggagctgactccccgacacccagtgctgcagaggcgagagggcgcagccgggctgagagagcgacggagctccgagctgcagaggccgccgcgcggcggcccccgccagagatgagcggtggggcgggggttcctccctcttttcgggtgaatgaatgattagtcaaacaccacctccccgccccggtccgcccgagattggaagggaggagtctcggagcgactgttcattttttaaggacgaaaggcgtttgcctcggtacgtttttaaatcgaccttgtgtgtgtttcaacttcgg

SEQ ID NO: 232865 - DNA, 140 bp, Homo sapiens
  chr7:33945360-33945500
  hyper
aggggagggggcgggagggaccggccctccgggacgccggtttggtacctgggaaaggtggcgctggcttgccccggggatgggagggtggggagcgcgcaccttggcgcttgccctgcgctggtcgatggggatgaagc

SEQ ID NO: 232866 - DNA, 147 bp, Homo sapiens
  chr7:35225351-35225498
  hyper
ctggggaaccaccgcgcctgcagttcgtgcacctcttcccggagctgcgccagggaattacggacgaactggaaggggtcgagaagggtcttggccaccacctttagctccaagccttttcgctttttcagatttgggatcctcccc

SEQ ID NO: 232867 - DNA, 57 bp, Homo sapiens
  chr7:35225678-35225735
  hyper
tcaggcacagcccatccgagtcaggcgaggtccagaaaggcctgactcgcctggcag

SEQ ID NO: 232868 - DNA, 110 bp, Homo sapiens
  chr7:35288337-35288447
  hyper
ggtggtaggcgtagcggtacctcttgttgtccacagggacgatgtccatcaggactatgtacttggcctcaggatccacccccgaaaaggacacccggatggttggaaac

SEQ ID NO: 232869 - DNA, 1141 bp, Homo sapiens
  chr7:35293044-35294185
  hyper
ggcacagacggatgcgcagcatccccagtcctcggcggacagccgggtagcccaacttacccaggggtttgattgtgttctccgtcgcctccttctccttagagccgccgctcgacatgagcgcggcaatggagaaggcgttggcccgagaggagagttggggcttgggggacgccgtgaactccatggtccccagcacgcggtcctggccagggacggggtcgtccgaactgccgtccagattccccaagggagacaaagacccgaaacacagctcaaagtttccgagagcagtcacagcggggccagggactccagaagtgtcagctccaacgactccagagctgcacactggcctctattccccaccgcaaagccccagagccgcagagacttcgaaggcagccggagaggagagggcccaccgagcactacggcgggtgcgcacgccccggggcgctcggcaggacgacagtctgcacagcccgaaggcggaaacgagcatcaactgcacaaagtcctggggtcctggagcatcccctccgcgtccttcctccctctggggctggggacagccgggatgtcccaggctgaggtggccaccagccgagcgcggctgctaggacgctggcgtggggagcgcggcgcggaactacggacagtgagccctggcgctcgctgccctgcgccttaatttgctggcggcggcgatcccggaggcccgcagccagtcagcgccgtctcacgtcaccgcttcctgattccgccgccgggggcggggccgcgggccgggcgcggagggcgcgcccagggtgcggcgcccgcgtggcctgtcgccccggctgttcggtaccccagcacaggttcagggaaaagggtgccaccactaggctgacgcagcagccatggacatccccacctggtctcacagccccgggcgggagggcggtgcgcgctgtcgggagaggacacatcaccgcggcctaacgcccgagatccgggcatggcccagttggggaagctatgaccagaccagtggaagcctcgggagttctcgctttttccattctttttcttacctgcgctcaaagttccaaaagaaagtagggaagcgctcagtagaatccggcgcctctgagcc

SEQ ID NO: 232870 - DNA, 39 bp, Homo sapiens
  chr7:35295132-35295171
  hyper
aaaacagggcccgacgtggcagagcgcgcatctcccccc

SEQ ID NO: 232871 - DNA, 1273 bp, Homo sapiens
  chr7:35296954-35298227
  hyper
taacgaatgctaacgaatgctcccttagctgggagctgcagggaccggtcccggcaggtctaaccaaccgtccgcaggcgccgtggtcgagagcagagccgagacggcggggcagggtgccaagcggagggcacagcctggcagccaccgttggcggcaggagagaatgggagaagggagacccgcttctcagcacaagggcatctgtctactcccgaacatggccggagattcctgtccacagcctccctccagctctttctggtagacactttaaaagcgacattaacgggcttcggtgcctttggattcctaaattaggtttacggaaaaggaaagacttcccaagaacagtgagaagaggaactgcagcccctccaaggccgctgcggcgcgttcccggggcgcgccgagagcagcgcgcggctccgtgccccgtggggagcgcgcggcgcggccttggatttcaccgcgagtcgggagggcgggtctgagccttgcctcccaggatccttccgacgaacaccccgcgggttttagtttatcgagccaaagtggtcccggagaagcgctccctcgcagccaagctgcaagaagtggccgggaacctacaggcctcgggccgacccaggaagcctccgcaccagaaagctcgaggagcccttacccaagtcttgctcgaagggcaaagcaaagagccagcacccctgagtgtcactgaagttcctggatggggtgtgagtgcgcgcgttccgtccgagacctcagtctcgcccagctatagagccgataaagggatgtcttgtgggcgtaaggcgcttcgcgcccatctccaaggccgatgtggtcaggaggtgaggggaaatgtccttctggcagaagcccgcggtgctgcgacgttgacccgcctggcctcaggctcagggcggcgggcagcccagggcacatgtagtttcagcagccgcgctacgtgggcgggggaccccaggccaccccacgtgtccgccctgggcctcctccgggtcccaaggcgcggcgcctccaggccttgtagcgtcttccccgggtccccgcgcgccaggccccgcagcctgctcacaggacagccctcggggctgcgaccctctcgctcctccccgcggccactcgctccccgttcatcccccacgagctcactaccgcagggaccggccctcagagccccgggcctcctcccggcagtggaagaatcagcgtgctaacattgtgtgcaaaactcgcagcgtgatcaaga

SEQ ID NO: 232872 - DNA, 168 bp, Homo sapiens
  chr7:35298621-35298789
  hyper
caaatctgtggcttcgaaagcgttgttcctaccgttgcatcgcgcacgggactattaacctggaaccccaagagggggagaaaagcggacaagggacacgtttcctgcttcgagatgaaggtcttgttggctgggtgccctggcctgcccgggcggacgcgtgggacc

SEQ ID NO: 232873 - DNA, 1026 bp, Homo sapiens
  chr7:35300788-35301814
  hyper
ccgcacgtggacaacgggcccgggcggcctttgtaatgttattttttcttttctgaagataattacctagtattctgcaggttcctctggtgcaacagagactgccgcggggcgggggagaaggtggtgaggggggtcgcgcatcgctcagtgcaggtctgtgctttcacttggcctgcgctcaggtcagtgcgccccttaccggagcacccatggcctcccgcgttaccccaaattttgtaggcagactgtcagagttcgaagccagctgtgtcctctgcgggccgtgtgaccctaggctatctgggctgctcggagccttagtttccctagttgtgaagagggagggtgtgaccatggcccggagctctccgaaaggctgtgcggattgctcggtggcgggatgtggagcgcgtcttctatgatgccaggtgctggccaagcgctcgatgcaggctgctccagttaggtcgatgcgatggcgggaagcactttcctctgcaatggagagacgccgacaccccgagcccgaaggcttgcaaggcgcgctctcgccactggggtcggggatccgtgggttctctatcccgcttacccactccatccttagcagctgtcgtcggtcccagacctctaccttggagagaccaaggcggcccagagcccaggagactactgcgcggtacgccaggatccagaagtggattctgacttctaaagacccctcccaagccaacgctatcagggtccctgcaagcggttgactgtggcggaggcagaaccaaaacctttgctctgcccgcggcgctccagcctctcacccaggacagtgctctgggctccagccgctgcagtggggtcgggacacagacgccgagttagaagccccgccgctgcaggtccctgcttggtcggcgcggtgacggtgtcgctggcggcggcgggggccttcctttggctgcccggccatttaatcagagctattatcagacagggcttgcaggatggcgccggccgagctttacc

SEQ ID NO: 232874 - DNA, 326 bp, Homo sapiens
  chr7:35576958-35577284
  hyper
actcgagcaccccccggggcagagcattgccgggtgagccgcatccctgcctggaacatatgagaggtgcggggtgtaggggaagtgggagcacgcggggggtctggggaggggacagaccgaaggcagagaccaccgcgacagacacctatcgaacttcacgctaaggactgctcgttttactgatccggactcagcccttagcgctgggcggtaccacgcgccgccagtgcggatcatctgggcactggcgccacctagtgctggcagcgcggcaatggcccttttaccgactcgcgcgtctatagtgcggcctcacacaacct

SEQ ID NO: 232875 - DNA, 257 bp, Homo sapiens
  chr7:35734777-35735034
  hyper
ggaacaggcagggcggaagtgcgtcaccggcggcacgcccctgcacatggacctcccccgtccccgccatccctgccgatcctgttgctgccgccttcccgccgtgctcgggctgcccgggactctagccgccaggcttcgcgtcgcccagcggcagatcgggctcctgggagcctctcccctggccgtttgctcggcctcggccccagctgccctggggcctagccactagctcccctggcgctagcctaccctgt

SEQ ID NO: 232876 - DNA, 376 bp, Homo sapiens
  chr7:35839772-35840148
  hyper
acagcgacattcatcgctacagtagaaactcacacaatcgcagccctttattagtattttgttacccagtagttcctgtgtccattcatttcctcaactggagtgtgagctccaagaggaccgaaccgggcaccgacaaggtgagccaatatgaatgtggcgagtccgcaatgggggctacagcggccgacctctggggctgtgccaggccactagagtgtgatggcgcgagggaagggtcggggaaacagggcctaacctcacttttcaccccgaaagtcaagatagccacggaaacagggatgaatggggagcacagacacctgcctcgaagtgtctcttcactttcactcacaaagccgtcgggtcagtaacc

SEQ ID NO: 232877 - DNA, 64 bp, Homo sapiens
  chr7:36192233-36192297
  hyper
agcagatctcgcctcgggcaatcctaaacagcctctaccaggcacaaccagtcctaggccccgg

SEQ ID NO: 232878 - DNA, 86 bp, Homo sapiens
  chr7:36406996-36407082
  hyper
gtggctgtgcccgcgagcgcgctggggtctccagccagtgggtaacgcatattgactgatctttcagagacgtttgtacccgttca

SEQ ID NO: 232879 - DNA, 244 bp, Homo sapiens
  chr7:36429677-36429921
  hyper
agccatgacccaccgctctaggcccccacccaccttcctctgtcaacctctgggcgaacccccaccgggcggagggcgcgtgtgtgcgcgcgtgcgcagtgtgtgcgggccggggtcgccgcggctgcggcctgctgtggttggtgggttcctctgagattttgttgtttcggtcctacagataaaactcagggaggaaggctttgagtctgtcctaaaaggctgttgcgagaggtctttcagc

SEQ ID NO: 232880 - DNA, 206 bp, Homo sapiens
  chr7:37873162-37873368
  hyper
aacagaaaagacaacgccgagcccccgggtatgagctcagaactctttacatgtttgatgctccaaatggtctagggcaggggggcttcagagccttggcagcagaacgtggtcgcgtagatgtttatctgattttctgttgcgctgctgctcaaccgccactacggaagtgcacactgccaccttatggacgtcttgagaagtta

SEQ ID NO: 232881 - DNA, 1125 bp, Homo sapiens
  chr7:37955577-37956702
  hyper
cacctcctacaagcctcagacgcccctggcagccttaggtgtggccgcccagttctcgattggcagccacagccccgggcgcctcctcgcctccctccatccttcctacggcctcaccctccgggaggtccgtgacgatggcttcaggcgagatgcacacgccacggtcatagacaggcagctcgtcgcaggccaggctttcgggccagctgtggttgtacatcttcatgaggggctcgcagtcgtcgcgcgcgcgttggcacaccgacttgcacggcttgatagggtcgtgcaggaactccagggtgcaaatgggcgcgtacatggcacagaggaagaagcgcagcacggcgctgcagttcacgtccaccagctcctcgtactgctcgatggccaggatggcgttctcctgcgtgctgtggtgcaggtggttgggcatccgcgtgatgttccagggcatgtgccggcacatagggatgcgcaccgcctcgcagggcgcgccgcgcacgcccagcgccaggtgcagccacaggcacagcgccactaggatggagaggaacatggcactgccctctcgcgctgcgaccccggcagacagaaagcgcccttctcttcctgccaccctcatctttcgctgtcccttcgccgaggaagaaatcctctggggcgcaggagagtttcttcccccaaactccagtcggcagcaaagcggggccgcggggtccggccgcggagctccgccgtctggcacacagggcacgagcagcgccagctctcagccttcggggcgcgaacccgcccgggcagctccagtcccggactccgcagctcggagcgcagccagccacggccattgcgggaccctatttatcccgacacctcccctgacgtgggctcggaacgctcccttggcagctgcagccgcggcgcgggctccccctcggccgccccacccccaggcccgtcggtgcagaagcggtgacatcaccccctctgggccgcagcccagggctggaagcctgctttccccctaaagtccctcctttttagtctggccagtcttttttcttcggaccaagaaaaagaacctctggcagttgttttcgacaccggatacaagagggt

SEQ ID NO: 232882 - DNA, 719 bp, Homo sapiens
  chr7:38217488-38218207
  hyper
atttccatgacattttcccacgagctggagcataaacccccaccgaataactgaagggaagcggaaggcgcagaaacgcggacgaagaggaagcgggcgcttgttaaaccgtgcgatgcacaatgcgggaaagtccaaccagctccgtgtttcaaagctggatgcccagatttcccacccattcctacaggcagaccggctcgccctctccctccttcccgcgtcgtttactggtcagtagaagattgacatgtcatctggccaataggttggctcctctatggaggcactcaggaaccagtcgggtctttggtccctcgagcgagatgcgagctgtgtgcgtcgacgtcagcgtgctgacgtcacgggccggaggtcccggggctgctgggtgcgggcggtgggctgcgcgttgtccgctggactgggtcccggtcacgccccgccaagccccgcccctcaggccggggcgcgaccgcggatccgcagttcccgggccagcctggggcggccggccaggaaccacccgttaaggtaggctgggtttctcgttcccctatttgacaggttggaaaactgagtctcctgggtcagatgacttacatgggggcgtacaggggacccgcggacggaggccatatcctggtcctgttctgtttcctgagtcctgcgcgagcctccaggggaggaggaggggcgaggcaggctgtgctcataat

SEQ ID NO: 232883 - DNA, 822 bp, Homo sapiens
  chr7:38670352-38671174
  hyper
tggtggcttctctgttaaatcgttcgtgtctgctgcacttaagtagccacaaaatcccccgcaagaaggaaggctgctgcaatctcccgccccgatctgcgggccgcgtccccgcgagctgcctgcgggcgcgctgggagccggcccggggagatgcgagcgcagggagatgcgctctgctccgggcgcagcgggcaagctgccgcacctcctacttctgttgcctggcttggggccaggagagcggcaacccggggccggctccggagctggacatatccggcgtctccggggccagggtctgcgggtccccggcgctgcgtcctcccgacccgctccccgcggcgcccgggtcgcgccttgcggcagtcaccgagctgagggcagggcgtcccagcgtccctggccccggccccgctccgcagcgcgccgcaccccgaggctcgggccccgcacagctgcagccggtgccctccggccaagcccccgcctggcgtccccggccccagccccggccgcccgccgctgaccttttcctgcgcgcggttgagtcgcttctggacgttcttggcgaagatgcccgtcttgatgtcggccatggctgcgggtccggggagctgcgaagagcagagcgcgcagcggggctggcggcggcgcggaggagcgggaggaggagcgggaggaggaggagagggccgagcaagggaggagcgggagaagcggcggggagccgcggagcgcggaggggtgagggcggggcgcggcggcgggaccagcttaaagcgacagagcgggggcgggatgcgtcgggactggctgtga

SEQ ID NO: 232884 - DNA, 385 bp, Homo sapiens
  chr7:39015596-39015981
  hyper
cgccaaaaccaccccggggctcacgccatccgcgcaccggctctgctgcctaagtccgaggacgcaggcggagggcgcggggctcccgggcgcccaggagggcggtgccgccggggtgcgctccaggcttggctgcaaaccccccaagaattagaaagcgggggcggctgctcagcggctgctgcggcctgggactgcagctcgcccctcctccgcaacttcccactggtcccgtcacctggctttctgtctagtgtccgcccaggcggggtcccaagaaggcgatgccaggagcagtcgcgccccctgccctctgtgagcccgcaggtttcgggcaagtttggctcagtccttgtcgatgctccaggctcggcttccctggcct

SEQ ID NO: 232885 - DNA, 609 bp, Homo sapiens
  chr7:39453762-39454371
  hyper
attcacactcattcctatccacgtttttaaaaatgcgaaatagtgatttaaatcagaacagaacctcttccaatgggggtttcctttgcaaccggggcttcgcggtgatttctgtgctgttttgagggcacacacctacataacacgtttgcagagataagggatctcaaactgttcccaaaagtcccagggactcgtaatatgcaaaccgagggcaaatgaacgtgggaggatccgaggcgctcgctgaaggggctctcctgcagtgcccaggcagagggagagtggagggggcggctgtggagtgaagggcggaagtgccctcgccgtcctgaggcctgggaccctcttgatggtaaatggcgctgttgagccccgatgcgcagggactccgcgggcggcggacttgacaggaagctttgctgcggggcggcccagctgcggacgcgcgggacgtcagggccccagcagaagcgccgggctgtgcgtccttaagactgcgggtgcggccccgcccaaggtcgccccgccctccatccttctaccccgcccccccaccacatttctgaaatgaaagagttatcaatcgctttagggttaacttaaaga

SEQ ID NO: 232886 - DNA, 359 bp, Homo sapiens
  chr7:39605669-39606028
  hyper
tagtttaccaaagcgcgcgaatgtaaaacccagaccatggtaagactacggtggaaatggaaggtgtctcactgagggtcccggttgccttctgcaaaggtgaaggtcgtgccggccacgcgaggaaatctgcctcgctcacaactcacaggcacacatcaacactgccaaccgagggagcccaaaatcaccgcaagcgaaaggctccggcggcggccacgggccacagcccgcctccgcgcacacgcagcccctcccgagcctccactcgccgtcttcgccccgccttcggaccggaaggagttgttggcgcttccggtggcctgcgaccccgtaattgcctcggtgatgtcgtgggt

SEQ ID NO: 232887 - DNA, 109 bp, Homo sapiens
  chr7:40174396-40174505
  hyper
agacaggaaaggacggacacccaagcccagcaacaacctttccagtctgagtgcccttggtctgaccgacagactagaagctggcccagcaggcgactagtgctcagcc

SEQ ID NO: 232888 - DNA, 167 bp, Homo sapiens
  chr7:40174829-40174996
  hyper
cggtggctttgctcgcctccctgcaaccccgttccgtgggcctgcggccggcctgccccgctctggccgcccagggtcgcctctgtcccgtgcgttgttgtgaccgagggctccgtgcgccgtggggtcccgctcctgcgcgtcccgcggctcgcgtttggggcctc

SEQ ID NO: 232889 - DNA, 226 bp, Homo sapiens
  chr7:41745165-41745391
  hyper
aaatgtcagggagcgggacctgcggaggggccggctggctccccgcggacagaggcgagccgggagcgctcgcgcaccagccaactgcccccttctgagtgcggagcgcggtcctccagcgactgcactagcaaagtggcccgctgccaccgcgttattcacctagtggaggcggcctgatttactggcgacttcacaaacccaactccacgctggagcatttgca

SEQ ID NO: 232890 - DNA, 430 bp, Homo sapiens
  chr7:42267545-42267975
  hyper
tcgctctttctctgcgctttcctgtcgagttcccttcaggttctggtttcctccgacggtggcaagggatgtttttcacgcctttcaccacttttgcccgcgcctgcgtcccctgcccgaggtcccaggccgcggcggcggcgcggtgggttcattagcgggcgcgccgggcccgcgcagcgctgtctgcagccgcgtcgccgcatccatcatcattacatcagcgcggggaagtccacgccgagttctcccggccccggcgcgccccagtcagcgcgccagcaaacagaacatgctggattgctcagagacggctctgggtgtctgggggcagaaggggtgctcccaggcccggctttgatccgcatttctgaagctggctttgggagacaatgcatctccgccagccaggccgcgggaaaagtgaaaa

SEQ ID NO: 232891 - DNA, 968 bp, Homo sapiens
  chr7:42275703-42276671
  hyper
taaaaggccgggtgcggggtggagcgtccgcttcggacaatctgcttaaaagtcgcttcacaaactctgcaagtttgggatcaatatttacaccctctctgccttctcccgcccgttttcccgctgctactcaagaaagtaactgtcccctgctgctctgtgtaaacgcggcaccttaaatgattattgcatggaccacggttactttgtgtgtctgtgcgcgctgcccctggaaaggaaaagaaataagagaatcccaaatcatatacagatggtacaactttcacttttcctctatgacgacgaaggcgcgcctctctccatccgctcacaccacacccccgccctccgaagcatagcccgggctggagaagccccagcggcggcggcccccgcggcggaggtccccgcgcgcacccaccatgcctcccgcctccttccgcccatcccgagcgccgtgcgcgcccgaagcccgagccgtagagcgccaccgcgcaaaggaaggagccaggcgcgtgcggggctcgcggagttcttctgaaccctttggatgggggcggaggcgaggggcgccgccaccactgcggcaaacttcgtcccccctccgggaggtgaaattctccaatccgtctccggccggtccgcgggtcggactcttcggaaaggaccttccaggaggagggagcgaatgcaagccttgctcggacgcctcaccggcggctctctaaatctgggcgccttttgacagccattttcactccatcccgtccccacgctggggaccacctctggccccggaggcgcgggcgcggccgcaggagcgggctgcggggtccgcgaaacaaagaacttcgagcgggacgtacctgcggcggcagcggctgtcaagtccccgaacttcccatagacccgcggacggggcgcaggctggcggctccccgctccgcgcggccgcgggcggctacggc

SEQ ID NO: 232892 - DNA, 123 bp, Homo sapiens
  chr7:42276911-42277034
  hyper
cctgagtgacagttctgatttggttcaaccgcgggagggaggggaaagagaaagaaagaaacccccagccgtacgcctctcctggcatccaatcgactttctggaaaaaggtcccatcccggc

SEQ ID NO: 232893 - DNA, 76 bp, Homo sapiens
  chr7:42277214-42277290
  hyper
ttgccggactctcctcgctccctcgcactctctcttcctccgccccggcccccgcccagtcccttttctttcagcc

SEQ ID NO: 232894 - DNA, 232 bp, Homo sapiens
  chr7:42277590-42277822
  hyper
ccgccgccgccgcctcctcctcctcctcctccttctcctcctcctcctcctcctccgcccctccccggtcttcacacagacacattcatgcctgctcctcctcttccccctacttgaccccgcgccctcccggcgcgccgaagccccacccacccggcgaggggaagggggcccgggcgtgatgtcacccgcgccctctctcttctctctccacaccgccaggacacccccc

SEQ ID NO: 232895 - DNA, 241 bp, Homo sapiens
  chr7:42533147-42533388
  hyper
ggacctactgctggcgcccactccccgcggccgctggccaagtgtgggctctcgggttcgtttccacccagcgcggcggtgttattcggagaaggaaaataaatgtctgcggttgctctgccgggctgcgggggcggtgccctggaaggaggggctgtgcatctgcaccatttctaggaatgtccgccctctgggaacccagccctgaagtgctctgagaatgagccgtgtttacggaaag

SEQ ID NO: 232896 - DNA, 866 bp, Homo sapiens
  chr7:42927719-42928585
  hyper
ggatctgtaagtaccaaaaacgcttaaactttcacactgcggttgtgtcactgaagcagtgcctgaaatctaatccctgagtgtgacgccgccccaaagggccccaagcaggtagatcccatgctgatgctcttttatcctggcctctcagctgttgaggagagtaattgccgggctaaactgataaagtttcattccaaacaattagcctagtctgcaggattgcagtcgcggcttggacaccatcccggtgtctgtcccccgcagagggcttgctaccttgctgtatcagctggcccagcaggtctggggccgcgcgctgcttacaggcgctggatctcgctgctcgtcgctgcgcgctactaggtcctgctgtcgtccgagtcgcctccgggactctccggaattgtagcggctgtagccggctccttgcctgcggcgcggagggcaggtcccagtggtaggaggatgtgttccctttgcagaatcagaccccctcctgggactgtggggaccctctgtcgccggcctccattggaggatgcgttgtccctggagctgggtgcgctgttgcgtgacctggggcctgggtggtgggcgggcctgtccatggcaaagggcacggctgcgcgctacttcccgagaacccgccagcaggctcttgggaagcagcgatttctccttagtcacagtcagagagggtgatgcgacacactgggcttcactgtgctcgtgaagcggagccagggtgaaaggatcatatggcctaaccctaaccctaatgggagtaacttcacctgcgtcccacaggccccgcaagagtgacgctgccaggcaggcgccgccctgttcggttcctgctgctg

SEQ ID NO: 232897 - DNA, 265 bp, Homo sapiens
  chr7:42951543-42951808
  hyper
gcaggcgcgtgcacgcagaggccgggacccgccgggaaatctcaaccgggcagcccccaccccgctcgaacgccgaggcggctccacccgcgcgagccccgccgcctcgggcacctcctgcatcacgtggttccgggccgggtgacgccaaacctgcgattcccaagcggcagcgcggcctcccgagccgggttgacgctggcgtggcggccatgtttattgagggcacctggcttctcccgcttgcgccgccgggtgagcctga

SEQ ID NO: 232898 - DNA, 44 bp, Homo sapiens
  chr7:43152000-43152044
  hyper
ggtgttggatatgcccagtacgcgtgctgggtgttggaaggatg

SEQ ID NO: 232899 - DNA, 329 bp, Homo sapiens
  chr7:43153364-43153693
  hyper
gctcaaacaatgtggcccctccatccccggctccagggcattctgattgctctgccgctttgacgtcccggccacttggctgattttcagagccatgatgcgcggtgtctctgtcttgcacacagaggctgggcaccataacttcttccctgccgaatttcagcgcgtagggggagctggcagggacacaggctgcagagatgcccggcttcctgtggttccgggcacagcgcgcctcagtctgcattgggctgacaccagagagcatgtggggattttcctagttgccgaagaagatattatttgacgttgctgtagttttgtgctta

SEQ ID NO: 232900 - DNA, 108 bp, Homo sapiens; identical to SEQ ID NO: 200958
  chr7:43622286-43622394
  hyper

SEQ ID NO: 232901 - DNA, 107 bp, Homo sapiens
  chr7:43769000-43769107
  hyper
gagactcttataccgcgggagactaacctgtgagcaacagaagcaccacgctacaaagagcatgacgagttcttccaggcttgggaaagcacgggtaaatgcccgcg

SEQ ID NO: 232902 - DNA, 91 bp, Homo sapiens
  chr7:43798005-43798096
  hyper
ccctccggtcggccggcacccaccacccacccctcgccaccaagctgggtgcagagaacagggcaggcgcacggacggttcttacggcccc

SEQ ID NO: 232903 - DNA, 213 bp, Homo sapiens
  chr7:43798608-43798821
  hyper
ggttaagactgcccgtagtttcggtttttatgtagacccaagagggcaggctcggcgtccgcgtgccgcgtagtccggcggctccaggagcgcgagcggctgggcccgggcgtagccaccgcagggccgctagctcggccgggacccgcctgggatgccctggggtctgctccgctggggcgaatcctgaggcgccacgcgaggcacttggcc

SEQ ID NO: 232904 - DNA, 77 bp, Homo sapiens
  chr7:43909236-43909313
  hyper
tagctgttactcccgccttccccgcagccctgtgaatgctcagccttgtgaatgctcatcccgccgctgttcgctct

SEQ ID NO: 232905 - DNA, 34 bp, Homo sapiens; identical to SEQ ID NO: 200959
  chr7:44122205-44122239
  hyper

SEQ ID NO: 232906 - DNA, 519 bp, Homo sapiens
  chr7:44143965-44144484
  hyper
tccgcgcgggagtgcgccacgcggggccggagcgcctattagccgccaggacctcggagcgccccgaccacccctgagcccctctggcttcggagccccccagcaccccttcccgggtcccctcgcccaccctaatccactctccctccctttcccggattccctcgctcaccccatcctctctcccgccccttcctggattccctcacccgtctcgatcccctctccgccctttcccagagacccagagcccctgaccccccgcgccctccccggagccccccgcgcgtgccgcggccatggcggccgtgcgcggggcgcccctgctcagctgcctcctggcgttgctggccctgtgccctggagggcgcccgcagacggtgctgaccgacgacgagatcgaggagttcctcgagggcttcctgtcagagctagaacctgagccccgggaggacgacgtggaggccccgccgcctcccgagcccaccccgcgggtccgaaaagcccaggcggggggca

SEQ ID NO: 232907 - DNA, 232 bp, Homo sapiens
  chr7:44240366-44240598
  hyper
gaagggttcaggccgctgtgggaggcccagcaccacccagcacaagacagtacggtatcccgccgcgcgcccgactccacctggcgagcagggaggggccaagcttacgcgaggcgtggcatcccgcccctcgctgcattgtacttccgggctcacatttctgcatccggagtatgagaaccctcaaccaggctgaccggatccggaagtggattgcgagccaggaggagga

SEQ ID NO: 232908 - DNA, 313 bp, Homo sapiens
  chr7:44349374-44349687
  hyper
gaagaaactggggacgagagagattccgacgccagcaccgtaggggccgcactcggcgtccgtccgcgcagccttgcagcgaccttcaaaggcggcgcttaagagccggtcacgcccctcctggagcggcggcccgcgggtagtcaccgcgcctgagcagccagaaccaggccgaggccgcgcggctcgcgaaggacacgcgggaagagcctttccgccggctgagccgtgggcgccaccgccagggaccccaggctcaccaagccacgcgcggaaccgcacggtggccgagaccgggcgggggcgggggcgc

SEQ ID NO: 232909 - DNA, 55 bp, Homo sapiens
  chr7:44530400-44530455
  hyper
agacaaaagagcccgacaagggcagcaaggaggttcctacgcggaaggaagcccg

SEQ ID NO: 232910 - DNA, 173 bp, Homo sapiens
  chr7:44621889-44622062
  hyper
aagaggacgcctgcgcagtgatatgtactcgccgtctcctgcaactccatccgtaccgaacactgccgcgccccgccccctcacacagcccggcgcccgcctacccccgcaacgagagtagagggcgcatgcgcaatgacgttcgcccttaatttctcgccccttaccccgca

SEQ ID NO: 232911 - DNA, 191 bp, Homo sapiens
  chr7:44645927-44646118
  hyper
ggttcctaccaggcgctagagatatcttactttcagaaattatttatgatagcagaagccgctggaagtccatagacaacctcatctctctagcggagcaaacagctgggctccagctggccctggcttctgcaactgcgcagtcggcgctgtgacgcccggcgcggctctgtgacgtcacgaatcggtcc

SEQ ID NO: 232912 - DNA, 43 bp, Homo sapiens
  chr7:44646791-44646834
  hyper
ctgtttggattaccgcgcagaccttggcgccgcccccacacct

SEQ ID NO: 232913 - DNA, 232 bp, Homo sapiens
  chr7:44788901-44789133
  hyper
tgtaagcggcgctcggggttctcctgagcgatgaaggctggccgggccttcgctccaacctgatcgttcctagctttggggccaggcagtctcacctacatggtacgcccctccgctcctacttacgtgcccaccagcacggcgatgtgggggccgtctgaggccgtcacctgctcgcggaggagctgttccgctcctgggctgaacgacgctgagcggccagcccccagct

SEQ ID NO: 232914 - DNA, 111 bp, Homo sapiens
  chr7:45128761-45128872
  hyper
gggtgggcgcctgcgcccggtcccaccctttccacagcatttacgagggagggtttcagggccaattggaagctgggttgcctcagggtggcattcgcccgtggccaggaa

SEQ ID NO: 232915 - DNA, 178 bp, Homo sapiens
  chr7:45151426-45151604
  hyper
ggctcaagcggagcgataggtcatgggaaacttagaaaagataaagaacctaggaagaaaggcttcggttgccccccgaccagtacgccatcctcatacggagtgcgggagacgaccctttgttgtcggtgctgtcaccctatccctccctgcttgcgtaggcgtaggagagttccta

SEQ ID NO: 232916 - DNA, 152 bp, Homo sapiens
  chr7:45197304-45197456
  hyper
tggtctgggggtgcggcctgagggcggaccccctgaggccccgccccaccccaaccccaaccgggcgtcccccagccgcgcccccagcgggaccgagcgtgacccagctgcggccggccagccatggagactggagcgctgcggcgcccgca

SEQ ID NO: 232917 - DNA, 222 bp, Homo sapiens
  chr7:45614984-45615206
  hyper
caatccacgaagcgcccctggcgtgaagtgtggagaggggagacaggtgtggagagagaaaggtttggccaaggtcagggagctgatgagcggccagacggcggccagaggggtccgccggtcttttgccgcacccatccccacagagggactgaaagtgggcgaggagagcagacccccagggcaagctccaaggccggctctgcgcgcagcgctgggctc

SEQ ID NO: 232918 - DNA, 646 bp, Homo sapiens
  chr7:45927932-45928578
  hyper
ccaccagcggtttgcgtagggccttgggtgcactagcaaaacaaacttattttgaacactcagctcctagcgtgcggcgctgccaatcattaacctcctggtgcaagtggcgcggcctgtgccctttataaggtgcgcgctgtgtccagcgagcatcggccaccgccatcccatccagcgagcatctgccgccgcgccgccgccaccctcccagagagcactggccaccgctccaccatcacttgcccagagtttgggccaccgcccgccgccaccagcccagagagcatcggcccctgtctgctgctcgcgcctggagatgtcagaggtccccgttgctcgcgtctggctggtactgctcctgctgactgtccaggtcggcgtgacagccggcgctccgtggcagtgcgcgccctgctccgccgagaagctcgcgctctgcccgccggtgtccgcctcgtgctcggaggtcacccggtccgccggctgcggctgttgcccgatgtgcgccctgcctctgggcgccgcgtgcggcgtggcgactgcacgctgcgcccggggactcagttgccgcgcgctgccgggggagcagcaacctctgcacgccctcacccgcggccaaggcgcctgcgtgcaggagtctgac

SEQ ID NO: 232919 - DNA, 2282 bp, Homo sapiens
  chr7:45959969-45962251
  hyper
ctgggattgcagtccgtgtgcacccccgtgcggggcgaggagaatctcctgtgtccaggatctttccaacagctaaacatcggtaccgctcccctcagctccggaaacctttaacccattttcactgaaagcgctttgcaatttacaagtactctgcacttagagaatcgagcaagtagagggccggctggggagggtccctccggcgaccgccttcacctttcccggagcgccttcagtttccccacatattatctccagtgagaagaaaagcggagtctcccgcagcggcacccagcaacccccaggcccttcggcgccagtgcgccgggtgctgcacgcagcgcacctggcgcgggcggctcacctggagctggcggcgctggcagcaggtaggcgcgcaggcggctgacggcactagcgttgacgcagagcccgcggccgtccagcagcgcctgcagcggtcgcgcctcgtcgggcgacggctggcagcgaaggccggagccacagcgctcggtgtagatgccgcacggctggccctcgctcagtgcgcacgtcaggcagcagccgcagcccggctcgcgcaccagctccgcgcacacggcgggcggaggcgcgcactgggccagtgcacgcgcgtcgcacggctcgcagcgcaccacgggacccaagcccgccgagctcgcgccagcccgcgccaccggcggcccgcggagcagcaccagcagagtcagcgcagcggcccagagcgtgggtcgcgcccgctgcatgacgcctgcaaccggggcacgctgcttggcaggctgggcgcgcagggatggggcgacagtacacggcgcgaagctgtggaatccaggcaggaagcggctgatcctcagcgcccagccgcagtgctcgcatctgggcggcccgggcgcgccggccgctatatagaagccggggtggcccaggacacgccccggaacggcgcgcccaggagtgggggttgggaggggggcgggtcggcgcaggcacggctgcgggggcccgtgcttcgccctgagcagccggggccgagctcgggggcgtgcagctcgagactcgcccgggcacctgctcctcgtgcgcacgcccggagcccgggtcaccttgtcgtctacaagaaccaaggtgtgcccggccaccccggcactccaggccacctcagcacccccggtcaccccagtcactcctggccaactcagcacccccgatctccttgaccccgccgcccttaccccttccgctctcggggtgaggtctccctgcggcgagccggtgtcggggaaactggcatacagcgctccgcattcgtgtgtacctcgtggagctttctaaaatttaattccgttggcaggcgaagtcttgggacatttctgacttacatttgggtctcagggagccaaggcactgcggggtttaatttacacccgctgggctgtttatatccccaggggcccacaaatacgcatctgaagatgcgcccggggccttcgcccctttccaggcttacttctcaacgcaagaagactctcacgtgttgctacaccgcaagtctccaattaagagtggaccggcaagcgaatgcgtccttaaggcagggcttttcaaatattttaaatgacaactgttcttcttgtcttgggtattctccctgattatgttttcaaatggagtttacacccatgacaaaagaataataaagacaataaactgggcactgctgaaacgtaattaaccaaatagtcctttaataggcaattttcattgtcattttttgaaggcgacttcgtattactgtattctcgatgcgttgggattctagcttatctctgcaatctaaacacttttcagtaaagttcgggggcgcaattgcgcgctgaggtcgctgtaactcctgtcggccttctctggcactcgagtttcttcagttttgtctgcgcaccccctcccttcggtgaccaacagaggacgctggtggtccaggattggattgaggattaaatttttcaaggcacttttccaaagagtttgtgggggtggagtgggaagcggtgagacctccgcgggaggagactttcctgaacgctgttgaaattggacgcttgccttaggaggtggataggtgacttgaaggagccctttgcagtttggagtagtaatagcaaatcaggagctcctccattcccctccagcacgaagccttgggtgaagttaatcttcattcatcatttctgtctctcctaatcgatctctcgcccagt

SEQ ID NO: 232920 - DNA, 335 bp, Homo sapiens; identical to SEQ ID NO: 200966
  chr7:47621011-47621346
  hyper

SEQ ID NO: 232921 - DNA, 67 bp, Homo sapiens
  chr7:47621853-47621920
  hyper
gcagcgcgcctccaggcgcccttcaccggggtcccccgccctgccgaggtgcgccctgggacctccc

SEQ ID NO: 232922 - DNA, 45 bp, Homo sapiens
  chr7:48075401-48075446
  hyper
ggccccttggttacctgttgcttatcctctctgtacttgctgtgt

SEQ ID NO: 232923 - DNA, 333 bp, Homo sapiens
  chr7:48075626-48075959
  hyper
tgttcctgctgtataccggcgtgatgtgctcccttctgtttacctggcgtggacatgccccctgctgtataccctgcatggaagtgccagcgctaggcgatcgtaaggcgcctgcaggcgtgtcagggcgaggcgtacagaccgacccagagcgggcgcgcggattttgcttttgcagctgcagctcctggcaactggtcaagcaggcagcgtccagcgcacccgcgaacaccaggtccggcagcatctgtcttttcccgcagcgtgcagcgcctgaccatgaggaacacaagcaaggaacttcagggcgccacgcaccgctacgctccctgc

SEQ ID NO: 232924 - DNA, 200 bp, Homo sapiens
  chr7:49812751-49812951
  hyper
ttacgtttcttactcgtaaacgtctatttctctgggtttctgaatgcaaagacgagaaagtctcaacagtctgctaaactaacacggccttcgaatcccaatctgaacacagtagctgaaacaagctgtccacaaagaggaaagccagagggggccaattaggaaggaagaaattaaagaaaagagaaaagccaagatga

SEQ ID NO: 232925 - DNA, 73 bp, Homo sapiens
  chr7:49813131-49813204
  hyper
agcgcgggccaaggcggggcctccagagcgggggcagcagaggagggagcggaacgggagccgggcggaggcg

SEQ ID NO: 232926 - DNA, 33 bp, Homo sapiens
  chr7:49814464-49814497
  hyper
aatgaggaagagtttccctcttatcttcctgta

SEQ ID NO: 232927 - DNA, 1503 bp, Homo sapiens
  chr7:50860138-50861641
  hyper
cctaatttccataacgcacatgctccaaggcagtcgtcaggcaggcgtttggagaggcaatcagcaaaggcgaagagttgcatcagaaatttccttctgcaaacggtaccgctcttatcacatttccacggctggcgggcggctaatccgcgagccctcaacttggtgttaggccccagcggcggctaacgggtcaccaacagaaccaaaaaaaaggtcctccgtacgaggctgggccggctcgggatttgggagtgtctggcaccactgtcccggacgcccggacgcccgggcgcgcgcgccgcggccccgccgcgcagtcggagcacccggggctgcagggacgcctgggcgcccaccctcccaggcggcggcccccaggagcgcggccttgaccgcagcccccgccacagcccgcgagccgccggcgtctgacaagatggttcaagaatgcaccgcttggactccacacctccccccaggggtcgggaacgcagcgcggagagccccgcggggcgcccggctgcctccgcctccgccgcgcgcccgcagccccagtcccgcctccgagcaccgcccgctgcgggcccggggcgccggagcccccggcccggaggcgacgcccttccgcccgccgcgcctccgcggggcccggcgtccccggccgcggccgcccagcgctcagacaatgacggcgcggggacccgcctggccgtcccgggccccgcggggacgccaaccacaaagtaacttgccgccgcgctccccgcccaactccgtacctgccgcgcgcggctccccgccgcctccgcgtggctgcgggcgacactcggcgtggccggcggcgggcgcgggtccccgcggggcgaggccggcgctcaagactgtcccgggcgccccgcgccgccggcgctgccgccacccaggggctgcgcggaaactttgggctccaccgggtctccgagcgccgagcccgcccggccgcagctcgcttccctctctgcctcctcccgacctccccaccccctcgatgggctttaaactcgcccggccccgcccgccctccccgcctctgccgccgccgccgcctccgcctccgcctcctcccccggctacttttcctgctcctcctcccgccgccgccgcccggaccgctcggcggccgccagcgcgggaggagccggggcctgggcgcagggcgtggcgcgggggcgcgggccgcgggccggacggccggggggccagaagctcccggaggttcctgccccgggctgctgagcgggttcccccctcctgctgtcctcgggactcgggcgcgggaccacgaccgccgcggctcaggaggcttcgccagtgaaaggacaaattggacctgtcccgaaagacaatttataagcgaactgtttgaaacgcacaaagtattaactgcgcagtccagatcctttatcctgggcgcagcaggacgggacggaagagctggggctgccccgtactctgtcgtgg

SEQ ID NO: 232928 - DNA, 1780 bp, Homo sapiens
  chr7:51383331-51385111
  hyper
tccccggcgcgccgcgctgaaaactacaaagtccaccgggactgcgcgctaccccgcggcccagcctgcaccgctggccgggatgagcacggcgcacctggctcggggtctgaataatgagcagggctgctcgtcctgtttgagggaaattactctttctgagagtcaaatcctgaatgtgacgtgtaatccctgcacgcaaggtgtggggatagcaaacagaaaccgggagaggtttgggcaaaagcggaatcgcgaagacagggatgggccgccagactcgcgggtccgctacggatgtctgcgcctcaggcctggccccactaggacgccccttccactgccaggggagaccctggaataaaggcagggagggagagctgctgccatgaaaccctccgggcaatccgaacaccttccgagaacgcggggcccgggcggctgcgaagccggggagccctcccctccacgctgccgggagagccgatcctggggctgccgccgaggccgggagagggaagacttgatgggaaccggccaggggcaagcccgcagggaagaggccggagtcaaaggccgggcgtcccctcgctccccgctccacccctacggcaaacacttggggggcctgaggaaagctcggagctgagtgggggctgtgctggcggggacccccataaggacgcctgcatacaaaccaccccgcgcgaaaagtgcgctccggccccggcccgacacggttacctgggcaacgacccgggtgcccaaagtacacagcacgcaccaccacccaacaccagcacccaacaccagcaccgcaccacctgctccaccactaccaccagcacccgctggggcggcagagagggcgccctgcccgggagcgcgcggtgcggacgcgggcgtccgagcccagggaagccccctctccaccccgcccgaccgcggggccgcttacccggtcgggggcttggccgccgaggcgcgcggcgcgtccatggtgccgggggccgggacgcgggcggtgctccgggcccgccgagtcaggcgctggctaccgccgccaccgctgccgccctcattcactttttccgcgctgacccatcgtcctcccacgcgggccggcggaggacagcggcggagcgcggcggacggaaggggctggaatcgtctctagcgggcgggggcgccgggagcgcagggaggggctggcggcggcgcggggcgggggcgccgggagcaaggtgcgccgcgcccccgccccggctgctctgccgcgcccaccggagcgccgcccccgccccgccccgccccgcctgctcagagtcccgacccggcccgcggcgagcgtccggggaaggaatcctccggcacctgggccctgcaccgacacccgcgggtgcggcagagggcttctccccgtgctcctccacccctggggggagcgcgaccctctctgggcggagtgggggatcccggggccggcgcctcctggcggagttgggggaggggaaccacctggagcctggaggccgtgcgagggcgaggtgggcggaccagcccgggaggactgacgttggagggtgagaagtgagtgtccggcaccgctctctgacctttatccgtgcagcaaatgtctagtgcgtagggtcgcaaagtgggagtcccgaccgggagcgtcaggaacacctgggaacttgttagaaatgcagatttctggggcccaccaggtcccacggaatcagaaacagtgcgggctggagcgcggcctcgctttgct

SEQ ID NO: 232929 - DNA, 781 bp, Homo sapiens
  chr7:54609622-54610403
  hyper
gcagttaataactgggtaagcggcatttccctaaatggctgttttcctcggcccacccgtctctcccccatcccattgctccccggtcctcagcaatgccccaactccctcccggaaccttttgctccgagccccccgccagcgccgcaatcccgtcactgtattgtcctcctcggcaccgagcgatctgatccgccgagccagaaagacacccgatgggggagagaagcaaagtggaaaaaaaccgacgtccctgctctccagaagggagaccccagcggcgccgacgagccctgcgccctccgcggccgcccggcgcgagctcccgggcggggcgctgtccagcgcgcacagagttaaaggcatcatcgcagccattagagggaaaagttgcggcgccgcgagcccggcgaagtcctcagcccgccccgcttgcccactccccacttcccgagccggctccgtgtttagggagggcagtgatcacgcaagccggagcggcgggctgacgttggacgagctgccaggtagctgaaagcaggcagccaggcagccgagacacttcccagcgattccagcctgggctccgcaggaagcctcgctgaatcccagccagctggttctaaccttccagaatcgcaatcccttctccccacagccagccctcgccaagcaagcagcaggatgtttgcagtgtcgcgcccagggctctgagactgagcctgccatccactcgcacgcctttctttcagggcttttcggctgttggctacactgatgt

SEQ ID NO: 232930 - DNA, 502 bp, Homo sapiens
  chr7:54612304-54612806
  hyper
tgttttgcagcaaaatttaccgagtttccgcggaacgtgacggcgaccgaggggcagaatgtggagatgtcctgcgccttccagagcggctccgcctcggtgtatctggagatccaatggtggttcctgcgggggccggaggacctggatcccggggccgagggggccggcgcgcaggtagcggagcccgccgaccccgcgtctccccttcgctcgcccggtcctcagggtgtccggcccggggctgggggccgaggtgctgcctggacacccctggggacctgcccggttctgtggaagcgagtgacccccagggcttctagggagggaaagggaatttgtcctggggacgcgaagttaaaacccagaaggaagtcctgctgcccagtttcttcctgttaaaccgggaagcgcctcctcctgtaagttctggtacttaggcagatgcccgccttgcccctaccacgctgccacatcccgggacatccgggagcccctttcc

SEQ ID NO: 232931 - DNA, 743 bp, Homo sapiens
  chr7:54614068-54614811
  hyper
agttgagcgagaggcggcgcccctgcgagccagcaagagaatctggggccaggagcgcggggcgggacggcaggcgggatggtggccggaacaaaggcgcgaaaattcgtcccggagcacttcaccttcactcacgccggccgccccacccctggcgcccgcccgcctcacccctggcgcccccccgcctgcccgcccgcccacccacctccgggcgcgcgtccgcacgggtcaacccgcgaaaaagacccggcggctcccggccccgcctccagagcgcagcatccgcgcggcagggacagcgccgggacagcgccgggacagccccgggacagccccggggaaagcgcggggacggcgtggggtatgccagggacagcgtggggtatgccagggacagcgtgggggcggtgcggtctgggcctggacaggggtggccacgcccctggtcgctcccctgtccccaggtcaccctgacggccctgcccggagccgcgaaggctatgctcgcgtgggagcgggtggtcgggcgggcctggcgcgggactgagcgttcgctccttgcccgcaggtggagctcttgcccgacagagacccggacagcgacgggaccaagatcagcgtgagtgcggggcgcgccaagggccgcgggcccaggctcgggacgcacagcccttccctgtccccgagaaggcggcttgccagcgctgcaggacagccggacagccgggtgccccttgctt

SEQ ID NO: 232932 - DNA, 592 bp, Homo sapiens
  chr7:54731845-54732437
  hyper
tgacctcccagcgccgtcctgggctgcaataatcaatcaatctgtgctgcatgctggcccccactggacagtggctaattgatccattcacgagggaagacgcagatctgacaggccgcgcgcagttccacacagccgcgctgggctcccgtcacctccctccgggatgagtgtggaaggcgctctgcaccaggagcactcagctttcccaggccgctgttgccgggcacaggctccgggcacacgagggggttccgtgcagcccgctttgcagagggaacggaggcgcagagagcctggcccgggcgcgcggccgcgagggtcgggagcagggaatccaccgctgcagctcagctctgggcaacgctgccacctgctgtcccgcgcagccgcacagcggcccgggcgtcccagcctccgcgagaaagactgtgcctgacctgcacggaggatgacgctgaccggccggtgatgaggaagccaccaagggaagcaattagacacaggacgtgctggacctgcaggctgcacaggccaagggagggccccaggcgcagcgggcggatctgcgggtccgcgggctgcgtccctg

SEQ ID NO: 232933 - DNA, 1513 bp, Homo sapiens
  chr7:55086551-55088064
  hyper
tccaccgcctccggcggccgctggccttgggtccccgctgctggttctcctccctcctcctcgcattctcctcctcctctgctcctcccgatccctcctccgccgcctggtccctcctcctcccgccctgcctccccgcgcctcggcccgcgcgagctagacgtccgggcagcccccggcgcagcgcggccgcagcagcctccgccccccgcacggtgtgagcgcccgacgcggccgaggcggccggagtcccgagctagccccggcggccgccgccgcccagaccggacgacaggccacctcgtcggcgtccgcccgagtccccgcctcgccgccaacgccacaaccaccgcgcacggccccctgactccgtccagtattgatcgggagagccggagcgagctcttcggggagcagcgatgcgaccctccgggacggccggggcagcgctcctggcgctgctggctgcgctctgcccggcgagtcgggctctggaggaaaagaaaggtaagggcgtgtctcgccggctcccgcgccgcccccggatcgcgccccggaccccgcagcccgcccaaccgcgcaccggcgcaccggctcggcgcccgcgcccccgcccgtcctttcctgtttccttgagatcagctgcgccgccgaccgggaccgcgggaggaacgggacgtttcgttcttcggccgggagagtctggggcgggcggaggaggagacgcgtgggacaccgggctgcaggccaggcggggaacggccgccgggacctccggcgccccgaaccgctcccaactttcttccctcactttccccgcccagctgcgcaggatcggcgtcagtgggcgaaagccgggtgctggtgggcgcctggggccggggtcccgcacgtgcgccccgcgctgtcttcccagggcgcgacggggtcctggcgcgcacccgaggggcgggcgctgcccacccgccgagactgcactgtttagggaagctgaggaaggaacccaaaaatacagcctcccctcggaccccgcgggacaggcggctttctgagaggacctccccgcctccgccctccgcgcaggtctcaaactgaagccggcgcccgccagcctggccccggcccctctccaggtccccgcgatcctcgttccccagtgtggagtcgcagcctcgacctgggagctgggagaactcgtctaccaccacctgcggctcccggggaggggtggtgctggcggcggttagtttcctcgttggcaaaaggcaggtggggtccgacccgccccttgggcgcagaccccggccgctcgcctcgcccggtgcgccctcgtcttgcctatccaagagtgccccccacctcccggggaccccagctccctcctgggcgcccgcgccgaaagccccaggctctccttcgatggccgcctcgcggagacgtccgggtctgctccacctgcagcccttcggtcgcgcctgggcttcgcggtggagcgggacgcggctgtccggcc

SEQ ID NO: 232934 - DNA, 189 bp, Homo sapiens; identical to SEQ ID NO: 200984
  chr7:55639104-55639293
  hyper

SEQ ID NO: 232935 - DNA, 402 bp, Homo sapiens
  chr7:55640382-55640784
  hyper
tcccaagggaggtcgtcctgtcgccctagactaaacccaggaaggcttttaaaagaagcagagtctccgcggggggaagcttgttccctgagaggtggccgcagacgaacccactgctcagtctggcatcccgaagccgctccgctcctggctctccccgctgttcctgcgcgcagcgggggcagtgcccccacacccacgcgtgatgggaaggccggcctgggggtgggaaggcccaccgaaatagatggtccccacacctcactgcttccttggatgtggctattttttatgccagtgttctcctgctctgaccctacttgaacttgaccgcaaccggccccgccttgcaggccaccctcccgcagcagaaaactgtgcggagctcgcgctgtcctcgcc

SEQ ID NO: 232936 - DNA, 169 bp, Homo sapiens
  chr7:56019824-56019993
  hyper
agcccaagtcatccgtcgctgggccggggagggggacaccgcggcggccccgccgagtgctacctgggcactgagcctgtggggagaggcgacccagcggggtggagagagataagggaccagtaacgtccagcgtttgtccgtggtattgagcgttctgtgggtcaaa

SEQ ID NO: 232937 - DNA, 209 bp, Homo sapiens
  chr7:56119352-56119561
  hyper
ggagccgtgcagccgcggaccaatgagcgggcgccggacgacctgtggcccaatggcggcggcgcgcgggcacgctgggggccggccagacgggccgacttttccagaagacccggatagttcctcccggccacgccgcgccggctctgggcactcagcatcgtttccttttcctccgctggagcagctatggcggcggtgaagaccct

SEQ ID NO: 232938 - DNA, 211 bp, Homo sapiens
  chr7:56174011-56174222
  hyper
gtccggacggccgcgctttggtctcaaaccctgcgatggtctcacctggccggaggggccatgcgggaggtgcggcttcggcttccacgcggcatcctaggtaagcgacggctaggcctccggacgtgggacaaccaccgaagagctaagcgacttctgaggagaccggaagatgggaggcggggctggcctcaacgcgcaaccaaccagc

SEQ ID NO: 232939 - DNA, 545 bp, Homo sapiens
  chr7:56183616-56184161
  hyper
gactctgcccagggcgagcagcgccgcgccgtggggggacgctcctagggtccccggggcactggttgggggaggtgttgggcgcacgtacccaggctcaggtgaggcgagtgcgcatcttgggatgcagctggcgctggcggcgcttgcgctggccattgaggagcttctgcgcgaccttgcgctcgtgcccgccaggtgcaggccagttggtgcgcagcgcctgctcgcgccgagtccggcccttgctgcgccctgccccgcaggccgggaagtcgcgcaggtagtagtagtccaggcagtcgtaaagctcctcctcgtagcttatgggtggcggcggccgagccagagcctgcagacgtggaagcgcccgctctgcgggcgcttccatcctgcccaggcctgtggccaccggcggccacctgcccgcgtctgggcgctcctggaagacccagcagccccgcctcgagttccgatgggctccgcgtgaaggtgggggtgccttcggcgacgccacagaggcggaccttcgacgacgtcacagt

SEQ ID NO: 232940 - DNA, 311 bp, Homo sapiens
  chr7:56355477-56355788
  hyper
tgggcgccggcgcccgcccgcgcggcacagacgcggggagcgcgcttggcgctgacacagcggcgacggcggcggcgttagccggcgctcgagctgtttcccttcctggggcgccgaccccgcccgcttgcttgcttgcctgcctgcctgcctgcctggcgccatgcaagagaaggtgccaggggacgcggagcgacgagaggcgcgcggtcccggacagctccgtctctggcgttggcgctgcagccgtgacggaggactacggcgacgactagggccgctctcccagctctctgcgtgccgcgccgctg

SEQ ID NO: 232941 - DNA, 78 bp, Homo sapiens; identical to SEQ ID NO: 200986
  chr7:63767196-63767274
  hyper

SEQ ID NO: 232942 - DNA, 36 bp, Homo sapiens
  chr7:63767574-63767610
  hyper
attacaggcgaaaaccaccgcgccctgccgccctgc

SEQ ID NO: 232943 - DNA, 281 bp, Homo sapiens
  chr7:63767730-63768011
  hyper
tctcagcatgtctagctaggcgcgcaccgccgtgtccccagggcttcgcaccgcccccagacttgcgcatgctgggattgtaatactgtcgccttgccaccaacgggctacgagcggttaagagactacagctcccaggatgtacggtgatggcacccgtttggactccgcccctctgcgcgtctagagctgttctcccgtgcggaggggatcctggctgttcccaaatctcgcctgcctgcgaggagccagcgtggcccgggcagctgatctcaacctgt

SEQ ID NO: 232944 - DNA, 318 bp, Homo sapiens
  chr7:63774383-63774701
  hyper
ctctgatcctagttcgcgtctccactgttccatctcctccgttcctggagttcctcggtgactctactatagcttctgttatcctgtgacctgcaggtactgggagatccatagggaggacggcggaacatctggaggctgggaaatggtgagtgcgtggagtgggtgtcccgagaatggggaagaggctgtttgaatccggccggaaccggctgcggtggtatctgggccttctcgcggtctgctctggagtctgcatccccgagtccccgcgggcacagctcaatcctcatttccctccatcgcagattaggggct

SEQ ID NO: 232945 - DNA, 284 bp, Homo sapiens
  chr7:64030435-64030719
  hyper
aggtagacctgagtggtgtacggctggtggcgggtctggaaggagcaggtgtagaggccctcgtcgccgagccccacctcggtgacgaggatggagaactcctcgggggtgttgatgagcagccgcacccgcgggtccctggtcctgcggtcgttgccggcgtacaggatgttggagcggttcagccaggccacgcgggtcacatgctcgtccatgaagcagctgagggtggcgttgtcaccttcacacactgtgtagttgtcggcaggagagttgaactccag

SEQ ID NO: 232946 - DNA, 124 bp, Homo sapiens
  chr7:64254687-64254811
  hyper
gggcctgagggggcgggttgttaaacgttatccaatcagggacgccgggctgggaacggtccaatcaggcacccagctggagcggacatgacgtcttccgggaggcggcggggtctttgtctcg

SEQ ID NO: 232947 - DNA, 223 bp, Homo sapiens
  chr7:64337834-64338057
  hyper
ggctctgcctgctccgttttcctctgcttagacaggctgacagccctgacaacctgtcgcccgagtgcgcctcgcgaatgcgcatgcgccagtagcggggctccaggcgcgagccctgagctgcgtctcgcctcacagtgaacgccactgttgcctggcgacgggtccctgcgtcatggcggagaaggggacctctgtggacgtgcatcgccgttggactctc

SEQ ID NO: 232948 - DNA, 978 bp, Homo sapiens
  chr7:64348611-64349589
  hyper
cagccagaggagggcgctccctcgtcagatgtccctgtctctatgggggtccttcctcctgtgagctccgtggcctcgcacaggctgctcaacacctctgagctcaaattcctgctcccagggggaagcgggttatgaagatgagagggagagagagcgagctgtaagggaagcaggtgacacggggctggacagggaagggcctggctctcaaggaagggagcttctccaggtggcttcctcctctgtcaaatgggcccacgaataccctattgatggtgagaattaagagatacgaaacccattcgttctttattatgatgatttttattttcacagtagcacttagcacctgcccgccctccaccttctccaccacccagcaggagcggggcggcctggatctgttttctgcccctgaccagggggccgcgtcttcggcaaagtcttcggggtgagaggtccggctcctggaggacagcgggatgggagagtcccgttcacacccagccccgcagagccggatagaaacgctgccactgccgactccatgctgccgggaagtgcactgtggaggccactttctggaaagaagaaaccgtctgaacacaaagttgctcaagccatgttcatctatctgccagggaaacggaggccctgagtgccagagtccaagtcaccctgcaagagaaaactctggtggagcccagggtgtccagcccctgtccacccagccgccgtggtcaaggttaataagggcaaggggccaagcagaaccgcctacaaggaaccgagtgtccacaaagcaggaagcgaagaacgtttctcctacctagagcgcagccgttttgcggaaggcacagtccgggctccgggagccaagcagggatccgggcctcgttgcggaggggacgcccgggctgagctgagctcacttgctggcggcggcagcccctgcagtcatggggtcaccggctt

SEQ ID NO: 232949 - DNA, 542 bp, Homo sapiens
  chr7:64407771-64408313
  hyper
cccgccagccgcatcgctctgtccctctcatgtcaggcaagccagttccggaccgcgtggcaccaggagccgccaggagccggggcgacccagaggtctccagcgacctggcgtccggcgaggacacagcccccaggaggggttagaccacgggagccggagcccgagtcccagggccgccgagccagtttagagtggtctccaggccctagtgggaaggggctccgcgcttctgggcgtccacaggagctgcatggccctgcccgctgacgcccggtcgggacgctccacaccctgtgtgggggcggaggggacgcggtgggtgcggcctgggcgcgggtgggctagagcctggagaccgccgggagcccgacttcctggcgctttgccctttggggagcggagccaaggaacagcgccaacctctctccacaagccagggaccctacgacccaccgccgcaggtgagctccgcccgggcgccccctcccccaccacgcctggatccctgccgggctccccgagccgagactgtgccttct

SEQ ID NO: 232950 - DNA, 477 bp, Homo sapiens
  chr7:64700148-64700625
  hyper
cgccaggctgagcgcgagggcggggcggggcgtccatggcaggggcgggtgtcctggcgtcctcagtctcccagagggtggcgacccccgcgtcccgctccggcaccggcgggaagagagcgcctcccggaatctggtgggcaaagagggcggctccttacgtaggcgggcagagacagaagctggcgtggccgggctcctgctcccctattctccgacccccgccacctagcccgcgccacccagggctcctggatcgtctggctcggggcctcctccccgctgcgttccctccctggcggctgcagagccctcctgggcagcggaaacaaacttccccgagcaggaagcccgtgccccagcctcctctcggcaaggaccagcccgcggaacaccccggcccctcggcgcctgccctgtccttctggctacgggtccaggagggctggcatgagaccaatcgcgaccctgcggttc

SEQ ID NO: 232951 - DNA, 766 bp, Homo sapiens
  chr7:64712193-64712959
  hyper
tcccttgctgccttaagtcccgctgtccctgtcacccgtgttcccgtggctctgggcccctgccacgccaggcgtgctcttctgtttctggctgtcccaccggcgatgctgcgcttccacaccacccggcgcacaggcgttggtagatgtggaaggtaccaagagcggcaggaggaaggggcgcgcggacacccagccccttcccgcgcacccagagcaggaagagcagcgcgcacccggtcagcgacgcggcgggctccactgtggcgcgcgcactccgagcacggagggctgcaggctcacgccacctggctccgcgcccatcccaatccgcacccgccgcccaggaaccggggctcaccctccgcctgacaattgtctcggggtgccgagggtccgtggcccgttgcccgggaggtgaccactgaggagtcgcgctgggtatcggaccaggaactcactgctttcattggctgcggaggtcagaccgtcccaccctcttctccccgccgccgcggcaaggccagggcgaaagggacaagtgcgctgctggggtcctctgcgctgtgcgggtccgggactcagggttcccggctgctaacaaggctgcgtagcttccccctcccctcctccttaggtggcaacttgtggacacacccattaagcggtcaggcgtcaggtttcctcccgagaggtgggaggcgccctggccttgattcatcgtgaagctaggcaggagatttcccagccacggagggtggaaagc

SEQ ID NO: 232952 - DNA, 660 bp, Homo sapiens
  chr7:64734126-64734786
  hyper
ccctgtccataaagcgcactaatgctggggacggtgggtgtgggggagggtcctggagccttattcaatctgtcagagtaggaaccgtcctatcaggcacgcagttggggaggagggcgtggcttccagcgtttggcgcggcctttgtctctggctcaggccggagcctgagatccatctctactgtcccgcgtgttgcccctcgggagcactaggtgactttgtcacatcctctgttgccctgagatctggaggtactgggaaatgcatagctaagatgccaggacatcctggaaaccaggaaatggtgagtacgcggggttgggcatcccaagaggggagagtgggctggttgaaaccagcggaaccggcctccccacggtcagctcccgggtccacagacctgagtccccgttggcgcagctgggccctcagtacccccggagagtggggtggggggcggtgcaagacggcagctgagccagcggactttgacccctcaccgtcctcttcccgcgccgcgacctgcctgaaactctctgggcagcgctgcacccgcagccccgactctctcccagattgttcagggatgacagagggtcattagagcagaatcccgactcggtgggtgcgtgggaggagctgcggccagtggggtcc

SEQ ID NO: 232953 - DNA, 36 bp, Homo sapiens
  chr7:64838772-64838808
  hyper
tcgctgcagccggcgctccacgtctagtcttcactg

SEQ ID NO: 232954 - DNA, 60 bp, Homo sapiens
  chr7:64974421-64974481
  hyper
aaaagccgcggtggcaaaaatgcgcggcggcgggggaaaaagccgcggcggagtggggcg

SEQ ID NO: 232955 - DNA, 593 bp, Homo sapiens
  chr7:65509014-65509607
  hyper
ctgtgacccagaaacgctggtaaatgaatgagagaaggagggggcacattgaaaggcagccggacacggaggtgctcggccccgcaccccagacacaggttgtggaggttcggaggggcttgagtcccgttcgtccctgtccctatcccggggccctcccggacagggccagccagccccctgccctcacttccgtacgagggtcgcccagtccccacggctctcggctctcagaggtccaactgttaggctcctcgcgtaccaaaagggacgcgtccagactagagtctggacttccatgaggtccagactcgtcgcctctggctgccagcagacaaggaacttcacactctacagctctccccaccgtcgccaacagcgccaaagtgccagctccgcacgccaaggtgcaagccaggagcgccgcgcttcatgccgggagcttggcggactcggaacctcgcgccgcaggttctcctttctcgggggtgggggtgttggggggggtgggggcgtgttcctgtatccttcgcccaggccgacttcagactgctgagcgtttgcggacaggattatctcgtgttttctattgt

SEQ ID NO: 232956 - DNA, 37 bp, Homo sapiens; identical to SEQ ID NO: 200997
  chr7:65579919-65579956
  hyper

SEQ ID NO: 232957 - DNA, 104 bp, Homo sapiens
  chr7:66093260-66093364
  hyper
catctgtgtgtcccggtggaaaaacggtcacggtggggagtcactgtcattattcattgaactcaagcgctcctattttgggttttctcgttcggatttctgcg

SEQ ID NO: 232958 - DNA, 494 bp, Homo sapiens
  chr7:66309613-66310107
  hyper
agccggagctagccggcttgcagtggccattaaggagcttctgcccgaccttctgtttgtgcccgccaggcgacaaccgcttggtgtgcagcgcctgctcgctcagcgtcaggcccttgctgcgccctacgctgcaggctgggaagtcgcgccggtagtagtagcacaggcagtgggaaagctcctccttgtagcttactggtgttggccgccgggtcggagcctgcgaacactgaccggccggctgtggccacgcgtctgcgcatgcgcgcttctggacgacccggcagccgctcctcgagttccgattggttccacatgaggggcgtggctctctgtcgtcactggggagcgccttcgctgacgtcacaggcgcgggccctcggcgacgcaatagcgccaggccttccgcgtcgtcagagtgacggtacagtgcctggagctgggctgttttgtcttcagagtggtgcctggtaaccgcgacttccccgcca

SEQ ID NO: 232959 - DNA, 551 bp, Homo sapiens
  chr7:66386845-66387396
  hyper
agagactcacgtacgtccacaaagttaaatggcatagtggtgttccctgtgtcaagcttggtaaatatccggaatggggtggattctttcttcatgtttttaataaaatgaggagtgatcgcaaggtaatctagaggcatgtagtttcagttcccttgatggggaccatcagaaataaaaccaggcttgttgtgctgttttgagtcgtttgaacgccgtacccatcggacagctggtgaggaggcctttgtggaagaatctgatgtctgagtttagttctcaactagcaggtgacagccctcactggctgatgaatggtgagcttctctgaagcctgctttgtaaagattgtggcttccgcctgaactgcttctttcctgcctcaaaggtgagccgctacgggagggaatgggaagaaaaactccgagactgctgatgaatatgtgataaagtggtttgtctcgatagcaccatcagcttgggtcagcttagggtctcagcatgtgtatctcatttgtagatgagtgttccatcagcgcttgaccgataag

SEQ ID NO: 232960 - DNA, 268 bp, Homo sapiens
  chr7:69063231-69063499
  hyper
gcgggggcgggagcgcgcgccgagagaggcgcggggagggcgggtgcgcgggagcgcgcgcactcgagcgagcgagcgaaagcacgaacgagcgagcgagcgagcgagcgagcgggcgggcgcggggttgggctgaggcgggcggcggcggcggcggcggcggtgggctggccgcggagggggaggagcgggagctgcgcgaggcaggcgggcgggcggaggatggggcagtgcccgggctcccgctgcagccgcccggggacacgcc

SEQ ID NO: 232961 - DNA, 67 bp, Homo sapiens
  chr7:69063679-69063746
  hyper
ctcatcgactgactgactcaccccctcccttttttgaggaagggtgacctcttctctgggactggaa

SEQ ID NO: 232962 - DNA, 240 bp, Homo sapiens
  chr7:69065126-69065366
  hyper
gcaggagggagtcgcaaagccgtgcctggtctcgtttcctcgctcgcctttcccctgcgccccctccctgcaccccctccacagcagatgggcagaaagaaaggggttcgggcatcacaacaatgcgccccctctccacagagagctctgcccccactccttcctcctctccctccccaatcatggcttcttggctggtggaagtctctttgctgggtttggggcgcctgtggacggttc

SEQ ID NO: 232963 - DNA, 581 bp, Homo sapiens
  chr7:70060814-70061395
  hyper
gtggggcagttttgtggttccggcaccgacaccgtccctttcacacggtactgagccgcgggctgcttcggggcggccctccccgccccgtgccttgccgggatggcagagcggatcagaagctgcgcgcgctctgcctgcgcgctttgcctgcgcgctttgccgccgcaacccgcgcagcagccaatccgctggtgcactgcaggtgacctcccccgggcccgggaataaattgtcaagtttccccaccgtgggtgtctttgctagccggcgagttgcagtcttctgagctaattaggagacggtcatgaggagcgaggcgggccggggcgctccgcgggccggggcggggctggggcgggcggcgcgcagctcctgggccgaggcatccgcgagccgcgggtagatcgctcgcgtctgatcgccgcccgggagctcccgcggagccggctgccaggactcgttccagctccagtgcggggctgcccgggcgtccagaggcggcggacggcgtgccggcaagtttccccggcacctgccagtgcccgcgaacccacctcggaagccagacccggggaggc

SEQ ID NO: 232964 - DNA, 43 bp, Homo sapiens
  chr7:70294497-70294540
  hyper
ccagaaatcaggccgacttgctataaacgccccattccgtcca

SEQ ID NO: 232965 - DNA, 297 bp, Homo sapiens
  chr7:70596163-70596460
  hyper
gggtgggcctagaagcagtgactggggaggttagaattcttgcacgcagagaacccccccaagcccgctcacgcccggcctggctccgaaggtctcagaatccgagcctccaggccagattttccctctagccattcctggccacgcagcgcggagccgcgagcacacagaaaaggatgtcttcatcgccaaccgggatggaacgaacccgcccgctcagggagtactgagaactaaagggtccctccagcgccggccgcagccagcatgccttgactgcctccatcccgcgcggtc

SEQ ID NO: 232966 - DNA, 44 bp, Homo sapiens
  chr7:70596820-70596864
  hyper
acgcgtacctccccgccgcgctgcccgcgacgttttgggagggg

SEQ ID NO: 232967 - DNA, 100 bp, Homo sapiens
  chr7:70597164-70597264
  hyper
gggctccccgagcgggcttcccctctgcccggcgcgatggagcgggtcggtgagcggaacaaaggcgcctgcccgggggagcgggtcttccgctgaagag

SEQ ID NO: 232968 - DNA, 898 bp, Homo sapiens
  chr7:70597444-70598342
  hyper
agaggtccagaggcgaaccacttgctggtgcagaagagaaaccctcaaatccctggcctttcgcggagacgcctggacggggccgtgcgccgtggactgagcaggcgtctcggggagcacttctgcagagcgaggacttccatgtgagcgattccgttctccccaccaccaatccgacctcccagccgtctccgccgcccgagcatccttgaggtgggacgagcaggggcttggatccctgccggccgtctggtgtgtgaggcttgcacggcccctggctgccccgcgcctcgccggagcccgagggggcgcaggtccggggcgagggccggccgggctgtttgatggcttcactgagaagagtcaaagtgctgttggtgttgaacttgatcgcggtagccggcttcgtgctcttcctggccaagtgccggcccatcgcggtgcgcagcggagacgccttccacgagatccggccgcgcgccgaggtggccaacctcagcgcgcacagcgccagccccatccaggatgcggtcctgaagcgcctgtcgctgctggaggacatcgtgtaccggcagctgaatggtaaggacgcacgccggcgcctccggggctcgacgcgggcgggccgggcacagggtgagccccagggtccttgcgcgctgcgccctgtgcctgggagccggcacaccctggctcccgcgcgctccttcttacccttcctgccccgtttcgggcagatggccggggctgctggaaagaacaacttgcctgattcttttctgtgccccacctgcaaatttggttttatcctggaaacatgtcagtacagttggctcccggtccccgcgtgcggactggaaatcattccctggcgactccagcccgagcgcagaaacta

SEQ ID NO: 232969 - DNA, 341 bp, Homo sapiens
  chr7:71217028-71217369
  hyper
attaaatgcagaagataaaacgtttcgcagcaccgggtccaaggaagtgcaatacaacagcaaaatgcaatggccgcagcagctcagtgatgggccgagactcgtcccgtgtggcggagatgctggcatcccccctgtggctccaagcgctgagcttggcggcggggacctggcggccccggctcggctcgggacaggcaggtgtggggagccggcgggttggagggcgttttgacgctagagggcgctcggtgcccggcgagggaggcggcccaggccggcgggggagcgcgcgcctctgcacttgcacccagctctccgctgcctcctgccctgtctgc

SEQ ID NO: 232970 - DNA, 616 bp, Homo sapiens
  chr7:71800657-71801273
  hyper
ggagctacgggcttcgacccaaatggaagaaaggcgccttcctcacacaagcctcgtccaagaaaaaagagcagtgggaaacgatggtgggctggtggcccgggcgcacgtggcccaaggctaagacgcaagccgatcccctcggtgcacgctctgtacccccagcccgtctggatggggcgtcccccgctcgccctcgccccaagggtggcccagaactacctgctgctgcctaggcgccctcggaccaagtctcgggaagttcactccgcgctgcgctagtccggagaaactaggaacccgagtaaacccagactgtccggggaagacggatcccacccccacctgggcgccagacccatccagctgcttggagctcagagactaggtcccagccggactgcagaggcctctctggttaccccttgcaccctggcgcccccggactcggggtgggtggcggcgaggagcgtgcgcccagaaaggcaagcagtcagcgctaggggccggaggtggagagaaccctgcctcccgcctcccccgatcgccatgactccggcttcgcgaagagacctggttgccgccgggcgctcccacctgggctgcggtgcggctc

SEQ ID NO: 232971 - DNA, 411 bp, Homo sapiens
  chr7:71802353-71802764
  hyper
ccaagcagcgcaacctgaggaacgcctcggcgcgcgcgcactcacactcgcgcgcacacacacacacacacacgcatgcacatgcacggcacacacaggcagacacgcggggggcgagcaggcgcttggcagacggtgctccttccttcccttcccaaagaggctgcccacgttaactccggcaaactgctgctcctcagcacaggacaactcaccctagcgcccgccgccttcactacttcatcccaggtgcccacaccctagatccacgattacacctgagcccagggggaaggcggggcgccgaagtggaggggccaatggccgaaactgcggggaccagcattccgcgtgaccgcccctggagacgtccagggaggcacggctgccgcagggcatcgcccacccacc

SEQ ID NO: 232972 - DNA, 1003 bp, Homo sapiens
  chr7:75931592-75932595
  hyper
attctatctcacacgcgtgtggttccaatcctgcctctgccacttctcagttgtatgccccaacccaacctgtctggctctgtcctccttaacagaaggacggccctggccacgggccacagccagcaacgcttaagcaccagggccggcgagtgccctgccgtggcacggctccagcgtcgcgctctcgaattcatttgctttccttaacgagagaaggttccagatgagggctgaaccctcttcgccccgcccacggcccctgaacgctgggggaggagtgcatggggaggggcggccctcaaacgggtcattgccattaatagagacctcaaacaccgcctgctaaaaatacccgactggaggagcataaaagcgcagccgagcccagcgccccgcacttttctgagcagacgtccagagcagagtcagccagcatgaccgagcgccgcgtccccttctcgctcctgcggggccccagctgggaccccttccgcgactggtacccgcatagccgcctcttcgaccaggccttcgggctgccccggctgccggaggagtggtcgcagtggttaggcggcagcagctggccaggctacgtgcgccccctgccccccgccgccatcgagagccccgcagtggccgcgcccgcctacagccgcgcgctcagccggcaactcagcagcggggtctcggagatccggcacactgcggaccgctggcgcgtgtccctggatgtcaaccacttcgccccggacgagctgacggtcaagaccaaggatggcgtggtggagatcaccggtgagcccccctgctcctgcaggggagaggaggaggctagcagggcgggcagggccgggggcgtgcggttgaaacgggggtcccgggggcctggggagttaaacgttggcccagcaccgggaaaaacaggactcctgattcccttgctcaggaattgggagtgcgggtcgcttctaagggcgctttctgctctgtaatccca

SEQ ID NO: 232973 - DNA, 343 bp, Homo sapiens
  chr7:75932655-75932998
  hyper
gcaacatagcgagacgcgcccccccgccccgaccccgcgccattacaaaaaaaaagcaaacaaaaatttttttaaagatcatcgatgaagagagaaaatgcgcttttctacagagtccccttcccacccacagccccatccccagataagcggggagttccctggcgcggtgccagtttctagccgctgagtgggcgtgtgcgcggctccaagtgcgcctgcgtactgctcactccccagctccgcgccctgctccgttcctcccaaaactctgaatcgaagaactttccggaagtttctgagagcccagaccggcgggcacgcccccatccccaaccccctc

SEQ ID NO: 232974 - DNA, 251 bp, Homo sapiens
  chr7:76145289-76145540
  hyper
tcaggcccttagaccgtcaccccagtaggctctccaggacccaggagcctccatcacctggaaggaccctctgtgcaaaacctcaagcgtccatctgtgcacaaggccggtggttcccgtcgtcgccactcggggtcgccggtgagccgcagccaggccgcctcacggccagtgtgcatgctcgctgctattcgctgccccttctgcctccgaggcggtagcagatgccacgttggcggggtcggtgaagg

SEQ ID NO: 232975 - DNA, 387 bp, Homo sapiens
  chr7:76751573-76751960
  hyper
ttggcttgactaggcgatgtaaacatcagctgcgtaatccccaggggcaagttgggatttgaaagctctgaactctgacctggaccccttgcctaagtccaccccctttcgctaaggccgacgggatacgtagttctaaagcggtggaaagtcgcagagctccgcctcttagaaaccacatatcccaggaggcaatgcgcaggggagcacgggtaagagggcaggtgttagaatcgctggaaaggcgggcgccctttgtttcaagaccattggctattggaggggcggtacatgggaggccactggccaatgggaagcacggaagggggcaacgagggtaaagctgcatggtcaccttggataccaaggacgcgacttcttgtttgg

SEQ ID NO: 232976 - DNA, 40 bp, Homo sapiens
  chr7:77167456-77167496
  hyper
gctggtctcaaagcgggcagggtaggacttaggccgtttc

SEQ ID NO: 232977 - DNA, 97 bp, Homo sapiens
  chr7:77167676-77167773
  hyper
ctgaaggaagccagccgacttcggactccccaggggatattgccgaaggcggaggggatgtgactatcacttcctatccggggtgggggtggggaac

SEQ ID NO: 232978 - DNA, 178 bp, Homo sapiens
  chr7:77325999-77326177
  hyper
ccggcagcaccttcgcctcagagctatggcagccccgcgtcttggagctttgcccctctgtctgctgctccctccccgtcctcttctcggagcagtttctctttctccgctggcacggccgttccctcctcagcctccgcttccttgtctcagccggtgccgcgcaaactgctggtcc

SEQ ID NO: 232979 - DNA, 102 bp, Homo sapiens
  chr7:77427837-77427939
  hyper
gaggtcccttttccgcggtaattggaccatttgtccgccagtgcaaaccaaccgacctttccttactttcgggttcgacagaaaggcggcaataaaaagacc

SEQ ID NO: 232980 - DNA, 148 bp, Homo sapiens; identical to SEQ ID NO: 201011
  chr7:77428716-77428864
  hyper

SEQ ID NO: 232981 - DNA, 36 bp, Homo sapiens; identical to SEQ ID NO: 201012
  chr7:77649269-77649305
  hyper

SEQ ID NO: 232982 - DNA, 1349 bp, Homo sapiens
  chr7:79081510-79082859
  hyper
gagtaaagtccatgcggacaaccattcatctcctccgacaaccattcatctcctccgacccccgcccagcactagactgcgctcctagcaccgcgccttcttccggagcctcctcccccgggctggctaggggtgagcgcaggggttagtcagtacgcacgtgacgcgcgatgcccacatgacacgaccgtgagcgggggagggggacacggagtgaagaaggggaaaagttacagaagacccgtcaaagcgcccaaagcaatttgtcccttcttttcttcgccagcggtggctcacggatccctaagggacagctggggacccaggcgcccccagcccagccccagaaacgctggacgcagttctccgctcaccccaccaccttctcttcccagacccgctggtgatgccgctgcaccctgaagttgctccttccttctttccctcccttcctcccattctttctttcttttcttccttcctcccttccccaaaagctcttcatccgcttcgggtgatgccactgacgcacattcaatttgccccagcagctctgaggaggtcagaccaggccgagcaccttccaaaggggagggtctaactgagcaaacaaagttgcacgccacaccacaacctgcccctcccctccctttagcccccaagtcgaatccccggcgaaactcacttgcactgcgggtgctctctggcccccaccccatcatcgcgcaacacacccccttcaacatgcgcggccaccctttcattgccctgcgccccgagcggtcccaccgcccggcaaaacactgagcaagccgctgctctcaccttgcttgacacacttgagccggagggggtccttgcagtgtttgatcacggccagcacgtccctgatggtgagccccgccacgggggtctcgttcacctccagcagcagctcctccgacaccaatttgctgccgctctcataggccaccttgccgggcttcacctcccccaggtaggggaactgtccattctcggcgccccccttcagttcaaagcccagctggccctccgggttcctgccaatgacactctcatggactttgctagtccagtggcttttctttttcaagcttttggacatggcagtggggcgagtcgcctcagttcctgggctccttggggttaggggggctggtggtgagagaatgaggatggaggagcaagggggcccagggggaagaacagcagactttgccttcgcccccctctattcggtgctttccctcttctttggatggagtgtggacgaggaatggggaggatgagagggacggctgggcagaggtaggagagcttggatgagg

SEQ ID NO: 232983 - DNA, 62 bp, Homo sapiens
  chr7:79083039-79083101
  hyper
tgggaacgcgcgcgcgcgcctgggtgtgtgttgttagctgatatccatggcagctgcagtgg

SEQ ID NO: 232984 - DNA, 57 bp, Homo sapiens
  chr7:79083281-79083338
  hyper
ggctgggtccgcctggcagcctacgggaggaggcgggagccgggaaggaggggagcc

SEQ ID NO: 232985 - DNA, 443 bp, Homo sapiens
  chr7:79083698-79084141
  hyper
aaagttctcgaaattccctcttagagaaggagaaagttagagaactggaggctgcgtaccctgattacgcagaagggaagcagcctcgcattccccggggcaggcccccgcccgcgcgtcccgccagtaggggaatttagcggacggctgcggttgtctggtgaaaggctatccaaggataaggggcttcacttttcccaagtaggggaaagagaaggggtctacagggctaggggtggagggagcggatgcagtgagcagcctccgcagagaaattgacaatttaaccagggacctgcggcagagacaaggcggagacactcccttgcccaggaaagccgccagagtccggcttgtacctggggaagaatccttaagacggtctggcccaacactcctttgctcacagagaaaggggagaagactcccgagggtgaaaatgg

SEQ ID NO: 232986 - DNA, 1319 bp, Homo sapiens
  chr7:79764137-79765456
  hyper
gcggaggccgagctcggctgggcttggcgaggctgcggcgcggccaccggcgggagtgcagcggccactgtacccagagattcaaaaccccaaacccgggacttgggggcgctgagccgggccgggaagcagagcctggtcgtgaggaacagccgcccgttgctgtctgcccctttgcggacagcgtctccctcgactccgcttaggaagtggtgggggcggcgtggcccccgtcgggaggcgttcgaacgcccgctaggagagagaaaggattcccctgtgcttggagcccgcactcgggcgcggagggagcggcggcaggctctcgctttcggcaccatgggctgcacgctgagcgccgaggacaaggcggcggtggagcggagtaagatgatcgaccgcaacctccgtgaggacggcgagaaggcggcgcgcgaggtcaagctgctgctgctcggtaagggcggccgggtcggggcccgggggtcggcgggggaccgggtgcggcgctgcgcggccctcggcgtttggaaacccggagggaagggggaggaagcgcccgaggaggcttctgagcgggagctgggtccggcggtgcggaggcaaggcgggtccccctctcccggtgtctggtctctctccgccccggcgggcgaggactccccgcggcggggcgggcgcgtcacttcactcggatgctttcgtgcgacccagcaaagagcccaggcgcgagtccgaggcggcgggtcgcgtggaaaccctttgctttgaagtttagctcagccttgtaaagatgaaggggcattcgcggctagaaaatgaaaacacccccccccccgcgccaccaaccccctcccggaaaacccttcttcgtgtgcggtgtaggttgtgtttcgactgtggttttctcatgcccagagtgccacgtttggtgaaatcagtgcaccttttgtggggcctctgagatggggctgaagcgtctttcctgttaacttcctatggcgactccttaagtggtcaaggagcgctgattacattccccctgcgctgagaaaaggctgcgctggatgcttgatttttcttgctgtgggggcatggaagccacccaagtggggttgggaagctttgctttagtagtaggcaaggcagatactcgagtggtgaaaactgctgtgaaagagcgagagggtcacgccagacaacagggttctgtctccgctgccaccgtttctgatgaatgagatttgccaggtacacgcaaggcttttatttgttcttagcactgttctgttcgtgaaacgctacgtggaggtcttttc

SEQ ID NO: 232987 - DNA, 120 bp, Homo sapiens
  chr7:80548007-80548127
  hyper
cttccctgacaaaccgcgtgtgttcttaagaaaatgtccaggcttgagcataccaatgtatgaaaaatcaatatacaggccaaaaaagttatactttgctaaatctgtaatgcggaaaat

SEQ ID NO: 232988 - DNA, 76 bp, Homo sapiens
  chr7:80548787-80548863
  hyper
atttttgccagggaaggatcactgcagccttttaaggcaaagagatgcgtttttaaaaggacgtgagttttgtcct

SEQ ID NO: 232989 - DNA, 1098 bp, Homo sapiens
  chr7:82072018-82073116
  hyper
gaccgcgtgtctgccgacacttagatgtttcaaataatgggttggggaggttggatcgcgtggtcccagtacctgcgagccccctgcgtggacagcacgctcggccgcggggagccagcacgcgtctaatcggaaggctgtcaagtgcatccagtaacgtgggataaaacgagtttgggcactacagcaattaaagagcatctccgaggccaagtgcgggggaagtccacgctacctcggcaagcctgaaattacctgtttgtaaattacccaaccaaaacataactttttattgaactgggttgaatcagagcgggtgagctggctggaaacttttttccccagtacggctgcactctgaagtctagagaatcccgttagagacgggctgagacgccgcgagtcgtcggcgggcgcttcccgggacagtcggcccccagtgcccggccccgtggaggcgcccgagacgccggttcgggacgcattccagcggcgagcggcgcgcaccgcctgcccggcgtctccgcatccgagcctggctccccggccgctcgctccccacccccacgggcggaaaagccccgcgactcgggaaccgacccccacccccaactcccgcggcgcccctcggccggcgctccctgcccggcccgccgacttacgtgacggccgaagggaacggctcctccgacgaggggccgatgagcaaagattggaaaagtgtcagagtcaaggccagcaggcagccagcagccatcttcgcgatcgaagatcaatgccccctccctgcccaagcgggggaaggagcggcgctggaaaccgcgggcggaggaagagcagcacacgccgccgggaccgcgggcgtctggagggctggctgcgcccggggcccgaggcgcggagccgcgcgggggacggcaagggcgggagcggacgccgaggaaggggcggtggcgggcggacccactagcgtgcgtcggctgctccgcgccgcggccgccttgcctccgccgccatcaagggcgactttggaaacagacctcggcgagcccgccggcgctcgcgcgctctcgctctccctctcggtttcctccctga

SEQ ID NO: 232990 - DNA, 269 bp, Homo sapiens
  chr7:82073319-82073588
  hyper
cagtcgggcggagacgggccgggagcagccctccatacaaggcagccaggaactcccaaagtcggcgccggctcgctcccgccgcccggcgtgcgcaggcggagcggaccagccccgcggggctcccgggggacggccagccgcccagcgggcatccacaggctgcagaggctccaacccaggacttggctcgcgtcttcgggggttatttttgcacatgcaggcagcgttcccccccagccctactcccaggcgcagaatccagtgcc

SEQ ID NO: 232991 - DNA, 247 bp, Homo sapiens
  chr7:82791563-82791810
  hyper
catatatgtaccgccgtgctggcacatacaggctggcacatatgtgcacgggaagctgtacatatatgcccggacatatacatcatgctgtgcatgcctgtgcatggaaggcgactccgcagcggccggggggacgcttcccttgggcagcccctgcgcccttgacatgacagcggcgatctgtctcctctcctcttcgctcagctggctcaaatccgcctccatgccggccgggatcgcggtgtga

SEQ ID NO: 232992 - DNA, 438 bp, Homo sapiens
  chr7:83277832-83278270
  hyper
gtgataatgtgccccgcggatgccatgctgccgtgttcaccgtccaagccctcgctcctcactttaaggagggtctgagttttacttaggacttccctccaggggcagcgtgcgagaggctttgtcagaaatcgaacgcgttgtcatcagaaagcacagttccgaagtgccatttgtcaggctgtatttggctatgtaaaacctttctttcctcgggacagttgtttataagccgggagcaagaggacattccaaagagtgagtcttcagagccatgtcctgtctagagcgctcttcagcaactacgccggtagattcaggaagaagctgtatttttcagtcacttgggcaaagctgttcattcagaaaaaaaaaaaaaaaagagagaaaaaaacaaaaccgagcacacgcactcccttctcccgtggaggtcctctc

SEQ ID NO: 232993 - DNA, 1888 bp, Homo sapiens
  chr7:84814641-84816529
  hyper
ccctcgtctctgcgcgcccccaccccgccatcccccgctagcgcacacatgcaggagaaccctttttaggctaaaccggaaagtttaggtcttctcccctcttcttttgcttgtgcaaatagcactaagctaaacggaaagtggtggggttttggtgatgaaataagagtccacgcacagaagcttgccttttattaccgcttcgctcgaggcgaaatcgctgaaagttcggctatttaactcctgtccccataactcggaatcccggacaccagcggccccagctgctggcgcgcggctctcttccagtcccctggatcccaaagctccctgccacagcgcggcgtctcctcctcctgtcaacttccctccttgcactgtgacggaggcaaagcaactcagcccaggaggttgaactcgagtcatcagagaaggagaaacagtgccgaaaacggcccgtgcgctaccagggtagcccattaacgcattaactccaggctcgttgggcagaagccgggaggaaacaccctggggaccgcactcctggttaaatgcccagcacgagtcaaatccggcctttccaaagcgagccaagcccactactacaaagagatcccccgagtgttttgccttaaccacatttcagacagccagctttgtggctgctgtttgactccaactttccctctaaatctaaaaggatgcacacttccatcagacggaacgtcgcgattccccggcgaagaaaaaggcgtcgcccattcctcttccaaaacgctacaacaaaaaccaccacgcttcccttccttcttccttgcccctttcccttctcccagaccaacaaggaaaggagcgagcgagggcgcagatgccctttggtcaagtactccccggatgttcccgactaaagcgtctccaaatgaacctgcagcctgcggaagccggggacacattcatagacgctctctgctgcccagaccaggaggggtggtgggggaaccaggaagccagggagagagcaaagttcctggacgcgtctcaggaggaaaactttgtgcagtgctgccaggcggaggctcgtcagaaggctccgcagctgctgaggcggggtgggactgcgccccaggggccgcgctgaagctggcgccgcgattactgcgcaccgatttcgcccactctctgtccgctcccgggagccttctctgtctcaggacggttccttatctcccaaaccatgctcgtcctccacttcggacccacagccacccccaaatcccggctatccccgcttagcaccgcggtctccagcacaccctcccactggagtagcaggtgacccaaaccagacttacctgctgtgaactcttctctccctctctcttttcctggtgccttttcagggagaggggaacgggatgcaggctgaggtccagcggcgcggcaacccggggcaccggcgcgcgttcctctgagccgcagccctggctgagcaagcggagccgccggcagccctggcagagccgggaagctgcggccgcaggggccaggccgggaggcagggggcgctgctgcctcccccgagagccgcgctaggacaggcggagagcaaggcaccagctggagctttggggaggagagggtggcgaggaaaggcacgctccaaacaggagggcggcttttaagtttgtggtgtgaccgcagcagctgtcctgggagagactcagtctttctaaaaagaggatgctgaaaacgccggggattacctttccccttccgatctcctcccccagccctcgccccctccttccactgcgcacgccagaactcccaagcgtgcagaagttcatccctgctgcgcggaggctgccagcagcgtggatttagaggt

SEQ ID NO: 232994 - DNA, 1354 bp, Homo sapiens
  chr7:86273044-86274398
  hyper
atttgggagaatgcgaaaaagcagcagcccagcattcccggatgggcgtggcttttctccaggggctgtccaattgaattccttcagagggagaagattgataagggttgctaggaaacaggagcgtctgcctcccgcctgacccagagattgttctgcacaaaccctctccaggggctcgcagtgtgcagttgagtcgcgagtacggctgagctgcgtaccggcctccctggctctcacactccctctctgctcccgctctcctaatctcctctggcatgcggtcagccccctgcccagggaccacaggagagttcttgtaaggactgttagtccctgcttacctgaaagccaagcgctctagcagagctttaaagttggagccgccaccctccctaccgccccatgccccttcaccccactccgaaattcaccgacctttgcatgcactgcctaaggatttcagagtgaggcaaagcagtcggcaaatctaccctggcttttcgtataaaaatcctctcgtctaggtaccctggctcactgaagactctgcagatatacccttataagagggagggtgggggagggaaaagaacgagagagggaggaaagaatgaaaaggagaggatgccaggaggtccgtgcttctgccaagagtcccaattagatgcgacggcttcagcctggtcaaggtgaaggaaagttgcttccgcgcctaggaagtgggtttgcctgataagagaaggaggaggggactcggctgggaagagctcccctcccctccgcggaagaccactgggtcccctctttccccaacctcctccctctcttctactccacccctccgttttcccactccccactgactcggatgcctggatgttctgccaccgggcagtggtccagcgtgcagccgggagggggcaggggcagggggcactgtgacaggaagctgcgcgcacaagttggccatttcgagggcaaaataagttctcccttggatttggaaaggacaaagccagtaagctacctcttttgtgtcggatgaggaggaccaaccatgagccagagcccgggtgcaggctcaccgccgccgctgccaccgcggtcagctccagttcctgccaggagttgtcggtgcgaggtaagggtcccagaggaggacgtgtccctctggagggcgcccagccagggcgcggaagctcgggtgccgcgtggggcaggcgcagccgggaaagttgaggtagagcatggaccagtccctacagtcctgactggagtgggaagggtggagggcagaggcgatgtgggtgtgcatgagtgagagtttgtgtgtgtgcgcccacgtctgtgt

SEQ ID NO: 232995 - DNA, 155 bp, Homo sapiens
  chr7:86781443-86781598
  hyper
atgaaaatcggcacgcgaggcctaagtgtccccagaaccagaggaaccacagttgcgtcatagcagaaggacctcttttacagcatcagcagtgggatagtcagtgccgagttttcctggcaggacagccgacaaccaccgccacagaccagtac

SEQ ID NO: 232996 - DNA, 60 bp, Homo sapiens
  chr7:86782566-86782626
  hyper
gtgggctggggcgcggggacagtcctggtggagcacggaaaatgcggctgtaaagttgta

SEQ ID NO: 232997 - DNA, 249 bp, Homo sapiens
  chr7:86848939-86849188
  hyper
tcggggaagcgctggcgccagggatgggtgggggctcacacgcggggaacgcgactgctccgccccggccccgcgcacctcctcatcttgagcagctgccgcaggaagtgaaaggaaacaaacactgcgtggcagactctcagcgggacgcccccgcccgggcagctcccacttcctcaaatctcagcccttggcgccgcgtggctctccgcccctctgggccgccagggtagcgccgcccgccgctcg

SEQ ID NO: 232998 - DNA, 277 bp, Homo sapiens
  chr7:86974660-86974937
  hyper
atcctgggtcaggcgccaagctccccagcatcatgcaggaagctgcagccccgcagagttaggacagctcatttggcacccggcgagcccttcccaggcccgcagcccagaatagagccggggcccaagacgcccactggagacagggtcgggtcccactaccgcgcaggcccggctcgcccccgacgtcaggcacggggcgggacccttgcagctgtccgtccagtcccgttccccggaaagtgaggggcgggaccctcgcggctttctatccaat

SEQ ID NO: 232999 - DNA, 441 bp, Homo sapiens
  chr7:87104710-87105151
  hyper
cccagttcaaagtcgccctccgcgctcgtggggcgccaggctgttccgttctttgccgcctcaagatccatctcagcctgaggagaaaccacagcctcagaaccaagtacaccctctccggcggcccggcgcacgagtcgcggggcccgggggcactgggtggaggtccggccactcccgccccgcgccccacgtcccgggtctcccttcgaggccagacgcgcccggacctctctcacctcgaacctcgcgcgtgtctggcagggcctctggacgcgcgggcgctgcagcagaggggcctggactttgctcgccgcggcctcgcccccgcccccgcccccgccccccacgcgcgtccggcccgggaaacgcctaccgttgcagccagggcgagggccgcggcccgcgagagcagctcccgccgcccgcccagctctctcc

SEQ ID NO: 233000 - DNA, 1016 bp, Homo sapiens
  chr7:87229460-87230476
  hyper
tcttctttgctcctccattgcggtccccttcaagatccattccgacctgaagagaaaccgcagctcattagccaaatgcatgagcctcaggcgcgctggaggtgagactaacctctagtcccccgtcgaagccagagagcagtaagagggagcgcccgccgttgatgccccagctgctctggccgcgatgggcactgcaggggctttcctgtgcgcggggtctccagcatctccacgaaggcagagttgggggtctggcagcgcgttctggactttgcccgccgccagtgcgattctccctcccggttccagtcgccgcggacgatgcttcctcccacccaccgcccgcgggctcagagagcaggtccccgcaccgcgcgggctgtgcgcgctccgggcaacatggtccagtgccactacggtttgggcgctgctccaggagctcctgagtctagatctaaccccacttggtccccatggacttgccagaggacttcacactatccacgcctcaagaagcccttctcccgtgaagaccaagttcaggaaatctgaaagcctgacacttgggaactgtcccatagtagctcccagctttgcgtgcccctacctcgcgctccttggaacggccaccaagacgtgaaattttggaagaagatactccgactttagtggaaagacctaaaggaaacgaacagcggcctctgcttctttgagcttggaagagccgctactcgaatgagctcaggcttcctgtggcaaagagagcgaagcggctgtgctcagcccacgccccggcgctgttcctgcccagccaatcagcctcaccacagatgactgctcccggcccggattgactgaatgctgattcctcgagaaactgcgaaacaggttgaatttccaggaggaatgttctggcttccgttgcacctctctagaaagggcaagtagagaaacgcgcatcagctgaatcattggggacatttcaacttatgtagacacgtctttcaaagttc

SEQ ID NO: 233001 - DNA, 986 bp, Homo sapiens
  chr7:87256907-87257893
  hyper
ggaccctcctgcaggtaaaacggtgggtagtgagaagctctaggaagggggcgcttccgaacacgcgcgtcgaggagggcgttccaggactctgagggagcagcccagctggaccgaggccgcgtcgttcctgggcttactattcccagacccggactcccgattccggagtcacggcccaggacgcgaaaagactctacactggcaccacgctcctccttaggcgggccgtcagtcccgggtgcgggctgcgctggaggctgaggtgggagcgacatggtgtggaggggcaagaaatgtcggcactagacgcgccaagaaggagattctacgagcaattcccccctcgggccattgtgttgctgtttattagcccctgggagggcgtcaggacaaaaggaaccctcctcccttcttagtacttaggcccaaggtcgggtgtgggagccggcgcgctgctttctaggcaggcactgaagctacggcagccacgcaaataggtatcagccgttaaagcttggctacaggcaaggggggggcaataggcccctggcgctgtggggccccgcatcccacaatccccgcggctagcctgtgtggctactggcggcagctagcgggctgcgaaagcgagcccagcgtccttgacagcagcccacgcgtcggggcggggcttgagcccgctgctttaaaaggtccgcgcggccggccccgcccctctggtgccgcgattggatccggcgggggtagcgttgatttgataggcgcagagagggtggggctgcgcacgcgaggccgggggccttgccgctgcctcccgggctggggcacgagtggctgcggagtgtgggtggttgggcgtgaggggccgacgggctcgcgcgcgcgccgtctgctgaggtccctcgggaaggaggagagcgcctgacgccgacccgcaggcgcagcccggcagtcggcggcgcgccgagggcggaggtggtgcg

SEQ ID NO: 233002 - DNA, 67 bp, Homo sapiens
  chr7:87505447-87505514
  hyper
caaacctagaaggcgggaataaccctggtgacgggcggggccgggctccggcgctaactgcatccac

SEQ ID NO: 233003 - DNA, 509 bp, Homo sapiens
  chr7:87563189-87563698
  hyper
cagctctttaaggacgatgcagatgaatactggctgctgtaacggcccagttggtgcatctcggatgccaggaggcggtccagtgctgatctctttcttttgcccttccctcccgcccttccagtctgtgggatatagaggacctcacagtcacgaggtcgcgacggtccgtgccgtcgtggagacaagcgggacacggagagagaactacatttcccagctgactctcctgcgcgcgcccttgcctgcgcgcggggggcgagtgcaccgggcgctcgctccctgccgagctcttgtcgcccgcccgagcctttgccaggggatgaggtgggaggcgctagaaaccacttagctacagccaaccgcccaatgcagcactcgctcgctccccccgccagcggaagcgtccgcgaagcacaatgcagcactgagccgcggtggaggttgcagcgccacggccgccgcagcaccggccggggctgggtggaggtggccgcggggaccccggg

SEQ ID NO: 233004 - DNA, 215 bp, Homo sapiens
  chr7:87563878-87564093
  hyper
cctctgtgcctttgggccataccatttcccgggaatctttggagccctcaggcgtattgaaaagggggcatccccatttcccgagtgcgcggggagattttttttttttttttttttaattcgggagggtggtgagaagtggagcaaaaatatatgtgtggaggcgcgcagatgcactggaagccttcggtcaaagcctgtttttctccttctga

SEQ ID NO: 233005 - DNA, 203 bp, Homo sapiens
  chr7:87849003-87849206
  hyper
cgatttcacgccgcgtatccgagaagccgcagggtgggcttctagggtcccaatccaccctcaccttggccccgcagggccatccaggagaagggacggggaaacgtggggagaggccgaaccccaggggcctagggcgaggccgcgagcgcagggagaagccgagggcggaaggagcccgggtagccgcccagcagcgcctc

SEQ ID NO: 233006 - DNA, 328 bp, Homo sapiens
  chr7:87849573-87849901
  hyper
agtggcggcctacgacctgcgaggcaattcacaccagggactttcctccctccaaaactaatggcacattccaacaccaatacaccaccccaggaattctttttttttttttttccttcggacttggctattatctggcacatttcttattttaaacaactttattggacaggacggagctattataagcggagcgcaccatcgcgaggcaggggctggatgcgttagggcaagccttaggtgccagtgggtgaaggagtctttgaaagatggaaatacgaaagcgcccttggaaaataagaattaacttgacgaactgtgtgcaagg

SEQ ID NO: 233007 - DNA, 435 bp, Homo sapiens
  chr7:87936000-87936435
  hyper
cctgttcttcagtgcgatgggctggggagtggggtcctagcagcagggactggaggtgagctgaagcagataagggacgggagccttgtggcgaaaagtgacccacctgagggagaggcgcttccaaggaggaagcgtccagcgccaacggtgcgcgccgcgggccgggcgggtagagggaagtttcgccgcgcctgcagctcagcgctgtggcttgtggctctcgctgctataagaagccagagaagggcgggacggtctgctggatttcgcaagagaagcggaaaagaacttgtttcctggaagagttcaagctgagaatcccagcagctggaaggaccggaacttctatactgcggtgctgctgatggtgccgctgacccccgggaagcggggattttaagggttacacccgagcccttggcatctgtgcat

SEQ ID NO: 233008 - DNA, 1666 bp, Homo sapiens
  chr7:88387738-88389404
  hyper
aattagcgcattggcggtagcctttcaattccagcgctgaagcaacagactgagaggaggtgaacctttaccttctcccaggcacagacaaggcgaggtgaggcagagatggattgcagaaccgcattaagcaaccgcggggtggaggagagtgcagggtgtctccaaaccctgggagggctatcttctcctttcagagcacatttctgcccaggtctttttattctcagtgcagctcgctccctggtggcttaaattacggtaaacgaaataaggtccgttaaaaaccacttctgagaggggtgattattgggggttttgaaagcacagaggtcttatagagaccaaaaatatgtgcctcgctaagatacagaaaggcttgtaagtgaatcttcataactctgggtacgtgcatgtatatgcacatatacgtatgcatgtctcgtttctataccttatataagttttctgcccaaaactttcctcgtccgtgcgttccctaccacggcgcatctaatctgtctgccctatttgtggctgcacagctcattcttgcaaccggctggggagctgttgcttctgccaacgccgccgtcagccagagcgctgaagaaaagctgaaggccagcaggcaacgaaagagtaaagaaaacgccctcctcctgcccatctcctccaccacagcctccccagtcctcccaggtgactcccaaacagtagaaagttggctcagagatagggcagaagaaccggggggctgggcggctgaggccgggaggtgggagaggcgggtcctgcagccccgagagccccccgcggctgcagcggcagctgtcacctcctggcctcgccccacagcacacctgagcctcctgggcagccccgagcccacagctcccagcagaggcgctaactgccctcctcaagcacaggtcgccgcgtccccaactccctgtcctcaccccggcccgcccgtctcctcctccgccctctcccgactgcagcgggggcagcgctttggcgctcccaaggactccccgccactctccccacaaagcagcggcggtggcggcggctgctgctggatcttcacactgcagccagcagcccaggacgcccccggccggacgatgggtacccgcgcctgagcatcccccgggcaggcgccaggcgcgaaggcagggggcgggaggaaaggggcgggggaattcctgattccctggtggaccctggaagttgtccttaaataaatatatcgctggcccgcggttgagcagccacctcgtcagagcagcatgtggactggctcgccgggtcccctccgtgctctgtgctgtcgccgccgccgcctctgtcagagcagcagctgtcggcagcaggagccccgcacggggcgcggagcagggacgcgctgccaccgcctccccctgcgtcctgctggccgcgtcttctcgggaggtggtagtcgctgttgccgctgagaaacccgcccgctttccacggctggtcgcctggtgaggagttgagactctgcgcctccgcccggacccacatggcttgttacctggtcatcagttcgagacatctcagcaatgggcactaccggggcattaaaggagtcttcaggggacccctgtgcaagaacggatctccctctccggtaatg

SEQ ID NO: 233009 - DNA, 1012 bp, Homo sapiens
  chr7:89747943-89748955
  hyper
ccaccggactcacgcgggctctgccacgtgttgcccgcagtctcggcccgttccctccgctttggtaacgggcactgactgtccgatacctcagcgatcgtaggagagcagagacgtccctcatgccgggcgcaccaccggcgggccggcggttccgttggcttccctgacatacttcctacagtcatttctttcagctgagatcttcccctttaatacctcgttaattaacgtgtaaccttttggttaaaatgtcagagctaagactaaatctgaagaaaagaatgaaaccaccgtaagttcttcagactcagtcgtcagcaaggttatggcccgaagccgtgcagaggcggcgcgcggggaagctactggcagagctgtgcgcactgggggtgctgcaggcgctggggagagtgtggagaggctgcgtggagctgcgcgctcggggtgggggctgcactcccaatgaagcgcgtgaagggcaagcggtgatgggttctgcgccagtggggctgggagcgtgtcgggggctgtacgtggggctgcgcgcaaggtgagaactgcgcatctaggcttggggactgcgcgcaccaaaggcttgcaggcgctggggagggtgggggggctgtgcgtggggctgctctcaccggaagctgcacgctcggggaagcgcggaggcgggggtgctgcgcgcttgggagcacgtgggggaacacgcagggactgccggcgcgaatggcttcgaacgcatgcgccccacccgacatttcacagtcgccatgacgaccggtaggtccgcaacggctgcggggacaagaccgttgaggctgccaggcgagtcaggcctttctggacctcgcctgactcggctgggctgtgcctgaaattgacccagctctatcagggattatgaaaaaacaaggagtaagcccgaagccgctgcagtcttcccgccccagccagtctaagcggcggtgcgggcctcccccttcccccccgcctccgccccgga

SEQ ID NO: 233010 - DNA, 171 bp, Homo sapiens
  chr7:89783802-89783973
  hyper
acctctgggcagcagcggcagccgagactcacggtcaagctaaggcgaagagtgggtgagtcccttgaatcgttctcactggccgtttgctcctcgagtccgcccgcgtgtccctgcaaggctgggcgcccgctcccagtcttgggaggggtgtagcgggtcgcaagcctt

SEQ ID NO: 233011 - DNA, 756 bp, Homo sapiens
  chr7:89840694-89841450
  hyper
ggggtgggaatcgcgtaagaaaagcaatttctagagcggaaaggtgaccccacattacaaaaagaaatggagtagaaaaataggcttgactattctaaagctgcttcagaaagaatctccggaagaccacggaggaaccccgcaggggagccaggcggatactcagccgctcgcggtagaagggcgcgcaaagctgcggagccgcgtgtgtggagctccccagtgcactcactgctggctccccctcggtgctctgggcccttcccagctccctccacacagcccggctcccttcacacacccccgccccctccgagctccccgactcctccccgcgctccacggctcttcccgactccagtcagcgttcctcgggccctcggcgccacgagctgtccgggcacgcagcccctagcggcgcgtcgctgccaagccggcctccgcgcgcctccctccttccttctcccctggctgttcgcgatccagcttgggtaggcggggaagcagctggagtgcgaccgccgcggcagccaccctgcaaccgccagtcggaggtgcagtccgtaggccctggcccccgggtgggcccttggggagtcggcgccgctcccggggagctgcaaggctcgcccctgcccggcgtggagggcgcggggggcgcggaggtgagcgggtcggggaggagcgcgaaagaaggtagcggcggcggagttgagggtcaagatgcagtctgcgccacgcgctgcatccatcctc

SEQ ID NO: 233012 - DNA, 1025 bp, Homo sapiens
  chr7:89874391-89875416
  hyper
gcaagcctgcaaactcgccctgccgggcgcggagtgcaattaggctttggggtggtttggctctccggctttccgtagcctctggccccgccccctagcaacgcgctggcttgtgttaacaaccggcccgggatcagaggtctgggtcaactggggggcggcagcggcgctaagcggactgtatggcggtggcctaggcccctggcggaattttgggacctttcgcgactctagcgactctcaggctgccttcccttctcggtggcggggcctctttgggcccagcggctgcgggcgcactgtaggacaggaagatccccccactctccaccccgccgccaccggccatgtggacagaggaagccggggcgaccgccgaggcccaggaatccggcatcaggaacaagtctagcagttccagtcaaatcccggtggttggggtggtgacggaggacgatgaggcgcaggtatgagcaggtgtctgtgctttcagaggtggagggggtgggagtgaagtctcgagacggggtccagacctgggggtggcaagggtggaactggggacaggagtgaagatgggggaagccgcgggatggagattccaagcgcagagctaatcctgatcccccaccccctgcgaactgcaccggttgcgaggggctggctgttgtcaaccatcctgtctggggaccagcgctgtgtggtcctcctggagggtcctagcaaactgagtaggcggggttttgccgcgcttcttcgaaaagtggtcatagagctacagggaggaaaggaatcattcttagcaaaatcttgatttgatgacctgatcagtttgaactgaactttttaatacgtagatccctgttaccgagtgatgttcttgatatagatgtaaattttcccatgcttaaatttgctgcgactaaagcctgcacccagaggggaggaaaacgctgttaaattagaaattaagcatttttaaaatatgaaattggaagctggttgttacacgttgggtcggagag

SEQ ID NO: 233013 - DNA, 404 bp, Homo sapiens
  chr7:89950293-89950697
  hyper
agcgcgtcccggcgcggtgtcctgggtgcgctacgctcgttgggaggaggacggggcgcctcctgcccacgaggaaccagaggtttcagcggggacgacccctgcccagggcgccctctgcccagcggacccacttcccgaggcaggcgaactgggcgaggcagcgctgtgtcacccaccccgagcgctcaccgggcgcccaagctcgctcagcggaaccgtctcggccgcggtgcgcttcggcgctgggaggctctggctggcactggctcaccgcgggtggagctgccggttctgctgcggccacgcggggttcccgagacagacccgccgctgggaccgcgatccttttctagaggctgagtgagggggcagatcgtgggtggccgcgctctcgaggcccc

SEQ ID NO: 233014 - DNA, 146 bp, Homo sapiens
  chr7:90032703-90032849
  hyper
tccagggcattgccgttcagggccacgggaaaacctgactgcgctcccagaagcctccggtgtacctcgctgggaacgcacttcctgggacgctgagagggagacgctccaagaggctcctcagtgtgggcgagtaaaatgccctg

SEQ ID NO: 233015 - DNA, 485 bp, Homo sapiens
  chr7:90225111-90225596
  hyper
tggaaggagaaaaccgctcaaacaactggactcggcccgtttcctttcggtaacctccccacagcccaacacgctgtccccagacgctgcccgctcccaccccggtcccttcgtgatcctcccgcgcgcgggcggggcgggggaggagcgcgggggcggccgggaggggcgcggccgggagggggcgccgccggggcgcgagccagacacagagggccgcggaggacgcgggaggcgagcggggagccgaggtcgtgctaggatcccgcgcccaggggccttcgtcgagggaggggcgtggcggcggcagcaggagggcagcaggagctgtcaggctggcggttccgcgccgcggctccttctgcgctgcgcccgcaactctgggctgagaacttctcccgccggcccactcgccctcgccccgcgcactcggcgccaggcgactcccgcaccttgtacccggcccgccccgcctcctccttcgg

SEQ ID NO: 233016 - DNA, 188 bp, Homo sapiens
  chr7:90226436-90226624
  hyper
gaaattggtgaaacgttagactgtgccctggtattgtttaacgtatccaacctaaagggaagtgggacagttaccttgggacctattgttcggtacttcgggtcctggaaagcgagatttgggtgttcagtctcgaggtctctgaatcttcccgctgctggagagaaatgcgcgctgtggagttgtct

SEQ ID NO: 233017 - DNA, 194 bp, Homo sapiens; identical to SEQ ID NO: 201041
  chr7:90893324-90893518
  hyper

SEQ ID NO: 233018 - DNA, 311 bp, Homo sapiens
  chr7:91569809-91570120
  hyper
accggaacttttccgttggagcttgtaggtgttcgccaatttcaccattaggtgtgttagttttgtaacctgaaggaaaaaaaaaactcatgttttaatagcagtggattcctcggacggagggtgggggtcaggccaggagcctctggcacactccgtctctcctacccctcagctcggccgccacctgtgagccgttgatgtgcgggaagggcgctctctacggcgggatcctcgctggtaggaggcaggtcccaggcctggcaagggttgaccccggagggctgggccggggcggcaccccaggagca

SEQ ID NO: 233019 - DNA, 381 bp, Homo sapiens
  chr7:91763723-91764104
  hyper
ccaatcgacggaacgagagaagctggcagatggtcgtccacagggggccttgccccaggtctcctactaaacccagccccacccctcgggtcccacgcgcgccaccccgtgcgtcacagaatggggcgggatgttccgctggccacgccccttaaataacactctgtgaagccgtggtcttcttgcgcgggatagggcacctgaggaagcgggctgcgcctgtggcacagtggtacggggccggaagataacttacctgaagaggcgatcaatccctgagaatcgcgggcgacccgttttttgtgtgcccgggtgcggggtgccgggacacggcgttgaaggcgctgagcggagggatctcagggcgagctcgagcggcga

SEQ ID NO: 233020 - DNA, 49 bp, Homo sapiens
  chr7:91875200-91875249
  hyper
ctttccaccccgccgttaccgtggctatgaaatcgcttccgggttcaca

SEQ ID NO: 233021 - DNA, 57 bp, Homo sapiens
  chr7:92464877-92464934
  hyper
ttccgcattcctccgcgactacaaaggctgcagccgcctccttctgctttctgtctc

SEQ ID NO: 233022 - DNA, 421 bp, Homo sapiens
  chr7:92861272-92861693
  hyper
tccttctccttcgcgtcagtctctcgttctcccaccccgcccctctagaccaggtgaggtttcctccctcacactcctaggggacatcgcgtcaatctggcttatatattgtctcctctgagtttgatctttcgctcaacgcctagtcacctgtgacttaggtttccgtctcgccgaagagtagctactgcctagtgcaagcacctttgtaagaccggcgatcgcagtggtcgctctgagcagtaatatttaccggcttaactgaagcacccgctcttttgcttgctgggagatgtagtccctgggttggccactttagttcatcgttgctaccgccggcgtccagaagactacagttcccagcaggcccagggaaagacaggataccctgggtcggctcctccacgtgaccacccactat

SEQ ID NO: 233023 - DNA, 939 bp, Homo sapiens
  chr7:93203660-93204599
  hyper
tgtggctccagggactcaggcgctcaagcttcagcgcccatctcctgggcaggagatgtcagccgcagggtgaggtgcggacgtgcgcacttctccaacccgggaaggtccgccagccgcgcggcgcagcccacccagacgctggtgggctggctttcctagtttgatgcgagagcaaactgcgttagtctcagtcctccctctccgcccctctcctggttttctgacactttaaatctgtcttaggtggttcagacccaagtctaggttgtattatcagctaaaagacaactgttctttcccctggcttgctttctacctccccagagtccaggaggctcaccttcccggcgccttcctgcgctctcccagctgtgaagctgtgcgcaaacttctcctgacttaagagtctcaatcctagcctgcgctcccgccccacccccgcccgcctcccgacaggcggcagaggaggtggcagcagaattgatgagagccagccccccttcccggaccccgccaccccagtcagccccctcctgtcccaggagagggaggggcgagctggtgagctccgtgcgcctcgcgccagccccagtcgccccggcccgcgagtggggctgcgctcgcggctgctgtctcgctccagtcagggctggggctcaccctgcgagtccgggagactaaagcgccgcgtaaacacaggaagcaggcgagggacccgagttagaccttgagtagggagggagaggggggcgacagtctggactgggagacagctttctgggagccctgtcccctccccggagaatgcaaattccggagggaggtgagtttccacaagaaccttatcccagagacattgtgaccctggcttcttcagccgccactccggggacagcactagggagcctgtggagggagggtcggtagtgggctagg

SEQ ID NO: 233024 - DNA, 126 bp, Homo sapiens
  chr7:93204907-93205033
  hyper
ccccctaaagccctcgatgtcagcaggagtccgggacaatccaataccaggcggggcgcagcggaggctggcaggcacgccctgggaggcaggcaagttgattccaaggacgagtcaccctcaacc

SEQ ID NO: 233025 - DNA, 991 bp, Homo sapiens
  chr7:93519346-93520337
  hyper
ctaaaacttcctgtagaaagcgagacgtgggaaactggcgaagctgctaccagccgccggcgcaaggagcgcgagagtcctgggtgcgcgcagggcacttactttctatcctccagcaagcatcgtcgcaagcctcccaggtgtagaaattgttggcgttgccctcgcagcccccgtacaggaactggcggcagctctgcgtgtacctgtcgtagtagtaacggagaagtagggcccggcagggtccgtagtctaggggcaggagacagatctccgcgttatttcctgaagaaggggcagaaggagagcaaaagagagggaaagtggtcaggcgtagctcctaggaggaaagaacatcccggggagttctgtccccttccgagcggaggggcctctgcagagaaagtgcaaacttgggagcgagtcccccctgccagcggagcgcgcggcagggacctggagaaagcgaggcttggagggcgcctacacggggccccatggcccgctgcgccctctccgccggttggggagagaagctcctggagcggccagatacctgttggctcctgagcagcatcgcccagtgcagcctccgtcaggaaaagcagcagaatcgacagccccagggggcgagcggggtccatggtgcagggggtcgggcggcccgctgggcaaggcgtccgagaaagcgcctggcgggaggaggtgcgcggctttctgctccaggcggcccgggtgcccgctttatgcggggcgagcgtccggccgacccccgccggggcggagcctgaggggtggctgattcatgcacggggactgtcaccccgccgcccccgcgctgcaaactgtgtaagagggagaggaattccccgccaagttgaaaagttgaacctgcctcccaaactttctcctgtagtccagacggggacgccctgagggagcgtttgtgtcagtaatgggaaatctgcaagctagacggaaatgacctgct

SEQ ID NO: 233026 - DNA, 516 bp, Homo sapiens
  chr7:93550972-93551488
  hyper
tgtgacttggaaacggaaaaaaaaaaaggagcgggggtgcgcggagaacacaaagtaaaacttctgctgttcccagtcctgcagccccagcccagccgtcccccgcgggcgtggcaggtcctgagtcagggcctgtccgtggccagcatccctgctgggcgattgagcagcgggaagctgcttggacccagtctcaaacttaaccctcatctagcacccgggcaggcctcctgggttgcagggacttgagaaaaggcagagttctcaggtcctaggaagctggggcacgctggcgtgacaagcgtcccggagaaagccaagccctcggggagctggggaccgcagcagggctgcagtcacatcctgcgcgggtgggcggcgggccaggccttcagttgtttcgggacgcgccgagcttcgccgctcttccagcggctccgctgccagagctagcccgagcccggttctggggcgaaaatgcctgcccttcacatcgaagatttgccagagaaggaa

SEQ ID NO: 233027 - DNA, 133 bp, Homo sapiens; identical to SEQ ID NO: 201049
  chr7:93633682-93633815
  hyper

SEQ ID NO: 233028 - DNA, 925 bp, Homo sapiens
  chr7:94284359-94285284
  hyper
atgttcatagtacaaatgcacgcaaatatttgtggccgaatctcggcaacccgctggaaaggattaaacgtgcggttgccgtgactaaacgcattcattcaccctacaagatttaggaaaatgtaacgttgcaagggaagcaaggtctctgtgtaaacctcgtaatcgccaccaaaagtcggtagctgggagccttcaaagcccgccaaacacactggaagcatccacagctgttttaaattggttttggtttctggaaatagcgcactcggtacggcagcatctctggcctccagccggggttaaccctgacctgaacgccctgtttagctcccagcatttcatgattccgcttccctgctccgtaaaaccgaagaaaaccgagatttccgtcaccgagaaatgcacttagcaagagggggaaattcggtgttttaaatgtcacatttttgtgttctctaccactatcaagaaaaggaaaaaagatgtgtttgtgtagcggggacgcagcttgacacccatttcctttggctcgcatcgcggtcgcagagcccaatcgcggggaaacgggccccccagaaaaacaggcaacgacccccagctctttgctacagggatcgggagaggactaccctggggctgggcggggagggggatgttgggaacaggaattggagatggaatttctgcgcccgcagagcagggaggggcccgcgggggcgcggagaggaaaaaaaggccaggggtcaagcctggggagagagaagctgggccggggaaatggggtacagggtgtactgaaggaggggtacggtggggtccgggacagaaagagaggctggtgcccaaagggcgcgctcaggcgcccggaacccgagcgggggagggggaggcggcggcctgttggccccgggacctccacgtc

SEQ ID NO: 233029 - DNA, 1106 bp, Homo sapiens
  chr7:94536808-94537914
  hyper
ccggagccaacacccgaacaggaaggggccttgccccaggccggagaggcccctcgcccacggccgagggggtggggcggcctcgcctcgggccggtgcttttcgcccttccttggccgccagaggctccctctctctccctctcccgggattttgctgccgggctccctctctctgcggccctagagttaatcccatcagccgaggtgaggcacctgttaccccggccttcctcacccccgcggcctctcctccattacaccgcggccgccgaaacggcccggcgtggcgaccgcacgtgggccaaaccccttccccggccggcacccctggccccaggccggcccgagcgtgcgggcgcgtcgctgctcgggccgccgcccgcccgcaatggcgttggggagcgcagcgcgcctcccggggccgcccgccgcgggcagggagcgcctgggggccgacgcgcgagtggaagcggccgccgcagccgccctacgcgctgcgccgtgaggagcgggttgcggtgtacccagcgggccggcgccgagccgagccgccgcgtccaccgtggggcggggggcgcctgcgaggagggggtgggagccgcggcggcccgaccctccccgcccgcggcgctcccgctcgggtaagggggaggctgagcgcggggcgaggagttggggagggtggagaggaggaaaaaatcggcttgtacaaaggctgagttgcaggctgggggtgggggtgggttgtggtggaggagcaataggttgaagatcggaggcattatcagtgggatctattgtttcctggcacattgggaggaaaaacaaagggatttattttcattaccctgtaattttttttcttttctatttttttaaatgtggccagggagctcgtctctctccgtgtcacagtgggatccgcctggcagccgccgggagctgcagccaatgtgttaggacttcaggtgcttcttggcacaaagctagactgcgacctcctaccatagcgcttggcgtcacctgctctcccggtcctgccccagggccgagggattgcgtcccgaaccgggcttgggaatcggctgcctctcaagttggtgt

SEQ ID NO: 233030 - DNA, 515 bp, Homo sapiens
  chr7:95025596-95026111
  hyper
caggaacatctccccgactaaggacaggccgacccccagcaggaccagcgccacgagcttccccatggtctcggggtgcccagcggcgactgcgcggcgccgagagctctcgggggcgcggcgggcggttcctgcctcgcgtacggattggggcccgctcggccccgcccgcacacgcctcctacttacctgagcggcccgggtgccgcagcagggcgctgacgagtcccgccgagccccgccgcccgggttcaaggccgccttcacgcccacgattccttgttttttgggcagaggtcaaggctcaacggagagggagcccgggaccgagttgtggtgggagtttgctcctaacacccgcgaaatcctacctcaattcctcagatggcctgagggagaaaccggagggcccgggaatggcggggagctccagttcagagccggaactccggacttctgcaaggccagacgtgaggcgacactgaattgctcccgagacgcgggaagggcgaagg

SEQ ID NO: 233031 - DNA, 126 bp, Homo sapiens
  chr7:95064141-95064267
  hyper
cccgagcctggggaccgccgaggaggggcgcgcgggagtcccacctacctgagtgccagaagcctctcgcccaggagcgccagcgcgatccccagcaagcccacagccaccagccgccccatggcg

SEQ ID NO: 233032 - DNA, 131 bp, Homo sapiens
  chr7:95064447-95064578
  hyper
tttccccagataccttcgggacggcccggacacgccttacattaggctcatgatgtgaaactttgaattccttcacttcctttttcaaacaacccacccgaaaccctctagcagcccgcatacctttctcg

SEQ ID NO: 233033 - DNA, 400 bp, Homo sapiens
  chr7:95225923-95226323
  hyper
ctgaactccaggtcgcgccaatcagatcagagaaagaactatgggctccgcccctccagccgcggtcatcacagaatggcctggcacggtgaccacggagtgccctggcaccggtgcccgcggctgtgacggaaaaagggtgggaagaacagggaagaggaagcagaaacaggtatctggggcaacgtgggcttaagattagcctcttgggacggggctccgagtcgcgtgggctggggtcccgcccaggctcgcccttgtttacaactcggaggctgtctcaatgtcaagtactcctggccacaaactgtttccaagagtttggactccgcgtgctcattggtccttgctcagagcagggcttttacagtagccaacaagctgcgttcaaaagtatggg

SEQ ID NO: 233034 - DNA, 535 bp, Homo sapiens
  chr7:95401814-95402349
  hyper
aggaggggcgcgggcgtggagggcgtgggcagggggcggggcgagccccgcagactgagtgctccggggagctgtcagtgtcaggctctgggagagaggaagtgatcgctcccggaggagcgcgagccgagcggccggcgcagcgtgagacagcacatcctgcccgcgccggccccgccaccttcgggagccgcctgcaccaacgctgccgccgcccaggagccgccgccggctcggggagcccagttccgccgctgccgagcgcgtccaggtaaactggagcgggatgtcgccgctccccggacggccgcctccgcacctctccccaaccctccccaccccggtgtcgtctgcgctgggaaccaggctggagccgaggcccctgcagccgcagccggacccttgtcctggccccctgcccaggctcctgcgtgctccgctgagcccgaaggcggccaaagccccccagtgacacccccctctcggcagagccgagagactagggcagagaaggaagggtcgtggtgtcaccacc

SEQ ID NO: 233035 - DNA, 767 bp, Homo sapiens; identical to SEQ ID NO: 201053
  chr7:95704890-95705657
  hyper

SEQ ID NO: 233036 - DNA, 579 bp, Homo sapiens
  chr7:96621716-96622295
  hyper
tgtgattccaggagcgcgtgtgggcgcggtcctcgccgcgacgccgcgcgcgggtcaggctcaactgcgaaccttgccaccgagctttcccgcgggaggcttcgaatataaccttgcctatttctcgcctactgagatttctttccagaaaaggacattctcctgctccgaggagatggatccctgaggtccccatgcccgcacagggtgtcctggaggagtttagaggacactcctggggcccttccctgtgtagtacgcttattcccgaggtgggggctgagaatcgaagagcagcgccccccacactgggattgggggtggtcgaggggctacagatgcccgcattgggcttcttagcggcctaggctgatgcctggaggtaggggggattgggtttggctggcgactagctttaatgcccatcgagttcctgggacacccaagttcagcacttctgcatgaaaccgaaacggccagggaggggcggagtgggccgaggctgagggagcggcggtgttgacgccctcttcccacccaggatcgatcgatcggtagggaattttttatctttgggaa

SEQ ID NO: 233037 - DNA, 31 bp, Homo sapiens
  chr7:96622325-96622356
  hyper
gggaaaattcgaatttaatatcctgtatagg

SEQ ID NO: 233038 - DNA, 45 bp, Homo sapiens
  chr7:96622655-96622700
  hyper
tgataaggctcgcacgtgagccaactccggcgcagcccaggctgt

SEQ ID NO: 233039 - DNA, 843 bp, Homo sapiens
  chr7:96625571-96626414
  hyper
attctggagtccaccggcgcttgggcaggtagcaagcagagctagctgcacgttgccccggccggcgttttcaaacaacttgaattacaggctacatcttgaatatgaattagccttccgcactggtgtgaattcgctttgaaactcaacttgtcaagtatggttttaattaaacatcttccggcctcgaaagattacatgttttgtaaaatatattctagcatgaaatttacttccacgatctgaaattagttttttggtaaatgttttcataaaaaagaaatacgaggtgtgtgtgtgtgtgtgtgtgtgtgtgtgtgtgtcagagagagagaagagaaggggggtatgaagtagtttatattcactgccttcctttaaaacgtcctaccagctggacttggagcctgacaggtcccgggtcccaggtcccaggcagccccggccggggcagggccaagaccgcgtgcccaggacaagtaagtaactcaaacccgacccggcaagcgtggcccaagctgcttttgcagttggggacaattgagcggacacacaagttaatcccgcactgatttgtttcggatccatctgcaggacgcctgatgcctcccccttggctgctgcagcggacacctgcctccctccccatcccagactgctctgcttgtcccatgaaagcagagaaaagaaaccatagggtgcggaacggacctcagtagtattcaagacaacacttcaccgtgaaatgtaaagttctcctttaagaattcctgcctaatattgagaacaacagccatgtcaattgatagccgttctaacagacagtccgaactgctccaaacc

SEQ ID NO: 233040 - DNA, 132 bp, Homo sapiens
  chr7:96627014-96627146
  hyper
ctgcgcgctgttgccggaggaacagggacccacagcggtttttgttttcccaggcttgatgatgtgactaactcgttagagaatttgcgtcctaggttgtgtgtgtgtgtgtacttgcgtgtgtgtgtgtac

SEQ ID NO: 233041 - DNA, 821 bp, Homo sapiens
  chr7:96627405-96628226
  hyper
ctttcacgaccacgcgaaacgcaaaggatgtggagtggggaggggaggaaaaaaaaaggggcggccagccaaatcaaagcttgggagacattttgacagtgcgcttgaaataatgctcttaatttttggaaggttttcaagaagggggtggggggcacgtgggagaaccacaactttctcctgtctgtcactcaagcggccagagagggctccaacctccagctcccgcggcaacacacagtgggaaattgcttcaagatacagtggggctctattctttctctacccctgccccgcctttcccgagcagtgaacttcacagagagggtggtaagggagggttatcctgggtgtcaaaaatctgtgcatagcctgagatcagaagagttaaccccaggccctagacccagcccagcggccaaactggcaccccgtgctgatcagcccccgcatccccatatctgcatccccatatctacctccccagtcgggggtggtgaggtttgggggaggggggcgacactaccatatgcatccaccacctaagtccagcccaggctggcttcaatgaaagctggcaaatccggcgaatctcgcagaaattttcttcgaacttaattcaattttaaagtggatttttactattaaaaacgctgccgagcaacacattgaattaatctgactgtacggttttaattacagtgagggtttctctacaaatctgtacaagacagtggctggttcttggaggatctctgcctcctgaattccattatcgggcccctggttccctgcagacggcagctcgtgggagccagctg

SEQ ID NO: 233042 - DNA, 379 bp, Homo sapiens
  chr7:96632631-96633010
  hyper
tgccgatttgtaaacgtgtagatcgtgttactggttcgcgtgttaaagtgcacctcttgttaaaaggtggggaacagggcacgccacttaaaaatgaattcagagttactgaaccggctccccagactcaagaacttaagcgcaacgggctgggaaaaggagggggagaggagcgcaaacgccgctgacctgggaactcggaggaaactcgcgggcagcgagcttcaggtcttctgatacattgaaggaaagaaagaaagacagaaaaagaaaaaaacaaactgtcctggagatagctagacatccagggctgggagctgggaaaatcaattggcataagccgctgccggcgggcttcgcgcaacgtaaaaaataaagt

SEQ ID NO: 233043 - DNA, 264 bp, Homo sapiens
  chr7:96633236-96633500
  hyper
tgggcaaaggctcgcggcttaggtctctaagcagatcgaaagtcggggtccagaccgagaggatcttcaggtctcgtccacccaatctcaagcctctggaagggcgggctgccggcgacctcctccagtcccgggacccggaacccgggaccctggacgccggtgcgggcgggcctgccctcctctgtgcctggcccccagtctggccctcctacctgttgaccaggcctgaaccacgcaccggggctccgctgtctctgcttg

SEQ ID NO: 233044 - DNA, 658 bp, Homo sapiens
  chr7:96634277-96634935
  hyper
atatataagaaatacggcctgaaacggcagggaccgagccagaacagggtctgatttttctttttctgtaccaccccccagtggggtggagcccaggtgtgagggttcgtcttccttctgtggtttcaataaaatacgtctagaaaaatccacggtgacaaggagctcccacaagagtgtagtaggaccagagtggcagggacgtcaagaaaggggggcctggatttaatgcgggggtggggtcactgcttctaagcacaggcaacctacaagggtgcaaagggattgaaagagagcagcccccagttggctgtttcaaggctgagatattggcaactggggctccgggatttggggcacgagctgcggcgggaagcatcggcggccggccgggcagaggcgcctccctccccaacggccccgggcgccacacagcgcggcccccggctgcagctccggctgggattggaactgcggaaggtaggcgaagaactctgcaagtcgcgcacacgccagtagaagccgtgcgcctgtgacgtcagggggcgactgaccaatggggaggcactgccctttggagacaaaccattcgactcgtggcgtctgcatcaagtctgaaagcagacgcgcaactttcgcagaatccaccttaaaatct

SEQ ID NO: 233045 - DNA, 388 bp, Homo sapiens
  chr7:96635240-96635628
  hyper
gggtggaggaaacccgggagaaggctttctccagcccccaaagtttttgatgatgaccatgactacgatggctgacggcttggaaggccaggactcgtccaaatccgccttcatggagttcgggcagcagcagcagcagcagcagcaacagcagcagcagcagcagcagcaacagcaacagccgccgccgccgccgccgccgccgccgcagccgcactcgcagcagagctccccggccatggcaggcgcgcactaccctctgcactgcctgcactcggcggcggcggcggcagcggccggctcgcaccaccaccaccaccaccagcaccaccaccacggctcgccctacgcgtcgggcggagggaactcctacaaccaccgctcgctc

SEQ ID NO: 233046 - DNA, 39 bp, Homo sapiens
  chr7:96636252-96636291
  hyper
tgggctttaaagtgtccctcaccttcatccctgaccggg

SEQ ID NO: 233047 - DNA, 381 bp, Homo sapiens
  chr7:96636471-96636852
  hyper
caggagagtcatttcaaaacatgccgaggatgcttgatgcactgagcttggagctggtgacatcaagtcaactggccgcgtaaacacctgggtggctcaagcacagcttcaggtactgttaagccgggcacaggggccccgctccgcccggacagctgccgccttgctgcgctgcgcaccccagagagcctccggcaccgcctccgctgcggcaaagcgggctgtttgtctgagggcctctggcgctcccttggcccagacgctgcacattgttcgggccagggactgggtcaaggagattacgcagacgctgggagcacacgggcagagtggaccaagagaggtcggggcatcatagggatttttcgaggtaacccttat

SEQ ID NO: 233048 - DNA, 297 bp, Homo sapiens
  chr7:96639201-96639498
  hyper
cggccctgtcgccacgctcgccagcgctgcctccagtctgggacgtttctgcctcggccaagggtgtcagtatgccccccaacagctacatgcctggctattctcactggtactcctctccacaccaggacacgatgcagagaccacagatgatgtgagttgcccaagggaacaccctagggaaacgtctgaacaaggaaaagaggatccgggacctgcttgtatctgcgaaaaggagccaaaggagcaggcttaggagagctcataagtgtggcaagaagccgactaggctcattc

SEQ ID NO: 233049 - DNA, 112 bp, Homo sapiens
  chr7:96642693-96642805
  hyper
tggaggaaagatgtcgaaggggcttcaccgtccagagattcatcagactacacctgcctttgcaaatgtccgcatacctgtggttctaaaggagccccgtcgcgagctccgt

SEQ ID NO: 233050 - DNA, 1678 bp, Homo sapiens
  chr7:96645918-96647596
  hyper
gcaggcggatccgccggcgtggcgagcttcccagaggtgcccgagggcgtctgccctctgggtgtgcctccgggagggctagagagctctaggttggcaagatcccagtgaccattgggaggcgcgcgatccaaggggttgcagggatggggcggagaggaggggcggttgggtagcctaaaggtccctctcccagaatacaaggaagcgctaagaaggaggatgtgggggcagtgttccagcaggcatcccaggctcttccggctggagagctcaggagactgagcggtgtcaaggctggagtgagctatagggtgcgctgggaggaggtgagcgcagcctggctttggcgcgctgtgggtgactcccaggacggcgcggccaggacgccgcgagccgtggggcgtccggtgggatcaaaggaaccagaggaggccagccgacgcgtctgggattgtgggataaggggcgggagagaggagattgacatgggcggggagatcctggcctggcctgtgtcaccggagggggttgtgtgcgtttgtgtctttgtgcggatcaacgctctcgggcctgaggccgtgccctgggtggatccgagtgtgagtggacaggctcccgggtgggtgcccagacgggagggagagcgagcgagcgagatcaagggcagcgaggtctgcgggttcctctgtgtgtgtgtctcaggccctgtggctcagcactggagccgcctggcacccacaggaatgcggcttctctcggatccccaggccgccccttgtcccacaaggaggtggccgccaggaaaaaggggggaaaaggggcagaaatccgcctagctcaacccgagcctcaaacaaaggccaatttatctgatctcttacaggatggcccaggaggtggtctgggcaccgaagaatcgcgctggccctgaccgcatgccccagccttcctggggtttgtgaggagctctgaaggtgggggtgaggtgttgtaagtaaggggtggggagtatgaagacgcccactgaaaagaacattaatcttagaaaggacttgattcgtcttgggagcactatactgagagctaggcaagtggaaaccggaaggggcaggcagaggggtcacccagtgcgatgtcaagagtggggccggctggtccgggaatatgctggggagtggagcacgtttatattcgacgtaggaaaaacaatggagaggaagagaaggtggaagggagggcaagggagagaaacatcacatagatatttttagactttgctgaagatctgttatttttacatccttgggctcgggacggcagggagttaaattcccctgagagaatccccatggggccagggaaagcccgctgcagactggtttaccagaatatttttgtccacggctcccagaccaagctaaaaaataaaaaccgcacgagagaaaaggcctttgcgagtggaagaagtgaggttggcacaagggaaggaatcctgaaaccaagtctgtgtccgcgcggcgttggtctgggccacctcgcaatgaggctttagtgatcttaacgacaagcagcctcaaagctagggtggaggagtggtcatttagaaagagcttccctctttctctagaagaatccgaaccctcccttccctcagctcggccgcgcccggtgaata

SEQ ID NO: 233051 - DNA, 401 bp, Homo sapiens
  chr7:96647814-96648215
  hyper
cagggagaggcgtccgcgcaggggaaagccaggcgctggcacaccgcgggcgcgggtttctcccagtcggagtcgccagaaataaagcgctagctctcggtgtaatggaaactcccgaaatccttacaagcaaagaaagaaaagcaggaagtggatatcttcatctcttccccaatccccctattctctgtgagcgcagaaaacaaaatggggcaccctttggcttcccgcccccccccccgccccccgcaaaccttcctattgccccctcttccccgcacccagtgctccttccgagaaagtacggctggagcggactggggagacggaaatattgagtcgcggccgctgggggtgccggaggaggggtgcacaggccaggctgccgggcgtagttctgc

SEQ ID NO: 233052 - DNA, 610 bp, Homo sapiens
  chr7:96650156-96650766
  hyper
tccaggtagctggacgctggggactggttggaggtcggagggtgggcatgagggtggtggctgagcgagcgggacgagccctggggctcccacaccgctggagactgcggcgagttacacgccattgggtcgctggagctgggactgtgctccgggggcatctccccgtttttcatgatcttcttgatcttggatcttttgttctgaaaccagattttcacctgagttggggaacaaaggcacacgttaccgggacactcagaggtcgcccgcgccttccccggggcggcgactggaggcatcttcggacctctgggcggcccagccctgcctggcgtctccccgccgcttgcggcctaccgccaagaagctatgccttaggcaaaccatggagctctggccccagagggcgccctggccggctcggggcgccccggcccagcgaggccacgaccccaaggcttgtcttttgtttgggctgggggtgggggacgccagcgcggcgggtgtgcgcccgagtgtcctcggcggcggcgcgcctcgtgtaagcctgcgcaggacgcgcggaacgcggcgaaggtctccaaaacaatcgcgcgagcccggcggg

SEQ ID NO: 233053 - DNA, 570 bp, Homo sapiens
  chr7:96650986-96651556
  hyper
agcgccccccacctcgcgacccttcggtggccgtggcctgaagctcccgtaggctcagggcacgacccttcagtttctccgctccaggcgacgttctcagccttttcttagcctgagaccaccgcgagaacaccaggccttgctcacccccgaggaggctctacattgttaagaaaaccagatagctgctctgggctgcctaggccgccctagaaataaccctccgcttgctttcaacccgcgaaattggccccacagctccggaggcccgctacggggtgggggcggggggcgcggttagtgggaggtatctccagaccgctgatgaataccatccccaccgtctcaaggcctgactcaccgagttaaagcataggggctgatgtctttgggtctgttagtttctcacgggtactgtcaaaacagctccagtcccatcgagactgaaccgcgcgacccaaccagacgtgcagctcaggcaggtctagtgcatggcagcgccgtatttacctgtgtttgtgtcaatcccagcgaggcggccagctcggcgcgttccggcaaggcgaggta

SEQ ID NO: 233054 - DNA, 628 bp, Homo sapiens
  chr7:96651949-96652577
  hyper
ggattcagctcttgcggtcgttgcttcttctcccggacttgtttttacgcccaccctgtgctcctccgcgtttccgcccctccccaggcttcaagaacaccagcccctccccaggcttcaaggaggtggccctgggccgtgaccctacttctgtcggcgtctgttcgggcgcccgcagaagccagactcttgggcagggaagacgctaaccgaggtctccaaagttcaaagacccacaagcaaactgctccttcacttcagcagcaagcggtcggggccgccgcagacagagggtcgattatgcaacccccataatctcgctgcagatctgcgagggcacagatgtgtctggtttcttttacaaatagacttaatatgttcttggcaaaaaaaaaaaaaaaaaaaagaaatcttccacttatgcacggaatacagagagagtgaaagaaacgtagacacctcaacccggggctctcttttaaagttcagcaagagtcacacactgagaaggaaccggtggtggggtgttttcgtaggaaaggggcggcaggtcaggatgagattctcactgtcatgagtatgggtttgggcgggagggggagggattgccaaacgcgtgttgtacaaa

SEQ ID NO: 233055 - DNA, 1318 bp, Homo sapiens
  chr7:96652879-96654197
  hyper
agtttcaaagcggacgaaaaaggaggacggaaagacaaattgtgggcgcctatggagacagaaaaaaaaatctatcctacaacgtgacccctcagcaaccctcctccacctttaaatggctttttgtttttggaaatgcctggataaaccgcaaaactctcggcgcgctcttctctggctggctacaactccttaacccccccacccccacccagcgtgctcagggcacccgcaccgtgctagcttgtggcggctctcaaactaatcctgactgagtttttgaggcagccttctattcccactcgcaccaacccagcacgcttaccaaaattcccaagtaaccttctctttgttacgcaaacgccaggagctgcttgattctttcttctctccacccctatcccctttccagcctagccggcttcctggccgggcaagctgggaattcagcgactgaagggccttggaaggtgccggaggggagagacgctagttcgaacctccacagggctctcctactaaaaatccctaaaatgctggcccgagaaactctctttgttggagggtctgagtcctactcccttctgccgcgtgcgcccccactgccgtgaaccgctgtgacccccaatctaccaccccatctcgcgcccccagcgtcctagtcgccctgtatctgcccagccttccccctgtccatgtacctggctggttggtggcgcttgggacgcggttgtaggcgccgccgtactggtggtaggagctagcgtagctatagtcggcataagctttggctgggtagctcccggcggagccgttcacgccgtgatactgatactggtaggggttgagagctttgccataggaagccgaggtaggagagcagtagccgtgcggggctccccccgtagggctgtagtagtcagaatcggtagctgaagactcgggcaaagttggcgattcctgagacggatggtgcatagctgcggacgtctggaacggagcttggaagtcgccggatcggatgctggggacccttctgtcaaacactcctgtcatcgctcacgggcggcggcagcggctgtccttgctgttgtggcggcggcagctgccctagttggctgtggggctgctctggtctaagcagacatggctgtgggagcgagggaggaggaggaagaggaggaggagagaaggaggaggcggcggccgcggcgaggaggagactgggagtcgtgaagtctctgtctccggccggctgactgctggctgaggcgcagcacagccttggttaaatccttaattgcgcgcttacgcacag

SEQ ID NO: 233056 - DNA, 644 bp, Homo sapiens
  chr7:97361011-97361655
  hyper
ttatcctgacgtctcgagggacggaaaagttaccgaagtccaaggaatgagtcactttgctcaaatttgatgagtaatatcaggtgtcatgaaacccagtttcgaaggagaggggagggggcgtcagatctgcagacggaagcaggccgctccggattggatggcgagacctcgattttcctaaaattgcgtcatttagaacccaattgggtccagatgttatgggcatcgacgagttaccgtctcggaaactctcaatcacgcaagcgaaaggagaggaggcggctaattaaatattgagcagaaagtcgcgtggggagaatgtcacgtgggtctggaggctcaaggaggctgggataaataccgcaaggcactgagcaggcgaaagagcgcgctcggacctccttcccggcggcagctaccgagagtgcggagcgaccagcgtgcgctcggaggaaccagagaaactcagcaccccgcgggactgtccgtcgcagtaagtgcccgcgcggtgctggccgcggctgcccgggtcaccccgccccgcatctgtccgaggtggccgcgctgggggcgccgctgcggcgagggacagtggggagactggcttcccaaacgccaacgcccctctttgtcttccacct

SEQ ID NO: 233057 - DNA, 1340 bp, Homo sapiens
  chr7:97361999-97363339
  hyper
gatgatctgaattactggtccgactggtacgacagcgaccagatcaaggtgaggccccttcccaggacggcccgcacccttcttcctgggctcgggagctgtcaccttcccacgcaacagcaccctagttaacgtggcacgcaccgccaccacggaaagaggcagcggttgcgtgcgagaggatggaaaggggcactatttcccgggttccccacgggattttgtgcccacgattcaagtttcttcccgagggctgcaccgtccggcccaggaactccctgcagtagggatgccctcccggatgagcccgagatcctcacaaggcgggaaatctcgtaagatttcatcccccaggacctgggatttcgggggctccggtccagctgcactgccctagcgtctgggcacgggcagaggagggcgcctgggtcgcgggcagcagcgggcacacgcgcgagctgcagggggattggagggccggaggctggagggaagttaatttcctgccttcacgtttgttttgcggacctgaggatgtagcttgaagtctccctttagaaactcgtaggctacaggcgctggggagcgcgcctcggaaaaacggtgaaagtcgtctgtaaagcgttgtcacccttccccaccggagccccagccccagatcccacacacctgtgtgcatttagggcggtgaggactctacaaagccggcaccgagacaagacaaagtcaggtggcggcgcagcagatgagggaaggtccccgggctgggaggaaagagcggaaagcgctcgaagcttgaagacgccgagccagctgctaactcgccctggcaggcttgcggggggcgggacgcgagttcggcggggaggggcgcagagaggcagcgcctcgggagggaccccgctcagcccgagcgtggggaaggccgcctccccacgcctcggggccggagtacagcggggggaagggctcgggttgctgggtgcctcgctctggttgccttacacgccctttgtccgtgcttttgtctcccaggaggaactgccggagccctttgagcatcttctgcagagaatcgcccggagacccaagcctcagcagttctttggattaatgggcaaacgggatgctggtgagataggcgaccgtccctaggtgtcttgggcagcccgccctgtctgctcactccttcctggagtaccccagggtctctcgctctgaatagagatttccactccaagaggggtgtaattccccaggcgcgacattggcccacaccgcactaaggcacgcacgggcccgcggggggagggaaagatctggttcgcatgcctcactgt

SEQ ID NO: 233058 - DNA, 143 bp, Homo sapiens
  chr7:97680598-97680741
  hyper
ccacttccgggatccggtttggctccgcccccgccctgctgtatccatggtaaccaggtctccttcgcaaggctggaccagtcgccacgacgagctccggggcgccaccggtggcctctctgatggcccgctcggcgaggggt

SEQ ID NO: 233059 - DNA, 41 bp, Homo sapiens
  chr7:97736112-97736153
  hyper
cggtgtggactgacgagtggctggccgccctgtccatcacg

SEQ ID NO: 233060 - DNA, 51 bp, Homo sapiens
  chr7:98030099-98030150
  hyper
ggccctgggcttacccggtaggtgctctccgtgagccggttcacctcctcg

SEQ ID NO: 233061 - DNA, 509 bp, Homo sapiens
  chr7:98245893-98246402
  hyper
ccatcagcgtccggcgcctggtcctggtcccggtccccgaggcccccgggattcttcccgagcgttttccgagttggcgcggggggtggaggcggggccatggagcgcgtcccggggaccgttgcatccggaggcggccgtcgtgcggctccttcccgcctcgagagtgaggtggccgggccttgacgagaaggcccacgcctgccgcgggggtggctcgcgatggcagtcggggttcgagtcccgcctggggggctgctcctgctggagaaaacgcctccctgagggcggcggcaaacgcgcagcgaggccccgtgccgcgccagaagccaccctgagaaaggggcaccgggacaccgaggggttcccactttctcctcagcctgtgacgcccgcgtcctcgggtgggttcgaggggcgcctgggcacggccagccgaggctctcgagagccccagtgtcgttttccacctcaggcctcctttcctgaggcagagcccgggacctcgc

SEQ ID NO: 233062 - DNA, 651 bp, Homo sapiens
  chr7:98247122-98247773
  hyper
cgcgggaccccggccacgtcgtggagcagctcagccgctcgctgcagaccctcaaggaccgcctggagagcctcgaggtagcggcccgcggggagcgcgggggacctggaatggggacgctcccgagtcgggggcggaagactcgggaggatggggaaagggggcctggccctggggagggtgtgatcgtccgtgggggtgagctggacttgagggtgaaaggcggggatctagatcctgctcgggaactcccctgcgtggtatcccttcccacaccgctgctcttgctggaaggaaacgtttaaattccacccccgcgcgtcgggactgccagcgggatccgccgagcacttcccgaggtccgggctagcgaacccagacggccaagccgcgggcgccaaatacccggggacgcggtagcctctatcctcttgcaaatctccaaatctccgcgagccgggatgcgctcccgcaggccgtgcgggttgctgcgaggctgccgcgggaggtcagctgccccgggcatgtggtgtttctttctttaaatcaggtcaggctgagctagagggggcggaagtctgggggcggaggtcgcagggaggcgagcgcagggggtcaccggcgaccccagagcgcgcattagaggggcaa

SEQ ID NO: 233063 - DNA, 145 bp, Homo sapiens
  chr7:98923236-98923381
  hyper
gaaactgccaaagcgccacacttcggctcgcgattgtgaggaaattggttgaggaacggagtgggacgcccatgccgcttcgccagcacttgccaggcgttccgtggggcagcatctcctctgaagggccgccgacagtaccacg

SEQ ID NO: 233064 - DNA, 231 bp, Homo sapiens
  chr7:99006252-99006483
  hyper
ctcctgggccagccgccgccgccgcttcagtggccgcagtggccgcaaggacccggacctcagggaggcctccgcacgaagtcggaccgtcctgcgcgccgcctaagtccaggcttgcccgtctgctgccaggcaacaacgcccctagtctctccgttcgggaagacgcgtggccctgcctgccacccaccggaagtgagggcaaatggcaacagcggctctggaattcta

SEQ ID NO: 233065 - DNA, 457 bp, Homo sapiens
  chr7:99036314-99036771
  hyper
ttgaagtgtccggcgcagtgcactccgacggggagccctgcccggtccccgcggcgaaccagtctcttcctcgggtccccctctccccaagcgcgcaggcgcaatccgcgtcgccgactcacgcggctggtttcaggtttctggcgaggccggtgttcggctggcggctagctgggactagcggaacggcggagtctcgattggcagtgcctggacaggcgcaagggccggcgcgggctccgggcgctcccggcatccctcgggcggcggcggcggcggcggcgaggcgaagcgaaggaggagtgtgtgcggcggggccggcggcgggtaaaggcgagaaggctgcaggagaccgagggggagccgggccggtggggccgccgccgccgccatgcaggaaatcatcgccagcgtggaccacatcaagtttgacttggagatcgcggtggagcagcag

SEQ ID NO: 233066 - DNA, 163 bp, Homo sapiens
  chr7:99097872-99098035
  hyper
cctacaactctctcggtcaaacaaccgaaaacatcccgtgccggaagcgcgtcatcgaggccttgcggcacctttccctgcatttccggggcctctctaggcgcctgatggggtgaggtgcatctcgctggtttatcgtcctagccccgcccgacgcagaggg

SEQ ID NO: 233067 - DNA, 119 bp, Homo sapiens
  chr7:99102377-99102496
  hyper
gtggtgagagtagcgaggatgcgggtgaagaaaacctaagggccccaaattcaacataagcgaggtttgcgggctgtcagcaaggtacagacctacttcaaatcggggcgcagagcgtt

SEQ ID NO: 233068 - DNA, 687 bp, Homo sapiens
  chr7:99149224-99149911
  hyper
atggcacttggtatcgtgtaagatcgccagaattttacaactcggggtacccaggaaaccagaaaagcccccaccacaagaaaaaccagtgggcacaactggggagcacagatatctgactggggtcattttgtccgcgcgtctttggggtaaaacaccaggactgggggtccagaagggacacgcagaccgcctctctccagtcccaggggtgtctccaatccggaaaccaaaacttcgttcccttcccacctgtatccagggacacctctgctgggggacagcgcttgccaccgccgaggctggcgcgaggaacgggggcacggacccgcttccactccgtcccgggcggtcgtggcgaggggattgcaggacacagccatgcacgtccaactctgtccccgcccggagaagtctgggatgctgggatagaaggggttgtgactttggggaccaggagcactagactcacatccaagccccctggccttcagagcccagggaaagcgtcacaaaagccggaagtgcgtcacacccgccttccggagctgcgctccgcttcggggtcctctctaggatcgcgggaggactttgcatccctgtgtagggctctaatctcgggtttggggatcttgctcctcagcttgtccgctccgaggaggtgcacagggcggggaaaaagggatg

SEQ ID NO: 233069 - DNA, 269 bp, Homo sapiens
  chr7:99155659-99155928
  hyper
ttcccaccagggacgcaactgtcagtttcctccgtctctctcggttctattccaatctgctcatctcccctcccgtccccgctttccccaaggacctactgagatttcgatcccacaacttagtgggtcccatctcacccaggccccgcaatcctcgccttctacttgtcagcgttgtactacactctgagcaggcacccctgtgctactcacggaagcgggaccattaggtcggccattcctcctcaccccacgacacgcacccactg

SEQ ID NO: 233070 - DNA, 408 bp, Homo sapiens
  chr7:99595186-99595594
  hyper
ttgactcattttgaggcccccgtcgtagggtacacgccctgggaatcgggggtcttccagtatagggaaccaccgagatgcgggccctccgaagtcctagagagggcgcctcggccgccggcacccgccacacttccggcctttgtgggccgcagcgacggcggtctgcggctgtcggttctgtttgttgctgtcactgctgtttgttcttgccagcggctaggtgtgtagttgcttggggctcctagcacgaggcctctgtccccaggcacgcagcgccagtctccggctgttgcgccctgggcgccgcctctctccggcccccctttgtttcctgagccagctgggaagactaaaagggtgggtcctgggagcggcccatggttcgacccttcttttcaggcatcc

SEQ ID NO: 233071 - DNA, 52 bp, Homo sapiens
  chr7:99613207-99613259
  hyper
ttccggcctttgtgactcattgtgtctgtgtcgaggcgtcgggagggcctaa

SEQ ID NO: 233072 - DNA, 140 bp, Homo sapiens; identical to SEQ ID NO: 201066
  chr7:99679773-99679913
  hyper

SEQ ID NO: 233073 - DNA, 199 bp, Homo sapiens; identical to SEQ ID NO: 201067
  chr7:99680213-99680412
  hyper

SEQ ID NO: 233074 - DNA, 350 bp, Homo sapiens
  chr7:99698203-99698553
  hyper
cctccgcccagggcgggagccagtccagccattggccatcacacccagagacaccgcgatcccagcccactgccgcctttcccgggcccgagcgaagctccggatcccaggcacgcccccccgggccgcagctctctccgcggccgccgcgcggaaggacactgtttacacgacactccctccagcctcctcgcgccacttccgcccggctccacttccgctcggagggcggcctcaaacggccaatcccggcgcgcagcggccccggcctgcccgcccccggggcctacgcgcgcctggggagggcgcgggaacctgggaatgcccaaaagcgcgaaggaaagcgggca

SEQ ID NO: 233075 - DNA, 226 bp, Homo sapiens
  chr7:99699434-99699660
  hyper
cgggcgggaggggcgcccagggccagcctgtgtcgcaggatccttcactgagtccttccacccgccagtccgcggggacagtggcggccgggatgtggccgagctcttctaccggaagctgacgggactgccaggagacgagtccccggttgtcatggtaaccagtggcgggaggcgggtgaggagcggggtcccgtcgggccgggtgggcgccagctccctccca

SEQ ID NO: 233076 - DNA, 52 bp, Homo sapiens
  chr7:99717143-99717195
  hyper
ttccttcactacccggctgccaggaccttcaagaggcgccacaaaacggagg

SEQ ID NO: 233077 - DNA, 122 bp, Homo sapiens; identical to SEQ ID NO: 201068
  chr7:100027394-100027516
  hyper

SEQ ID NO: 233078 - DNA, 480 bp, Homo sapiens
  chr7:100091122-100091602
  hyper
cagagggagccagcagaggccgttggggggcaagcaaggacttgcttctgaggggagacgtgggtctcggcagtgcggacccgtccggtcatgctgaggtccccgaccttacccgcgttttcctttctcccccgcccgcggcacagccccaccccgcgctgccgctgcctctgcccctgccgccccagccggcccgcgagcgtgacgggaagctgctggaggtgatcgagcgcaagcgctgcgtgtgcaaggagatcaaggcgcgccaccgcccggaccgaggcctctgcaagcaggagagcatgcccatcctccccagctggcggcggggacccgagccccgcaagtccggcaccccgccctgccgccggcagcacacggtcctctgggacaccgccatctgaggcgggcgggggggtaccggggcgcctggactggggagggggcgggcacgcctggctctcccgggagcctcgcctt

SEQ ID NO: 233079 - DNA, 1081 bp, Homo sapiens
  chr7:100167116-100168197
  hyper
caggaaggacacctacaggccgagcggggcgtggcaggagccagcagggtgcatggaggccccgttccaaagccctctaatcgccagcgccaccaccgctgccacaagtccgatcactggcctcacaccgaggctttctcggttgccccgacgacgtgtccggaccgcagtcagctgatcggtagagacgcccccacgctctctgcccctataaaggctcagtcttggggtcgaggccgcctctcttggacttccctactcaaactccagttcctgggcgacgtgaggattagtctcgtggggtgggggttccggagcggtcggcggagggagggaggtagtggggagcccaggccaggggcaacagtcaccgggacactcgctgtgcgcagagtccttgccccaaacttccagtcgggagcccgggagagacgctgggcatcaagacgggtggcagcctgcccggccgctgctcccggcccgccgagttcgccacctcacccccacccctgctggcctctccccgtgctcaagacacgagacccagccgtctctgcctcttctgcagccactttattgccttcgcccctgaatgaagcccgcaggcggcggccccggggagagccgggaatggccgccgtgcccctcagccagccgctgccctgggcctgccctgccgacgtgcggttctgcggccacctgcgcgcagacccgccgcgtcccgagtgttccgagagcgagcagaagtttcgcgcgtgccgagcgcggctccagcgcagcctgagcctggcgggtgcgtgcaccaccagcaagtgcgcagatgcgcgccagcaccacctgatcgtcctctacacccgcgacagcagcctgcgcgtggcggcggcaggcgaggcggagcagcaggcgtgatacaacaccctgctcgaggagcgcggtgatgccggtgaggcccgagccccgggcttccgggggcctcgggggcttctggctgtggtttctccgtggctcgcccctcccccaggtcgccgaaagttcaaacattaaaggggcaggtttagagttctccgggcacaggcccggc

SEQ ID NO: 233080 - DNA, 755 bp, Homo sapiens
  chr7:100202090-100202845
  hyper
gcgggtggaatgggcggcctggggttactgggacggtgagtaactgccggcccccgtccgcaatcgggctccctccgtcgggcgcgagggggcaccccagggctggggggactaggttcctccaaccccggggggcccctacacccagccctgggctcccgattgcggtcccatcaccccctcctggcggcagaagtctcccttgcaatgtttcaggcggggacctccctaaaggggtcctcgggggctgtgccccaagtcgaggacaccctctccagcctgaaaggggactctgctgcagggccggggagatgggatctcctaggggaagaggcgcggtgcggccgcgggtcggggaggggccagaagggggcgtccagccagttcctcctcccgcttccaccgcccgccagtgcgccctgcggccccagacttccccgagccgcgctcctcccggccgctctctgttaacctgcccccatcttacctccccttcttctcgtcccctcatcctgagccccagacatccgagctgcctgccggggctcccagcctagagttctcctgaagctgaccgagggtctccaccgccccccacccccgctcctctctcccctccccagagcaccaattttgcggggggcggctggagaaggcccagggaaccctgaccacgcccaactggcccgagtccgattaccccccgggcatcagctgttcctggcacatcatcgcgcccccggaccaggtaccga

SEQ ID NO: 233081 - DNA, 523 bp, Homo sapiens
  chr7:100203046-100203569
  hyper
cctggtataacacgcgggcctgtcacttgtgagtgcgccaggacttgaccttgccaaccacgacgaccgacacccctgcagggtcccatgggtgtgtgtggtcctccgtgctgtggtgtgaacgccttcaggaggggggcccagaggacgcgggaggtgggagtgggagctgctgcaggcacccagtaggagatgaggtgcaggcgcccaggggtgtcccgccgcgcagtccccgcctccgcccgccgccaggtcatcgcgctgaccttcgagaagtttgacctggagccggacacctactgccgctatgactcggtcagcgtgttcaacggagccgtgagcgacgactcccggaggctggggaagttctgcggcgacgcagtcccggggtgaggggcgggacctgggcgagtccgggagagagtcggcggaccgcacgcacgcggctgtttggaggggcggggttcagctaaagggacgggatctgaaccccagggctccaaaccggcgaggggagcaggtt

SEQ ID NO: 233082 - DNA, 413 bp, Homo sapiens; identical to SEQ ID NO: 201073
  chr7:100224177-100224590
  hyper

SEQ ID NO: 233083 - DNA, 376 bp, Homo sapiens
  chr7:100253835-100254211
  hyper
tgagactcgacccgctcgtgcgcggaggtgacaggccccggggtgcccagagctcggatggatggcgcgggtttggaacgcagggctgcgggagccgggggcccgaggctcgctcacctccgccgtagacgcccccgctcatagtgcccgctgcgctgctagcggcccgtgggcggtggcgggatcagcaccgaggcggccggacagctcccgggatccctggcggggcgggactctcagcggccaattgggaggccggatcccccgctccaacggcgccgccgattggctgccaggcgagacaatgaccgaccgggggcagctgctttaaaggggaagatacactctattaagcggccaggaggagatggggcag

SEQ ID NO: 233084 - DNA, 237 bp, Homo sapiens
  chr7:100271101-100271338
  hyper
atcacgtgaccagcgagcggtctcaccctcctcatatgccagtaccacctcctccagtcccagaggggggatgtcttactcctttccgtgaagcaaaccctttgagtacggtttgcgtccacaaagcgtagggtgagaaccttgggagcgactgggcccgtctttgctccctcggtggggttttgtctcctggcttcccccaagtgcgaggcagttggtctcgcccagccgggtcct

SEQ ID NO: 233085 - DNA, 141 bp, Homo sapiens; identical to SEQ ID NO: 201074
  chr7:100303156-100303297
  hyper

SEQ ID NO: 233086 - DNA, 594 bp, Homo sapiens
  chr7:100318139-100318733
  hyper
gcactcccctcccgcgacccagggcccgggagcagcccccatgacccacacgcacgtctgcagcagccccgctcacgccccggcgagcctcaacccaggcgtcctgcccctgctctgaccccgggtggcccctacccctggcgacccctcacgcacacagcctctcccccacccccacccgcgcacgcacacatgcagataacagccccgacccccggccagagccgcagagtccctgggccaccccggccgctcgctgcgctgcgccgcaccgcgctgtcctcccggagccggaccggggccaccgcgcccgctctgctccgacaccgcgccccctggacagccgccctctcctccaggcccgtggggctggccctgcaccgccgagcttcccgggatgagggcccccggtgtggtcacccggcgcgccccaggtcgctgagggaccccggccaggcgcggagatgggggtgcacggtgagtactcgcgggctgggcgctcccgcccgcccgggtccctgtttgagcggggatttagcgccccggctattggccaggaggtggctgggttcaaggaccggcgacttgtcaagg

SEQ ID NO: 233087 - DNA, 188 bp, Homo sapiens
  chr7:100424341-100424529
  hyper
agttcggggagcccgggcaggggaatgtcccgggtcgtagccagactccatctctttcccaaacaaaagaaaactccactacccgtcgggcgcctcttccccgcccccctcccgttccagcactatcggtccgaagtgtttgggactgcagtgcccgggtaggggtagtcagaggccggcccctccac

SEQ ID NO: 233088 - DNA, 806 bp, Homo sapiens
  chr7:100425036-100425842
  hyper
cgcgggcggggatggtgggagcccgagcggggacggagcgggagggagggagactgcggcgcggagccgggcgggccgggccgggcaggggctgagctgcgctggaactgggccgggcggcgccgggcccgggagggaggggcgcgcggggggcgggggcagctctcccaacgcgggggctccgcgagtgagccccgggcgcgctgattggagctcacgctactgaataattcatgagggaagcggagaggggcaccgagtggagcaggtcgggaagttgagagaaagtttggagaagggggaggggcggcgggtgaggaaccccgggaccgcccagatgtgcgccgtggcggtgcgcgctgtccaggaccgagcatgtcggggctggggcccagggacccccgggacaggcccgaacccggctggcaccagggagcagagaaaacacacacccagcagcaacacggagggccgcccaggcgtgcacgtaaatgttcaccgcgcacacaaagcccgctctgaccttgctgcggactctagatgccgctcttggatgcgcccaccaccctctagtgggcgcagggactgcgttttgggggaaaaggaaggaaaagggagtagaagctttggagaattgacggccgcccagggggcctcaaggagcaatcccagtttggatagccttgcagcgaacgttcacacagtcaccccataaacattcagtgttggggacctactgtgcgcgcaaccaagccctgaaaaatgtccagaggaggcgcgcactaagctgcgctagggagtagaga

SEQ ID NO: 233089 - DNA, 252 bp, Homo sapiens
  chr7:100546904-100547156
  hyper
ccctccacgggtgtcggggaggaagggcagcttccaggcagttccatgtgggccaggcaggctgtggggctgagccaatagcagctcttcctgcctgacacttcctggacttgtcctatctttttcccccgtgtcccgcttcccacagcgctgacgtctgtctgtccgggtgcagggagaagggaggaagaggggagaggtggggcggtgcaaaggtgaggctgtgctcagccctgacgctcagcaaaaccg

SEQ ID NO: 233090 - DNA, 47 bp, Homo sapiens
  chr7:100609061-100609108
  hyper
gagctctgctccgtcgccctaaagtgtagccccgcctccttgatggg

SEQ ID NO: 233091 - DNA, 33 bp, Homo sapiens
  chr7:100609361-100609394
  hyper
ctacggtggattccggccgcttgtctagggtgg

SEQ ID NO: 233092 - DNA, 557 bp, Homo sapiens
  chr7:100660367-100660924
  hyper
tgcagggagagccccggagtccagagagtgagtggttctgcgggaccaggaagtaagtgatcgctgtgctccgggaggatgctggaagaagattccagacgcagcttttttgcctgctatggttaccgttgctatgaaggagggcggccctgctgacccagagccagccctgtctcccgctccactctgacctcacccctgagtccagggctgaacgcacgctcctccgtggcccccgcttccaccccgtgcatgtggggggcttctgctccgctccctcctgttccggggtccagcgggcggctccccaggcaggctctgcacttacccgcagcccagtgatgcagggtcggaggggtggtcggcagtgggaaagggcgtagggcagatgccgggctgactcttccttttgccagaggaaatcccctctgccccctagtcctccccctaccaaggctcccatcactcatcacggcctctccctacagaccagaatctgagggagagcagattcggccttgagaacgcctacaacaacttccggcccaccctggaga

SEQ ID NO: 233093 - DNA, 233 bp, Homo sapiens
  chr7:100728513-100728746
  hyper
tactcagagaacccgccctcaggtagttccctgtttgtgacatacacacacttagccctgaggctggactgacaggccgacctggctggtggactccagcccaagcctgccagctgcctgccggggtgggggccttggcgggagaggacggggccgggtggggaggaaggcggggcctgaggctgtgcgaggcgagtcggtgtgtccctggctgggacggaagttgcaccaca

SEQ ID NO: 233094 - DNA, 313 bp, Homo sapiens
  chr7:100770178-100770491
  hyper
atgctcttacacacgtacacacacagagcagcacacacacacacacacacatgcctcagcaagtcccagagagggaggtgtcgagggggacccgctggctgttcagacggactcccagagccagtgagtgggtggggctggaacatgagttcatctatttcctgcccacatctggtataaaaggaggcagtggcccacagaggagcacagctgtgtttggctgcagggccaagagcgctgtcaagaagacccacacgcccccctccagcagctgaattcctgcagctcagcagccgccgccagagcaggacga

SEQ ID NO: 233095 - DNA, 37 bp, Homo sapiens
  chr7:100797581-100797618
  hyper
ttgccatggtttccgcttctccgcctccagccccgcc

SEQ ID NO: 233096 - DNA, 2152 bp, Homo sapiens
  chr7:100806008-100808160
  hyper
gggccggggccccgcgtggcaagggaactcgcacaaaccacccgccctcctgggctggcccccggtcacccgcgggtgagctctgggagttcgggctcaggacccgggaggggggtctggcaggtcccgacgcagcccggggacaggggcagggccaaggggcagggccggggcgcatgcaaacaccgagggggagcgggcaacacggaggggggcgccggcgcgcgcgcgcggcgggggcgcgcgggggcgggaccgggaagggcagtcacgggcgccggagcagcacgtgctcgatgtaattctccagctcctcctgctcctgcagccggcgctcctccgcctccgcctcctcctgcgcgcgccgcgcctgggcctcccggccgggatagtggcgcgaaggcggcaaggcgtggtggtagtggcggcggcgcaaggccgagggcggctgcagtgtccgcggccggatgtagttggggaaagggtggtacggccctggcgggtacacctcgtcctcctcccgatcccagggcgggagcacctcgttccagtccggcagctcgtctcgtgcgggagcgggggcggggggcgggggctgcggggagcggacgtgggtgggggcgggggcggcacgggggggcggcacgggctcgggaggggcgttcttcttccgcttccgcttctcctccacctcctcgatgatgctgaccacgtcgtccgctggcaggtggagtttggtggacagctcaatgaggctgtcgatcgtctgcggatccatctcctcgtcgtcctcctcctccccgccctcctctgtcccctcggcctccttccgccggtggcccggcgtctcctcctgggagcgcttgtcctcggcgccggcttccccgtcctcctcctccgcgaacaggagcgcgttctgccgcgccctctccgcctcctccgcctctgcctccgcctcggccgcctcctcatcctcttcccccaccctctcctccccgccgcgtctctcctgctccgcctcctcctcctcccttgcactctctcgctcctccgccgcctcctgcagcccccgacccccgaggccgcgctgccgggccccgccctgcagcaaatactggagcagcaggtccgaggcgaggtcggccagccgctcttcctgcgccgcggcctgccgcgtggcctccgcctgccgccgcccggcctccacctgcgccagcccttgctggagaaggcgctcgcccgcctcggagccgcccaggagtgcgctctccggccggcgcgccttggggaacggggcggccacgccttggtacgccttggacaggggtgccaatgcctcgcctaggtgtgttttgggggaggacactccttccccgaacttgtgggtttcgggaaggggcccgctgtcgggcatacgcgcctggaattgagagggggccgggggcggcaggggcgcgcgctccgggacacgcgcctggaactctccccaggaagcgcgccatacgcgctctggccccgggctctccagattcactcgggtcagcgtgtgcgtgcgggtttccgtctctgctgccgccgtctcctgctggcgcttggcgctacttggactgaaatctcgcagttcctggagcagggacgctagcgcctcgagctcctcggagggatcgctcgcctcgggcccattctccggagtctgagggcgaggcggagccgcgggctccgggctctccggcgccgggaggctgtgggtctggctgcgcacggtctcggtcagcagagcttcagctgcttcttcctccggcccctgctgggagccgcttggtgccgggggtgaggcgggacggtcgagtgcctgcagcagcaccgcggccagcgcccggggatccacgccctggaaaagctctccctcgtcctgcggctcggaattccgagcgcctcggacctctggggcgctgccatcctttggcccgggcactgcgtccccggctaccggctctttatgctcagagctgagaggaggaggctgcgcctcagggcgaccagggggtgctgcccctaacccgttgatcagcagaaggcagaagagggcggaagccgacaatctgagggctttcatgaccaagaggctgccggagactgaaaaatagaaggg

SEQ ID NO: 233097 - DNA, 153 bp, Homo sapiens
  chr7:100808911-100809064
  hyper
cccgccccattgacgtcaatgttcattcatggggaagcgggcggccgcccggaggaggaaggacgcccgacgattggagggtgcctgcctctcccggcctgcgcctgcgcgctggggccttcggctgaaggggtgtgcgctagcggagctccg

SEQ ID NO: 233098 - DNA, 230 bp, Homo sapiens
  chr7:100809332-100809562
  hyper
aaggataaagattcaagagccgaccagggggccgggttccccaccccgagaccacgcgcccaaggacggcgtgaacctgagtgcagagggacagatctgcacgcctgcgggcgctgtccgcgaatcggcagtgcgggtggcagccccctgacaggggcagatgggtggatcttgcggttttggtaatcccatcgggaagggtccgagtcggaagagaaaagggaaagaat

SEQ ID NO: 233099 - DNA, 41 bp, Homo sapiens
  chr7:100809971-100810012
  hyper
tggggggcgatgacgcacagatttgcgcaaagagaatccat

SEQ ID NO: 233100 - DNA, 562 bp, Homo sapiens
  chr7:100815471-100816033
  hyper
agctggcacatgacgttgaggccaacgaggcgcggggcctggcgctgcaggtgccacagcagctggctctgcacctgcgcgccgtcgctaccgaaggcgtcgatgttgagatagcgccaagtgccgtcccctccgtgcgggatggggaaggggcgcgtgcacagcgtgagcacgcgcgggcgcgcgcggctgtccacgcgccactccaggcccttggccgccagcaggcgcaggttgctttcgctaggccggtagggctgccagtcctggatgatggtcccgcctggaagcacgtcgcgctgcacggagggtgacagcaggaggcgtgccacgtcgccgcctgcctcggacacggcctcggtgggcagcggcgagaaggtgccagaggtccgcagcgccgccagccgcgcgcccagcccggccagcagcgcggacgcgttgaatcggaccaaaaggatgccctgcggggggcacgagtgagcgcggggagggggggcgcagcagggctggcgagcccggcgcctctcggcaggcatcttcactcccacgttcacgcccacgg

SEQ ID NO: 233101 - DNA, 285 bp, Homo sapiens
  chr7:100816642-100816927
  hyper
tgccaccttgacccccgggtgctgtctcttgaccagctgcgagcagaagcgctgcagcagcccggccacgcccttcccgcgctcccagggcgccacgcgcagcccctccaccagcaccgtctccccggcgtcgatcacgttcaccgactccagcgcgatctgcggaccgaggccgttagcgcggggccctccccgcctgcgcccctgccagggctgtcggttcactgggctctcctcttcccacacgctgagcactccgcgtcaccacccgggcaccaggccagg

SEQ ID NO: 233102 - DNA, 459 bp, Homo sapiens
  chr7:100845024-100845483
  hyper
tcacttccccacctgcagtcacccagcggacaggcgaggccaggcggtggggcgcgcctccgtgaggaccaggtgtctgtcggcggggacaccatagcgcgcctggtgctcctcgaagagctgcgtgagtcgccccacgtagcgcgcttgcagcgtgtccacctgggccggactgggcggggggctctgctgcacgggaatcgccgaccccactgcgggcgggacgggaggcgatctgggctgggatccccggttctcctcctcttttcctccttggggataggcgggaacagagttcagggctggcgcggtggccaaaggccagtctgggtggccccaacccgggacggggagggagcgggccctgggccaggatcgcggggcggaggccggggctcacctacggtgcggatgggcgcgcggaagggcagcgggaggccccggcggcccaggaacagc

SEQ ID NO: 233103 - DNA, 40 bp, Homo sapiens
  chr7:100861069-100861109
  hyper
ccactaggaacctcggattgcccacggaagccagccactt

SEQ ID NO: 233104 - DNA, 443 bp, Homo sapiens
  chr7:100951542-100951985
  hyper
gaccctccagggaacgcccttgagtaactcgcgcacttggggcccgtttccacctaggactacaggctcaagatggcctggtagatgcagccggcacgcacctctcctctgacgggaaccgaaggagccggtaggttttcacacttgcagcagatccgctaagagaacgcgggattcagccgagaagccacggggagcccgaggagcggagcagaggcacccaggcagcctgcgcggagaaattggatcggcggggacggcctgcagctcccgcgcgcggggaaagggtgagtgagagaccccggggctatgcagttcccccagggacttccacagccccccgaccctcgcggacctccagaatagggggcagcgggcgagagattccccagcggcgttgcaggagcccacgtggagcccacgtggagcccacgggcttcctt

SEQ ID NO: 233105 - DNA, 178 bp, Homo sapiens; identical to SEQ ID NO: 201084
  chr7:101006949-101007127
  hyper

SEQ ID NO: 233106 - DNA, 83 bp, Homo sapiens
  chr7:101268843-101268926
  hyper
ctcactgctgtccccacccccgcccaggagcccgcgtcgtcgagggcaggggcagaagcgccggctgacttataattagcttt

SEQ ID NO: 233107 - DNA, 198 bp, Homo sapiens; identical to SEQ ID NO: 201085
  chr7:101447357-101447555
  hyper

SEQ ID NO: 233108 - DNA, 177 bp, Homo sapiens
  chr7:101457433-101457610
  hyper
caggaatgtccctcggtggcaatgccgcttcccgccagaagcctgactccgggacagggcgtggcaggcgcgggggcctgggcgcgccggtgggcacgtgcgcggggacccgaggacccgaggacccgagtgtcggggcgccgctgccctctaccgggcggcgcggtcggagctaca

SEQ ID NO: 233109 - DNA, 127 bp, Homo sapiens
  chr7:101458246-101458373
  hyper
gtaaacttgggaccacgctttccgttttcagtgagtgcacccacactttccaactttctgcgcccaaagttgcaacaaaccaaggtgtctgaaccacaggaagtttcttgggctgttccgctgaagc

SEQ ID NO: 233110 - DNA, 166 bp, Homo sapiens; identical to SEQ ID NO: 201090
  chr7:101499970-101500136
  hyper

SEQ ID NO: 233111 - DNA, 88 bp, Homo sapiens
  chr7:101500354-101500442
  hyper
actctgtcctgccccgtaccacccgccgcgggccacttttgggcctgcgccatgttcctgcccttaccccgcccggtgttagcgtcac

SEQ ID NO: 233112 - DNA, 346 bp, Homo sapiens
  chr7:102104793-102105139
  hyper
ccattgcagtccacggccttcaggcaccgttggactggtattcagcaccctcgatcgaccctttccgtgtcatctccctgcaggcccgtgaagctcccagcgccagacccgagaggctacgtcgaggtttacaggcagatccccccagagtccccgaggtgacctgtaatcgaacccacccacgttccagctccttccccactcccaagcccgctccttaaagccctcatctcctcaccctgcatcacccctaccgtaagggtccctcacaggcttcgatcccggcccctatcatggccaagctggacctcagtttccccagatgcagagcgacgtttgtgggcgc

SEQ ID NO: 233113 - DNA, 230 bp, Homo sapiens
  chr7:102389177-102389407
  hyper
acgcagctttacccgcgttgccccttccgtgcttcccattggccagtggactcccatgtaccgcccctccaatagccaatggtcttgagacaaagggcgcccgcctttccagcgattctaacacctaccctcttacccgtgctcccctgcgcattgcctcctgggaaatgtggtttctaagaggcagagctctgcgacttagaactacctatcccgtcggccttagcgaa

SEQ ID NO: 233114 - DNA, 142 bp, Homo sapiens
  chr7:102789382-102789524
  hyper
gagatgcaggctccgcaactcgcgaggtgcgaaaattcaaatgaagccctgtcgctcacaagtgcggcatctccgagatgagggagggctcggggacgggaaacccactctcagcccgctccacttcgccgaagaattccaa

SEQ ID NO: 233115 - DNA, 138 bp, Homo sapiens
  chr7:102937735-102937873
  hyper
atttggtaaagaccgctcagcatcatggtcgggccctgattgctttcacaaccgcttcgaggagtgtcattcccatcacggccacaaggtggagcccacctccctgctctgggacctcaggtcgcgaccccggaagca

SEQ ID NO: 233116 - DNA, 87 bp, Homo sapiens
  chr7:102985260-102985347
  hyper
accctcccacccccgccaacgtgtgcggtaacctagttctatactgactgagatccggctggagaccaagtcgcacgagagaatggt

SEQ ID NO: 233117 - DNA, 153 bp, Homo sapiens
  chr7:103085750-103085903
  hyper
gcccggcccaggtgcgcactagatgaggcagtcaaccaagtcaattggttcccgatcaactaaatctctcctaaaaataaacactgccgcgagcttcgagagttcagcgtgtcagagcctctatgatggcagagcacctgccgcgatgcctga

SEQ ID NO: 233118 - DNA, 68 bp, Homo sapiens
  chr7:103086863-103086931
  hyper
ctttcttcccataccgcccaggagtttctccaggtggcattcctgtcgccttgaggtggaacatcagt

SEQ ID NO: 233119 - DNA, 86 bp, Homo sapiens
  chr7:103087709-103087795
  hyper
ctttggctgggagcgctggtgctgttcttcatccgagaggaaaggctagagattccctccctactccacacgagggcgatctcttc

SEQ ID NO: 233120 - DNA, 71 bp, Homo sapiens
  chr7:103629130-103629201
  hyper
gtcaccagcctgcccgcaaagcccagcgacagcccccaacgcccccccggggacccatctggggggaccgg

SEQ ID NO: 233121 - DNA, 113 bp, Homo sapiens
  chr7:103630161-103630274
  hyper
gccgccgccacacgtgtcccggccgctcccccgcccccgcgcgccgccccgcccgccccccgccctctcgggctggctcggcggcacctcgcgcggcgaggggcgcacgcgtc

SEQ ID NO: 233122 - DNA, 665 bp, Homo sapiens
  chr7:103630454-103631119
  hyper
ggccgtcagtgtgccctgtttttcctgggaggatgcgtgagggaaggagaggggcggcagggacggccgctggcgccggtttctttgtctgagccggctgcgtcccgcgcccctcggggctcgcagtctgccagtccgggcggcccgcactcgttctgggaatccgcccgaggccgcgaaccgctaggggccctcgcgctcccttcccacccaggccccctgtccctcccgccgcggccgcccggcccctcgcggcagcgacagagcctcatctgtagaggattttaaaatgagattaagcgaaagtggaattggcagactcgagtggtgcctggaaatggtgatttgtgctgctcggttgtggggaattgtaaggcaggaagggctggcggagctaagatccgacaggctctcttcgccggactgttctgttattcattgcttctgggctcttcaggcagagatgggtgttgtaattttttaaatcagtgtttatttcctttaaatgtcggttatgaccaatggccctgaaatcgggggagggaaaaacgttcaggggagatgctggcagcggtgattgaagcgggtggtaatgagcggctgcacatgaactgcagggaagtgaaataatccataagcacgtttttaaccgaggacggctggca

SEQ ID NO: 233123 - DNA, 1494 bp, Homo sapiens
  chr7:103968590-103970084
  hyper
cagaggtcgaagcacgtttctgtgcggtgatgaaatgctcgctgaatcagcctctcgagcccggcctctcacacccaccaggatcctggggttgtctctaggatccctgtgggtgctcctgccaccttcttagactaccctcgccctcctaatccaggcccacttctctggctcatgtccaccccttgatgggcgttccggggtcgtcactgtcctctgcgcccctgggcactggcagcgcgggccgggcagcggggagggaggcgggaagcagagcgggaggcgccccgggcttgcgcgccgcggtgctccacgagggatttgccgccttcagctgcagcagctgcagcggcggcggcgggaagaggggtggagggtggtgaggagggccggagcccgggccaggagggagggaggggagccgggaggctgtgccaggcgagccggaggggtgctccgcgctcccccgccctccttccgggagcgaggatgcagactctgaaactggtgctgctgggctgaggcggaggcaggggagttgcagcgcgcgaggctccgtgagtgtgtctcctgcgcgctgagaggcggggggaggcggaggaccaggaggaggaggaggaggaggaggagggggagaatgcccggagccgccgccgctgccgccgccgccgccgccgcgatgctcccggctcaggaggctgccaagctgtaccacaccaactatgtgcggaactcgcgggccatcggcgtgctgtgggccatcttcaccatctgctttgccatcgtcaacgtggtgtgcttcatccagccctactggataggcgacggcgtggacaccccgcaagccggctatttcgggctcttccactactgcatcggcaacggcttctcccgggagctgacctgcaggggcagcttcacggacttctccacgctgccctcgggcgccttcaaagccgcctccttctttatcggcctctccatgatgctcatcattgcctgcatcatttgctttaccctcttcttcttctgcaacacggccactgtgtacaagatatgtgcctggatgcagctcacctccggtgagtgcgcgctcacctccgcggaggcggaggaccccggggcgcccgagccggggaggggccagagtgggagggacgggggctgtgcgcgccgctgcgagccaagccgcctaatccgctcaggcgtcgaggtgtggggggcgggagcccagcgaggccggaacccccggggttccccagccccggcgctggcgcctcgtcccggggctttcgtgagcctcccaagtgtgggggacgcccactcagagggacgccccggaggcagggcggttgtggggccgagtccgctcagaactaaggatggtgggtggagaagtggccgcttagagagatggggccggggttccgtgctgagggactaaggagggactgacagggcgaagtgaaaagcggatttggagaggtcatagtg

SEQ ID NO: 233124 - DNA, 38 bp, Homo sapiens
  chr7:104652243-104652281
  hyper
acttaatacagtttaaaacacggcttttattccgtatt

SEQ ID NO: 233125 - DNA, 37 bp, Homo sapiens
  chr7:104652581-104652618
  hyper
aagagcgaatcccaccgacaaaactatattcttaagg

SEQ ID NO: 233126 - DNA, 278 bp, Homo sapiens
  chr7:104654732-104655010
  hyper
ggcatagacactccgagcagcctcgccgtcgtctctgcgttcctgttgactgcctggctgccccctcccctactcctcggttcctggtgaagaggctgcgcgctgctgtttggggagggggtgtgtggagccgggtcctgtgtccgcagtggctgctgtcggggggtcgcctgttcgcggaggtgcggagagactccttgggggtcgagcacataacggggttcgggtgtctcgtgtgtgaacatcacaggttagtgcctgtcgtctccatgggagtt

SEQ ID NO: 233127 - DNA, 165 bp, Homo sapiens; identical to SEQ ID NO: 201126
  chr7:105162864-105163029
  hyper

SEQ ID NO: 233128 - DNA, 195 bp, Homo sapiens
  chr7:105221811-105222006
  hyper
aaagaaaaggagggcgctggtgaggtagctaaccacctccttgatctgatgcttttccaaatactccgcggcttggagctccctgctgctggtctccatcgctccgcgtcccgctgttgctaggcgactgcctggcgtctcagccgtgcgactctgtctccctctacccggcgcggtcacgtgacacgcctgact

SEQ ID NO: 233129 - DNA, 137 bp, Homo sapiens; identical to SEQ ID NO: 201127
  chr7:105331662-105331799
  hyper

SEQ ID NO: 233130 - DNA, 626 bp, Homo sapiens
  chr7:105332030-105332656
  hyper
atctgatgctacgacgactgtaaacatgttgtacttttggaacctgaagcgatccacattagcacggatgtcagtaaaaaaaaaaaaaagaaaaaaaaaaagagagagagagagaaagaaaaaggagggaaaaaaatcgcaacgactaaacaacaacaaaagcccagccccaaacagagcaacgtgatacggtattctgcacggtgcacagcccgacggctgaccagctgcagtcaataccagctatccgcgcttgcacacgccaactgttttgactacacgcacttgttaaacacggagtttcaggtcctaccagttggacaccagaagttcatagaactgacccagtgccaagaacaacaagcacagaaagcgaaccggctgcctcgtgcgggtgtttttgttaactgtttatgcaagccccaaagcaattgggtaacaattacgaataaaaaagaacttaaattacaaaagcaaaagattaccaccttgaaggaaatgtagatattggcagctgaaggacagacgtcatgctactttattggtggggtgggtgggtagttttcagagagaactggttgggggagggggaggtgtcacatgacacactgcggttattagcagaa

SEQ ID NO: 233131 - DNA, 189 bp, Homo sapiens; identical to SEQ ID NO: 201128
  chr7:105516545-105516734
  hyper

SEQ ID NO: 233132 - DNA, 39 bp, Homo sapiens
  chr7:106239344-106239383
  hyper
cagaagctgtcacgcgacacttcccgttccactgctcta

SEQ ID NO: 233133 - DNA, 406 bp, Homo sapiens
  chr7:106685756-106686162
  hyper
ctctccccgcattctccacctttccctaccttcccatctcgcccaccccctcagcatccatttctgtctctcccactcgcccaccttcctactccgctctctgtcataccctcttcccttcctctagaggtgggagagctgggatgttacgcttccctcttaccctttgccccctctgcctgggccggttggggtgggcatctgctagaaagacaactttcgctgtggttggaggtatttcgcttagaggataccattgtgcataaagaaactggcccgcttggcgtcttctttcagcccttgtatttattaatggaatgtcgaaagagaaaaggagaaccgtgtttaatatgattggctttactgttgttaggacggtagattcgctaaaagaagcatgaaattg

SEQ ID NO: 233134 - DNA, 197 bp, Homo sapiens; identical to SEQ ID NO: 201133
  chr7:106808942-106809139
  hyper

SEQ ID NO: 233135 - DNA, 272 bp, Homo sapiens
  chr7:107220331-107220603
  hyper
gagagtaggtgaccggaaaggagtgcgtcttaagcgcgttcgctgaatttgcaccacccaatccagccccgccgcccggcgccgctccttagacctggaccccggcaccctcccgccggggccgcacttagcagtggaaagtctgtcctcctgaagaagttgcgctccgacctccaagcatcaggtcaaaagtctaactcattctctgacctgccgccaattagaaaacaactgttgccaataaacgtggtcgcgccgcctgtgacctcagc

SEQ ID NO: 233136 - DNA, 1549 bp, Homo sapiens
  chr7:107300982-107302531
  hyper
ccacagggcctggcccgcccctgacctcgcaacccttgagattagtaacgggatgagtgaggatccgggtggcccctgcgtggcagccagtaagagtctcagccttcccggttcgggaaaggggaagaatgcaggaggggtaggatttctttcctgataggatcggttgggaaagaccgcagcctgtgtgtgtctttcccttcgaccaaggtgtctgttgctccgtaaataaaacgtcccactgccttctgagagcgctataaaggcagcggaagggtagtccgcggggcattccgggcggggcgcgagcagagacaggtgagttcgccctgaagatgcccacaccgcccggcccgggctccactcccggggaggcctcgagggttgcggatgggactcttaagtggtcacggatcaggtgggcagggggcagtacagctttctttctgagacgccgagagcgaacaggctgctcggaaaacaggacgaggggagagacttgctcaataagctgaaagttctgcccccgagagggctgcgacagctgctggaatgtgcctgcagcgtccgcctcttggggacccgcggagcgcgccctgacggttccacgcctggcccgggggtctgcacctctcctccagtgcgcacctggagctgcgtcccgggtcaggtgcggggagggagggaatctcagtgtccccttccagccttgcaagcgcctttggcccctgccccagcccctcggtttgggggagatttcagaacgcggacagcgccctggctgcgggccataggggactgggtggaactcgggaagcccccagagcaggggcttactcgcttcaagtttggggaaccccgggcagcgggtgcaggccacgagacccgaaggttctcaggtgcccccctgcaggctggccgtgcgcgccgtggggcgcttgtcgcgagcgccgagggctgcaggacgcggaccagactcgcggtgcaggggggcctggctgcagctaacaggtgatcccgttctttctgttcctcgctcttcccctccgatcgtcctcgcttaccgcgtgtcctccctcctcgctgtcctctggctcgcaggtcatggcagcgccaggcggcaggtcggagccgccgcagctccccgagtacagctgcagctacatggtgtcgcggccggtctacagcgagctcgctttccagcaacagcacgagcggcgcctgcaggagcgcaagacgctgcgggagagcctggccaagtgctgcaggtagcggccgcgcgggcctgcgtagagagaagcggagcggggcgtccacgccttggggagggaagggcgtccccagcgggcgagagtggggtgcgggcggcggagcccctgggcgccagctgcttctcccagaggcccgactttcggtctccggtcctccacgccgcccttctggtgggagggtggctccatcagtctcgggcccgaaatgaacttacctgggaaactcgcctttggggagagtgggttctaggagccccgtctctctttttcctctctga

SEQ ID NO: 233137 - DNA, 94 bp, Homo sapiens
  chr7:107383748-107383842
  hyper
agaggaggcagctgcgccgcactggctctccaccctccatccggccctggcgcccagtcgtcaggtgttcgagaggttcgtagcgtcacaagcg

SEQ ID NO: 233138 - DNA, 182 bp, Homo sapiens
  chr7:107384544-107384726
  hyper
cacgcgctcgctgcgactccggcgcggttgacttccgctcccactgtgctctgcgagccgaatcatggatcacactggtaaggaggcggaggcagtgggggtcccggttccaagcccccttggccggcctggggctggtcgcacagcaggcaaaagggattatgctcgccccacaacactag

SEQ ID NO: 233139 - DNA, 89 bp, Homo sapiens
  chr7:107531675-107531764
  hyper
aaggaaaatacagcggaaaaatgcagagctggagtcgtgtgtactgctccttggccaaggtgagggccgagtaggtgaggtcgtgttga

SEQ ID NO: 233140 - DNA, 2120 bp, Homo sapiens
  chr7:107641951-107644071
  hyper
tggacgggaggaggcgctagcagagcctcgaaccccgctctcagccctcacctgcaagtggctgacgatacagtagggttcgggcttgtgcagcccgcacgtcgaggtcaccgaaagcttctgtgctcggccgatgagaaggtcgcccgtggcgggatagcagctgccttctgcgcagccgtagctgaactcgggttcctgagcgcgcactcgggctctgcacagggctgcgggaaggacaggcaacagagttggggggacacaagcagggagtggagcccgaaaaaaacgaacaagcgggggcgggggagtgggtgcggagagaggacagtccattcggaagaaagcaaaatgcacagaaaagacaatggagagatgagcgcaggagaggctgggaaggcagggactccgaaaggagaaggacacggaaagaaacccacacacgtcatcaggtctgtccagcagcgagagcctccctcccgggaaacccaccgacgctcgcgcccaccctgatcagccccggggagcagctcccccaacaaagggtggatgtgtagaccctccacttcgacgtgtccggagcccggcgcagggaggctgacccccaaagggccacacacccacgcacgtgaacccgcgtgcacgcggcagcccgcgcatcctcggtgtgagtgtgcgcgtggagatctgtgagcttgggaagcgagagtgcgtgtgcgtgcacgcgcgagggtcaccggcgcttcgctggggacgaggcgccggggctcgcggtggacgccgctttccggagctaggggagcccatggacagtccctggggctctggagtggtttcaaggcttctccattccagggaagcgccaggtcctgctgtttctggtgccatccggagacaaacagagatggttaattaaagccacatggcccccatctgttcccagaatgaagcctccgctcagctcaggcactctcctgggcaatggatttttggagagccctcctcggtcagcaccgccaaccccagggaacctgccctctgcggtggggaaacccagggtgaaccggccgagggtgcaaaaccctgagcgggggccgcgggaggccgcaggggccggggcttgggcgcagagcccgggggatgagggtccgcggcgctccgcgtgcgctgtctccagccaccaccgaagcaagggcggtggcgtttaatcccaggggcgtcatttccatccagtccctctcccaagcccccaggatcccacgaaggtgagcaagcagcttttgggttttccttccccatgcccaagtccgtccgcctccccgcaccgtttccacggaattacctaagaaactgaaagctagcaactggagaagccccatgccggctccctgcagccacggggacgcggcagaggagtggagaagacgcccgccgagccgcctgccctttcttcccgtcttcctttctggagaggtggaaaggaggggaaaaaaggcaaatgttcaaagagagaagaggcgcccttccatttcctgtcgctcccacggaagcggggggtgggctggaaagtggggaaaatcgtgcagccactttgttctcctcacccggcgacgcgagctctcgccctgctccgggagcccccgagcccaaagaagggaattagaaagtttagccttgggaggaacagagggaggcgcctctgctcatgcgcatacggagagccggggctgaaggggcgggcggccgcaactctgcgaggaccgggtgaggtcccggtcccaccccccggggcgcctcttttgtttgaaagccgaatctgcgatcgctgcggggctggggcgcttccaggtcccagggcgggtccgccccggggtgcgcgtcccagaacggcgcgcggcggggccgtccagcgaggggggcggatgcgtgggggcgtctccgaggtgggttttcaggttgcccagccagggggccggcgggacctaccgcggactcgcgcatttacgttcgcaagaagtgaatcaccaaacgtgcccacggctaaaactctcgtgcggtgcgctcggggaaggcgggttaaccctttagaaacagggtcgacctgtcgtgtttgttcttta

SEQ ID NO: 233141 - DNA, 226 bp, Homo sapiens
  chr7:108096282-108096508
  hyper
gccgtgccgggcccgcaggctctccatgcccaactgcccacgagcaagagctctgggcagggcttcccggaaagcgtggggtgcgggcgcggagcagaagttggccacaggctggagggggtggtgggtgccggcgctgctggatttcagctgtgccttcacccaagcgcaggtccccctgctccctctcggcgcccgcgggagtgtcgggggcctgcaggggaga

SEQ ID NO: 233142 - DNA, 1005 bp, Homo sapiens
  chr7:108096688-108097693
  hyper
tctcgcgccgcgccctccgctcagctctggcgcgactgcccaggaccctggaccgccggtgtcctccgttctcgacgaagctatcccctctggctgctccagccaggcggcccctgcgccgtcccccgcgcccgcgcgtctgaggctcggactgcggcgcgcgtccgccagcgaccctggcgaagcgaggctggccccgcgccggcgcgcgcccccgccgctcccgccctctccgctccccctccccgcgccgtgcttttgcccctcccggctctccttagcgtcctcccgtccccctcccccgcactccctgcgggcgtcctccgcctcctcccctcctggccaaccccctcttgccctgctgctgcgacggcagcgaatgggctccagccgccggcgcctcgagggactgggtggcccctcacctgagcggccgccccaccgccaacctccgtcagcctgcgagcgcgtgtggcggcgggggtgggggtgcggggacggagggcgggagtgttccggggctaggatggctgggatttagctacaaaagatgttccagaaaatgggtagtttttgaatgccactctcatgggtttagctttctgtgggaggtctgtggtcttctagttttttcttttttaaaaagcactttcttcgaaattcatcagttggggtggttgagattgggtgagtggttttgggggttttgttttgtttttgcaaccgttctttccaaacactccccgccgccccccaccaccgcagaaaaaagagcttttagcataaggcggatgctatctatccgcggtagaaactgggtcttctggtcccaaggaatagggttagttcggatttgcttatttacaaatgggggagtattatggagattttttttttttttttttggcaatgtaaatcgagaattaagattttccaactgtatagtatttgagtaaacacactgcttgctgcatagttcaggctccgaagcgcacgtctccactc

SEQ ID NO: 233143 - DNA, 206 bp, Homo sapiens
  chr7:108210024-108210230
  hyper
ggcccctggagaccggggccggcgacggatgcagggcggccctcctcactgaggatgcgccacaggtccaggcctctcgagcccctgcgcctgcgctagcattctgccgggaaagccgcctcgtctgtcgactcacttccgcctcctccggtttaagcaccgccttttcgggggttgaagccggaagtggcgcacagccctagcag

SEQ ID NO: 233144 - DNA, 45 bp, Homo sapiens
  chr7:111202652-111202697
  hyper
cgcccgcccaggtcgggctcaaaatgcggcgtggatctgaaagga

SEQ ID NO: 233145 - DNA, 240 bp, Homo sapiens
  chr7:111844236-111844476
  hyper
aagcctctgcccaccgcttgtaaagaaaggcaagagaggaactaatcgataccagcaccccagctgtgacctggcacatgaagaaatcaagaaaataaatcccatccataatctgtataatttaacacttggaagaaagcaacatctgggatcgactccaagcaggacagttttgcctggatggatctgagcttcctgcactgagtgttaaagccgcttaggaggcgatgccctcgggtc

SEQ ID NO: 233146 - DNA, 66 bp, Homo sapiens
  chr7:111846864-111846930
  hyper
gagtacggtgccccggaggcgcggctgatgtgtcttcctttctctatgaccgggtgtgcaacggac

SEQ ID NO: 233147 - DNA, 57 bp, Homo sapiens
  chr7:112090452-112090509
  hyper
gcccacagagtgacgtcaggtggcggtattgctacttaaggcgtcgtggcctcccct

SEQ ID NO: 233148 - DNA, 743 bp, Homo sapiens
  chr7:112429892-112430635
  hyper
acagcaatttctctccctttcggcctccttctagcgagatgtgggaggtccgacaaggagcttggctgttctccaccatcctctgcctcggagaacgcgaccacaacgtggcgcccagttgagggggaacccttgcgaaatacggagaggcgctcccacaccctccaatctccaaccaccactgtcaactcctccagaggcaggtatcctaccccggccctgggaggccgactgggcggagcttggggtccggaccacgcggagccctggcagtgtctatgcctagatctcgccgccctgccgtccacccatttctccctacctgactcggccgtcgccaccaacgcgctctcccaaccctcggagtcagttccaaaaccaaaccaaaaaggaggagagcagacaaggcttcagcctgcgactgagaacagggaggcggcacgccttggggaacgagggcccgaggccatacgcgctaatacaggccagtgtcggcgtaaactttctccgttaccggcccggccgcgaccgccatgtttccgccgccgaaatccgcgacggtacggaacgccgccggggtcaaactgcgcggcgcgcctccttcccgaggcccggccccctccccgcccaaacccgcgcgccgccacacactcaggtgagcaaggcgctgcgcgagtgtcaactgccccacctaaggcgcctgccttcctcaagccaaagtcgactcctgggacctggaatca

SEQ ID NO: 233149 - DNA, 253 bp, Homo sapiens
  chr7:112579978-112580231
  hyper
tttgagggctgggcggaaacggaaaaggctaagggccaatgggcagaaagcgccggcggcgaacccggttgtttgggaaggcgagcagctggaggaggcggagcttgcggggatagggaggctgaggcagtgggagctccaggcctgggtgctcatctcttccccaccctccccggattctgtgcgcaggcgctgtggctcggcctcgggagacgagctgtgagcaacgcgcttgcgcgtctcagtttgctta

SEQ ID NO: 233150 - DNA, 396 bp, Homo sapiens
  chr7:112726514-112726910
  hyper
ctgagcatccaggcagggctcggcggcgcctgcgcgctggagcctccttgagctccagccgcgtcctcccctgtcgcagcggcaccgtctcccccagtaacgcaggggccgcggcggcggcggctgcggtggcgagggcggcggcggggctgcttcagcctctgtggaaccagcaggaacccctacctgactccagagctggctgggtttattgactgccctgtccaatccaactggcagcattaagcttttgtcccttcgtggctgcttctgaacttttccctccccgcatttgtagtggggggctggaaaggccctttcaggacctcaggcccatcctcttcccaaaggcagcgcacgaggaagtcacagtgcccgtgacgcccgccccctccc

SEQ ID NO: 233151 - DNA, 1065 bp, Homo sapiens
  chr7:113722691-113723756
  hyper
aacatttctaatttgtcattcgcgtgcgtcgctttccttcatcttggctatacttcctctcatctgcggtgttttatttcgcgcaagatgcgctgacagaggccatttcaaacgaatttatctttcactaggaccgtactagagcagtgtctcgaattttgttgatttgtggtttcgtcgtaaaataaacttgaaatcaaataaactttcgtgaggaagctttgatgtccacttggtgaaactcctcattcacccagttgagccgttgaactttcttctggaacctctttaaatgacttttgccgatccacgtgctgcaaagaagacctgaaccgtgcctatgaccctgcgcggcgactacagggacagaatttggctttccttctctttccaatatgcagcgtttcgtttaaaggctgcctcgatccagtgggctgaccagtgacttgtgcaaaagaaaactattcgatcgctgtttgccctttcagcgttttcctcggctgcggaaacccggttttcctattattatacttcaactttttttggagtcagctagcacagagcgctaaaccccggccagttccagcagcagccgaggcgaacaaagcctgcagtgttcggggccatgctggggcgggagtggtggacgagttcaaggaattgcaaataaatatattttatgaccacccatcaacaaactacgtgccaccgtggcggcccctggtagccgggccgtgtctgcagtgtggccaggggcgggggctgaaaaggaggcggccggagaggcgaagcgagctgcgagccccgggcctgaactttcacctctcgaacccgggcccagcccattggctgcagccgaggggtccaccgagggcagcggctcctgacaggacctgttttcccaactccctggacagcttccctgcgggatgggttggtggcccggggcatggcagcaggcgaggaggagataatgggggcgaagttgagcgggggcacttgggagctgcgggctcagtttcactgagaaaaaggccccggaagggtacgcgtccactctataaa

SEQ ID NO: 233152 - DNA, 1702 bp, Homo sapiens
  chr7:113724592-113726294
  hyper
gacggtgtgtttaccgacgtgggtgccagggctgcttcctccctgggagagccgcgggttctgaaggaaagggttggtgccaagtgtgtgtgtgagctcgcgactgccctttagagaaagggcgcgctgctctttcaggaaaggaaagattcaaaggcacaagttagtgcggttcgcccgtctccccaaccaccaccacccctccctcttctgccaccggaggggttcaagttggccgttctttccccagggaggagggccgggaagcagccgggggccaggctctgttcaccacggcctattggccgcagctatttggaggaaagtttcagcgcctctcggaacgccacgctttgcgactgacttgcgagcaaagcagcgggctcagtctgcggcgcgcggaaaaggcggccggcgaagagtcgcccggcccgcgggcaggggagggaccggagggagacggcggggagggagcgctggcccccctctgggctggggctccggaggaagcccctcgccaagattccggtcgtgcgtcccctccggggcccgctctctcctccctcggcctttcccctgtcaccgccctgggtcccaagcaggccgcccagccgggtcacacccggtggatagaagccgggacccagggctggcggctgggcccgtgcatcccccacgcgggcgcctcggctttgaagtgcgcgcggagcaggctctgaccgtttcttctttcctttctttccggttacttttgctcccctcagtcactgataggacccttcccgaaaacctcagactctctaagtcccagcttggcggccccttccttccaagccgcgccccggtgacctgggctgcgcgaccacgaggaagcccgagaactccttggcccaagtgagacaggaaccagggcaacaatgaagagaaagacactcggcctctctccaccccaggccgcagaggcgcacaccgtgaaaagaaaggccaatcagcgctttaacgcacgctcgggtctccctttccgactaccatgtacttttaactccctgccaccgagggctttggatcccttcgaggctttctgcacttcaagtggaatcccctgtttcatttgccagcagctccgtctgctgagaggacgtactttggggactgccaagaagcagcagacacaactcggctttgccaatacagcatacggttttgttctcgcctccctccccacccccttccctgactcgccgtctggggcgagctggagaaggcggagcaggaggtggggagaagggtgggggtgggggaaggtctggcgtagcacaaacaagttctccagcgggttgtttacatagcaggtggacctgacgtcagccaggaggctccgctgcaaatccgaacaatattcttccccgcgtttccccctccttaaagaagttagggaacggggggagataggtggacgggggagaaaggcatcctaaccagctggttccaaacctatcaacaacaacaacgacaataacaacgcaaagtaaaacaaaacaaacaagtggtccggcggtacttcagaatcctctgcggcgtcctgtcccccaccccgcccctccgaggagaggcagccccgcgagcagtgtgtgtacagttcgcattgccaacaacacgcgcgcgcggccgggtgcgcgcgcctgccagcgcacattcacac

SEQ ID NO: 233153 - DNA, 935 bp, Homo sapiens
  chr7:113726354-113727289
  hyper
cggctgcgcgagacagcgcgagcctccgagaaagcgcgagacacgccggcgcgtgcagctccgcggccgccgcttcgccctagctctagccccgcgccacccgcagcccgcccgcgaacgcccgccccggttatttatgcggcggccgcgtccgctggctgcggcttcctcggccccccccctccccgggcgcgccccccactcgcggcagcagctgcccggactcgcgcgtgggtgtgttgtttgggggcttctgcctcgccgccgcgggtgccacctcccgggacgctgcccacggcgtccccggtcgcggtaagtttcttggccctcactctggcgcgctacacctccgcaccccaccctgtcccagccacctccacgctgggccgagctgcgactttactctgctccgcgctcctcccgcggtggcgacaaagtttcgccccaaaggcagcgccctgcttgccggggcgagtgtgacatgtgtcaaatttgggctcggcgttggggtcgcattccggacccagcatcaccacttgttgttctctttcattttgctttgtgatgggggaaaaaggggtggagaggggagatttgctgttggctcacggatgatttttagtttggataatgcaaaatgttgcttcgtccggagagacctcggctggaggagaatgtgtgtcgaaacaccagatgtgtgtttgtttactctcttctttttaattgtttgttgtcttttccccttcctccccgcacccccacccccaacctcgggaggagaaacaacagtaaaaacatctggcggttagaagcacacactttattgatccaactgctgacctttatttactcagttgggcaagtgcacgcttctcgcgtctaagttgggcacttcagcgttcatctcagaagtacttctccaggaaggagagaga

SEQ ID NO: 233154 - DNA, 1164 bp, Homo sapiens
  chr7:114562236-114563400
  hyper
gacagcgcagggcgcgagggatcgcgcggccgagcccgggtcgcgccgctcccagcatcggggccgctagccaagagttcgaggccttcccgatccggatgtgatgaaaaagagcaacagagggagaagtgtttcaggattgtaggagtggaagaggggaaagagaggcagagagggggaaggccccctcgcaggggagccggctggagtgagctggctggaaagagggggcggagtgcgcggagtcagagccgccaccgctgccgcagttgccgccactgcggcgtctgggctgagccggagggaggcgggaggacgcgcaggggcggccgccgccgtcgtcaggccaccggggcgaaaatgcggccgctgccggaggctcgctaactttccggggcggaagaggaggaggaggaggaggaaggggcttggagcgactacggggggatgcggaggtaggtagtggtctccgggcggggaagaggaggggtttgatccccatccccggggttctcccaaacccgatctctctttccagcccctccccgctgggtccacctcggacccctgggaccccgccgctgtcaacttgcgctgtaacagttttcttcgcaagtttcaaatcaaaacttccccggggtggagtttgagggagggaagtggagggggagggaacgtcccgcaggggtggtgtgctcttctctaaaaacatttttttttttaattttgtatatttttccgccagaagcagtcagttccctgcacccagcacctcacagcccttcctccgtgcgccctgccgggcggcgagctaggcggcagcggcgcggcgcgggctcggcggagcggcccatgtccggcgcgggcgaagccctcgctcccgggcccgtggggccgcagcgcgtggccgaggcgggcggcggccagctgggctccacagcccagggtgagtgcgcgcttgcaagtggcaagcttctttgtcattgttgcatttttcagtttgctcacaagtgcacagataggggtggggggagtgctgtgaggaggggctcccactcgtagttgagaacttttgcacagttcgcgttactcaggcaagttcttcaggatccttgccctagatcaacaaccgggtaagagggcgggaaccgttggtccctccac

SEQ ID NO: 233155 - DNA, 295 bp, Homo sapiens
  chr7:115117319-115117614
  hyper
agcgagccgccagacgtgagctaaagaaggtgctggggggcagaacgggtactggggcgcctggaggagagttgaggggcctgaaagactctgggggcccagctcggtcggtgggtttattccaagtgccccgtcccaggcttgcactccccaaaaaggagccgagacgggagggttgaggcgtctcggctgcctccgtggagatcccgagaaaagctcctgcgctccaagttaacttctctctgggccgcgcggcgcagtggagtctcggtgcagcccgcgtccctggaggcgc

SEQ ID NO: 233156 - DNA, 41 bp, Homo sapiens; identical to SEQ ID NO: 201150
  chr7:115850424-115850465
  hyper

SEQ ID NO: 233157 - DNA, 493 bp, Homo sapiens
  chr7:116139783-116140276
  hyper
cgggagccgcaccgcgccagccgggctgcagcggccgcgcaccaaggctgcgatggggctggagacggagaaggcggacgtacagctcttcatggacgacgactcctacagccaccacagcggcctcgagtacgccgaccccgagaagttcgcggactcggaccaggaccgggatccccaccggctcaactcgcatctcaaggtgaagcccggggcgggcgggcccaagtccccgctgaggccgggaggtgcgggcgcccctcagccccgccctaacccgtcccaccattgctaccgggtcggccccgcagggtctgagacccgcacccttccccggtcccacccgtcaccaggccgcccgcgtagccaggaattcttagccaggttcctgtgcgcccaccgtgaccctaagagaagaggcggacgccctggcacgtccttccctcctgcttcccccgcccaaagcgctcccggttcccggggcgtcaggttg

SEQ ID NO: 233158 - DNA, 163 bp, Homo sapiens; identical to SEQ ID NO: 201152
  chr7:116164619-116164782
  hyper

SEQ ID NO: 233159 - DNA, 424 bp, Homo sapiens
  chr7:116166325-116166749
  hyper
ggggaggcaggcgcgccctgcagagtacagaggggtgtggtgtcctctgcgagatcctcttaaaaagctggctacgcgcaggcggtttctgtgcacggagccgtagctgtcggagcggttagttcgatttcgagctcgaggtttcccccgccgccaggctgacttctcatcgcttgtttttctttttgcatttttcctcccaccgccgttgccgccctccccgtcctggccgtccgccctccgccctctgcagggacatctctacaccgttcccatccgggaacagggcaacatctacaagcccaacaacaaggccatggcagacgagctgagcgagaagcaagtgtacgacgcgcacaccaaggagatcgacctggtcaaccgcgaccctaaacacctcaacgatgacgtggtcaaggtaagc

SEQ ID NO: 233160 - DNA, 77 bp, Homo sapiens
  chr7:116503304-116503381
  hyper
ctctctttcctttcgtggctctagcagtaagcttgcagctcccatgttccccaggaggcagcggagttgctcacaaa

SEQ ID NO: 233161 - DNA, 434 bp, Homo sapiens
  chr7:116592940-116593374
  hyper
ttcaggcctactagccggcgacaggagcgcacctcctcccttctcctagctgtcccgggtttattcattccctgagcctgaatcctgataagggagcagagtagggtttaagacctcggaccccagaatacaccactgcaattgaattttggttccaccttaaggtaaactacgcagctgctgtgagcctcagtttccctacctatagaaagaggatcgtagtggggaattgttgcaggggttaaatgagattgtacggatcgtggagcagcgcctggcgtgtggtaaacgctcaacttatgcgggttgtaactgcctgaggcgtttccttcggcgcgccacttggccttctctttctaaatattagcataataaatataaatggacccagaacgcgagggggcaggggccacgtgatcgctccacgaaagcca

SEQ ID NO: 233162 - DNA, 226 bp, Homo sapiens
  chr7:116594407-116594633
  hyper
ccaaatggattgtcgaagggaccggagggaagaggggagagctggaatttctgagggtttcggttgcagttttcagtgatctttgctcgtctcccttccctgtaaagctacatatgctcagcaagtgccgcgtgcctcccatccttggtcggtggtaaatgcaggaggtaattaacaggatcttcacaaacttggagccagcccactgagtcgttaaaaaaacacc

SEQ ID NO: 233163 - DNA, 118 bp, Homo sapiens
  chr7:116759580-116759698
  hyper
agtgaccataaacacgcttatttttctgttctagatatttgaatggtggtattttcgcaaatacggaacttcattcattgaacaagtctcagtaagccacttgcgcccccttctggga

SEQ ID NO: 233164 - DNA, 1094 bp, Homo sapiens
  chr7:116963723-116964817
  hyper
gggatgaagagctagcacttgtaaatttggagctgccgcgtctatgcagggcaaggttagggaggggccaggcctctgcgaaatgacctgttggctttgattccttggtgctgggcttaaatacagagcccatagggaggggaacttggagggtccatgaccctcgggacctaacccagcagtatctgccaaagcacccaggaaagatgcagtttttacgcacacccagctcctctccggagctgcggagcgcaaaagatcacatagagaggaaccgaggcagccaggcgttcgccgggggtgtgcgcccttgcacctcctgccgcctgggcgctcagcctgtgcgccttgtggaggttaagggaccctcggtcctggacctgggcccccgcccagccaagagagaggggcttgggcccgcgggtggagcattttgagcagtagctggcttgtagccgcgccgtttatcaccggaaaggaaggaagaccaggaactcgtggcggccgtgaactgttccattgctcttttcctggggcggagggactcactgcccgcccgaggagcgtgctctggggaatagagtatgcgcctgtgtgtatgtgtgggaggcgaattgttcgcagggcgtgggggagggggtgccgcccagatcggaaggacgggctctccctctctccagcccaccctcgggcctggactggccagagcgtcagccctcgccggcagcgagcgcggtgagaggctggacgaggcgaagctcagagacgccaaaaacctgaaagatgctgtcatcgccacccccttcccccacgctggtccctggcaggtccggcccctcccaggctgacccagatacatccccgtttgggtccggaaagggaggggagggaaacaagcaccgcgccacccacgactcgggaagagcagggctcctcgccagggccgctccgtatcgctgggccgcgacccagggaagttctgcttggtctgcgtcggtcgggcgggaggtgcagggagggcgcgtggggcggcaggcagcggggcgggggagcgtttctgctcgccgtgtgtgcacgccggccatggggagggt

SEQ ID NO: 233165 - DNA, 791 bp, Homo sapiens
  chr7:117119487-117120278
  hyper
ttcaaaatgcaccttgcaaacgtaacaggaacccgactaggatcatcgggaaaaggaggaggaggaggaaggcaggctccggggaagctggtggcagcgggtcctgggtctggcggaccctgacgcgaaggagggtctaggaagctctccggggagccggttctcccgccggtggcttcttctgtcctccagcgttgccaactggacctaaagagaggccgcgactgtcgcccacctgcgggatgggcctggtgctgggcggtaaggacacggacctggaaggagcgcgcgcgagggagggaggctgggagtcagaatcgggaaagggaggtgcggggcggcgagggagcgaaggaggagaggaggaaggagcgggaggggtgctggcgggggtgcgtagtgggtggagaaagccgctagagcaaatttggggccggaccaggcagcactcggcttttaacctgggcagtgaaggcgggggaaagagcaaaaggaaggggtggtgtgcggagtaggggtgggtggggggaattggaagcaaatgacatcacagcaggtcagagaaaaagggttgagcggcaggcacccagagtagtaggtctttggcattaggagcttgagcccagacggccctagcagggaccccagcgcccgagagaccatgcagaggtcgcctctggaaaaggccagcgttgtctccaaactttttttcaggtgagaaggtggccaaccgagcttcggaaagacacgtgcccacgaaagaggagggcgtgtgtatgggttgggtttgg

SEQ ID NO: 233166 - DNA, 1243 bp, Homo sapiens
  chr7:117512789-117514032
  hyper
ctaggacctaaagcgctggcctcagcggcagcagcgcccacatctggacacggccctctcccagtgggcctcccgaaggcacaggaccagatgcacacaatgggcatccccacacctgctgggcgatggcccacctcccccaagctgctctcccgggtccgctgagcggtaccaggcacccccgagacacgcgctggcaaccacgcgcgcagcgagaggtgaacaatggggggtcaaattcgccaggaaacacgtcccagccttctcccccggccagaagcgaccgcagcggagggagtgggcataggggtcgcactggacgcagacagggagctgggagaaccgggcgacccggggccgcttcccgtggggcgcggaagggacaggagggatccccagccagggtggccgctccgctcccccccgcggcctccgccgtgtgggcatcccgaggaaggggggccccgatgaaggggcaccggagagtcccgggcttacggaacgccccgggggtgcgaagtcgggtccggctgggaccccggcgccgcccccggcccgcgtctacactagccccgcgcccgccccgggaactcggttaccgccgcctccgccgcggcccccgccgcgtcctccggggcccgggacaagtcgggctcgcagctcgcgccgtccgtcgccatcttcctgctctagcggatccgaatgcgagctcggagccgcggctccggactcagccgtctccgcgcgggcggcacttaacccgctgctgtccgggacgcgggcgcctggagccgggagccgggagccgcggcactccctccgcccctcgccaccgccctcgccgcttaacccgctgcgcgccggagcgccccgcctcggtcccgccccgcgccccgcgtcccgcgcccggtggcgccagccgcgggctcgtggaggtgcgagaaatgggcgcacgacctggctccgctgcggccctgcgcggggactggggatcaaagaccacggaagaggtgaaggcagaaagcgcccgaggagcgttgcattccgcagaaccccaaccaagccggagaaatccgtgcacagaccagattaaatgtcaggcctcctgaatctgaattctctgaaagatcagggaaaatcctacacttcagctccctctatcccaccgcgaggaatcacacagggcacccctttcttcttaaattgctctttcttaaatttcattgccgccagggtgttttta

SEQ ID NO: 233167 - DNA, 1504 bp, Homo sapiens
  chr7:119912399-119913903
  hyper
cttctcgccatccacgccatctagtggcttgtatgtgttacgtttggttttaaggatgattcctaatgactcgggggcggggtacgcgaaaaacaaaaaggttggtagcgacaattttcctgtgtctctctacctcagtaacccctcatacgaacacctttaactcttttaactattttaaatatgcgcagtgatgcgcagagaggatgaaggggacgcaaactttcagagacgcacgccccttgacgatgacatttagaaaagggctccacatccctgttattcgtaaaggacgggaaaaggagttgtgtcaagacctcgatcgaggagagtctctgattttttggcaagttggacagatggcatatcaatccctgcaacgttaacaatctggttttgaaaataaataaaaacagaaagaggaaatgcacttaaaaattccgcgtcggagctttgcgggtcttgccttccagtcgcccccagaagacaaccaattcctgcgcattccgctccgctcaccctccttcccagcttctctcgctctctttccccccattttcccacgctcgccttgaaccgggactcgagaggcagaagcaaggcacgggtcccctttctcctctcctccaccaaaccaccgcagcccagcacgtgaagcttccctttgttcatccgaggctcgcttttctccccagcagatccacctggatgctctccctcggtgacattttgcgccggggttggtgggtggctggggtggagcgagaggagcccgagggggcgggggcggagaaaggtcaagccgagggaaaggcaggagacgcctttcctaacctgcgtggcggggcgtgcgcgcggttatttatttattttctccttatttattgatcgcactagcagagcagcgcggggagcccggggagatgcaggaccacccactggcggggaagcagctagcagccctcccgcgcccccgcgctgccgagcgccttctgcctccgcgctcggacgagagcccgtgccggccccggccccggccccaccgcgccaacgccgcccgcccggccgccccgcagccccgccgccccgcagccccgcaccgcgctggccaggctcccgcgacagtggccccgcagtaagttggcaggagcgagtcccctccgttctcgcctcccccgcaccttttgaacttgttgctgctgctctgctcgcctgcgcctggcttttggaaggtgaaaaggaggagggaggcacggagggatgggggaagggaaagaagagctcgcttgagctttatttatgctctctcggcgcatcggattcggctgctcgcgagctgctttctctcctcttccctttccgggtgcacggcgaggagaaagtctctatgcaactaagccccggcgcgcacttggccaggtatgtaccgcgggagcggcgcgttctgcgcggaagcagatgctgctgccgccacggcggcggcggctgccagctcctgagctct

SEQ ID NO: 233168 - DNA, 533 bp, Homo sapiens
  chr7:120496812-120497345
  hyper
gccattgtgagccccgtaagggagaagccccatcctttcaccacatcctactcccaagggcaaaacggcagcgatctgcagggggcgggggagagagaacacgggacatctcaccatcacgcttcccacagcctgcccgtccctcctccacccgccctcagcagggtccagagggtcccgaggcccagtgcattcgagacatcgcctcatcaaaaatcatttgttaaaatcataatggtaactaaactcccaaaagttccaaaccggcttcagataacacctgctgggaaaagaaaagagcaactatccggatgaatgaagtcgcacagtaaactcgcgttctcaggggacacgcggcggagccctgtgcattctgatgagacgctcttgaaaacctccctcactccacgcccctcctcgaggacagctgtgctcggcactgtcctgaaggtgagaaaccacactgccccctaccccggacacgtcagaggcgccaccggcaagcccgagagaatgagcgcccttctagttag

SEQ ID NO: 233169 - DNA, 49 bp, Homo sapiens
  chr7:120497525-120497574
  hyper
ccccagaatgatggattagcctgggacagtgggcggggggcggggggcg

SEQ ID NO: 233170 - DNA, 548 bp, Homo sapiens; identical to SEQ ID NO: 201158
  chr7:120497836-120498384
  hyper

SEQ ID NO: 233171 - DNA, 140 bp, Homo sapiens
  chr7:120627988-120628128
  hyper
aatgcctgctatgcgctaagacagccctgggtatccagagttcacaaagcaaggactgatttcctttcgccttgacagcctcagcaaaagtggaagggggtttgcagaattgcactattagcagcgtccacccgaaggtc

SEQ ID NO: 233172 - DNA, 532 bp, Homo sapiens; identical to SEQ ID NO: 201159
  chr7:120628558-120629090
  hyper

SEQ ID NO: 233173 - DNA, 1436 bp, Homo sapiens
  chr7:120969345-120970781
  hyper
gatggacagggcggcgctcctgggactggcccgcttgtgcgcgctgtgggcagccctgctcgtgctgttcccctacggagcccaaggaaactggatgtgagtatggaggtggcagggaagcatcgggtaggtggcaaaaggggtgcccaatcctagggaactttcaactgaggctgggggagaagggcggggacccttagacgagtgacctaatttttcggaaaacatctggaattggggagcggcttaacgctacgggcggccgtgtcttacaggtggttgggcattgcctccttcggggttccagagaagctgggctgcgccaatttgccgctgaacagccgccagaaggagctgtgcaagaggaaaccgtacctgctgccgagcatccgagagggcgcccggctgggcattcaggagtgcgggagccagttcagacacgagagatggaactgcatgatcaccgccgccgccactaccgccccgatgggcgccagccccctctttggctacgagctgagcagcggtgagtcctgggtccttaggggttggtgggggacggaaggcgacaactcctccaccggttcctgcaaataaagtaaatagtgctacgtggtcctgtagctctctaagttccagaagaagccctttagtgcacggggattgagagctacaaaggccagacctggggagcaggtgcgagcctggagggaggtgactccccagttccagagcggagctctaggggctggagctcttcctctttcctgcggtgccccgccagagttggaaaaaaaactctaattctcctaccccgccgaccccctcggaccccgtagcgcccccctacgtgggtgaccagctggagaaacatgatgtcggcagcggggaatgcggctgccgcatctgctttgatttaaccaactccgctgcgcaccaaaccccggacaagtggctaattgcagcgaagccccacctttattggctcctaggagcaccgagttgacagaataatggtgacttttaaagcgactgtccgcgaccacccaacgtgcggctaacctgagcaggaccacttgtgcgcttctcgtttctttggcttttctatctttccctcctcggcgcactcccgcggcgcgggaagctgcaggaaaacaaagttccacttccacgtgcgtagtgacttggtaaggataaaggtacagggagccaggattgttcctggaatatcaacagatccaaagaatgttaggactggggcgctgaaggatgcgctgtcgtttttcatgttcatttccgttccccctccgcctttgacccttgtccacgcagtccctgcgcgcacccccgccgagccgcgcacctcccccgcggcgttctggccggcacgcccttccgaaggagccctggtccccgtagagagaaaaaaaaaaaaa

SEQ ID NO: 233174 - DNA, 89 bp, Homo sapiens
  chr7:121036655-121036744
  hyper
cccaccgtttacacgcacaaaatcccagcctcaagggcagaacattttaaatgacccacccatcctagagatgcgccagttaggtcatc

SEQ ID NO: 233175 - DNA, 566 bp, Homo sapiens
  chr7:121512767-121513333
  hyper
caggcgcccccaccgcattctgattggacccacttaagcatctgcagaaaacaataaaatgaaaaaaactcttagaggtgaaactcaaaggtcaacctctggctgtgcgggacaatgggtgtccggccttcccttcccttcccttccgaagtgatgaaggagttccaatgttctgcgaacactggaaaccccagcggatccctctaactccagggcagcgaaaccactggcagcggacagagggaggattgtcggtgtgtgaattgctaccctgggatccggacccagagcggcagccgcgcccctccgccccccgcgcgaccccgggtccgaggcacgctcccagcggagcggtcctgcgcccccgccccctccaggagccgcggcgcgcacagccgggctggagcgcgcacccggcactgaggcttcgctgctctcggagcgctcagaccgcggccgccgcagccggcgaaagaggcaaagtcccgcacgccggaggacatgcgcctcggctagcggccccgggccccaccaccgtgcggctttctccagattattcctctctc

SEQ ID NO: 233176 - DNA, 566 bp, Homo sapiens
  chr7:121513393-121513959
  hyper
acacacacacaaacacacatacgcacgcacgatctcacttcgatctatacactggaggattaaaacaaacaaacaaaaaaaacatttccttcgctccccctccctctccactctgagaagcagaggagccgcacggcgaggggccgcagaccgtctggaaatgcgaatcctaaagcgtttcctcgcttgcattcagctcctctgtgtttgccgcctgggtgagtgagaagagctcggtggggtttcagctccgggatcggtgggatgagggtgggagcatttcagcgtgtccgcgacttgccgccgccgccgccatctagccaggaggaaaaagggacagccaactgggctcccacggagcgggcggccgcgcggtgcaggcagctgcgtgggatttgcgcgccccctccccgccccgcgccctcgccccttccatcggcccgcgggcattcgtgccccgggccccaggagacggagctactggagacggagggctactcggatccctgccgccaccgttcttctctcctcttttgcaaagtgtagaaatcgccttttagatatac

SEQ ID NO: 233177 - DNA, 1017 bp, Homo sapiens
  chr7:121783354-121784371
  hyper
ttcattctctctcgcgctcgagcgctctttctctctctctcttccgctccccccacccccattcccctgaaatcaatgtctgaaaagcacatttcttcttctgaagctgtcaggatagacagacattcagccccattcaaccgaggagggtgggtaaactgcttctccccgcgccccgtcccgcgcgagcgctcacaatgggctgcatagtcccgcaggggctgaagagttcaggaaacccagacttgcaaggcgcccaacttccacccatctccgatccttgctggagaatgggtctgtgtctcggagagtgggcagcccaagatggacaaggagagaagtttgtgatcagtttggctaagctgggcgtggggagggaagggggaaagaaccaccccgaaatctccatccaccgccccctcagccagccgtcccctctaagcacgccgtccacaaattaacaagccgttgtttcctcagcttcatcagttctttattccccagccacagcaccaccactgtccgccaaaaaagaaagaaaagaaatccgaattgcaatccctcgcctttctacttagaaatgctggagctgcgctgaccgctctccctcccttcctcgcagtgaaactctctgcgtttccgctctccctccattcctcgcagggaggcccgaatgctcgccgccttctccctctctcggcccggccggggtcgcctcgcggcgccgggacccgaaggccaggctcgcgggcccctcccagcgacagcccgagcccggcccgctatctccaccgcatctcacaggctgagcccacccgcgcgtctgctcagctctccgcggggacctctcctctcctcacctcgtccgctctggggcgccgacttgtcccccgccgcctcgaatcttccgagtcgctgcaggggaggctccgaattcctagaagaaactgggatggaaggccgggaagtaggaggtgtttgctcaacttctgaggacgtcacgcctctgcctcccgt

SEQ ID NO: 233178 - DNA, 1315 bp, Homo sapiens
  chr7:121939737-121941052
  hyper
gctccctcgctttccgaagtcaaatctaacatggatttggccccaacagtgggcaaggtcggggcatgaggtcaggaaaggagaaacatcggttttcgatctaataatggctgggctggagcttgttccctgtgtccaaagggcgtgcgtactagcacaagcgttgagaaaggtctggacccgatgtctgcaggaagtgtcaggacctccctgttctggggaccttcccagcccacaccaggtccgtgctctctagattcccccaacctcgctccacaacccggaaggagctcaggccggacttggcgtgagggtccctgcggggctgggtcacctacccgtccgcgatcaccccacaggggctgttagtaatctccctgcttcctaggccgttgagaagcactcaggtcacccactctcggtgaccagagcggtcagtctttccccgccatgaaatgtgagttcgggtggcagccgccgcgcccctgcagtgtcccctgcacatctccggtctcggtctcgcctttctcagctccgcgccgccttttcctgggcgccgcaggactcatagaagtgaggcggggccacagatttaagtttattccccgcaactgtcggggcggtcccggagctggtgaggacgcgctacggtgggtgcagaaaggagatccctggactctgtagaacctgggcccgcggtgtggaccgatggtggattctccgcgacaacagccctggagggagagagtgggccgggggaggggccacggggcccctgaggcctgcggggctggccgcactggccccgggcctggcggggtggtggagtccgaagcggcgaggcgaggaccccggggcccgctccccccagtcgccctcccgggatgtggccccgctgcagtagcactacggtgctgggctgtttgtctggcagcttctactgagcagctaatagtataacaacccggctttgataaatctgaactaattacccctcttaattaaagtctttagcagttgtttcattgttttggcaagaaaacaggagagacgtgcagttagaaacaccagagcccgagctcacagcggagccgctgattaacacttgaagcatttcaaggacctggcacccgccacagtttggttttcatccatgtttcctccttgaatggaagtatattcgtctataaacatacatacacatgtaaaaacacggaggctccgtttgccagctgtgtacaagtcagtatgtgccgtcaggatgcaaacaatagatacctgtctatctatgattgtaatgcgtttgaggagatgt

SEQ ID NO: 233179 - DNA, 648 bp, Homo sapiens
  chr7:121941876-121942524
  hyper
tagcaggtgcatgcaagaggcgaaaggccaggggatgcagaggcttctggtcggccctgaagtgtggggcccaacatgccctggggtctgcagacgaactcggaccaggagctctagtctgccgctgcctcagcgtgggggcacggctgaggctgggaggacccttagcctcgatcactggtggccctggtggagcccgggctgcaggggccccggggttggcagcggcggctgcagaggaggcagcgtcatcggcggctgctgcggtagcgggggcggcggttcagtgcctggttcgccagctggcgtgcgggccagccccaggctgctgtcgtgcagcttgcggacatgcttcttgaggtcaaagttcctgcagaaacccttgccgcacgtggggcaggtgaaaggcttcttgtcgttgtgggtgtgcatgtggaaggtgaggttgtaaacctggtggaaagccttgttgcagatattgcacttgaactgcttctccccgctgtgggtcaacttgtggtttttgtaattccctgaaacacacaaatgacaggaatatggttctgaaaaaaaaaatagcttaaaaagggaggagcagacacgtggaaggtagcgccaggcaagcagaagagccgccacaggtcccac

SEQ ID NO: 233180 - DNA, 67 bp, Homo sapiens
  chr7:121943301-121943368
  hyper
cgaagggtctggctcctgtgtgcactggcatgtgacgggttaagttatagtgcgcattaaagacctt

SEQ ID NO: 233181 - DNA, 1239 bp, Homo sapiens
  chr7:121943690-121944929
  hyper
ctttccacacacttcgcaagtgaaaactttgggcttggcattaggagagcctcggctgaaatccgaggttttgaacgcgattttttccgacagaagctgggcgctttctttcatgtaatgctgcagctgagcctgggacaggtctttgaaagctactccagaagggtatttctccaccgccgggaccaccagtttattcctttcggctaaatacgtttttggctgcgggtgcaaaggggaactgaggaagtaggaggccaccgggtggatgttcacgccggctgccgggtggcatgggccgtcacctcggttcaggtagcacaaggcgcccatggcgtggaatgaagagtggttgaccacacgcggccttaccagcttgtactgctgcagcggcagcgcgtcgcgggccaggtcgcccttgagactcagtgcgcagttgagcaggtcgctgcagctgaatgcgggagccgagggcaccgccgcgggcgccgccggggcctccagactggccttccgcggctcggagcccgtcactcctgccttggggctcgtgtcgtaggccacaggcacgaaggggatcatgcaggggatcgacgagttgagatgcagagagtgcttgggttcccccttgggtaaggctccctgcaggaagtgggggactggcagggccttgggctctggggtgcgcgccatgattcgttcaatggagaaagccaagggtttggacgtgctcatcatgttgccccgagctggagcagtcgctaacattttggtagtcgcgttgtggcagctactgtccatgtctgagtcgccagcgtccgtcagccggggctgggttgcgccgtccgttgccttgttccctgcttgtcacagacctgcggagagggggacgggcaccatcaccaccagtagcctcctcctcctcctcctccccagcatcaccagccgaacctgcctgcccagcccaatggactcctgccagcccatcgcagagttcttggcgcaccaatgactcggggacaatcactacttatttctatcaatagaaagtgttgtgtcaataacgcagccaagatctcgccaatcgttaacttccaagaggagaaggtaaactagataattgctcaattcgcttccaacagtcaacaggaaaacttttttttttttcatctgcagtcagtaactacttttcattggtgagtgaggttccccgcccagaaaaggcgggggcgctttcac

SEQ ID NO: 233182 - DNA, 1470 bp, Homo sapiens
  chr7:121945134-121946604
  hyper
ctaaataaggaaacggagtctaattcaggggcaaacgccaggctatatttatcaaacgccaagctccagaaagcctcggctaggaagcctcggcagtgaaatccgaggtttcgctgcttggttccactgggcctgggtgggccgggctgggccgggctgggccgggtcagatctgtgccacctccgcagacctatttcttcctccagggctcggggttgcccgctcccggaatcccggagtctccgcggcccgaaccgagtctggaccatttagaagacgccggcaggtaactggcctccccaaacgccccgaaaattaaaagccttaggaggcttgttctgtgtttgtggttttgtaaaggcaatgcccgcggcaataggcctgggaaagtcgcactttcatccacaaagttgaggagttgcaaggaataattgggtgtcacaccacaagcaaccttgactcgatcggaccccacccaggatacacacagacgcgcgcgcgcgcacgcttccgagtttccattgagagtctggaaagagcatttctttcttaagtacctgcgctcagctagagctctcccggagcattttaaatactgaatgccgagcggagaagggaaacagagtgtattaatccccactccggttgccggtgtctgcaagcctcctctaagcagcgcaggcggcagcctggatgtctgtgcgcatcaaggagacttgccggcgccagagttgtgtccacaggtgcacttgtgcctcccaaagagcgcgcgtagagaccatttcccctgcaacgccccccagccgaacacccgccgggtgtggcacctcggccgaaactcctggggcggcgcggtggagcgtgtggaggtttccgggaagacgcctacggctgcggctccgactgtgcgggctcccgccgcccaggcaagagcgtccaggagcgcgctggaagctgcggcgcgcaccttccccggcgcagtctcttgccagccggcgatcacgcagagctgaaccccgcagctaggcgcgcaggaagggctgcacagagtttgaagacacggcagctgtaagctggcgtgaggaggccaaaggagcgcgcagagctgcaagcaaagggcggtggggcctggaccctgaagtgagtggccgaccgcagcagctcaaggtgccatctgcctggtgagttaaccccacgtggctgtgagacaggtggtggcgggtgtcaggtattgggccaagtgtagtgggggcgtccttctgctagagctctgaaaagggttggccccggaaggctggataacggcggactagaaaccctggcattattaagtccctgagcaatttcactcaaagatgcgaaactggaccttaaacgaaggaaattgacgtcaaagtattccctcctctctaccccattctcaacacatgccaggcaagctacccgggtccctccgccccactctaact

SEQ ID NO: 233183 - DNA, 583 bp, Homo sapiens
  chr7:121946856-121947439
  hyper
ctcgtttcaggcctcgaggtggcttcaggctgggacaactgatgcagcagagaagggcagagcgcccggggggagaaagcaaagaggcgctacactccaaggcggccctttggaaccgtccttggcccgggtgcacctactttggattcgcccagactgcaaatttttctttccttttgctggggccacgggacagagcacctgggcagagcaagcggagaggcgccacatccccgagaggcgcttcgtagttgtccttggaccgggcgcagacactcagtattggtcagcgctggaaattttctttccttttgctgttggggccgcagaaccagtctcctcctttcccctgctcagacaaagggcacgggaagggctttgctggggcaaaggggggtggggggttctctgtcccacgacagatgggtcgcggttaagactttaattgctgacttttgggccggatcagattccttttcctacctgccacttcccagcagcgaaaaatccccctcctgctgcactcctccgccaccgggctaggttgaaaggaaaaagccaagaagcgcgaagcagcccggct

SEQ ID NO: 233184 - DNA, 1061 bp, Homo sapiens
  chr7:121950009-121951070
  hyper
accatattcaagacacggttcgactgtttccttgacactacccacgaagtttaaagcattttttatgttattttcaaactttcttaagtgatcccatgaaataaaagtcgataatagaaattaaaacaacacagagcaaagaacgagcttagtgaaatggagaagcagtagaggtaaataaaaatcctcgagctagaaagctctaagaaccgcttataaattcagttacctcctgaactccggccgatggccactccggcccgggagtgccccgcgccgacccgctggccttggccgtctcagccttcattatcgccacggccttggcgccccctgcccccggctgcccaggggaaccaagttcccgctgctggagttggggcagaggagccccgcctcattcaggattcggtggccagcgcagagccatttgaatagaagaagcccgaagtgaaacagaaaagctgaaaactccccggctgggctctccacttctcggttcttgctcacgagttccaaacagttaaagtgacgttggcaaggccgagggccaccgagctctgtgagactcccttggaggggtcaggaaacttagctcgagaagcttggaggcggctgggagttggggcgcaacttcagtgaccgggcgccgctgccgggctggggctcccaagcgtccggctcccggggtggtcgacgcggcgctgccttcgatcaggtcccgccgacctcgggcctctggaccaccaccgccccagctggtctggcaacccatcccgggcgcaatcgcgctcctccccttctcctctgcattcccgcaggtcctggggcggctccatccccccaaggctgagagatggcgagggaggctccaaagagtttcgggagggggcgccggatctggtttaagagaccgcggaacagatggtggagagctcctggatgaaagtttttgaacaggcactcgctaatagacttgctttgacgactcagggtgtaattgaagggtcatttaatctagacgcaaggtgaaagaaaacaggcccgggggtgtggcatac

SEQ ID NO: 233185 - DNA, 318 bp, Homo sapiens
  chr7:121951858-121952176
  hyper
gaaaaggctcctggaaacaacgcgaagctttaagcgccccgcgcgggtgttgacgctggcagctcgcaaacagcgtcccgcggccacggtgacccgaggggccggccggctgacgtcacgaacgcggccagctgcggggacccgggctgcaaccgcggcctctggcccctgccttctcgttgggtcgagggtgggaagggaagttgaggtctggggtaaaaagccggaaaaagaaaggaacaaggctgagaatcattcaaagattaaatggggtcggctcccgttgcttgcgaagacggatgaggagggagagagttg

SEQ ID NO: 233186 - DNA, 971 bp, Homo sapiens
  chr7:121954944-121955915
  hyper
agggagataaaagacgtcatcgtattgagtcactgggtctaggactcagaagctgccgctggctactttaaaaaaatgactggggggagaccaccagtcgggttaaacaagtggctccagtcccagcttaatgccaggcacggtctcttcccctttccagagtgctcagtttctacctccccaaggccacagagtgctagacccccagaccgccagggcgcgcgtctcccatgccaccgacgtgctgggttgtgaccctggggcgcacccttgccccaccctgtgccgccgcgttgctcaagtgttcctgggagcctagaagtactgcagtccagcaactccgggcaggagtcggtgctggcagtcgccctaagcgcttgtgcgctctctctctctctctctctctctctctctctctctctctctctcgtgcttggtttccgcagctggggccaccttgaagggtgtggacccctctgcctttctctctctgttccgcttgcagtttgcaagtgtatccttctgttgcatccctgaattgggacgcaggacatcgttctaggctcccataagccttggaaaatattaatgaacaccatttgcacctgaaattcccttgaactcaacgcactgaccacaacagccgaggcctgagattcctcgcttgtgatctggcacctcctggatcatccccgtcccatttcagagcccttgaccaacataatctgcaagtggactcaataacacatctccagctacctcccttcccaaccgcagccacaggggctgctgttagcgatgctggccctttctgagaccagagttcccttgcccctccccgtctcctcctctcctcccatcgggctggccatatatataaccggagaactggacaattctagcaagttcacagacacgccaggggctaggctgaagatcctcagagctgcgtgtgatccaaaaggaccctg

SEQ ID NO: 233187 - DNA, 1047 bp, Homo sapiens
  chr7:121956304-121957351
  hyper
acatgctcgcactccggtgactactccctgaaagccaatgagcggttgaccctctggtgacatctggaacccaggttcagagtttcgctctcgcctctactcccttaatattttactcaatgtcacagaggagaacagcttaaggcagccctgctccccatcttcaatccgaagctggggtatcccagagaaagtctcgctctgagctcctgctggggcacctgcccagccatgcccctcgagggcgtcgctgctctcaacccctctccgctactgcccggccgcccaggcctgtggacgcgactccatctgtagcaaagttcgggggccaaatgggtcgcggctcttcctcgaaggttactgcgagcgggacttgaagggaaaaggaggcgcattagcgacttcgttttcttgcatagtactggtacagagtaccggtgatggtcgtaggggaactctatgtaaagactggatgaccaccggcctcccggaaaccccacacgccaggcctccaacttcttcacaaaagtggggtgggtggcggagggctgtggcgggggcttggagctgctgagagccgagaggcgcagagcgcaagctggcaggctgggctgctatcccggcgcgcagatgccccgccgccagtcgagcgcgaacatctctccggaacatcgatctatcacctccctttaaggacccggaccgggaaatttccattttctgttttgggaataagaaataaaagcgaccaagctcttgccctaatttccccccgcgggcccttccacgcgggctggcgggatcagaaggacgggtccgagctcgggggcgcggggttcctgtgaactccgggcttgctcggtccggtccccgcgcctgctgtccccaggccctctcgggaggcagaccgcggcagcgcaaaggggcttcgaggatctctgagcaacgacggctgagtgacctctttccctctcaagcacaccttcaaggagccggtggaccctctcaccgccggtagctgcaggctgagggcggcgccaggccagg

SEQ ID NO: 233188 - DNA, 1407 bp, Homo sapiens
  chr7:122525746-122527153
  hyper
tccggccagagctgcgcctgccgggtgcaaccgcggcgcggccggcgctgtcggtctctgtctcacggatggtgagctgacagctcctgccagcccaggcggggaggaggagaagaggtgtccgctgcagccgcatacccggcgggtgaaagcaccgtcttgtccccaaagattcctctgccctcagagactaacaaaaatacggtgtcctgcgtttcgcagaaggacgggaggcgtcccagagctctcccgggagaaaaacccagggagaagtggtggtaggaggcgcccggtcccgcaactcaccttctgctgcctccgggccatgtcggtgggctgcttggcgttgaaggggtacgcgatgcacctcacgacgaagacgtagagctgcaggcggatcctccgctcctgctcatcgtccagctgccgctggggctcgtctcgcccctcgctgagcacagaggggctcgggctcacagatctggccgcgccgccgccgcccgcgcgccccggcgcgtcccgccgcccttcccgagtcggggctggaggagctcgctgcgagctgccggctgccaccagcacatcgcggctttcctcttccagcccctcgtccgactcctcttcgctggaagacgggtccagcatggtgctcggggatccccgccgctcggcccgcggtccccaagcgcctcacccccggcggctgcgcccgcgggtctgagggagccgcggggctggctgcagcggccgcagaacgaaaggaaaactggccagggctttccggacacgtcgagttagattcaggagtgtttcctaccaccagggcgaaaggggcgggcaggagccgggaggaggattgggaggggggagagggggagccgccgggactgaataggcggagttagcgttgggggtgagcttgggcgcctcaggaattgctccgccagccccgggcgcgccgacccagcggttccccagagcccgccggcagaggcggagccgcccgagcgcccggacgcaggtggggaacctgtggcgcctacaacaagcaacacgtggaattgaatgttgaagagccgcgcggggccgcggagtgcgcgtgcgcgcgccgccgctgctgcccgggcccgcctggagccctagcacacagtttgcaaaggcggggagcggccgagcgcgatggcccgtgtaagcgtccaccggggctgctccgactaccctcaccctaccacctgtgatcttttctccagcaggtggaggtggaatggggagcggggagggactgttccctagcaagaggttagggggagcggccgagacatctccccaacccgaatcggctgcctaggattgaaccccagcgcggaaaagcgggactggagcccttcaccacgaagtatctttgcg

SEQ ID NO: 233189 - DNA, 116 bp, Homo sapiens; identical to SEQ ID NO: 201169
  chr7:122527423-122527539
  hyper

SEQ ID NO: 233190 - DNA, 223 bp, Homo sapiens
  chr7:123172987-123173210
  hyper
ggccggcagttgctcggagctccggcgggtcaggaggtgacgggaggaggaggaggcaggaggaagaaaggggggttgggaggtagcgtccggtaggtctgcgcagacagcgctgccagacctctgactcccccagtcctgccgccgccgatagccccacaaggcgacatgggaagtccgccggagcagaggggagaaaattcaaaacgagtctactcaacct

SEQ ID NO: 233191 - DNA, 1671 bp, Homo sapiens
  chr7:123672011-123673682
  hyper
atgaggcccataaaattgagcgggtagtgagaatagtcccaggaacaagccccgcacgtgcggagtcccagaccccaggacagctcccacacgtagatgaagatcacgtagatgggcacccgcttccaagtgccccaaccgcggctgtagtggaggtggaagtagagcttttccaccacgaaactgcagctgccgtacataaagaaggaccagagcgacgtgtggccgctggttgtcccgtccccctgccccagtacgttgaagaagaaggtgaagaagatctcatccagaaagccgtgcattccgaagaaaagaaagcggggtaggtcgggcagcccctggctgggggctcccccggcgcccctggggccacggggtcgtcgccgccgggctccggccgcagtagggacccgggcgccgggagggacggggagcgcgcccctccgctgctgctgctgctgctgctgctgctgttgctgctgccgccgcctctgtcgcccgtaccgcaagcgcaggaagcgcttcaggaacacttggcagtggtagagcgccagcacgtactgcagcgccaggtccagcgcccctggcgccaccgcgacccccgccccgccgcccaggctgagtagtagcgcctggcccgctagggtctgcagccccacgtgggccgaggggtagaggaggaaattgaagacgaaggcgttgggacagcgccgctgctgcaggtacaccttctccagggcgaaatgggtgagcgagtgcagcaggcagcggtagggcgaggagaagcctagcatccgcaggtccgggctgcgggcgaagcgccgggccgaggacaccagcacgtccagggtgatcccgtgcatcccgtagaagtagaggcgcatccaggcgggcagcgtggcgctctcagccggcgcttcagcagtggacagcggctccgggcagccggctgccgcctcgcttcctggcccgccaggggcccccggacgccgcgccgcgccgcccctccgtgcggggccctcgctgtccacgtcgctccccgccatgggctcggaggctgtccgaacgcccgaggctgcaccgccgccgctgccgggtgcgcggagctgcagggccgagcggccgagccccgcgccgcctcctggccgctgccggcccccggggggcgcgcagggagctccgtcccggccgcggtcccgcggcagcgggggctgatgcactcaggggactcgcgggccgcccggctagcggaatccccccgccgtggccccgctgcgccctcccttccagtcccgggcgaggtgccgcccgcccgcgcccgctctagctctcaccctgcgcggcctaacgggcaccgcggcccagccaggggaggcggcgccggggctgtgaggggaaatgcagaagcttgtggaagccccatcccctccgctgcttagccccgcgcctccgctgcaggctctgggaacgtaacgcgagcagcggcggccctgcccccgccctgccaatgcccctctccgcctgcctcgacctctcccgccttctcaggccgcccccacgcgcccgcccgccgcaccgagtcccacagggtctgctcgggaaggcccggccctgcttcttcctcccggtgcgcccactcaacacaggggctccggtcgtgcggggggcgct

SEQ ID NO: 233192 - DNA, 861 bp, Homo sapiens
  chr7:124404309-124405170
  hyper
tgctgtttccccggcggggacccccaggctcatggattccttcacccaaggatccattctgggccagcgcccggcccgggagtgcaattgtccacccttcgtgccccgccagtccattggccgtcttggacaggggcttgtggtgggaaccctggagtttcccggctctccttggccagtaaaaaagatcgctggctccggggactgtcttcacactctgctcctggctacgcccggaaatgccagcgcctctgggacccttctcttcctcctctgagatctgaaggaagagctggagggccgtggggttccctctccccaaagtttcagaaggctcctgaccccgagcacctttccacctccaggggccaggtggcctggttggaggtcccgggggtccggctgccgacgcctccgcccctctgcctgcagccgggtcacggcccggggccgccggcaggtcccaggagggtcccgcaagaaacgctgccccctgctcctccctgggtgctcgggctcgcagaacgtctcttgcagaatttcccggtccccaggcgtccctgccgcggcgctggatcactgtaggtgcacagctctcccccagacaagtttcgtttctggacgcaggggcgaccccgagggcagaagaggcagacaccttgagcagtagcagaagcagtagccgcgacatgcgggcgagaagcgcgcccggggctcgcatggcttggtgagggcacacccggcagccgcagctcctgcttagttaggatcgacacctgctgccgaagttgctgctgagagttaggcacatgtcacatactcacccccgcccgggtagcggggaaccggagattagggtga

SEQ ID NO: 233193 - DNA, 936 bp, Homo sapiens
  chr7:124405510-124406446
  hyper
acaagtccccctcccccagacgactcgcagtcacaaccccgctcccagctcgctggaaacacgttgcaaacagtccgaagcagcgctgatgcgccggcgaaactcttgccccacctaaccccagcgacttgcgagcctactgctgccgaggagaagcgggattccaaccccgcggccactgccaaagttgcttctcctccagctcaaagttgacgacggggcgaagcaggctgctggacggcgtgccgccgcagagaaggaaatcgtggggagaagggggagaagagggcgccgctcgtcggtggacagtgccgctagccgcgggagctagtcactgccacagcgggctcagcccggacgggaagggtggtgcctggaaccgccgcgggccaggcagtgcgcggccgggaaggggaggtggcccggcctcgcccccgcgctccagccgctgcgcgcgcccgcgaagctcgactctcggctcgttgcctcctcccactccttcgcctcctcctcggagagatactggtttgtggggagacgggatcccctggtggttcaccactcactaaacccacacacgtttcattcaagccatttgtagcggcttccactcggaggagctgggagggaacaagggcggaggcgcggagcctgcgcggctcgaggctagggatgggcgggacaggttaattccccagctgtcgaaaccagcctgacaggtccccgagcccgggctaggggcgggtgcggggcgggagtggggggtgggggtgggaacgggaatatgagagcggtcgggggagggaagagaggagggtagcaggggagtgagcagcagggtcccctccaatctgttgcggctgatgcgcatgcccaggtctcagctctggggggcgaggggcggggcgggggaggggcggacgggggttgggccgc

SEQ ID NO: 233194 - DNA, 163 bp, Homo sapiens
  chr7:124570033-124570196
  hyper
tgacaggatgcgacgtcaacgggagcgcagggccaaggtacaggccccgcccagtccggtcacatcccccggaattctcgcagctccccttagctccgcccccagtgactttccagctttcgtggcgggaggcaagcttaggggaagcgggcgggtccgctgg

SEQ ID NO: 233195 - DNA, 61 bp, Homo sapiens
  chr7:126891135-126891196
  hyper
gcaaataaggcactccctcccggggtgggacttgcttaggggacttaagggtttctgcaac

SEQ ID NO: 233196 - DNA, 32 bp, Homo sapiens
  chr7:126892456-126892488
  hyper
gtggctgccttgttctttgcaacgtaaaatca

SEQ ID NO: 233197 - DNA, 137 bp, Homo sapiens
  chr7:126892668-126892805
  hyper
cacctggctgtccgctgaaaggttttagagaagaaaacggaaaggggaataaaacggggggattctccttttccaacaagcagggcgttttggggaagtttgggggccaggggctttttgtcccgtggttcggcact

SEQ ID NO: 233198 - DNA, 1051 bp, Homo sapiens
  chr7:126893225-126894276
  hyper
gtgtcacccagcggccctggcgcgggcagggagggggaccctcggcccgcggatccccctccgctcttcagcctgaagcgacgaggagaccagaaatgtcaatagttctgatttttaaaaatcatccccccttccccgcccccaagaaaaaggggaggacccaactacagagtgagagggtgggaagaagcgggagcggtagaagaaggaatatggttgtggaggagcccagcggctccggctgcctggcgagcccgggaccggcgcggggaggcgcgacgcccgcccgagcacagcgggcagcacccgcgagcccgggtccccggtgaacacagctccagaaagcgtcaccgagaataacacatggtagatgacaagtgtcccgccacatgctttcttttcgggaatgcttaaagtagagccggcaagccgcgcggttcccttgcaaagtttgcctggcgccgcgcggcggttccgccatttgtcccgccccgcggctctggcgattgtctccccactccccgcccccgagggtctgagggacgcgtgcaacagagtccccagggctcgaggtaccacacagcgcggtccgctgcgggcactgcgcaggaaggggcatgggtggctaccgggacggtcattttattgagatgattcaaggagccgcagacgcggggcaggaaactccgggggagccgtgctcgggttctgcagggaaacctcgggattcccttcgcatgccgcatgcggaaacctgccgggctcgacgtgcacagtccagcgctcctccccactagttactgcccaggccccccgatcctgcacccgccggaatgagagaaagtagcccctcgccgcccagctcccgggtagctgctccggccgggccttgcgttggtgagaaagttccatctagaggcggccgcgcgcaactgcaggcggcgccctaggcccgggcgagccagggagagcggggcgcggggggagagggggcagcccaggagataaggaggatggagaaggacgggagagaccccgaaaaggcaagctc

SEQ ID NO: 233199 - DNA, 115 bp, Homo sapiens
  chr7:127032409-127032524
  hyper
aggaggaaccgcccggcagcagctgccgccgccaccaccgaaggagccggaaccggagcgggcaggacctgaggcttccctcgccggggcaacggctgccgccgcaacccgggtc

SEQ ID NO: 233200 - DNA, 258 bp, Homo sapiens
  chr7:127033347-127033605
  hyper
atcctggcagctccgcttctcaaacttgaaagtggagttgggtcacgtgggctcacgcactttccctcctcttctgcgccccgatcctgcttggaaaatcctcgaagatcccagtcatctgtcaaattctgccaaccaagggccgcttcttgggggcgagagagccgcctccgttgtttcctcccagctcctggaacgtaattcttgctcttggtgacatcaagcaaatatgtgtccaccgcccgtcaggaaatttta

SEQ ID NO: 233201 - DNA, 109 bp, Homo sapiens
  chr7:127228128-127228237
  hyper
ctaggggcctggacgcaacaaaccaaagcccagcggccggccactgaaaatgggggcaggggccgctgcggagcgatgaatcctttcctcagccgcgctcgggctgccg

SEQ ID NO: 233202 - DNA, 183 bp, Homo sapiens
  chr7:127228671-127228854
  hyper
ccttccgcccccgcgtccctccagccccgctcacctgggtctctggccccgagtcacccacctcataacgccccggggcctctgctctcgggcgggtcccggtctgcatcgccgaccccggggcctgacacccggagctgcgggcctgggtggggtgaagctccctccgccccagcccggctg

SEQ ID NO: 233203 - DNA, 292 bp, Homo sapiens
  chr7:127291485-127291777
  hyper
aagagaccgaagaacgagggtcactctcccctgtatacgtggcatgtccttcctctgagacatttattcctcccaccaacaaacattaatggaacgcctcacaagtgctagaccccagcgacacaaacaagggcgaggcacactctctgactacaaaaagggcgcgcggccgcgtggcaggtcaaagcccacatcggtaggaggttccacaaagctctgattttccaagttctctccatacttttagccaaggtaaaatgtcggaagtcgagtggagcgggtacggagattc

SEQ ID NO: 233204 - DNA, 839 bp, Homo sapiens
  chr7:127775616-127776455
  hyper
tgccccccacccccgtttccacctcccgcctgcaccgccgggagctccggaggagttcccggggacctagaaacagcggcgagagcgtgagaggggaagagctgggggtccgggccaaaaggaggatggaggggctaggcttctagagcgtgggaaggggtcccagggaccgagccaagtggaaggcttgtccaggcccccgcctgctcccctggatctggagggagcctccacgtgcttccggctggggcggcaccgcgcagtgccgggagcgcccacgagggggcgcgcgagctcggcggcggcggcggcgccccagcgggagcgggaggccgcggggcacaaagagtggcggggcggaccctggggcgcccgggttccctgtcccgtgggtccccagcaaaccgcagcggtaggagaggtgggctttgcctctgaagcacagcaggcccttaacaagttttcacggactgaatgcgtgagctatgtaagccctgccgcatcgcgacgttagaggtttcccaagttacgcccccgcaggcgctctgatgctgacatattaaaagaagcccggaggaagagggcgacgcacgcgggtggctttaggccgcctatttggggaataaatgacagaaggggcgtggtggggtggggaggaagcgggtccccgcgccctgggttccgattctggcccgaggctcagctaggatggccccagatcccagagaacgtcctacctagtgcccgtttctacacctccccctcccgccccagagttacgggttaaggagaaagacttggtcagagaaaacgtgagacggcgccggggcagggaccct

SEQ ID NO: 233205 - DNA, 2216 bp, Homo sapiens
  chr7:127806578-127808794
  hyper
ccaatgcccgggagcggcctttgggaggaaggggaaggctaatgccctctcaaatgctcttccctgcttcccgcatctactcaggtgtgtgagggagcccgcggaacccgctctgcccagccggcgcgccctcgaccgccctcggagttccgcggctccgcgcgccgcctccccgcctccgccgacattccgaggctccgcgtttgccatttcgatctggaggcgcattctcctcaccctcggagagagactgggtcaagggcccaggctgggaagaagggacagctagtaaaggaactctgcccgcctggccggcggagagccgcagagagaggacgctcacaaaagtcggtcgctacccggcccaaacgattgtggagccggcgagagcaactggtcccccagtcctcctccctggaggaggtgcgggggcgcggcaggcgggcttggcccaccccagccgaggagcttgtgggggacggcgggcggccggctggacccctgcagggcttcccccactttcgggagcccgagcggccgagggagaaagggcaggggctctccgccgtccgtctgggagagcagctcctcccagtcgggcccgcaggtgtgggtggggaggggccgtgtccgcctccgtgctaggtagagggtgggaggagggaccttgtctgtccccctcagctgggtaggaaaccccgactcggacctgtccttgagcgcgggggatctgggcaccccctcccccagcaggttcccgagagtccgcccgagggtagacagacctaggcgtggtgtgcacgcgcgcgtgtgtctgtgggtgtgcgtgcgagcgaggcaagagggtcttggcgtcccccgcaccctctctgccgggttctatattttgcctttctttgttctcaaaatagtaggcgagcgcggccggcgctgccctggcgaggggtgggggctccgcgctcgctcgcgcgagccgagttagctgcagggttacaaacagtatctccctgctcccccggcctgaattaatgtgttactatttcgggcgagccagtgtttccaggggaaacctaatgacgcaatgacgtcaatgcaggtcagcagcagactctccgggagggcgggcgggctcccggctttcgggctcggcgcagtctgcgggcgggagggcgccggcgaggtggcgagggcggctggcgcgggggcgcgggagccccggctaagcccggggacgggagggcgccccctcccagcgcccgaacccaggcaacttcccgccgcccgggcaggagtttctccgtagcccacggacatccgggaggcttgtggagggcaggcgggtaacccccactcccaccccacctttatccaggggcagccagaggagccagcaggtcgggactcgctgagggggctccacgcggggcctcccacgcacaggtacgcgctggtcctcggggtgtccccagtttgggagggagacacgcacagtcgctcccgtccacactcctctcgtgtcctggctccatgactgggagtctggggaaagaagaatgggtgtctgagacctacccctccgccggtgtcgccccgctctttctgggcgtaggagcgggctgcctgcccctctcccgcaccttcctggtctcgggctagaactggggcttcccatcggccgcgcttcccttaggggcgccatctgaggtcggaagcaaagctggaggggcgtccaggccagaggacgcgggctggggcgggagcctcggcagcctggtgggagctggtgcccactgcagggtgcgtgtacggggctgcctgcgtgtgcttggtgtgtgtcacttctgggagcgtaccccgtgtgtccacggggtgtgtatgcgcccacggaagtcctctgtgcatgcgtgtctgtgccataggcgtgggaacacctcgtgcacccatggtacttgcccggagagtaggaagccagcgagggagcggccctgctccagggtctcttccctgctcatccctccagctggcccagattacaccctactcacacccgggtcgcggcccactttccccatagccgcagcttccggcggctgcacacttcttagtgctcatcctgccttctcgccccaactcgttgtgcccttccctccttggagagtgagtagaagaggggatggggaggaatccgtttccatcccccgcgaccccctcaccta

SEQ ID NO: 233206 - DNA, 640 bp, Homo sapiens
  chr7:127841246-127841886
  hyper
ctgagccacccaaggtcacccgggcagcgggcacagttgggactgaacgcaggggctctacctgtgccaggtgtccacacctcggtggcgctcggccgcctgacctcctcttggagttcccggctcagggcagggggtcgcgtccctgcggtctctggaggccacgccccacccgggcccaccggggtgggcgtggctacgtggctccctggcgctgaggcgcctccttcccaggtgggcggggctcctgccgggtcggttcccgcaggctgcccgcggaccccagccacttggccaggctgcagggacagtgcgaggaggcgctcagcctggaccacagcggaggtgtgcaggactcagcgaggcccccaagcttgtacgcctccttcctccgccggcttctctgtctgcctcccactgtccctattctgcccttcacagatcgttgtcattatcaagtcctacactttgagagcagaaaacgaccccgtacgtggtgggtctccgacatctgtttattacgttggaccgcatgctgcatatgatccagccacctcgctctactcctgtggctgcccttcgtcctcgtcgccgggacccctctccctgcctcccagacgacctgtgccttaccccttcc

SEQ ID NO: 233207 - DNA, 291 bp, Homo sapiens
  chr7:127991589-127991880
  hyper
gctccgcgtccccgcgagcgatggcgctccccaggggctccttgtctgggggcccagtgacccagcctcccggcagcagcggagccgcgtggcccggggacaagcggaagagcttggcccagcagcgcggcggcacgcgaggactgcagagcgccgggtagaggcccagcagcgccaacgggagcgcgacgcccacctcgcccaggcgcaggcctagctggaaggcccaccagggccagggcccttccaggccggattggccgccgtagcccagggcgtgcagcacctcat

SEQ ID NO: 233208 - DNA, 476 bp, Homo sapiens
  chr7:127991910-127992386
  hyper
aggtgcccgccaccggggccgtgcgcgccgcgcgccgccaggactcccgaggggcgaaggggctgcgcccctgcggcaggggtgtggcgcccttgaagcccgaccctcccaggggcgccccggcccgccgccgccgcccgccccagcaggagagcgccagcagcagcccggaaaggaaagcggcgagaaaggcgtgcagcccgcgcgaggcgagccgcaggggccgcagcgggcgatgcgcggcgctcccgagggcggcggcggccgccagccccagccccaggagcagcagcgcagccaggccggtggggcaccgcggcgggcgcggccgggccagcagcaggcaggccagccccaggccggcagccaagcagggcagcggaaggtcctgcagcagcagccaggcgagcgcgggcagtcgatccctgtgcccataggcgtcgtagaagagcgggaaggcccgcgtggtcccggcc

SEQ ID NO: 233209 - DNA, 251 bp, Homo sapiens
  chr7:128001888-128002139
  hyper
ctcggtgccgggcgcctccacgcgcgctcattcacccagcgctgtcaatcagccgcggcgggcgcctcgctgtgagcctggcgagagcaatcacacactcccagggcggcccagcacacacatccacacgcgcgccaggaaacacactcgcaggtcagagggcgcgcgcacacacgcgcacacatggcagcctgccccaggatggcaccccgggcaataagagtcccaccgtttgctaagtagaagtacaa

SEQ ID NO: 233210 - DNA, 120 bp, Homo sapiens; identical to SEQ ID NO: 201180
  chr7:128049871-128049991
  hyper

SEQ ID NO: 233211 - DNA, 76 bp, Homo sapiens
  chr7:128337471-128337547
  hyper
ttggggcagcccggcgccactgccggcatctacgcaccctgaacgcgcccgatctggtctcatctcggaagctaag

SEQ ID NO: 233212 - DNA, 195 bp, Homo sapiens
  chr7:128337607-128337802
  hyper
gtttttggcttcccgctccctctctctttcccccttttgtcgccgcgcttttcaaccgccccctaactctgctcccccttttactccgtcgcagcccgggacctcctggtgggggtccgccactgcagcaccaggcgccactgccataccaccctgaacgcgcccgatctcgtctgatctcggaagctaagatgt

SEQ ID NO: 233213 - DNA, 143 bp, Homo sapiens
  chr7:128379663-128379806
  hyper
ctgggatggaggccgccgcccgtcttaccgcgcgctctgggaagggggctggtccggtggaactctgtcccgttgggtactgttctgtgcctggtttgctgcgtcctggtcctccatctctaggtcacgccactcaccgagtc

SEQ ID NO: 233214 - DNA, 239 bp, Homo sapiens
  chr7:128430710-128430949
  hyper
gagtgaacatcagtcgtgcccactctgagcgggctactgtgggggcgtggctcgcagcccaccgggtgtgggaccggaagggaagacagggcggaggagagggggtcttccggccctgaggcttgatggggccaccggagggctcctcctaagagggtccttggccctggctcggtggggggtcgcggaaagcggagaggtcagggccctgccgttcgcccatccgggcctcgacttcc

SEQ ID NO: 233215 - DNA, 64 bp, Homo sapiens
  chr7:128470453-128470517
  hyper
cagcccgcccttcccgagcaccgctccggccctggagggagagagagccagagagcggccgagc

SEQ ID NO: 233216 - DNA, 262 bp, Homo sapiens
  chr7:128502879-128503141
  hyper
gccgacggggcgccgtacggcggaggcggggtttcagtggcttctggtgctctagggtgagctctgcccggctgcagggatggcggggaggggtaagctcatcgcagtgatcggagacgaggacacggtgactggtttcctgctgggcggcataggggagcttaacaagaaccgccatcccaatttcctggtggtggagaaggatacaaccatcaatgagatcgaagacactttccggtacggtaccgcgcgaggcctgaac

SEQ ID NO: 233217 - DNA, 55 bp, Homo sapiens; identical to SEQ ID NO: 201181
  chr7:128579008-128579063
  hyper

SEQ ID NO: 233218 - DNA, 318 bp, Homo sapiens
  chr7:128695028-128695346
  hyper
ctggccttttttccggtttttccacttgattctagactcttgagtccacagattctggcgctcccgtcttcagtcgctgacttgccctcagaagcctatcttgggaggccacacaccagtgtacctaaggttcgtttacccggaccggaagcgacagcaccgatacctttggcacacttccgcctggtacactacaaacggcctccttcccggcacgcctcctcttgtctccccgccccctcccggaagtaaccctgccgggccaggagccgggaagaagagccggtgttctctctgttcctcgctagcagcttggga

SEQ ID NO: 233219 - DNA, 52 bp, Homo sapiens; identical to SEQ ID NO: 201182
  chr7:128784405-128784457
  hyper

SEQ ID NO: 233220 - DNA, 248 bp, Homo sapiens
  chr7:128784698-128784946
  hyper
gccaatgggaagtcgggctcctgcacggcgcggctcggctcatgcccccgggcgcggggcacacaggccggccggcagccgctgggaaataggcccccgggggcggtggcggcggcggggccatggcgcggagaccccgggcgccggccgcctccggggaggagttctccttcgtcagcccgctggtgaaatacctgctcttcttcttcaacatgctcttctgggtgagtctcggggtcgagggcacc

SEQ ID NO: 233221 - DNA, 700 bp, Homo sapiens
  chr7:128828679-128829379
  hyper
ggggctggggattgggggcccaggggtctcctagggctgaagacaacttggattgcgaggctagggcttggggagtcgtgcatcccgttccgggcctccgcagcccaacatgggccccgggttccaaagtttgcgaagttgggcgccgaggggccggggcgcgcggagcgtccgggggggcccgggcccggattctctgggcgcacaggtcgcctgagccgcctccgcggccgccgaggtcgtgcgtgtggccggggggctccgaggagcaggcgggggcgccggggcttttgctgagttggcggggttggccatggccgctgcccgcccagcgcgggggccggagctcccgctcctggggctgctgctgctgctgctgctgggggacccgggccggggggcggcctcgagcgggaacgcgaccgggcctgggcctcggagcgcgggcgggagcgcgaggaggagcgcggcggtgactggccctccgccgccgctgagccactgcggccgggctgccccctgcgagccgctgcgctacaacgtgtgcctgggctcggtgctgccctacggggccacctccacactgctggccggagactcggactcccaggaggaagcgcacggcaagctcgtgctctggtcgggtaagtgcggcggagccgggtctggggggcgggaggtgccgcggtaagatgggggc

SEQ ID NO: 233222 - DNA, 847 bp, Homo sapiens
  chr7:129418307-129419154
  hyper
cccgctaactcccccgcaggagcatgaaggggcggccttgagcggtaaagaaacgagcagtggtggaggctgccgctccgagcccaggtccgaaccgagagccgcgcggggaatgtgggggtcgaggctgagagctgggcttggggcaggttcctttgcgttcgctcaggccacgatgaggccactaggacagatttctccgaaggctcggcctcggatcagagatccgccgactcggtgcccatcggtcgggctcactgggtgacaggtagagggtgatgcgcacccgtagagctgagtgacccggcccgagaatccgccacctggctcgcaggattttcgccctcaggagctttgcgaagacgggcgcaaacctgggaggcgccgccgcaccttgcctgtgggggtggggaggtcgattacggcaccgcccgccctcggccctaatcgctcagagccggcctcagtgcccctgcccccggcgggtattactgtacacggtgtccgggagcccgggttggaagagcaaacgaatggctcagcctggaggacaccgtggaatcgggcgacccctgaccccgggtgacaccctcactgcccatagtcctgggatgcgctgaccggtgaggcgccagaggcaagccgtccagccgccgatcttggggaagggctgggaacctgggtgccactagcgctattaacaggaatggggcagttgagggcggggaacggtgtctcattcgcgtgcgccggggttcccgggatgagtggccgcgaagtggaggcacacgggaggtctgagagccgctttcccccagagactgggcggggcggctccgggccacgg

SEQ ID NO: 233223 - DNA, 706 bp, Homo sapiens
  chr7:129421183-129421889
  hyper
taacccttgcacttgaagaccgttaacaccttgtcttgggctcgagcaaaagaagggggtgaggcagtggaagcggggcccgggaaatctatagtttccccacccccagctcctgccgagccgggaggggccaagggtgacggcaaggatacgaacccttcaatatgcccgactcccgggcagggcctgctgaagccgtagatgtcgcagccagatggatcgggaagcaagattcccaccccaggtggataactggacgagtctcagggcctcggggcccctctccccatgcagccagggatgggcacggtgagcgagaacccggacagcggagataatgagcacgtcacagagcccaacgggccaaaagggggtgatagctccacattaacccctccccgtcctactagcattcccccgcccatctaggtcgcctcgagcctccctggctgtctctgcacccgcgccctacctggtcctcagacccatgcgatgctgggcaacccgggccgggtgtgcccaggaccgcaaagcgggaagcgcaggccttgcggactgcgagtggcccccgcggcctgctgctcccctttataacgcgcgccccgccccccgcgctccgggcgccccgccctggcccattcacctgctgtcgagaaccagacaccgcgcagcagaaagctagccgctgggccgcgaggtccggccg

SEQ ID NO: 233224 - DNA, 591 bp, Homo sapiens
  chr7:129422069-129422660
  hyper
gcaagggcctcatacatattttaaggagcaggccaggcaggtaaccggagctggactcggacggtgagggggcggcccccggggacctgataccctggatcccttacggctcagggctcaggcgggggaagaggtggctcaggacgacctggggtcctcactttgctggcctgtccagcgcatcctaagcccgcgtgtatcctaccccctccttctgcagatccaatgtccgtctggcaattgccccattccctctcgctggagagatcccttccgcctcgccacaggcgtcccacgctgcccggagtcgtgcgccccgggacgggtagttttgggttcctcgacgcttggccaggtttaggaaagacccgctgtcttccttgctgcccccacctaggagactcggcgccttgcgctccgtcctttttaatggtgtcgcggcttgtccctctggcttgctccctcctagtccctaccccacacggctcccttcgccagctccatgacaatcccactcgtgctgaagaccttgggcaaagaagtaaccatcggtcttcccctcccttcccattcctccggcggcaggactag

SEQ ID NO: 233225 - DNA, 567 bp, Homo sapiens
  chr7:129422937-129423504
  hyper
tgcacatgtgagcacgtgggtacttggcgacccggagatctctgcaaactgcaggcccagcgagatggcctcagcacgccctgcaccctcgtccgcgcgactgccgccgggtgcccgccccagccgctgtgtccctggtgcttcctccgccagggccacgtgccggggaagccaaagcgggagtctttcgatcttggcccagcccttagccctcggtcctttgctctagcatctagattctcgtgggtcaacaaagtcactggaaacccaacgaacttcccgacatttttcgaaaaccgtatgcgtgtgcttctgtgcgtttttcctctgatcgaggtagggccctgtagggttctgtttggacgggaggctggagtggttccttcccggctgcggggtcggaggatgcagagattcgaaagaaggagaaacacagagactgtcaaatgaaaggagattctgtcttcggaatcgacccagctctttaaaagaatgaggaaaacatggggtctttatatatcctggaaagtcgcctaggcgttcagtgaaaaacgcaaaaggcacgtg

SEQ ID NO: 233226 - DNA, 1583 bp, Homo sapiens
  chr7:129424364-129425947
  hyper
ataaaataagcattcgggatgctgaagcctgcaggagttgaatcagagggcgagctgcagagcggaggcactggggcggcgggccttgcccgggctcttggctcccatgaatcctcgatgagtagagaatcgtcgctcggagcaaaggcgagaggagagagaagcgtgcgggtgcggcccttgctgctttttaccaggcgacaccccggtcgactttgacccccgagcaggtgaaacataagcgtccaccccagaggggtcccctacccaagtcagaggagaaggtggcctgccaggttaaaggatcgagtccagcctcggtttcctcatctgtaaaataagccgagaacatccgcgcctctttctggagaaggctgggaggatgccagagagaaactgcgcgcaggccctggcgaggagcccctccggcccatgcggaactctgcacaggctgggtccctccagggttagaaacccagcttccccacccctacccagcagggacccgcgctgcatcccctaacgccccccaaccctctgcacccagacccaagagccggccttcgacgcaccacatgcgtggagcccgggtcccagccctgaggaccaggtttcagggctcagaagactccagcgaggttccctcgcagattgtgtctgcggtcgttgggggaggggccccgcagccttcagcagattatccaaaggtcagtgacccagatatggttttggccacgggccatgtttcacttcctgtgccccaagcagaatttagctgaataattcggaccccaaaccaaacaaaacgctcttatttccgtttggggattcttcggagttgggatttttctgtctcaaattagaataatctgcattattaaccacttaacagttatttgttggttggctgcctgacctttctgagcctcagtttcttcgtctgtaaattgggagcttacccaggtcggaggactgttggaattggaaatattcgaataaggaagtgtttttgcaagtgctttgtaagcagcaaagcgcttcttcaggggtcaatttttttttagctctgcagtcaccacccaaattcggaagatcgttgtgcctttcttggatgagaatgcccggctccagcccggggatgggacggtcttttccttgctaggagtccgctgtggagggggcgatgcgctctgtccaggacctaggagtccctttctccctccaccctcggctcacagcgggcagctcccccgacgcgtaccgcctctttgcccccagcctgaggtgcgctcttccccaggacgcctcctctgtcctctgcacgccgccggccctgctggggttgctttctgccgcggcgtcttcgcgaatatcccctcttgctgtctgcctgggcgtccctccgggttaccgcacaccgcctccgaccctcccagggcgcgggaggaggggcagggcatccgcgttcgtgtctgggccctggcggggagtcgcgtggtccaacccctcgtttttaagaggagggatctgaagcccagctaggcttctaattccagacagagccctacggagcccagttctct

SEQ ID NO: 233227 - DNA, 119 bp, Homo sapiens
  chr7:129709789-129709908
  hyper
tgtttgattgggacgtggcttatacagggacaaatgcagctaagccgactgaaagacaaatgaaacccaggaatatctggttcttacattttagctttgactccgcccctgggtcccct

SEQ ID NO: 233228 - DNA, 90 bp, Homo sapiens
  chr7:129710295-129710385
  hyper
cctaccaagaaaacgactgaccattggctgcctttcaccaaggcggtaagtcattggtctctggtgggaccgggcgctgcccccttcccc

SEQ ID NO: 233229 - DNA, 114 bp, Homo sapiens
  chr7:129845324-129845438
  hyper
ggtagtctcttctcgcgagaaagggaggggtcgcaggcccaggcgctcggagcgttaccagggaaacaggtctcggttttgcggctcccactcagctgcgggagaaagctaagc

SEQ ID NO: 233230 - DNA, 442 bp, Homo sapiens
  chr7:129913008-129913450
  hyper
gtgctcaaggtacacggtgcagggacggttcttcctctcgatgtttctagaatctccctcctcccaggctagccggcagtcccagcttgtgctacagagaggctcctttttattactttttttttcttttcctcctaaccggtccttgctggttttgagtatccactcccccacccccgcccccttctttttctttctctctgttcctgagcaagctgacgcaggtctgcaggagtgaattaatgctcacgtcctgagagatgagctcctggggaaccggggcaaatgcgccaataggagccgaggaagggggaggtgcgggccgggggaggttgggggctgggggctgtaattcaagctgggagttctctgcctcccctccccttctcttttttttctttcctctttaaacacacacacacacacacacatacacgcgcac

SEQ ID NO: 233231 - DNA, 186 bp, Homo sapiens
  chr7:130741971-130742157
  hyper
tgcacttcccaagtcgttgttttctttgatctccttagactctctgcctcctagagaatctaatccacatgaactgcgctcctggatcttttacataactgtggtttttcacaaggttctttaaacaaaggtccacgtgatagatttctgctcaagcttagttccaggaaacgtttggtttctgca

SEQ ID NO: 233232 - DNA, 37 bp, Homo sapiens
  chr7:130791783-130791820
  hyper
tccagtggagaaccgagacaccgcgtcctttctaatt

SEQ ID NO: 233233 - DNA, 282 bp, Homo sapiens
  chr7:130794764-130795046
  hyper
gctgcagcagctgcggttctgctgtgtcatgcaagaaggaggcggcggcggcggcggcggcggccggagctggagggggaggaggggaggaacctgatcctccggtagcgaagggctagaggcaaacaccgagctcctccagagccgcccgggagcagggagggctccgctagcccggggggccctccccgcggggcagatggtaagtggggcggtgcaggtggtcgccttgggaagggagcgcgcaggggggtaaggtggggcggcgggaagtgctagaag

SEQ ID NO: 233234 - DNA, 95 bp, Homo sapiens
  chr7:131012269-131012364
  hyper
aaaagcgcacaggcgtcccttttccaacttggtcttcttattttcccttcctgctccataactacaacgtgtttctgttcgtaatcatctcggct

SEQ ID NO: 233235 - DNA, 47 bp, Homo sapiens
  chr7:131013175-131013222
  hyper
agtcgattgctgccgggacaaagtgtaaagccgaggagtgtctattc

SEQ ID NO: 233236 - DNA, 120 bp, Homo sapiens; identical to SEQ ID NO: 201188
  chr7:131240426-131240546
  hyper

SEQ ID NO: 233237 - DNA, 528 bp, Homo sapiens
  chr7:131242580-131243108
  hyper
gagtgggtgttggagaattccgtaaactgagtttatccggtgaaagaacaaagaagttcctttcccctcccccgctcccctccttttttccacccccaaagctgcctgggagacgcagaccccaggcccgcctgaagaggaggcacatcggcggagccgggaagcggagggggcgaggggtgattaaccttggaacccgggtacggcgtaaatttggctcacgtgactccggggttgctaatctggagtctatctgccagatggggctgggtggaggggttttctccaggatctagccgcgtcccgggcacaggggactccgtgagcccctcaagtcggctgcaagcaggcgatgcctgcagggcactgcgtccctggagccgcgaaggaagcgctggagccctggctggggttccgtggcagccggcctcaagcttgggaagggctgacggggttgttttcatcaggaagtttctgcaggatcgttctggccccgttttccacaccgcatatgggaaagacagaggg

SEQ ID NO: 233238 - DNA, 237 bp, Homo sapiens
  chr7:131514697-131514934
  hyper
ctgtaaagccccagcccacccggaagcccccactttggcgctcctgggcttggatcccgctgtgaggccgggggcaggtgatcatggcaggcggtaggactcctctcactctctgccccagaccccgcctgggagcctctgccgccctctcctgctccagcaggcaaggccaggaagccgggagtgcttgctgtcaatatcacatgtggagctgcttgtggccggccaggactctca

SEQ ID NO: 233239 - DNA, 1391 bp, Homo sapiens
  chr7:132260161-132261552
  hyper
cggtgggcagtgccgccacggtcgtgagggaggggagcctcctcttttggaggactatatccctcgtgcttcccccttctagttctctttctcagacacacaccacgaaaggcatgtgacaggtgttcgccagccggaggcaccggggaaggcagccccatgtgcccagggagggtagggaggtgagaggggacccaagtcctgtgtctccaagtcctgtctgcttgctgctaagcaggcactgaggctgtgaataaggtcttaccttttaaggaggatctgacccccgtaccttccctagacaagcaacatacgcggcgatgctttaagccgctttctgcctgaaatctcggcgcattcccggggaagcagtgccacgcttcagaaaggcgtttgtgctgcctcttactggggaaacgcagtgtctgtttcatatgcgccgccctacagaactgcagccccaaccgcctatctggcctcctccccgggcgctgggccaccactctctccaaatatgcgtccgaatatctgtgggtctgtctcccgttgaaatcccagggtgtccaaaggccacggggccgcgatgacactgggtaggtctccggaaacctctcaggacttctcccattttaaagcccagctagggacgaaaggggctgggagctgaaaaattgctccctcaacctccccgggtgggaggcagagccgggaatacacagaatcccaccccgaaagtcccgggaaagagaagtctgagtccaggagcgtgagaggagaacacacccgggaaatccctgctccggccgctgcacctccgcgggcgtccaggtgggacgtgggcaggtgcgcgagcgccgtgtgtgccggtgtggatctgtgtgtgtgcctgcgtgtgtgcgtgtgcgtgtgccgcgggctggctccgggacactgaggactcccgggtcggcccaggtctgtccgaccttgctgccctcgccgcccgcccggccccactccccggcgggccggctccttacctggacgcgccgcgtttccctccttcagcgggagcgccgcattgacactgcagatggagcctatgccgctgcctctcgccctcctctgaacgtgtgcgtgtgcgcgcgtgtggctgcctcctccagccccagccccgaacgcaaatactccaccgaggcacagggaagccgggagcagccgaggaacgcggagggcgccgaatcagagcctgcggggcttgacagcttctcttgcggcgtccaaggtgggcgtaatgtccaacaaaaaggtcggaaaatggggatcgattccgaacacccctttcctccacccagccccggagcccgagcagcggcggcggctctcgggggctgcggtggcgacgccgggct

SEQ ID NO: 233240 - DNA, 224 bp, Homo sapiens
  chr7:132262152-132262376
  hyper
gcttcccttcctccctccctcgcctcgcctcctctcctccctgccgcccgccgcccgccgccgctccctctctggctcgctctcgctggctcggagctcgcggctgacatctagagcgagggagagcggccggcagagggggcagggggcgcctccctacatgctcccacccgccgccgcccggcttgccggctctcctccgcaccaacgtttgccgacacccc

SEQ ID NO: 233241 - DNA, 186 bp, Homo sapiens
  chr7:132299531-132299717
  hyper
tgtaaatacttgggaaatgccggagacacctcccaccgcggaactgagccgcggagaaaagcaagctgcagagaaagaggaagcagatgtgcagagaggcggagatggaggagtggctgggaaggtcgcctgtgtcccgccggcttccaagttccagagccttccggagcctcttctgaaatcctg

SEQ ID NO: 233242 - DNA, 195 bp, Homo sapiens
  chr7:132340198-132340393
  hyper
tctgacatgcataacgggaatcaaaccagagaggaagtgctgcggcttccctggtgggacattgtgctctctctccctctcggagggcccctccctctgcactttcagcgatttcaagatccgcacattactctttatcaacttggcagatgctattgcctcttccggctcacaagcttccgtgctgggctcctc

SEQ ID NO: 233243 - DNA, 125 bp, Homo sapiens
  chr7:132766985-132767110
  hyper
tttgatagctttccgcggagtccctgggtgtagtgggaactgtggtctcgatctggcgcggtgggtgatgggacattctctccccgcgcctgagcgcgctaagggagcacggcattctgggagtt

SEQ ID NO: 233244 - DNA, 217 bp, Homo sapiens
  chr7:132937609-132937826
  hyper
tagctttcctgcgcgcccaggagacggagaaggaaaactacgactcccagagtgcttagagagaacacgcgcgtcgtggcctcaaaacttgctcccttagtcccgcctcctcacttcagtgattggattttccacttccgcgcctctggaattctcttcacccattggtggagactcctgcggggtcaaatacagaatttacgcacccttggcttcc

SEQ ID NO: 233245 - DNA, 357 bp, Homo sapiens
  chr7:133812026-133812383
  hyper
aaggcgagtacgcgcggaggagactacaggccccagaatcctccgcggttccccttgcctggggtcagtctcctaggcaaccccgctaaacaagatggcgacctccgagagggctctcctgaggaccagagctgcctctctcctgagaggcttgggcagatcccgaactggagcccgatcgttacagtttcgcgcagaaaaagagcgtcagccttgctggtcttttcccatggggcagaagacgaaaggcagctctaacatagcctcctcctacctgctccagcagctcatgcaccgctatcaggagctggactcggacggagatgaggaccagggcgagggcgaggcgggatccga

SEQ ID NO: 233246 - DNA, 121 bp, Homo sapiens
  chr7:134001194-134001315
  hyper
tgaaactgttaggcgggactgccgccggtgcgcagttttgggaagcagcggactcagcggggtcccaggctgcccagacaggacggattgctggggggctcaggccgtcctgccccgggct

SEQ ID NO: 233247 - DNA, 96 bp, Homo sapiens; identical to SEQ ID NO: 201192
  chr7:134001929-134002025
  hyper

SEQ ID NO: 233248 - DNA, 281 bp, Homo sapiens
  chr7:134142980-134143261
  hyper
cggctaggcacttctcggggacgctgtgtggtgttgaggttttacagggaaaatgctaaccttggcgcctcctgaattatcaactagctacggggtgcccagatttttctcccgagttccagacccagggcaccccgaggcggcgcctggccgaggagctccgcactgcgccttgttaacagctgggtccgggcaaactcgcgccacctaattctctgccctctaccggcttgagatgcttattcctcagggagggcaagaatcgaaacgattgagaccaa

SEQ ID NO: 233249 - DNA, 177 bp, Homo sapiens; identical to SEQ ID NO: 201193
  chr7:134331362-134331539
  hyper

SEQ ID NO: 233250 - DNA, 483 bp, Homo sapiens
  chr7:134832830-134833313
  hyper
tgtttactaggcacgactgcgaaggcaagggggcaccagctcaggactgcatctgcctgccatttcccttccactcctcctttctggagtctgacattagaaagccagcgagaaggaagattcaaacaaccaaccctgatttcctgcttctccttttcatgagtgttcctgtggtctctgcacctcctttctgtaagtaccgatcctgcaagcatcacagcttacccagacgtctactaccttgtaagacaattttgttttcttctcagatatttcatgttctggcaatccacataggggaactcactggttgttcagtatctgtgaccctccctcgctcatgtctgtataatctacataatctaccccctttactctctgctctccttccttccactcttcggcatcaacatgtgtagctctggcctcaaagatgatgaaagtaaggccagtataactggttagaaacgatgcagggctgac

SEQ ID NO: 233251 - DNA, 294 bp, Homo sapiens; identical to SEQ ID NO: 201195
  chr7:134855495-134855789
  hyper

SEQ ID NO: 233252 - DNA, 153 bp, Homo sapiens
  chr7:135194963-135195116
  hyper
gagttgaagtcctcggagggtaacctcccaggggcacgccgggagttgaagtcctctctcagagggcggaggggatcgcccacctcacgtggctgctggactgatgcctttcttcgtgttttgcttccttctctgcacgcgtgtgctgcttca

SEQ ID NO: 233253 - DNA, 88 bp, Homo sapiens
  chr7:136553410-136553498
  hyper
cgaacacacacgcacgaatacagacacgctctcctgctgtactaaaggcgccagggcgcaaagacctagggagcgcgcgcgggcacac

SEQ ID NO: 233254 - DNA, 2667 bp, Homo sapiens
  chr7:136553558-136556225
  hyper
gccagagcctggaaatcgcagatttcaccaggaaatcgccgaggtacccgaataggtgttgcctcccaaaactaattcctacttccccaagcactttggtgaagaaatgaatccagcccagctcgccgaggcatccaggtctccattctattttggtctccaggctcttcgtgaaagccaggtttgaaagtcttgtttgcttctcctttagtggtttggcgtggagggcgggggcagcgtcaatttaactccagtctaaaccacgaacaggtcacagactagccaagtggctgagacgagtgtggggtgcgtgactctgcctgcgcgcgcgccagccccgcagctctcgccagagccttggggtcggttctctcccgcctctcccgcctctcccgccccacccctacagtgtctcggcatcaactaatcttttccttttcttttgcaagatcaagggagaaagagaaccggcagctggcctcggactctaagcggtgcgcagctccagcccgagcggatcggccctgaacccacaaaggactcctcgctccttcaagcctccaccacctcgcagccggggaggcaactggagcgaaaccagcgacaggtaagggccccgcgctgtgcagctctccgcttacccactccaagggccctggcaccagggggtctctcccttcatatccccccaagccggaggctcaggggtcggggcttgggggaattggagggaggtcctccccacgtgcagattctcaaacggaaactttggatcctggggcttggagggttgcgagcagtgatggcgggtctgaaaggaaggggcaaacgaggcacagcgcgaggcgaggtacccctacgattccgacggtcactgagtccagccgaatgtggcgaaagcagcctgggagctgcgctgtcccggcgtcgctccctattccagccccccattccctctactgttgctgacccccctcccgccacccactccagatgcagccatggacaagacaaggagagcttcgtccctcccgcccctcgggttccttcctgctggggtctgaccgcgtcttctgtgcgtgtgggatggaggcccggctcgctcgggctccgagctgtcccccggctccgctttcggagcagcccttgggcgctggagaggtttcccattgcggtctccaggtcatggccaaggaggagaagcaattagaatgggggaaagggtcccaagacaaaggagagggaagcattctgcaatcccatcctatttgagccccgcgcaggagctggactgtccgccgtggctgggggacaaggtctcagcccgaagctcatgaggtaccagacagtgcctgggcttcgccacctaactcacaatgggtcctgaaccgcccgggcagtccccggggtcgtagactggggaccgctgcacccctccccgcccgcaatgtcccttggagtccgcacctgaggtcccaggcaatcgccgctaacttgtagctctcggacacggacaggtgcggtccatgcctggtgccggtagacgcgcagaaattccacctgtgcgcgctgcccggcgcccctggggcccctcacggggtaagtagagactcatctgggagaggtgaaaattccccagaattattgacacacacggcggcacaccctttgcctccgtccgcctccagcatccgcatccctttctctatcttcctgcccattgccgtcctcgaggctgccctgagatacagaattgtcccaggctgagtccaccgacccgccagtccctggcgatgatgccaaggctcttgcatgtacggaaataccagcagggaggttcgccaggggcagagaggctggaggagaacagagaattggaggtaaacgcgtaaagccagcagaactgtcggtggacatttcacccaggccgccctcccgcgtctttaagtcagttcaccgccacagcacgtctgtgactgcggccacccagggctccaagtctgccagcccaggcgccgcgagccaagaagagcgcggcgcctcccactcctcaagctccggaatcccccacatcgactttctatttccctgtcttcttttcttttttgtttgttttgcttttcctgctcttttcttagcgctgggtggcagtgggtatgcggcagccgtgtgatttgcccatcccctagtacacgcagccagcgacacaagcacacagcgaccagtccccacgctgtgccacacaccctccagcggtccggcgcgcagcccctgctccacagcccgggacgcctgcagccaccgccagggtcatggccatggcccacgcagggctctgcgggtggagaggggaagtcagcctagactccagagagaaaccctggggcaacccgaaaggcctgaggaaaactggaattggggttaggcatgaggggagggagtctctggggaaaacgggccgggctgtgcggagccctgagggctcctgcggctgcagcgctgcaggccgcccgcgtctcgccccgccccgccgctgggcgtccccgccaggagcccacccgcgggcggcagcttttctccatgctgcccagggaagttcgatgcctggtgctgggatgcgccagcgcttctgttcgcttctggcaatcctggcgtctcccaatgaga

SEQ ID NO: 233255 - DNA, 409 bp, Homo sapiens
  chr7:137028151-137028560
  hyper
ccctccgagaaatcgtacgttcctctcacttactttgagttggaaacgtcctctctggcgctcagtctgcctttgttgcaaggggcgaggttgctaccgctgagtccaggtacccggctcgctgcagctcctgcttgggccgctgctgctctccccgccttctggacggatgactcactggtctctttcttcccctctctccactttggattttcctctgctctggggctctcttggcgggatttttggactggaaggcggggaacctgatcctgcctttgactcaattacgccctgacagggagggaacggaagggaaatggagaatgggagggatgagaggagcgggccaggaggacgaaggctgggcgagggagggagagcgctttgcactcgagagctgattggg

SEQ ID NO: 233256 - DNA, 1406 bp, Homo sapiens
  chr7:137531047-137532453
  hyper
ggggagaagacagacatccccgggaggagagggggaaagggggaaggagaggcgtggaaacagagaggtgcccaactccgcggaagcgccccttgctgggtagaagagtgggtctcccgccgcggcgcacctgtctcggctgccggctccccgcacctacctgtacgagacctgcttccggaaagttaagttcctcagcttctcctccagcgcttcgtccttctccttctggccggcggccgcgggctcgtccagggcagcggcccccgccgccgcggctgaccctgcgccccgcgggtccgcgccgccctcggcgcccaggcagcagctcccggcgccgcttccgctgctgctgctgccgcccgtcgcccctttctcctctcccgccgaggagctggggttcatggcgcccgctccggcggccgcggagggagcgcaggcggcgccgctgcaggggccgggcgggctggcggcggcggcggcggcggctgcaggagcgcgggcaggtccgcgcgccgctggcaggggcagcaaatggcagccccttcccgcagcatccatccgcggctgcaccgcaccggggcattgtgggaaactccgctcactcccccgccccggccaatcagaggccgccgctccccgcctcccgcgccctcccgcgccggcccgcaccctccagccccgccggcctcttcctaaatcccgagcgaaagcccaagctgaacatgaactctgcccggaggcgacgggctgcggcggagggggagagagaggaggacaggctgcgaccccgggctggggacgccagggcagggacagcgagcatcaggaaggagagcgtccggggaactcgagtggccgcgccctgggtcctgcaccgtgaggctggggggaccaggaccggcgggcgcccaccttggtcctgagcccagctgccgacgctgggccagcaccctctccaccgccgccctccagtgagcagagctgggctcaggcagcagcccctgggcgcgggaaggtagcgggagctgcatttaggggaggggggaggtagcaggagctccgccagtgggaaccttggagtgaattcgtcggcgggtgccaagtcgaagcgccgacctcctgtctctggactggggcccggacccctgcgtccccaaactgcgtccccgccttgctcgtcgcccggtgccttccttaggcgcagcagaccctcggtaaacagcggttaattcgatggaatcggatcacagggccctcggtgaagcagaaaggcggaggaaatccaggaggcagaagtgaggaccctggcgcctggcgccgctgcgttgttcgtataagaagaggcatcccggaaggggcttcaaaccacttaggaccgactgctgaaacgaatccaagcttgt

SEQ ID NO: 233257 - DNA, 57 bp, Homo sapiens
  chr7:137685726-137685783
  hyper
gctggtttttcctccgaagagggaggaaggagacttcttggtcgtacagtttaagaa

SEQ ID NO: 233258 - DNA, 177 bp, Homo sapiens; identical to SEQ ID NO: 201198
  chr7:137686993-137687170
  hyper

SEQ ID NO: 233259 - DNA, 100 bp, Homo sapiens; identical to SEQ ID NO: 201199
  chr7:138665269-138665369
  hyper

SEQ ID NO: 233260 - DNA, 176 bp, Homo sapiens
  chr7:138666618-138666794
  hyper
cagcctcggggccgcggaggggacaaagccagacaaagtcgggctcctgcgctagagctcagcgtgcaaggcaggggcgagcagagcgcacgcagctctcccccgccttcctgccttaagaaggtgcggccacctctgcgggtcttcgggaagcgaccctgcgctcagggcctggg

SEQ ID NO: 233261 - DNA, 115 bp, Homo sapiens
  chr7:138794419-138794534
  hyper
cagccgggctccgcgagccttctttagaaagaagagaaactaaaagcgatcttggggctctggccggtgttttataagccagccgactgaggcgtgtgacgcaagtcctgagagc

SEQ ID NO: 233262 - DNA, 32 bp, Homo sapiens
  chr7:138818580-138818612
  hyper
ggactcacaagaccgacgtcaagatggttagt

SEQ ID NO: 233263 - DNA, 215 bp, Homo sapiens
  chr7:139024981-139025196
  hyper
gccatctaacggccgctggagcaaagctcctcctggaaattcgcaacaccggaaaaggtccggctgcttccggtaaaaacccaccagagctgacgttcagagggcgagtctcgaagatccggccaatttgcccagcgcgctgtgctccgcgacggcgcatgcccgcttttgcgcaggcgcggggactacggcgcaggcgcggagactattgcgca

SEQ ID NO: 233264 - DNA, 408 bp, Homo sapiens
  chr7:139168600-139169008
  hyper
gagggagctgagaacggcagcggggccaggcgagggttgcagggtgggcgggagctctcgggagaaaagcagaacaccagcggaggcttgtggcagggaacccggagccccgcctgacccttccctcttctttgtctctgacctcacccattttcccctccagccctatgccggggtgttggttttgagagttacagtttgggcggggaaggattggccaagcctgtctggatcctgggacctcagagaaatcagaatccaaaggaattggggcgacctgtggaaaagtagcccagttggttgtcctgacaatccagcagggtttcgaaaggactctccatcatacttgggaggactcccccactgagtaacgctaagagaaaagaaacagggcgtggataagcaatt

SEQ ID NO: 233265 - DNA, 108 bp, Homo sapiens
  chr7:139477943-139478051
  hyper
cgaagggcagagccgcgccggcggcccgaggggaccgcgctgggaggggctgccgcgcagcgcggggggactgggcgcagggcgggccccgggtagtgggtgagaggg

SEQ ID NO: 233266 - DNA, 248 bp, Homo sapiens
  chr7:139929834-139930082
  hyper
cctctgtcaagaccataccacggctgttttgactcctgggcttccgccctttagtttacacatttgatgattccgtttgaaaatcgcaacctgaaatactcctcttctaggctggaggcggggttgggggcgggggcggtgggtggcggaaggagggccctcaaacaaagatccgctttctcctgaacaggtgtcaggagaccaagctttgacctccagctccctggcctccgggcgcgggccctggg

SEQ ID NO: 233267 - DNA, 164 bp, Homo sapiens
  chr7:140098064-140098228
  hyper
gggggcgagcggccgaccctgcctgggcgccccacccaaggggggccgccacctacatctccccaccgccctcccgacccgggaagcccctcggattggacccgcccccgccccagcaggtcttcggccccacgcatcaccgcttgcgcacccgagatccgcag

SEQ ID NO: 233268 - DNA, 67 bp, Homo sapiens
  chr7:140098408-140098475
  hyper
ggaggagggcgaggagggcggaggctgggagcccacagaactctgctgctgcggacctggccagtaa

SEQ ID NO: 233269 - DNA, 236 bp, Homo sapiens; identical to SEQ ID NO: 201206
  chr7:140103657-140103893
  hyper

SEQ ID NO: 233270 - DNA, 100 bp, Homo sapiens
  chr7:140340187-140340287
  hyper
cccccgtcagggctcaggccgcgcgagccgtttcctccctcccccgcgcgtcccctcctccgtcccctttccctccccagctcgaccctgcaccccctgg

SEQ ID NO: 233271 - DNA, 86 bp, Homo sapiens
  chr7:140373221-140373307
  hyper
ccgagtgccctcgcgatgccaggctctgctggcttctgctgggcactttgcccaaggtcgtctccctgtgcggggacgtgggtgag

SEQ ID NO: 233272 - DNA, 37 bp, Homo sapiens
  chr7:140624448-140624485
  hyper
acagagcctggcccggctccgcgccgccaccaccgcc

SEQ ID NO: 233273 - DNA, 287 bp, Homo sapiens
  chr7:140714398-140714685
  hyper
aaagctacagtgccgaaggccgtgtgatgagcagagaaactgagccttctactgttaaccaatatggaagagagtaattgcgcctgagaggaaattacggcagcggaaacgcgggtattctacgtttaagaaatcccccaactgaggcagaaaaaggccaagttatttgtgtgatgcacgtgaaccgcccgagctggtcactaatgaagtggattcgccctattcctggcgactctacaaggttggagacccccgtagacttcgcagccatcgccccttgctgcaga

SEQ ID NO: 233274 - DNA, 813 bp, Homo sapiens
  chr7:140771228-140772041
  hyper
agatggcactgaaacgcctcgttcgcgcttttcaaaatgcaggaagggcgggggagagagagagagagagagagggaaaaaaaaaaagacaaaaagaatatggtggaggtgcgctcattttggctcacaagccccgttgtgcaaagcagggtgtcagagactctctttttccccagggcaactctttacccggcaatgccggacctcgactttggggtgagggtgaaaacgaggggtgagcattagagtgaaaaacccagcgtttgatgccgggagggagggtcccagcctttgcggcgccgtctcacgtgagcagagcaggggggctgaagttgggatgaagcggggcttgcctggggcccacccgctcaaggtctggggtccggcgctacctcccagagcccctgcagagcctaaatccagcggccacccttacaaaatgacaaaccctgcatcgaggtttcttttaaccccaccttccctcaacgctcgagctctccagcgttttcaaaatatctactaacggaccaccccccatccaccattaaatttctctcgtcttgagtcgatcagccaaatttcttctttctgttcctgccgaggagggagggcaggtggaggtgggtgtgtgtcggggtgcctggctctggcttgggactggactggggctggccggataactccgcagccgctctcagctcagtcctaggtggaaacgcctgtagcttgcaaggtagcgcctgtggctttctggggaaaaaaagatcaaatgcctcccaagacaccagcgacccaaaccggggatgcagggag

SEQ ID NO: 233275 - DNA, 250 bp, Homo sapiens
  chr7:140774487-140774737
  hyper
gaaaggtaagcgccgggcgcaaggcgtggcgctgcggagagcccggcgcctttaggccccgcagcccctcgcgtctccttcccaggccacaggctatcaggtctctgggttccaggcggtccggttatccaggcctggctgagcctcggggccaggacttgcctcccaatagctgttaatgaagcttggtgcaggcttaactctctcccctgcctctcctttcgcgcgtctctgtcgggattcgagtgga

SEQ ID NO: 233276 - DNA, 645 bp, Homo sapiens
  chr7:141211325-141211970
  hyper
tctctccagtggtgcgacctgttctgctcatgatctgtctgctactagccagccggctggaaaatgtggccaagaaaaccgcagagaccaatgttcggaggagaaaaccagaaagaggggcctgcctggcccctttgatcctttatggccgattccgtggacattgctgctcctcacgccggcagccctctcttgagtacctcaattgcagtctccagaccctccaccccgccaggcattcctgggtcggtgtcccagtcggtcacagtcatcggatcctcctgcagagcagtagaaagtccgggaggggcccgtgcccatggctccaggaaaggagcggccaggtacctgccaggggagaccaggcacttccaggtgcgaccaggtacctcccaggtgcggccaggcgccgcctcatctctcggtgggcgagtgtatttattccaaacccagactgagaggtgacagcttcaagtctgctcgggaaggaaacacctcgcaggccaagcacaaaggggcttactcgtttcttttctgcagcggcagctttccccctccctcctgtttctccgctttccctcctttccctccaccattcctcgcccactcctgcccttcccgggtgggacacgtgagctgctttgc

SEQ ID NO: 233277 - DNA, 607 bp, Homo sapiens
  chr7:142985837-142986444
  hyper
aaagactgccccagcctccctttgttcaacccacgagggttctaaaggggaggtctttgcagtcctgcccgctcttgggttctcttgaagattcttcatcctttcctctggctcccttatgagggaaactataaaaagaccatactctgtctccttaaaaatcgacgagaccttctgcagacctcggtgctctgcctgatgtgcatttgatttgtatcgattgtatcatgatctgcatggctttgcatagaatgaccagattttcaaagaagtcaatacagggtttggaaattgagtacttttggcagaacaagggggttcctgtggctccgagtgtccatgcctctgccccggtcattccatttcatggcagtcatcacccaggagaacattgtaatgcctcctgctcgagactgaagattaaggtcttcgcaaagggaacctgcagaaggacacagaattaagacgtaggaactccgtggtgcccttcgcccctcctccccttccagttgtgtcctgaaattctaaatgattggaaacttttataatgttcacgtttaagactctcatactacagagtagaggaaggagcgggtgtgcagagggg

SEQ ID NO: 233278 - DNA, 252 bp, Homo sapiens
  chr7:143042628-143042880
  hyper
tgggctcggtggagcggtcggaactgcaggccctcctgcagcgccacctgtgtcctgagcgcaggctgcgcgcagcccaagagatggcgcggaagttgtcggagctgccttacgacgggaaggcgcggctggctggggaggggctccccggcgcgcctccaggccggcccgagtccttcgcctttgtggatgaggatgaggacgaagacctctctggcaagagcgaggtgaccgcgccgggaagggctaggg

SEQ ID NO: 233279 - DNA, 395 bp, Homo sapiens
  chr7:143059279-143059674
  hyper
ctgctccggagtgggggatgcgaggaggcgctggggacggcggagcagaggcggatggcctggaggggcagggatgaggggaccgagcgtcgggccgagaggcagaggagaggagggcgatggagaggatggagaggaccgcgcctgcgggagggcgacggggagaaggaagcgagccgagcgggatggcagccccggaggcgcaagacgagagcgggcaggaaggagggacagagggaccgcgggcggacggaaggaaagtgaaggagctagcagggcaaggcgggtgcggagcggggcgcccggaggcgcgaggagagggatgggggagggggtcggagggcggcccggggggcccagccctgcccccgcccggccgcggtacccacccacag

SEQ ID NO: 233280 - DNA, 93 bp, Homo sapiens
  chr7:143077218-143077311
  hyper
aaatgaagcgcctacgggtgcatactggactagcgggcgaaaggccatgactccttagtttggagaaagaactggggccgagattggggaagt

SEQ ID NO: 233281 - DNA, 593 bp, Homo sapiens
  chr7:143105720-143106313
  hyper
gcccctaggaatgccggcttctgcaggggggtgctggccgggccccgggaaggggcggggcgcgggggttgggggcgcgggggcgggggtcggtaccttccttggcgcgcgcccccgggggcagcggggcgcagagcagcagcaccagccctagccccaggggccagcgccgctccatagctccgggccgggacctgggacagtggcccggatggcagcgccaggttgcaagggactaggagagccgggcgggccgggcgggggcggggggcggggccagcgccgggggcggagtcccggcctcacctggttcacctccttaaagggacagtagggcaggaaagaaacttgctagactggtaatcaaattcaagaaccggaggcgtcttgacccgaatgagactgcgggcgccgcctagtaggtgggattaagaattgacgaaccttttcccaattctaatcctaaactcaacccaatcttgatccagcttttaacctaattctacctctgacttgaattacactcctatattcctctttctgtctttgtgcaggccccagagctgggtaatagggccggggaaggcaagggg

SEQ ID NO: 233282 - DNA, 811 bp, Homo sapiens
  chr7:143579479-143580290
  hyper
agcagcggattagacgcggttctctaggtcaggccctcaggtaactcaaccacacaaagcaagcacacacaaacatcagatgtcagaacctggagaggaggagcaatgcggcagggggatgcgggacccaagcgcagaggaaaatcaccagcagaaatacggacacaaaggggattctctgtccccgatgatttctgatttcggcacacccagacccacggcgcacccatcgcgccccgcacccccgccccggcctcccgccctgccctcccccccgcagcacccaggccgagtccaccgttgctggccccttctccagcctgccaggcttttggagagggccactcaccaggtcaccctgcgatttccacgggggcaggtgggagcgggcagagcctggcgcagagaggaatgcacagggaagaggcttccctgtaccagtgactgggcgaccgagccgggatttgggagcggggaggaggctggagctggaggagaggaggggtttccacgggagtcccctcctccccacttcctcccaggctggagtgggagctccagggggcggcgcttggcgggggacagcgcttctttgtgtcgccggccctggtggcttggcattgctgtggcttagggacgcctggagaccccatcctggcagtgtggacggctgtttcattaaagatacaaacttctctgactctacattagtaagggaaaggctgagcaaattgtgggacaaacattctgcttagtattattcagttcttaggaagagcttgaatctccatttagtcggtgaatataccgt

SEQ ID NO: 233283 - DNA, 126 bp, Homo sapiens
  chr7:143598479-143598605
  hyper
ttgggccaaactagcggccagctctcggctgtttaccagggaactgtatcacccagcacttgctgcttcaggccaaatgcattccagactaacattcagcctgaatccccgcgccgctctcaccgc

SEQ ID NO: 233284 - DNA, 308 bp, Homo sapiens
  chr7:143599064-143599372
  hyper
gcctcggtcaccgcgggcctctcctggtccagagtctacgctgaaccccactcactgtttgccccgctgttccctgcagcgcgggttcggggcagtagcaacctgctaggagcgggaggcggttgttcccaggaggaagcagcttctccgcccaggaggcaaagggcagcgggctcgaaactacaggacttggaaagtcttaggcggagactgcgggggtggggggtggtgaggaggggccttccagggagctgattggtcgacgcggacgggggcgggacttggccggcgccgtccctcccctagac

SEQ ID NO: 233285 - DNA, 1079 bp, Homo sapiens
  chr7:145812737-145813816
  hyper
aacatgtgcattaacggcatctgcagtcctccctccctgctccagtcagtcgggatgtttagcaccgtcacttggtgttaggaccactcggaagacctgcctgtcggacgcctgactgtggttcccggggggccggagctccaggagcctgtaccatctttatctgaaggggaggagagaaggaaaggagaaggcatccgagcgagggtgttctccttcctgcagccgggtagggggcagccaggtttggagcagggttctaggattacacggcaaatccccaacttcagcaccgcggacagcatcacctcccgcccagggagaggcgcgcgcctccttgctccgcccccgccccagctgatggaccccggccggtcggctcagtctcccttttgctttcaaacgaggccagggcagggcagaagggttttgacagccagaggggtacggtaaggaggaggaagaggaggaggaggcggaggaggaggaggagccgaggagggaaccgagaagggaagagaagggagggcttccctccgcctcgctcgccgcccgggctcacaggagctggcggcggcggcggcggcggcggcgtctcctgctctccgcggctgttgctgctgctcgcgctccgccgcccgggagatgcttcctcgcgcggcgcagcgctgaggccgtgcgtgcgccccggctgcgctgcgcgctccccacatacacaagctctccatgtgagctgacaggcgagtggaaacccctcgagtcacgctgcccggcggcggagggagcgctcgcccgcagtggcaacagctgcaccaccgtccccgtcgctctgccttcctcttctgcagcctctgctcttctgattacctccctcccccgtcctttggtgatttttttttttcaagaaggagagggcggggtaggtgtccgttccctcccctcttccccctcctttgccttcttggtttgaatttcctcccccggcgttgcactggcacacagtgcaagaggcaatacccgcacggagggagaacgaaggctgagactcccctgccgctccaagcccggaagaactggag

SEQ ID NO: 233286 - DNA, 325 bp, Homo sapiens
  chr7:145813996-145814321
  hyper
gggcagcgctcctgctgtggattgtcagcagctgcctctgcagagcctggacggctccctccacgtcccgtaagtagccgtctcctcgctctgctctggagcagtttcagtgcggcattgatgtttggcaccagggtatcaactccgaagtgcatcgcagtgctggcaccctgatgtgtttgtgtctccgctgtcacacacttgcagccactgcagtagacaaactcgaaacccagcgtttctgttttggaagagacagggttgtgacgctggtgatgtttctggaaagttgttcctggtcttggtgatcggttggcaagagctt

SEQ ID NO: 233287 - DNA, 138 bp, Homo sapiens
  chr7:148036944-148037082
  hyper
tggggagtaaatcacagcgtttgggtttgcattcgaagcactaccaagtctactccacagggtcactgcacggggagcaagtaaaggaaaacgaggagaatctgagagtgctccttcgtgcagtgtgtgtgtgtgtgt

SEQ ID NO: 233288 - DNA, 304 bp, Homo sapiens
  chr7:148394979-148395283
  hyper
gacttcgaagtacacgtgaaaacaatactattttatatcacgactcatgccatccgtatgtgtaatcaaagccttctaagtcttgatatgtccttacaaagacgaaggatagagtgaatgtcaaaatttgccaaacaggagttactgaaagtctgaaggggaaagcctagttaggttttatcttagaagtgatttttaaaacgaaacacgcagataagctcgagctttctggagccgattcctaaggccttgcaggtggtaagggggtcgagaattggctgaggttcctcggaagtccgcgccg

SEQ ID NO: 233289 - DNA, 67 bp, Homo sapiens
  chr7:148580444-148580511
  hyper
gagcagagcagctcgactcttccctcaaacttagcataaagccagaccaggcggcgagggcagcccg

SEQ ID NO: 233290 - DNA, 240 bp, Homo sapiens
  chr7:148762866-148763106
  hyper
taagctctggtctcgcggaggaaaagcaggggcggcccccgtacgcggggcctgcgcccttcagccccagccccaccctgcgcgaccccgggatctcgctcggcggcggccgttgcccagggcacaggcagggcatgctgagaacgctctgcctttcctgtgcctggacacggctcgggctgggatcccacagcgccgccttctggcgggaggcacccccgcggcgctgtgcattctggg

SEQ ID NO: 233291 - DNA, 56 bp, Homo sapiens
  chr7:148822680-148822736
  hyper
aaggcagggacagcgttgttgatctgagcctacaacaggccgagaaacagatcttt

SEQ ID NO: 233292 - DNA, 151 bp, Homo sapiens; identical to SEQ ID NO: 201227
  chr7:148892417-148892568
  hyper

SEQ ID NO: 233293 - DNA, 53 bp, Homo sapiens
  chr7:148936558-148936611
  hyper
gctttgcctgaaacgcggaacctggtcttgacttttgagtgactgagccctcc

SEQ ID NO: 233294 - DNA, 358 bp, Homo sapiens; identical to SEQ ID NO: 201229
  chr7:148982135-148982493
  hyper

SEQ ID NO: 233295 - DNA, 344 bp, Homo sapiens
  chr7:149112127-149112471
  hyper
gcgcagagggaacgcggatttacccggcatggtctttggaaatcagtgtgctgtggaagcaggtcttgctagagccaagaaacctctaaaagccactattcagggggcacccggatttgaaccggggacctcttgatctgcagtcaaatgctctaccgctaagctatacccccgtcacacgggaggaaagcgtcactcacgtcttcgtagtcagccgcacgcaagccgcgtacagcactgcagggtccgcgctttgggcggcgcttttctccggcggccagttcggacctttgcgcttttaccgtcacactccaacgcactttcttccccgagtttgggaagaa

SEQ ID NO: 233296 - DNA, 934 bp, Homo sapiens
  chr7:149119393-149120327
  hyper
tggttcggggctgcggccgggcggctcccgcactgcgactaagggccagccggctggcaggcggggctggggctcggatgtcgggactagcgggtctctggcgcgaggcggccgccaccaccgagaaggccgcgcgcattcctagagcggccgccagcggccaggtgagggcgccgcggcctccggggcctcctcgcctctggccggcagggggcagcgcgcggccccgcgcggcccgacgtggcgctggcccgggaggcagcccgtgggccgccggcgcgccctgccgggcacccagcagcgcgctcccgttctcatcagacgggagaaaaaacgcccaggcagaggaacgtctaaaagtcaagtcatcaaaattaatgtaatcgagaaaatgtgcatatttaaaatatggatagagacgcataaatacatctttaaaataaaaatataatcgtttgtgttaagtccttgctccattggctctcagctgcactcacagcaccagtgagaccgacacggttgtgccccatcccacaggcgccaaatggagggcgcagggttttaggagctcgcgtagggcctctcgggcggcagcaatggagccgcgaggccggcggggagaccgaggacgggacccgctgagctctgggtgagctggggggactcgaggggacctggatgggccagaggcctggcttggggaagggccccttcccggttccccaaggtcccggtgtgccgctgccgtagggaagcaggaaggcacggccgcgccaggcgacctgaacgagaggaagcccggggtcgccgcccgcgggcgcggctggtgttcatacccagccaggaagggcgggcgggcctcgggtgccacgcggcgtgcccggcgctttccccgcagtcccgcttgctgcccgtccctggactccttatcagg

SEQ ID NO: 233297 - DNA, 202 bp, Homo sapiens
  chr7:149157616-149157818
  hyper
gctgccgtcccggcgcctctttagcaggggagctgcacagcagctgccatgttgctacaaactgcatcctgggaggcatgtccctctcaggccgtttaaagagaaacactccgaggctcgtcggaggctgccggaacccagacagctccatctacagccggtaggagcgaacagtgtcgagcgagccgcccggcggcgacgg

SEQ ID NO: 233298 - DNA, 210 bp, Homo sapiens
  chr7:149411353-149411563
  hyper
ccgcgcttccttcccgcatcacacgtttatttgaggcctactatgtgccaggaacaactggggttaccaccccagcaaacaggcacgcaaaatgtgacacgaaggtaggtcatggctgcggcgagcgggggcgcgggcgaaagacgtgaggatgtacgggggcctggcagctgctctgtcccacccacgcccggccggaccctcgacccc

SEQ ID NO: 233299 - DNA, 185 bp, Homo sapiens
  chr7:149535232-149535417
  hyper
acattggccttcgcgtagcccaatcagagcgctttgcccttgctgcagaggactaaaggacgccacgccgccgttgcctagtaactgtcgccggagggaggcggggagggtcgcaagcgcgccgccggcgtccaatcaggacctgcgttccgggagccaatagcagcttcgagagccgctcacct

SEQ ID NO: 233300 - DNA, 1090 bp, Homo sapiens
  chr7:149570353-149571443
  hyper
cctctgcctggttcgctgcagatggatgtccgcgaggacgccagccctccgcctcccgccgggtccctgaacgccggcccggccggtccaacctcattccgcttcccgccatcgaaacgcgaagcccccgccttcccccaaacgtctcagcgccgctggggcctttctggctgcgccgcctccgaccccaggccccggtccgcgcccgccgctcgctagtcctgggagtgaggagaacgcgtgctgaggacccggccagagggacagcggggaccgccctcccgctgcgtctctgaaagcgaggccgttcctcccgcgtccgacccccgcggggccgtcaggttcggggcggcccaggctgcgggtccgcagggcgcttcgggccgagccggcgcggcgcgtgaagggcaggggacgccccgaaagaccgctggggtgggaccccaagctccaggggtctttggaaataagaatgcggcgtgacgttggctgtgcgggcgcggggctgacgcggaccctataacccatcgccgaaaccgggcggccgcgcccctattcctcggcatttctctctgtccgcggccctgctcagccaatcagcgagtgggctcctaggcaggtcctgagtgacagcgcggcgggctggatcaggagatgcgcgtgcgcggcccggcccggctgatcgcttcgggtgctcgactcctgttgcgcatgctcagcgcgctgcccggctggggacccgcgcacctgcagcgcccgctgctcggccctgcatcctgcctgggcatcctgcgcccggccatgacggcgcactcattcgccctcccggtcatcatcttcaccacgttctggggcctcgtcggcatcgccgggccctggttcgtgccgaagggacccaaccgcgggtaaggaaagcgcgcaggccctgcagacctctccaccccggccccctggcccggctcgcccctccgccccggggcggcggcttcctgctctgcagcgagcgtccgcaggagggacgccaggaccccggacgccacctctgaggtctctctgcacctgggtctctgacagccgggaacaggcagga

SEQ ID NO: 233301 - DNA, 237 bp, Homo sapiens
  chr7:149744521-149744758
  hyper
gggacggcgatgaccgcgatctggcgccacggagcctgtctgggggcgcccggagagtcgtgggctgggggagggcgcctgattcccccccccacagatgcccccggccgacgcgtctcgctgcgcgctcagcccggagcccccgccgccgtcccccgcccccgagaagctcttacgtcctccttgtcaccatcgctccgcgcctggtactggaaccggggccggccatccgcgccg

SEQ ID NO: 233302 - DNA, 133 bp, Homo sapiens
  chr7:149745490-149745623
  hyper
agagggcacggggtcgcacaaaaagggtgcgagggtgcgtgaagagggtggaggggcggggaccacgcgggtcgtgggtgcgggggcggtgggggagtcccgggagctgagggttctgcggccccgccgaagg

SEQ ID NO: 233303 - DNA, 115 bp, Homo sapiens
  chr7:149917248-149917363
  hyper
ccggagtctccactcgcccgccaactgtagcctccatctgcgccccacgcccccgcacaagccccctccgtcgcgggtctcttaccttgtggcctttccccgggggatacctgac

SEQ ID NO: 233304 - DNA, 42 bp, Homo sapiens
  chr7:149917866-149917908
  hyper
ctgcaaggagcccacgggtgcgcgctccgctccagggcggat

SEQ ID NO: 233305 - DNA, 114 bp, Homo sapiens
  chr7:150065156-150065270
  hyper
atgggcacaggctcgcacctgccaccgcagacgccacacaggctgctgagcctttccaagcgaaatgccccacgtgcgccaacggccacctcggccgtcgccccacgcttggcc

SEQ ID NO: 233306 - DNA, 184 bp, Homo sapiens
  chr7:150065987-150066171
  hyper
ctccatggacgggcgccgcgtccctgcacagcccgccgcagaggtacggccggggcaggggcgcggggccaccgcgggcccgcggggggccgctccacctgcggggcgcgtgaccgtgagtgtgcgcgaccgtgtgtgagtgcgcggggggggacgctgctggatctgcgggggtgggggagcg

SEQ ID NO: 233307 - DNA, 461 bp, Homo sapiens
  chr7:150075203-150075664
  hyper
gttagtgacaaaatcgaatctcagtccccagttcctgctgtgctactgaggctaaaccgcagccgggcctgtggcaaatgtttaatcagctgttgactgaagaaaataaggtccgcctgcccaacagcaaccgtttgtagagtctcagaggcccagcttctgtctgtatctacctcatgccccagaggcagcttctagcagctccggagagcatcctgccagtgggagttgacccagctgcgccccctttgagggagaagtgtgaggaatttccttacaatggggtggggagttgcgaagatactccttcctgaaggtctggcagtctggaccggggtggcaactgggcggagatgattccgctcacgggaaccctacctagtaacccgacctagtaacgtaacctcagagccgttcctcagctagaaaacaaagggattaggccgggcgcgggtttgtaa

SEQ ID NO: 233308 - DNA, 42 bp, Homo sapiens
  chr7:150102886-150102928
  hyper
gcgcgggtgtcgctgcgggagagttaccgtatttgcgttgag

SEQ ID NO: 233309 - DNA, 79 bp, Homo sapiens
  chr7:150497200-150497279
  hyper
ttttctggggagaaacacctgcacccagctgtccctccctcctacgtgagtcctcctggaaaccaggttggaggaagaa

SEQ ID NO: 233310 - DNA, 144 bp, Homo sapiens
  chr7:150498059-150498203
  hyper
cggccccggcttttgacctacctccgcaccgcagcgcggtccttcacggggcaggggcggcgtgaacccgtcgggcgtgagcagcagtcggtggagcgggaggtcggcggtggcggggatgggggtatccggagcgcagccggg

SEQ ID NO: 233311 - DNA, 376 bp, Homo sapiens
  chr7:150655196-150655572
  hyper
tcgatgtcgtcggccgacgaggcgcggcgcacgctggcgcagctttctcgggagcgcgtccgggccaggctgcagctggagcccgaggcgtcggggttgaggctgtgcgcccggggcgatgggagctggccgggcgcgctgcggggcggagagccgggacccaccagcgcacgccgctcctccgcgggcccgagccctgccacgtggttgtccatggctgtcacttcgtccagggccagcgactcgctgctgggtgccgcgggcgtcaggtccacgtccaccaccacggcccccggggcgcccgcgccgcccgcgccgcccgaccgcaccgacgactcccgggccgtcagcgccagcagcgcgggcagcttcaggc

SEQ ID NO: 233312 - DNA, 297 bp, Homo sapiens
  chr7:150671457-150671754
  hyper
ctgccatcccagctcggtctaactctagtccaacttgctctacgtgcccacacctgcccagggaaaaaaaggaccagaggagccagacccacagcctagcaactcctttgccctcctgaaaaccatctcagcagagtgaggcgcaggccccggaaccgcgcctcccacaggcacaccgcagggcccccgcccgcgtcacacccccacagaaccctgcccgggctcggggcgttctccagccgcccccacacccccacacccccacgcaccctgcccctcgccgtggtcccgcccctc

SEQ ID NO: 233313 - DNA, 217 bp, Homo sapiens
  chr7:150672114-150672331
  hyper
agccgcccggggactccccgccacaggaagcatggctgggactggggtcccagcagggggcgaacgcagctgtgcgtgtgccccgatacaggtgcctggccggccgggccgcgcggcgcgccccctcctccgcctggcccgcgggcgggctgcgtggcttcccccgggcaggccgccagcagcccgccgcctcctccatgcccgaggctgaggccag

SEQ ID NO: 233314 - DNA, 219 bp, Homo sapiens
  chr7:150685652-150685871
  hyper
ctaccacccgatgccgttggctcctttcctatcccctgggtctccccctcccttcgtggtgtctgatcccacgattgtgctgaaatcgctcctcctcggctctctgctgccctcatgtggctgtctcaagaagggctggggctaccagggggcgcccaggatcaacacaggagccccttcagaccggcaaccgcgtccacagcccggaaccctcagcat

SEQ ID NO: 233315 - DNA, 249 bp, Homo sapiens
  chr7:150716072-150716321
  hyper
gggctcagcgccaggttcagggcggccagcagcagcactgtgcgcccccagcgcgctgctagggcgccccgctggtcgctgcgcttgtaggcgtgcggcagctcccagcccccgcggaagagcgagaagggaccgcggaagagcagcaggtcgacattgagcgccaggccgcggctgaggaaagccgcactgcctccccagggcagcgggcagcgggccggcagcaggcctttgttggccagcgccacc

SEQ ID NO: 233316 - DNA, 39 bp, Homo sapiens
  chr7:150716351-150716390
  hyper
tggatgtccagctccgtcaggggccgcggctgcacgcac

SEQ ID NO: 233317 - DNA, 449 bp, Homo sapiens
  chr7:150725069-150725518
  hyper
ccagcagttctgacgcacctaggagagcggggtgggtggcagggcatatgtacgtgttttgaaaaaactcccagtcgatttttgttcattcctcccccaaaacccgcgttctacacgcccttgagacgacgggacatctagagatcctggagccttgggaaaatggcccgaggtcggcggctgacgcgttactatggatactccatagcttggagggccagtcgggccacaccctttggacgtcacccggagcccacaggagcacctggcaaaagccaggcccacttcctgctcggctccgcccagagcagggggcgggcggataggcgattccctccaatcacagttccaaaaggagggggctgacaacatatcctccaatcacagcttgaagtgagattgatgtgtcttttcaccaatcaccgccaaggcgcgagggggttgtcggg

SEQ ID NO: 233318 - DNA, 296 bp, Homo sapiens
  chr7:150748197-150748493
  hyper
ccccacctcccgtccgccccgctccgcccgcgggcgtctgacgcggcccggtggcccgcagatgccatgcttcgcaaggactcgtgcgcctgccccaacccgtgcgccagcacgcgctacgccaaggagctctccatggtgcggatcccgagccgcgccgccgcgcgcttcctggcccggaagctcaaccgcagcgaggcctacatcgcgtgagctgcgcggggcgggcgggctcctccgagccgggggctcccgacggggcggaacggggcaggccaggccgtagccctagtgcg

SEQ ID NO: 233319 - DNA, 165 bp, Homo sapiens
  chr7:150754922-150755087
  hyper
cgtatttctgcatcgcggcggccgcggggacccctgcgggccctcggttttaagactctggccccggcgttgcagaggaggcggcacctgagcctccagccccgccccgtctgcccgcgcagggccttctggggcttgtagtcctaaaacgactaggtctccccg

SEQ ID NO: 233320 - DNA, 56 bp, Homo sapiens
  chr7:150756477-150756533
  hyper
cactcagaggtgccgtaatggagccaagggacggcatcctcggggctcccgagccc

SEQ ID NO: 233321 - DNA, 152 bp, Homo sapiens
  chr7:150757073-150757225
  hyper
agccagggtgccgcgccccctgccaccaggagggggtagtctccccgaggcgccgccggccctcccactccccggctggctccagaccacccctcccctccggcccccccgcatagtccttcagtcccgtccggggcgcccagactgggggt

SEQ ID NO: 233322 - DNA, 115 bp, Homo sapiens; identical to SEQ ID NO: 201239
  chr7:150778108-150778223
  hyper

SEQ ID NO: 233323 - DNA, 318 bp, Homo sapiens
  chr7:150784279-150784597
  hyper
ccaggccacgaggtttgccgatctgtgttgcagaaccggcgggcagcttcgccatatctcgttcggggacactttggggttgggggttttctgctgactgtgttccagggcgcgaaggtggtgtcgcttgggggggccgggaccagatctgtccaggcctggccggggaaggtgggcgcggcagagggcttcagctgcggggaggtggggtcgtgaccggggaggcttcttagccgctgcccgggccctgctccgcagtggggcgggggatcggagcctcgcgttagtggatggcagccttcccgggcccagcgcccg

SEQ ID NO: 233324 - DNA, 1556 bp, Homo sapiens
  chr7:150863956-150865512
  hyper
tcagaacctgcgcgcgatctaaaggtctgggacttcaaggctccaggcaggtgccgaggtgccgaggttccgagcaggttcctgtctggaatttccaggtgaaccggcctcccgccagccctggtcggccctagcacttaccgggcagacttggaaaagtctctgagaagtgcggaggcggaggtggtgggggctctgccactttctcccgggccggcagcagctcatcagcttccagcccaccctctgggcgtcggccgcctggctcggggttgtttcgggcggcagtggcggcggcggcggcagcggcggcggcgagctcctggggcccgtagaaagcgtcgggcggctccgcgaagctgggcagcgcggtggtcagcgccaccatcgagggcacagcctgacccagccccgcgcagaaggtgttggtaaggcggccggcgaaagaggctagcggggcgaggggcgggaggccagcgggcagcggcgcaggggccagcgcctgcggcagcacgagcggccggtagggcatgaacatggggtagccggtgtacagcaagtggccggagcgcggcggcggcggcccgattagggagtcgatggagaaggcagtgcccgggcccccgccgccgcccccgccgttgcccccaggggcgctaccgcctccggcccgctgcatcttgttcggagctgcggccgccccggggcgctcctctctgggcgcctccgtgcgccccgcggctcgggcgccccgcgcggacacgcagggctcgctccctggctcccgggccgaggtggcggcggggcgcgggctcggcgcagtgtggctccggcgccgcgctccctctctctcataaggagggagggggcgggcgagcaggcgggctgggggtgtcgccctccggactcatccatcttcctcaaattacgcttcatttcctccctccgcccgccgccgccgcgcccggctcccgctccctccgcagagcccgttcccagcggcccggccggccggcccgggacccccacccgccccccgcggcccaaccaactattattaatggagattgatgaggccggacacgccgctttgtgaaagtttgcggccgacgagaaggcggcggcagctgctgggccggtccccttccctccacccagtccacccccccaactcagcccacctggcccgggctccggctaggagggcaagcgggaggtggcccaggctccgatggggcggcggggccgagcgtggatgggacaccgggcggcaggcggagagggcgcaccagcagggacaggcggcggggccggacctcagcacccctctgctccgggccgccgccctccttcgggccccaagtcattccccggcgtgcctcccagctccgacacccctcccctgcccgtggagcggacgttgtggcggtccccagagcaagctccggcgcgacgggcgggacagcacggccaccgccccctccagcgagagcgcggggctgagggaggcgaggcggggccgacagggggcgcgctgggcccgcccggttctgcgg

SEQ ID NO: 233325 - DNA, 123 bp, Homo sapiens
  chr7:150924342-150924465
  hyper
tctcggcgcgccgcgctgcctccttggaagtgtagtcctcaagttgcagcggccaagagtgagacccgccttgaggactactatgtatcccacagacctcgcggggccgcgtgacgccatcag

SEQ ID NO: 233326 - DNA, 252 bp, Homo sapiens
  chr7:150929281-150929533
  hyper
attgggagaaaagcgctctcgagggtgggggtatgctttttccagggcagatggtgttcagcccaagttacggggcagctttggtccactctggatttgcctggattcgcgtatgtgggggcgaacgcgtcttatcggggggcggccggttggggccaggcagcccggatcccagccgaggaggtgcgcggtgctgagaggccgtgggagcgaccatagagaacgcgcgggcggagcgagcggccggatgcg

SEQ ID NO: 233327 - DNA, 111 bp, Homo sapiens
  chr7:150974357-150974468
  hyper
gctcggaggccctcggcgggccctggccagacccgttgtgatcttcagcctgtacacagatgtgtcgtaggcctgtgcttgcatctgcacgcccacgagtcacacacgcag

SEQ ID NO: 233328 - DNA, 123 bp, Homo sapiens
  chr7:151107727-151107850
  hyper
cggggtcggcctgagccctcccggagcgcccggcggctggtttccattagggcagttccggcgccgacttcgctggggacggggaaggtgacccccctactcggatcccccaggtcctaaagg

SEQ ID NO: 233329 - DNA, 312 bp, Homo sapiens
  chr7:151136925-151137237
  hyper
acagggggcgaaggcggagccccactcggtttccttggggttgagggacgcactcaccttccccgagcgctgcgccatggtgcgccccgccccttccgcgggtccccgtttacaccgggcagcgccctgctggctcagcgccgccccggacaaaagatttgctgggccggccccggagcgttagtgctgtcgggcgtgctaagcccgaggggccaccaggcggttgggacccgccgcggccaccctgtgccaccgcgagtgcagcccgccctgcccggggtctccctgtgctctccgcgtttagctcccgag

SEQ ID NO: 233330 - DNA, 198 bp, Homo sapiens
  chr7:151215383-151215581
  hyper
aggcggtggaaagcgcagttggggagtgcatccagtgagcggcaggcaggtacaagcttcccatgacagatagtcaccccgttccgcaatcacgggagcctcggaaccctcgctttcacctccccatcccctcaactgtggcccggtgcacgccttctatagacagttacttcaaaacagcccgaaaagatgaactaa

SEQ ID NO: 233331 - DNA, 195 bp, Homo sapiens
  chr7:151217305-151217500
  hyper
ggcgaaacgctaagcggttggcgggttcgcgcccgctgagcccgtgaagggcgcgaggcgcgtggcctgggcgggtgggctggctcctccctcggggttttttgaaaattctccttgagctgcgttagcgttcgtgtctgggtttgaggatgtagtggtgactaagcgtcaccgacggccgaaggactgtgggaa

SEQ ID NO: 233332 - DNA, 429 bp, Homo sapiens
  chr7:151572578-151573007
  hyper
cagcccattcactgcgcactcccaccctgccccgggagagcaaaataactttctctacggagcactctggtgtgtgtgtgtgtgtgtgtgtgtgtgtgtgtgtgtgtgtgtgtgtgtgtgtacacaaacatttacttggttggctgaggcggagggtgtgacccagtgggccacacctcccaccgccctaccccgctacgtggaggcgaggaacagtggccgcgggctaccggggcgccttccgaaaagagaaccactacgcggcccgccgcccctctggctggacaaagtgaagccgcaggcagatccgagtcgccaatgtcctcccgggcggctggcgcggacggggctgaagttcaatgcagcctgcacggattagggagctccgagcccccaaataccacagagacccaaagtacactcccgggg

SEQ ID NO: 233333 - DNA, 292 bp, Homo sapiens
  chr7:151573247-151573539
  hyper
gcaaaacaacacaacgcaccgccccccgcacccgcacccggctggataccgggctacgcccagccgcccacccgccgcgcccggcgccccctctagtctgcagccgcccagcccccgccccaggcggagccccagccctggctgcacgcgggcagagagagagattgagccccggctccgccagcccagctcgggccctgtccctctaccctttccccaagccgcccgaagtgacaggaggggcacgcacggcgcgcgcggggcgtccagcgttaaccgcttcggcgccggg

SEQ ID NO: 233334 - DNA, 257 bp, Homo sapiens
  chr7:151722451-151722708
  hyper
acacagatgcgtgtcgccgcgcaatgggcacagcgcatacagcgcagagctcccgggctcaagcgctgctcccgcctcagcctccggagtagccggggccacaggcagggcatttgtcattaatggggtcttttgagaccgcgggtgacagacaacaggagccaggccacgcgcggcgcctctgcgcgaacgctagggaggactcagcgcgcggcggccggtgacgtcagggcagcgagaggtttcgtcaccgcggc

SEQ ID NO: 233335 - DNA, 32 bp, Homo sapiens
  chr7:152133406-152133438
  hyper
tggcggcgctgggcgccgggccgcggctcgct

SEQ ID NO: 233336 - DNA, 168 bp, Homo sapiens
  chr7:152161044-152161212
  hyper
gggcgccaggcggcgagagagccaatgggaggccgagccgaggaccgcgggcggtgggcctccccccgagaggagggagacccggaaggcggtgggggcggggagtggagctgacaacctgtcaaatccactttgggacgaactaggtcacgcgctccgcgggtcggg

SEQ ID NO: 233337 - DNA, 159 bp, Homo sapiens
  chr7:152161898-152162057
  hyper
gtacggaccgcggcgttctgtttccaggcaaaggaaaataagtcaaagactcagaaggcagcctgaatccagggcctgggatgcagggtttgctggaacgccagccggtgcgatcgcgcccctgggattccgcttagcccgcgcgtccatttccctgca

SEQ ID NO: 233338 - DNA, 119 bp, Homo sapiens
  chr7:152373449-152373568
  hyper
gtaaactttggttcgttattattatattaggtaaagctggtcttatgtattaatttgtttaaccattaaaaataattgtattgcacaagcaggcccctttgtccgttctcgggttaaaa

SEQ ID NO: 233339 - DNA, 166 bp, Homo sapiens
  chr7:152591571-152591737
  hyper
ctcccccttcgccccggccctcggtgggcgcctctgacctgggccgtagtttccaggcccgcgcgtccccgaggcggacgccagagggcgcgcgccccccactcctgcccgcgtcggggccgcagccgcgctccgccctttgcctgcagagcgctgggggtttaaa

SEQ ID NO: 233340 - DNA, 920 bp, Homo sapiens
  chr7:152622355-152623275
  hyper
ggtttcctgtcccgcgtggttcatggggcttgccctgggcctgggaggccggtggcgggagcctcccctacagtgaggtgggtggggggcgccacacggcgtctcagggagaggggagaggcggcttctgttccgggaagagggaacggtggaggccgccgttctcttgggcgcggcctctgctgggggacggcggggatcgcagggccgaggggccgggcgcgcgcgggggagggacccaggccaggggccgctcgcctcggggcggggtctctggagagcgcgcagaggggacgcttcgtgaatgcctgccggcctgaaggatgtcgctgatctctgcccccttcgccaaggccgggccaggcgagtaggggcgcggcctgagcccctgcggtgattccccaggtgtggaatcaaaacagatcccagagcgcgatccgcggggcttttggaaggagccgcccagggctggagattccgacgcaaagacccggaggcccgcggagctgtgggcgcagctggagatggcggaggccccagcagggagtgggggctcggggtccgcagaggcagctccatccccggcgctgggggccgcatggttcccgcaggctgtggccaatcgaggaccgggctccgcattcttcagacgttcctgagccccctcttgccccaacgtccccctcccgggcagccccacagtgggcgattttcccgcactccgcacgagtccatccccatggtggactaggggccgggtctaggctctgcgctacccggccagagcgtccagcggccccactgggcggcggcgccacgcggacgtgggtgggaacagcccccggacccgccgggagaccctcgcggggaagagaagccgagcagcttgggggcgccccggcagggagggacgtgcggct

SEQ ID NO: 233341 - DNA, 94 bp, Homo sapiens
  chr7:152890309-152890403
  hyper
tcacagggcccacaaggtggcgcgtgagccgcagagatggcgaggagccccgcgggcgaagaggctgggcggcggggtgaggaggaaccctgga

SEQ ID NO: 233342 - DNA, 186 bp, Homo sapiens
  chr7:153446091-153446277
  hyper
aggtaagggaccagcgacggagggggcttgtgcgggggcgtggggcgcagatggaggctacagttggccggagagtggagactccggcaggtttgtggagggagtgtgagcagccgctggtgcgtctgcatgccttgcaggggtcggtgactgaggatggttggcggatcgcgggggttgagagaa

SEQ ID NO: 233343 - DNA, 1010 bp, Homo sapiens
  chr7:153583418-153584428
  hyper
acgggaacccaggtcgcggtcactggtcaacccgcctcttggggtggaggttagagaaatgggcgctgggatttggccccggccagtgctggggttccagggtagggagagccgtgggcgccagactgggctgcgggaggtcttcggggtcagatcccgcaggcagccaagagcgagccaaagaaacaaagccgccgagggacgcggctggggcggaggcccggagggaagtggaggccgggaagccaggtgtgcggcggggagagcggcccctgccacccgcgctggtagccgggcgctgccattcactgcaaggtcctctgcgccctggaattgccgcggcggcggatgcagaggccaacccagagtgcaaccatggagacgcgacgtgtgtcccatagtaacctgttacaacattatttataagctgccatccctagccttcccccgcttcccctccgctccctcgccagacttgcgggcgacgggcacagccgcgtctggctcttcccggcctctcccttctctcgcgggcgcagccgatcaatagttaacacccggctgcggacggcggctccatccgcggcaatcaccgtagtgcttgtttgtggaagccgagcgtgcgtgcgccgcgcgcgcacccagtccagcgcggagtgggcgtctacccgaggaggggtgtctggggaggggctgccctcgttacccaaacagtttgcgctcgcttaaccttgatgcagctcgaggcttcccagtccagctcagttcagacagaaaacctggcgcgcgcgcgcgcacacacacacgcctcccctggcgtcgccgcccggccgggtccctgcccttagggaccagagcggcgaccgctgcaccccgcaccgcctgctggaggagcccccggagccggggccgagccgccggcgtccccgagtgcgccccctgtgcgtgccgccgcgctgttgctcgcagtgtgctggcgccgagctcggtggacacgcgcgcagtcagag

SEQ ID NO: 233344 - DNA, 765 bp, Homo sapiens
  chr7:153584826-153585591
  hyper
ccacggacagggcgcgcgctgggtcggggggacccaccgtgaggagcgatgctgggggaggtctgtccttctcagtcccgaacctccctggaaggacagcgaccccatgcccgcgcgcggcggcgcttctcccacttcccacccgagcccacccagcggcagggggatgcggaggagcaggcatttctttgcaaattgcaactttgcggctccgcggcccctctccttcgggcatgtggctttgtgttttgggcgcgggatgggaggaaggggctgcggggagccctcgctgaccgcgggtcggtccgagccccaagcagacccccagggctcttctggggaaacgcggggagaggtggtcacttcggccagggaagggccactgggccctggcgcccgcgccggcctcggtgctccgagtccccggaactcgagacctgttgggtctgcggagccttcggtgctctcggggcaggcgccagtcgctccgctccgttccagacgccgccgccgggcgggaccctgctccctggattggggacgctgactcccccaaaagcttgactgtgccggaggaggtcaggggcacttcgtcccccaggagggccgcgtgcctggaaacgcggctggtccgcggaaggctccgggcagctggccaggggacagttctgcacggataactttctaagtggaggacccggcgatccgcctccccagcgagcccacccgcctcgccgctccccgctgacccgcgcggcctgggcg

SEQ ID NO: 233345 - DNA, 32 bp, Homo sapiens
  chr7:153749742-153749774
  hyper
gaggagcggccgccggcgctgggcttgccttg

SEQ ID NO: 233346 - DNA, 112 bp, Homo sapiens
  chr7:154705761-154705873
  hyper
ccgagagggactgcggacccactcttggcttcctctttagaggagagatggagcggggtccgaagcgcacaggcttcgaaggaactagtgagccagccgagggcagcgggag

SEQ ID NO: 233347 - DNA, 571 bp, Homo sapiens
  chr7:154861685-154862256
  hyper
ccagtccacccctagagggacgtgtgggggtggctaggggaacgttttgaggaaagttcattggtcaacttgttcaacgtggcaaactcatttcaggcaagagaggcagcaccgtggacagcgccaaccctcctgctcccgggcggggcgaggtggcagcaccgcggacagcaccacatgtggtggcgcacactgggagccgccaggcgcggggagcgcagcagcaccgcggacagccccaaagccgcgcgctctgagccaggaggcggggagagatggccttatcagctgatggcttacgtagggctagatctccacttggataaggcaggtctcggtgggcgcgccagcattcgctctccggagctgcagcctccgaaggggtggcgggggcaacagggacagaaggcaggtcccagaaagcaggttcccccaaaactggcttccctagcacggagttaaggctgcagccggctgcctagagagaagggtgggcagggagacaacgcggtgagagcgactgctctgacgcaccagcccctctcctgcacccacacgctgctggccgccc

SEQ ID NO: 233348 - DNA, 109 bp, Homo sapiens
  chr7:155090929-155091038
  hyper
tctgaagccaaaccgcctacaccctgaactgttagagctctgtagattacgttcttaaggaaaagagtaacccccttacggcgtttagattttcgtacacccaagcagt

SEQ ID NO: 233349 - DNA, 2191 bp, Homo sapiens
  chr7:155164457-155166648
  hyper
aggcgagcggaccgcgctgcacgggtccaggctgggtgcccctctcccctggggtaaagaggcagcacaggttgggacagctagatgggggcaatccaggcgtcctgcccacggtttcctgggagccaacaaaggcgccgagacctcacccgtgtgaggcaaccgccccgtggtcccacagagcttctggaagtctgcgtcccggccttcccgatgcaaggcgccctctccacctgcctcggccgtgagcaggttcaggagggcgagaaaggttaggccgagcggaaccgcgcggccagcgttacgcagggtgccctggacacccctaggcgcccacctggacttgttcccacctcctctcgccccttgccttcttaacccgcattacccgtgtaggcctggggtggaatcggactacttgttcgggatttgctcgagaacattctagggagaaggcacgcccggctttgggcttggccgagagtttagggcaggagcgccggcggggagctccccgggtgctggagaatgcgtgtccggaaagaagtagggcgcgcttcgtggatgcaaccagggccgtctcgcgcactttcttcctaccctgggacagcgcctgaactggagctgggcgcacacactttacggagccagctcgggttcttacgccctggctcacccccgcccgccgccccaggatgcaggtgctgcggcgctccctggtagcctcccgcgctccctgggggcgcgctttcctccatttcagggaagtccccggacaggtgcccacgttttacgctgtccggtagaagcccgcgggctcaggccgacttgcgcggccgcttctccccagggagagaagctggagcttcccccacgcggccctaaggcggggccggctgggccggagtgggcgcggccagggtgtcccagcgcgccccctgccgaccgcgcgctgcggggggcaactccacctcccctggggaggcctcgtccccgctgcagggagactaaagcgtgggtccgcgaccagccggtttaggaacgaaaactctggaactaaaaacaaaaaataaaactggtgagtgcgcagcgtggtcagtgtttccctctgggtaatgcttggccaagggggaagatcgagtactcccgcccacatccgcctcccccaggagggaggattccctctctgctcacccaccctgacccacgcctcccgccaggtccactgctcagacaaatctgtaggtttctgagtatccgtatctcgaaaagcttcaatgcacaaacgaggttttaagcccatcgcggcttcgcaaggggaaggggctgcttccctaaaaacaaaacacaacaaaaaaggcaagggggtactcttgcagatggactggaattagtaatttagccagggtctcttccaaactcactgcaaaattcgccagcgtctcattcttcacacacggggcaccacacgagaatcaccccctccccagaattttgcaaagcacgtttgctgagttttctcgcctttccttccgacaagctcgaactggaaccagcgctctcccctctagacctgcctccgcgccccacccttcttcccccacacagtccctccgcagggagaattcaggtgctaaaaatgctcgggcctcgcagcttcctccctcctcctcggttcctcgaatgacccaagctgcctctttccgggcccttggaagacggtgcgaattccgcggcggcccgctctcgccagcgccacagccctgactcccacccggaggcctgagttcaaccgctttcgcttccttgcgggccgttcaaccctctgaatacgcagattcatttatttatgttttttaatgtagtaagtgggcagctaaatgaattgcaatttgtcatttttatggttaatttgaaatctcgctcttgttgcctaatcctgttagttggtggcaaaacaaggagaaacgcgtgtttcggcagcagtgattctaacaggcgttttatgttaaattacagcagaacccagaacaaaagcaggcggcggacttgcagtcccagcggcctcggccggtccgcgctgccggtgtgagccccgaaggaaagcaccccaagctggctgaccccgcgcacccccggccacacccgcccatcctggcttcgagattaagaagcccagtttggcacccca

SEQ ID NO: 233350 - DNA, 268 bp, Homo sapiens
  chr7:155166828-155167096
  hyper
tccctccgcctctctgtcagctcttcccgtcgtttcctcggcacccagctccagtccaggcgctgtcccagggtaggaagaagggcgatgccccttcttccccttctctggtcccctccccagcctccggctccccaaggtgcagggctccggcgggggctgggccgggcgggtgggtttctgagccgcagcgcttggagctgggggagcgggagcaggggcggcccggcgggcgggccgggacccggcttttccggctacccgtggg

SEQ ID NO: 233351 - DNA, 341 bp, Homo sapiens
  chr7:155168226-155168567
  hyper
gccagccttagcggcggtgacagcttcctcacggtggtcctgcagctggagctccagagaaagaagggaggaagcacttccggaagtctctgccaagagattttaaattgtgttgcctgcggattttgtggttgaaagaattacctggtgacttgccaaatctctgagtttgttgaaaggagatgacctgcccttagaaacccctccattcctgcctacctccgagaccagaggctgtgcctctctttctcttttctttcctagtccccacaggagggaggaggaaggttacagcgtttgtggaatcaggctgccaggcgacgtttcgtggttgtatttgg

SEQ ID NO: 233352 - DNA, 92 bp, Homo sapiens
  chr7:155170441-155170533
  hyper
tctggctgggcttccctaaaaccgggcttagttggactccttggacctggggatgaattcttgccaactatctccaaatatttcccctacac

SEQ ID NO: 233353 - DNA, 1250 bp, Homo sapiens
  chr7:155173870-155175120
  hyper
ttcaccttccaaaccgcagtccctggtgatcctgacttttgcagcctggctctgggtccacacggggctggagaaggggattcggtctgaatgggttcgtggagggtggggcagggggctgagctgaggaacgcgctggcgagggagtcagatactgttacttcgtattttaggaatgtatttctcctgcacacccctccctcccctgcccacccccctctcccagtatcattgctctttgaaatgtcatgaacttggcgctttcagaccaaaccgccgggctcaggcccgagacaatgggattgtcagagggccagcgcggagctttttctgcgtgttcacggagcgttaagcctttatcccacagaacggctctgtctgaccgggtcagacaaaagccaacttgcatcttccgctccgaggggatctgggcagagcccgggtacagccctgcgcggccccagggagaggggggagagggcgcgtgtccccagccctgccaagtggcgtggggagcgcgaggccctcctcggtcagagccaccaactctggtctccgtggacatcccccttcccccgcccgctcccgaggctctagggcggcctcctggccgctgccttctcgcacccagggtcttcggcctgggctccacacctcaggcccctcaagtaatcggcctcttggtggccgggcactgcctttccggctgctctctgcacccgtctgcccctccggcctcccctggcggctacaggcgtccggggccctcgctccccagctccaggcgtcccgggagccaggcgcgcagcggggcgagttctcgtgtccgtgtgagcgcgggcgtgtgtatgcgtgcgcgtgcacgagcgtgagtgtgcgtgagcgtgagtttgagtgtgcatgcgggtgtgaatgtgtacatgtacacgaatgtgagtgtgagtgtgcatgagcgtgagcgtgcgtgtgcgtgcgagtgtgcacgagcgtgactgtgagtgtgcgtgcgtggaagcgcggcggggagcctggctgaaggcctgctgcctgcatggctgtcagagaaaaacagaagtgggagcctgctgcgggctccgagaggacttgatgggagccctggcgcgcgctgggcaccgcgcggtgagtgtcgggggtgggggccgcgggtctccagcagcccctgccctgtgcggaccgccgccccgagggtccctgcttgcgggtccggggctgggcgtgcctggctcccc

SEQ ID NO: 233354 - DNA, 3029 bp, Homo sapiens
  chr7:155241407-155244436
  hyper
ggctgcgctgagctcgagctcgccgcccgggtggacccgccctgttcaagcgcggaggggcggaggcctggttgggttgtagcgtggtgcggagcaggacgccgcctcgtgccatggtcactggagacgcacgcccatcttccctcccgggcccgtcgatcctgccatcttccgctcccggccgctcgtgggtgttcgtcatttagaccttccccgtgcttcatgggacgcaagccctcccccagagttcggttttgcaaaagaggtctggagccctcgctacagatcccctccctgggccacggaggatgagaagggtcaccgagccgagccgtaatcctgcgtaacccctgacctctctccttccctgcccccacggcaccccatcgtcccctccccgtctccgaggtcctccagaaaacagcgcagaattgtgcagatgtttaggagatgtgaagatgctggagatgcttaggaggcgacggttacgcgaggagaattgcttccaggtgcgcttctggaacgcacggagatcccccggcggggaaggggccggggctcgcgtcacttagtgtctgctcaccgatttccctctgaagagggggcccagggcctctgctgagggagcggggaggcggtgcgggcccctcccgggcacacatgggtgtccgctccttcctccccctcccctcccctcgcacggagagcggagagcggagagcggagagcgacagggaggcagccgaagacttgaattttgaaaggggagctggcggcgaatggtgaatgagacagctacttaggaagcgagtccagccagcccgggaggcggtggagacccacgcccggaagtaaccggattaggtctcagaatgtgatcgccccccgggtcccgggggagacgccaaggacgcgcaagcggagggcgcggagacaactgggagtcagagtctccatcacttgggctgggaacgcctctgggcgttccgacggggtggcggtgggggtcgggggaggcccttgagaaccgtgcggcccggggagagcccacccattgctgagccccgacacaggctttgaagttgctgcagtggctcagcccctcccccgtccggccctgcgcagcgcggtgccgcagagtccaggccgtgcctccgtttcgtcgctcagagcttattgcggcggctcattggaccacgtcggtggggcgatcgcagcctctgatctgtgagctgcaaagagctccgaggttcattcacaaatctgcgcccccagccgtccctccacgcacccgagccacgtcccgggacccggagagcccggggcgttgggcgctgcggaggaggcccggcttctgtcgctcccttcacctcccagcccgcgagggacttgggggaagggggagcaagctttcgctccggaagaaacgttcggaaccaaggagtctgactcctggatccgggtgcctgttggatccaggctcccactcccgggccctccggtcgaaccaagggtcccgacagggcccgaggcacccgcattcctaggagacaggagctcggccagggcgcatcaccgggtcctgctccgagccagaggatgtagtgtagacacccacccccacaccgcccctccacagagctcctctccccttggggcgtcgctgggcacagggcaggtcgctaggaatccccagtaaaaccacgctcgctcagaggttcgcggcttcctcagagggcgctggggaaagagaggggacctgatttcttcgaccctcggaggaaaagtgctcggggcctcctagggacacagccctggaagctcacctcatcttagcttaggccgcggcgaggtggggaggagagttaggagagggggagaggggctctgcgccctgcagaggcctttaattctggaggaaaaagactgggacacacccaagcgagccaaggcccgagccccacgcacctccacccacccggggcggcgcacagccagctcctgccgggcgtgagcactcgatcaagggagcaagtggaatgaaaatccagctgggggggtccccatcgacacaactgtcccgcagtcgagcttctggattcctgggagatgtggagagcctggggccggctcccgctccgcagagcagactggactgccctaggtgcctggaatgcgcctgcaccctgtccctcggacccgcgggagacccgtgttccgcaagtcccccttctcaccctagtctgcccctacctacatcccgccggcgagtgtgccaccgcgaggcgcctccttccccgggaagggagctcccttccgcgcagacccgcattgcccttcttttcgctcggttttgttttccaggggtagtttctgcagaaaggagattctcctccgggccgaagggctaccagcctgcagtcagttcagccccggaccctgggagatgctcaccactctgcggatcttgatccgaaatcctttctggccgcccactgcggagagtgtcctcgtagagaggttttcaatcgaaggagcctgggctccacattttgtcttcaagcctgagctttcagggctgctttgcacgaggtgcagatgaacttgtgtctgcaaacaagacagaaaaccctaagtgccgcccgaccttcctcttttggggaacccgcactttgtcctgggagcgtgcccagcgccttagtaccaaactttctggccggggctggcagagctcagagtcccgcttccccctaggcgcggccccctaacatctgtaacccaaatgttgcgccgcggccaaaattagccctggcagtgcgaacagagaactaaaagcaggcagtgaatgagaacagctcgcatttctccttcctggtagacggggaggtgtaaatcccgaggaattctagggcattcgctccaaacgtgggaaatcttcgcgcgtatcccgtttcttcctcccagcctgtgttaatgctccaaatggtgtcgagttgctcaactttgccgtcatcacagaggctgttgtg

SEQ ID NO: 233355 - DNA, 1117 bp, Homo sapiens
  chr7:155246273-155247390
  hyper
cccccctccccgggcgagcctgggctaagtatcaagtcaggacagaagggcggtccccagtcggctcctggcccactctgcttccccaacacctagggagcttgggctcagcacaggcgcttctccagcgatcggggcagaaccaggacgtgcaatgcgactgcccccccctccccgctccccggcagagcttctgtccgcgccaacccacccaccaggctctgcccgcgccacgcgcgcccctggcaggcctggggcggggaaaggcgaagcgctgggcacgcgagggcctgtgcaccccagttcctacgacgctcctggcccttttcaggcccgccgctgccgcatttaaccccctccttccgggggttattctgaagaagtctcagaccctagacccagcctcccagaccccgtccccgagctcgcccggtgggcctgtaggccggtcctccttcgcccagaggagagcgcagacacgcaatgtccgcccgttggccccgcccgccccacccctgctccccgcgccccttcgtttcggcctttgtctacaggccgggtcggaacgtcagccccaggagccgacggtggctctctgctcgccccggggaaggtgttgctctcctatcggccccaattccccgcccggcgcctggggcttggctgcggggctcggctcccagccgagggcgcagggctggccaggcctgctttggctgaggtggagatctcgctctcagggattgttgggcgtctctgccccgcgagtaacgagaccgccgcgagcgaacggctttcattgagtccatttttccaagtgtcaccacgtcaagctagagaagcgaggcgagtggaggggacgcagaggggccggaaaagtcacccttctctggcctcgttttcagataaaaacgggagcctggctcggcatccgggcgcccggtgtctccggggcgcttcactgaggttttgtttgcaaaactagcgtccgtgtcctgaagcgcacggcgtctggaagctgctttcctgctcgccctctccgaggcccctctttgtgcagcgagcctgagaaatatggaggaccgtcctccgcaagcgggtggtcgcgggcgctctc

SEQ ID NO: 233356 - DNA, 131 bp, Homo sapiens
  chr7:155247810-155247941
  hyper
gctttcccagagttgtttcgtgtttgggtccactctggggggcccggtaccctctagttatctctctcttcatttatttctctttctcctattcctccctccacctctcaccttcctcctttccaggagag

SEQ ID NO: 233357 - DNA, 212 bp, Homo sapiens
  chr7:155248841-155249053
  hyper
ggcctggcaggccacgctgcctcggagatgcttgccagactccccaagttcactcagggcctggcagcaacctgctggctgcctctgcgggggtctgggttgctgagcacggtgcagctgcccagggccaatcagccctagggtgtccgtgccaggctgcggcctccccgcctcccccgcactgagggtactcatggcgtgcaaatgctccc

SEQ ID NO: 233358 - DNA, 929 bp, Homo sapiens
  chr7:155249383-155250312
  hyper
taaaacaaagaaaacgagatgaccggtctgggagctcctcaatcagagtagagaagttagaggggggcgggcgacttggttttgaagtcttagctgaacagtcacccctcctctccttggcaaaaaggattcctttagaacctccgaggctcctggatttctcccttcgcaaatggagccgcatactgcattcccccgctctttcggatcgctaagcatgtttcatgagggtcgctgtccccgggtggaatgcggccgtatgcacgcgcctccctgcacacgcacacacacgcacacttacaataagtgtctgcaggaggagtgtcctgcgcgccagctctgcgtttaagacaggaagctgccgggttaccgagtcaaatgggagtgacactattcctctccatcagcaaggaaagcggaccacaaaagtccctttgtatctcggcagctcatttaatattatttatgcattttgtgcaaggaattgtgggatttcgccccacggtaaacaatatggaaatcttaaaaatagcgatcttcctgtgcgtgtccacctacgcgccccggggtgacctggcggggctgtcgccgggtgactcacacccctgaaccgcgaagcgacagggaaagcgcgggcgagcgcaggagacgcggtcgggggtctctccgggttcctgggctcccgcacccggagcgggggacgcggccgctttaaggggaggaggggcggcgggctgctcctgtcacccagcggcggccggagcgtcacgtgggcgcgcggcgccgcggccattggcccgaggcacgtgtccaggagaccggcctgcgacgtcactcgagggggctctgttaaaaataagaacaaaaatccagagtgaaagtgtctcaggttgcgccgagtggcctggaaatttccgagcccgcgcgga

SEQ ID NO: 233359 - DNA, 162 bp, Homo sapiens
  chr7:155251992-155252154
  hyper
cttctttctttctctgtctctctctctccttcctctctccctgtctcccctctctgtcttccaccccgccttggcgcatctcttcccagcccctagcccatgtctcccccactgtagttttttttggtgggaacgtggtggctggaagatgggcccggaagt

SEQ ID NO: 233360 - DNA, 92 bp, Homo sapiens
  chr7:155252334-155252426
  hyper
aggaggatgcacacagggaaggaggaaaataaaggcgccctttccccttggctccactttgtttgccagcgccagcccgcagtggtggggct

SEQ ID NO: 233361 - DNA, 439 bp, Homo sapiens
  chr7:155252634-155253073
  hyper
atcatcaactgcattccatgcgggtctgcggctgggaaccgccattagaagtggactgtttgaccccgagctggcagcggatccccgctgcccccaaaccctcaactattttgcgggggtcatttgcccagatcacagcaggagtgagccaacccttgggccgccatcccgcagaactatgcgtgcatatttctgatgaaattcagatttctcagctagatctgaaatttgctccattgttctcgtcttcctcctttgttaatatttaattaacatacaggctcacaatgccgggcgaggagactcggccgggctttgtgcggcgcgggagttcgctgagccagcccccaacggcccgggagctgggcagcaccgcccggcccggcctggcccggcccagctcagcccagcccaagtcgcctatcttcatgggctttaa

SEQ ID NO: 233362 - DNA, 382 bp, Homo sapiens
  chr7:155254935-155255317
  hyper
tggcggttcagcctcgagtggccttgggcgagtcacttccctcttggggccccagaatccttacccggtgcctattgggtggcacacctctgggtaacctgacttctctctgtccaccgtatctacccaggtcccaggtctcgaaaaccaaagaagaagaacccgaacaaagaggacaagcggccgcgcacggcctttaccgccgagcagctgcagaggctcaaggccgagttccagaccaacaggtacctgacggagcagcggcgccagagcctggcgcaggagctgagcctcaacgagtcacagatcaagatttggttccagaacaagcgcgccaagatcaagaaggccacgggcaacaagaacacgctggccgtgcacc

SEQ ID NO: 233363 - DNA, 124 bp, Homo sapiens
  chr7:155256238-155256362
  hyper
gcatacatcgtctgcgtctgtggtctgtgtcgctgtccccagtcccaccgcagtcctgccgcaggcctaaccctcctgccctgggcactgcctccatgcagaagcgcttcgaggttctggggct

SEQ ID NO: 233364 - DNA, 733 bp, Homo sapiens
  chr7:155257754-155258487
  hyper
ggaggaagtgttcaaaactacggtgctattccagtgactacatttttttaaattttgcgaagttcaacaggtctccctccggctgggtgctcactggccctgccacccgtgctggaccgaggcgctttcccctggggacaggaactttttactccactgagacaaagagactctccttttcaaagtgtcatttttgtttaccttttgttgtttcccccccaaaacaaaagactttgtacaacttcctaagcaggattgggggagggatcagcttcgcctgtgctgaccgcgcctctggattccgctcatcaggaagtgtttggggtctttgagcgagtgatctacgcgttgaattgctgtttttccaaactttcatggcttaaaaattttttttcttctccctgtaaaagaaactcagagactggtgatctgttaccgaagacgactttttaggcgttttctgtttccccaggcagctgggccgttggcgttcccaggcggaagcggggcctctgggctgggcctctgccctgccaggaagcggtctgggggctgcccctcgggattttcagaaccctggaaggagagagctggggtctcaccgcggagactcccgagttctcgttgcctgggcccgagctgcgccccagggtcatcgctgatggcgcgagaccacgcattccccgcgaaccccgacttctgaacagttcagaaagttcgtagattaaaaacc

SEQ ID NO: 233365 - DNA, 587 bp, Homo sapiens
  chr7:155258815-155259402
  hyper
ctcatggagagccgcggctgtgccacctgcctgctttcgccatggagaccggagtcaggcctgcagggaagtcggtgcgcctttcccaagtcctctgcccgctggttcctctcgggcctcccgggctctgcgtgccgcggatctggacccggactgcagacaccgccccacgactgggcccccggccagactgttaccccacaggaggagggttccctaagtgtgcagaagaggaaagctcatttataaagtccttgctccttcgagctgaacgacccccgcgcccgaggcctagctgtgtccccgccgggcccaggctgagcttactccacactgctccatagccgggcagagactccgcgagggtctgggagtcctggcctcggaggacccgccgccctgcaggcctgcccaagcaggcgcccccgcgagagtgcgggacagagagggcctggcggggctccttggcgctgagagccctccttctccgctgcacccagctctgccaacggggctggatgagtgggggctggagtcagaatcccagggtctacacccgccgacagcagcaatgccgacccgccctg

SEQ ID NO: 233366 - DNA, 51 bp, Homo sapiens
  chr7:155260182-155260233
  hyper
ttaataatctcaaacacttcattatatttatgctgcctgcccagagaaaat

SEQ ID NO: 233367 - DNA, 1251 bp, Homo sapiens
  chr7:155260413-155261664
  hyper
gtccaggcccagtttcctcagagagactcggggagccccactttgagggatggggttccccggaacgactccgaagtcccggagaccaggcgcggcccaggccctctgcccttctccagccccagccccagccccagccccagccccgggcaaactcttccaggccgagggcaggactttctccagacccttggggccctctgtgtcccctggggacgcccgacccggctttctaggagggggaactccgggtcctgagcccgggccccgccccgttggctgttccgccccctccagggctgagccccgcgcaatgcccgaagcagaaacaaagagtcgccgagatctgcctcctgggccgccttttcaccccctcagcctggaaggcgtcccagagaggccccacccccagcctccacggagacccaggagggaagaagagccgggacccggtagccctgaggggctgccgggcctgcggcgctttctccgccgcagaggggttgggtgggagacgcaggcgggaaggaccctgtcccagccgagagtcctctgtggggtcgaggaatggtgaggatcactgtttgcaccaaccgtctggaagaaaccgggcggccagccgctcgaccccatctgtcgagatgtgaaacttggccgcgcggtccgggcgcgcgctgcctgcgcggaaggagccgcctccctcctttcagcgaacgcattcggggttcccccctcccgccaagtcctttgtctggaaggggactggcaggctctgtcgtcgccgtgtgcccccctcctttccccagcctctaccccctccaactaactttcctttcttcccttctcttttcttccctctctggatgggtaatcacaggctccgctgccaagcgcgctgcgaggagccgctgcccgttcccgtcggtgcccctccccgcggcagcctggccgagtccgcccagcctgcctaggacgtccctgacccgcgcgctcagtttcattcagtggccgtgggatgttgcatctgagtttttcctttaggccaaaactttgtcccgaggtttttctgagagggttttattctccaacagcaacaacaacatgcgaattcttaaaactagtatttatttcgattcaggcagtcagggaaatggcagaatcaccagccgtttgcagaattctacgctcgccaaggcaagtactattagtatattttctcccaacgttttcgttgtaaaatacacatgacaa

SEQ ID NO: 233368 - DNA, 189 bp, Homo sapiens
  chr7:155262413-155262602
  hyper
caccctccacagcccaggtgcggttttcagtagggcccttacaccttcttgcttttcccagccaatgaggcatccacgctgctgcttaggagtaggggaaaggatgtaatgcacgcgagaggcagtgtccacaccgtgagaaaaaagtgggacggtggcaggaggtgcgggagagtgggacaggattct

SEQ ID NO: 233369 - DNA, 629 bp, Homo sapiens
  chr7:155264017-155264646
  hyper
gcatactgcctcagagtaggcgattccaccagtgactcatcactcgcagagagaaaaacatcttttatatgtagagacgggaacgcgccctgtggattcagagccccaaggaaacaaaaacagcacgtcagaggaagaatgtcatacaaacccgctggagtcacaaggcaaaacagcccccatacctaaacgcccggcgtgacaatggcctttgtgcctggcgccgtcggggggagctgggcgcctagcgggtggggcaggcggaagttggacacatttccacgcaggtgaggccatccatggggtgatgcgggtgttggggctcgctgctttcgctccatgaagatttgcagccccccccagccaacccaccccatcccttccccccacaagggtatttcatccacactgttttttaaatgcttcctagtcaaacttgaatatgcaatgagacgcgggagctttgtggcggaaatataattaaactggggaaagatgtaaaagctgaagaatgggatgacatcaggctgatttcacactcggcagtcggatcgctgggcccaagccgcgctcttgccacgcaaggcagatcaaagtgccctgccaccgctaaaaaggcaaaaggggac

SEQ ID NO: 233370 - DNA, 218 bp, Homo sapiens
  chr7:155283717-155283935
  hyper
ctgggagtcctgggctgctccgtccggccctccctccgtgagaaggggaagccgaggcttggatgagctgccctggccggctccgggctccaccccccgcgccctggctgttgccatggttggcctcaggcatccggctcggcctacaggaaacacgcttgtaggactcgctagggcaggagagaatggggtaacgcggaagatggattttttttttt

SEQ ID NO: 233371 - DNA, 164 bp, Homo sapiens
  chr7:155299544-155299708
  hyper
tgttttctctcacatgctgtcgtttctgattcagcggagacgggggatcctgtgtcagagccgtggatcgcagaggcagcgaggctcggtctgcaaacaagacgctgcaaggctgagtgagagagagagggtgtgcgagcagcgagcacatgttacatcagaca

SEQ ID NO: 233372 - DNA, 299 bp, Homo sapiens
  chr7:155301651-155301950
  hyper
tttgtctcctttcctaggagcgaatctcttgaaagttctctccttcgtcacagggtcttcctcaagcttgtagtcgttcattcgctcacagactttctccaaaagatccgttaggaacgcctccgactgagctagggggatctaagaagaaagacagggcgaggaaacttgtcttaatgttaatgttacttcaaagaccttccggcgagtccacatggaaacgccacactctccctgaatgcaaacgtgtgccacttccctagcacgggcccagaagacggtaccgcagattgttatta

SEQ ID NO: 233373 - DNA, 951 bp, Homo sapiens
  chr7:155302309-155303260
  hyper
agtctggccctccccggggctgcccttggctgcgcgtcccccacgctgcagccgcgcgatggcccgggctggggtggacgtggggctgggagaggaaggggctcacggacgggcgccccatctcccaggcgggctcctcggctgctttctttgggaacagctggtgcacgtccccgcgcgcccctctccctccggaattcggcgaggattcagctggaccctttggccaccacctccgccccgggcgcgggtcaaagagcacccctcgcccttggtaacggagacaaaacgttcggggccgtctagacaggtcaaggtgcaggatgcggcgtccccgcggctccttccggaagggggcgtggagccgccaagggcgccggaccgcgccgcagcccgggcctttgcgggctttttccctctccaccctctgctgatcaaagtaggaagtttgcatgacaaccgcagtgaaaggggctgaatcacaaatgaactcgatttctgcagtgttgatctatccagcctccattgtcccctttcaggcgcagtatgaacccttccggtgccagcggccgcgctacattcacaggcgcgctcggggcgcacaaagggtctccgcgcttcaccgccatctggccacaaatctcatcagcggcgcggcggcgtccccttgaaagcgcgggcggagggtgcgcttgtgttcttgagacccaggttccattacaaaccacccagcatcgccaccggcgccccccgtttcaataaggaagccactttgtcaaaacattctaaaagaaacttgggaagaggacgcgtcagagaaataccgccgccgattaactatcagctgcgcctcccctgtgcacaggtaacatccctccttctcccccacgactcggctggagcttgattttgagctgctctcaaggcccaggcactcgaatcggaagttaa

SEQ ID NO: 233374 - DNA, 937 bp, Homo sapiens
  chr7:155325791-155326728
  hyper
agttagagtaaccaagcatacgccgtacagtgacaacatctgcgtggctcacaccacacaggcagccgcagaaacagcgcctcccaaacggcgcggcctcgctcaccctcaaaacccactccgcgcccgacgggaacggctggagggaggaaagagccaggcacctctcgttcggggtctgacattgtcacctggcagataagtgagtctgctcggatgtgccggctcggaacatgcccgttcgtcaaagagggaggggaaacaaaacgagcttgtgcctcattcccggtggctctccacgcaaagttaacgtttgtttactctaagcatatgcccaggtgaggcctgcacagccacctcgccgcgggtgcagggcgcgcctcagaatgacagcgaggtgcacgctccggcccgcgcagagcggggccagctccgccacccagcgcgcgggaagccccgcagcaccagcagggcccgtcgcttcgctccgtcccggtccggcgtgaaacccccgaggggaaaagcgggtatcaaatgtgaattccactcgtccacagcgccgggcgttatgaaaatctgagcacctttgaccggagaagcaatagctatgggattaaggcgaatttcttacggagaggagaaagatgtgcagtttgtaattacctgctccctgtagtacagtccgtccttcacgcctggatctaacgggacaaactctcagcggctttgctctcccggcattgtttcagcacccaccaagaggattaaaaataatctctttcccttttaattttgtgtcccccacatcccctcctcctccccacatcccctggggacagcataaatttttaatccctgaggtttgggagggggagggggtgttaaccccttgttgaggtggcggccggaggactggaagcccggggggaaaggtccc

SEQ ID NO: 233375 - DNA, 140 bp, Homo sapiens
  chr7:155437084-155437224
  hyper
ggagacgggctgccgtaaagcttcgctttgccgactgctgcaaagcgccttacgactgaacccggaatcgacctatggccagcagtcgtccccgccctgcttcaaacatttgggtttcaggagccgggcggaggtgactg

SEQ ID NO: 233376 - DNA, 131 bp, Homo sapiens
  chr7:155579915-155580046
  hyper
gccccgaggcgtcccgggcctgcgcccccagcgtccccgcaccagcgccgcgcgacctgccgctggctgcgtccgagcaaggggtccgggcccgcctggctgccccgagggtcccaggaggcagcgcaggg

SEQ ID NO: 233377 - DNA, 2850 bp, Homo sapiens
  chr7:155600562-155603412
  hyper
tctgcttggagtctggttgtcgccatggagggacagcttctatccagggccctaactgtagcgtgggttggggggactctttcgagagggtggggcgaggacgctggccccactgctgcggcgctttaaggggacgtgacaaattgcgcaacaggaaaagtcctgtgtatctggcagcaataaaacccagtaatatggttgtagagttcaacatgcaacaactgggggtggggtagggctgggggccgccctggtaacaggtcagtgcctgcatgtttgtgggcctgccagcagttaaaaaaaaaagtcggaagggcagagtttgagtgaggtcatcttgaggattgaacgcgttttacatgaaaatcaatcagtaaaccagggtcagtgtagagctatgatgtgaggcccgttgcgcgcaggcgcacaccaccaacacgcacagggacccccatgcaagccccccaccccaccgcagctccctcccctggggctgtgccgaagaagctttaaacagcttcccaggagggcagccagggagagggcggcagggtgaggatgacctggcccccagctctgtgagctgcgccacttgggcaggcatggaggaccccgggcagggagacccgggtccagccgggccgcgacgggaggtggctgcgcgagtgaggggcggaggccgagggttgctggagttggcgcccccgccccttgcgccctcctccggcccgggctccgcgcggcctcggctggcggcctctcctccgcccgcgctgggcgggattgtcgcaggcaaagccgggaagcccaggccggttattaattcattgggtcgtgtgccgcgaatcaagcccgactctgtgcagccaccgtgaagcccagcagggccgccggggccgggctttgtgtcggcggaggccaagttgttccccacgcctgagctcccgcctacctccctgatctgcgagccgcgccggcgagtgtcaccgccagcagccggtgggcttcccccagcgcgggggcgggggcgtcccagcttcaagacagccccagcccctaaacgcacctctctccactgtcctttcccccaagcttggtggaacagcccctccccaaccccatacctgagcgtctttcctggcggccccagagcgcacattaaatctatttagtgtagcggctcgggaccccactccaggcttcagatccggccctctggcctcctgccccttaggagccccctggccgccagcaccctcgcctggcacctaggcccgcgcggggagagcgtgtctgtctgcgctttcctctcccgggttaatattaaccggcagctcctgcgttccggaactgctccgaaagttccactggggacgatctcgccatggttgagggacttgggcggcagtcacattagagacccagagacagggagggagacagaagaagagggtcacgcacctggggcagagcctaggtggttatttaaaatgagggcggccgagcaggctccccaaacctcccgccggcctggggctcccctgccgcctcctgcaccccgcccctgccctcagcacccgagcctccgccttccccatcccttcctcccccacccttaactcctggaatcgggagaaggaaggtaggggagggatcaaccggggatacctcacagactgccagcccctacccccctcggttttaggggacctttgtggggtctgcctgataatcccggcctggctctcctcacccaacccccacttgggccgtccttccccctccttttgtgttgggaacgggaatagccactgcccaaggaaaaaagtatttgttttcgtttcgttcgtctgagggaagttgacagaaggtcagaagttcaaatgctgcctgtgcgcgcggcggcgagagtggccgggcgcggggccgctgggccctgcgtcccccggcagggcggacgggggtcggggggaggcccccgggctgggggctccggctgggacgcggaggcctagaggccaggcaggcggcggactggggatgggggcgcgtcccagggcaggccggcggagcccgcgatgcgccccggcccctgcgcgggcgcccccatctccgcgcccccgccgccggggacactacagcgagcccggcgctgctgttagctcctgcggtgcctgcgctcccgcgcgtggagcagcagagcccggcggctccagcccagcccctcgcgcactgaaaccctagccgcgggggatcgataacccgggagtaagtggggctgcaggcgtctgcctcgctgcgcggctctgtgcgcttgcagctttgcagcagggctgcaaggcccaagccctgggaaggtgtgcgagcccaggaccccttctgcggtattggcctcccgcagagcagggcagaagctgacccactctggctctgggacctcgggtatccacgcccccgccgctctctccgcagtgcctccctcctctcgggttccgagggaccctggcaaggcccctcctccgcggggagtgagggtgacgagaggatgggcgcctcgggctagccggagaactccctccagccagctgcacgcaacgggcaccccatggcccgtgcagagttaattgtggatcgcgctgctgtctggcactggcgcgcgcgtccacactcgcggtccagatttaaggtggtcgggagcagatgagggagagcaaggaaatcaggaccatttcccattcctctcccttccgacagctggagcaggctaccttgcctgcccctcgcctttctcggcctcaagcaagcctgggaatcgggtcgggaagcagggcggcacggaggtagctcctc

SEQ ID NO: 233378 - DNA, 589 bp, Homo sapiens
  chr7:155604520-155605109
  hyper
gtcatcagcctgtccgctccggtgttttcttcatccttaaatatgatgtcggggttgtaattgggggtgagttccttaaatcgctcggagtttctggagatcttcccttcataccttccgctggcgcctagggtcttctcggccacattggggataaactgcttgtaggctaaaggggtcagctttttggggtgcctcctcttcccgaaccccctgcccggtccgcacgccagtcccgagcataccagcagcgaggagacgaggactagcagcagacatctcgccagcagcagcatctcgcccatggaactgatgacttccgagctgtccccgtgcgggtccgtgcgcgagtgcgcgcggcgggtgtgtgcgtgtgcgctctctcttgcgctttcccttcctcgctccggctcgcccgctcgctctctccctcgctggctgcctcgctctttctcttcctatataaccttgcccgccgcggctgcgggggactctccaccgctccccacccagacaggggctggaatggcaggctgccggccgctgataacggaacacatcggagttgggtcgcgagacagcaatcaaa

SEQ ID NO: 233379 - DNA, 716 bp, Homo sapiens
  chr7:156409139-156409855
  hyper
ccaggagggaaccagcaaagcggcgttggcgccccggtctttcctgcgttggcgctggccgcggggcccagcacccgggacgttggcggcggcagaagggaaggccccggccgccctgctccgctccgctacagctgcaggcctctgcggtgacgggtgggggcaaaaaccctgcagaaaagtcaccgtcacacgcagagtccaaaactcccctttccccgctggaaccactttctccaaggagctccgccccgcgctctccccgaccccgtgcgcccccagacctcgcgtcccccgcgctctcccccgccgcgccctcctgccccgcgcccctcctcgccccgaccccgcgcccctgcgcccgggctccagcccggtccctgccgcctcccgcgccccgcgccccgctcctgcccgcggcccgtcccctccctgcagcgcagcgctctgggttcgggtctctgccctctccacccgcctttcccgcgagtcttcttggcttccgtgtccccctccccagccgggcgtcacccccgcaccccgcatctgcgcccccctcccgctaacccgcggcctccgcaagggcagcgcgctcagccgggtgaacctggaactgtgttcctggcccagcgctttcataaaagggcgcggaatagtaagtcctagttcaaggaataaacacggatccccactggccatgccgggactgacgcagg

SEQ ID NO: 233380 - DNA, 1051 bp, Homo sapiens
  chr7:156432929-156433980
  hyper
ccctcgactaacagcgcagcgaaggggcggtgcgctcgagaccctggaacgggaacgaccacagccaccgcagggaaacaaccggggcccaggcccaggtgggcgggcggctgaggagcgtggctgcgcccacaaagccgccgggggctgcggactacagcgaagccggcgcggggctcggccctcactacacgaggcctgggcgcctgcacgcccccgtgcttcagcccgcggctcccgaacacccccgccaggcgatccccaaaaacgcccgctgcgcgagcctcgacgggaacgcacctgcgtctagacgctgacgccgtgcgcggggcgggggccggcgagcatgcgcagtgtggtgtggacagggcgtggttggcaagcatgcgcaatgtgggccgggcggggctggcgagcatgcgcagtatggggcggggcggggcagggctggtgagcaagcccgcggggagcgagcgcggaggcgggcgttgctacggcaacggtgggcggccagggagttgcctgagggaaaaggggcagacgtccctgggttccggtgttcgcggaggagtcgaggcacggagaggcttcgggggagggacggaaagaagggtggcccgccaggcgggcggggtccatggattcggggtgagggccgtccgcggcctcgctttcgcctcctccgagccgggccggcgatggccgcagctgtgaggcgaggtcgggtcccgtagcggcgcgcagcctccttgggggactcggggtcctggttagtttccacagctccttctatctgaggggtacgaatttacggctgcctaaagccttagaacagtgatcccacgtcggtaattttagaacccggtaggaccggctgccatcaggggccccaggtgcagggtggtgtcagctttgagaggaattggagcctcgtcaccgcgcgcttcctgcatgagtggaacctcagaaaacggtcagcggggttcagaaggcaggagataacaccaagaccctacgtaggattgcatctttacgtcgtaggcttggtctc

SEQ ID NO: 233381 - DNA, 211 bp, Homo sapiens
  chr7:156701727-156701938
  hyper
cctgggaagttgctgcaatgcggcctgagcgccagcggggctagggggcgctgaggccacacggaacgccggcgactcactgcgccaggccgggccaccgtgcagaacgcgcgcggatctcacaccccaccatgcggaacgcgcgcgggtcacacaccgcaccgtacggaacacaggcggatcatgattcgttctcccctgctcctggggc

SEQ ID NO: 233382 - DNA, 46 bp, Homo sapiens
  chr7:156742210-156742256
  hyper
cctccatgctcatcgcgagcctgacgtccacgcggcgcccacccgc

SEQ ID NO: 233383 - DNA, 338 bp, Homo sapiens; identical to SEQ ID NO: 201263
  chr7:156792492-156792830
  hyper

SEQ ID NO: 233384 - DNA, 34 bp, Homo sapiens
  chr7:156794451-156794485
  hyper
ttacaggcgtaagccactgcgcccagcctgattt

SEQ ID NO: 233385 - DNA, 1210 bp, Homo sapiens
  chr7:156794956-156796166
  hyper
tatcaaagaaggaaagtcaccggatgagggaagggacaggtccacctcctctcccttcgagctgtttctttactccctgacaccagggattaaccggggtctcctggctgcctctcacctggcagccggagctccaggaggggctggaaaggagccccctgggcctccgtctggggggcgtgtgtgaactgttttctcccgtcacaaaaaaggcttcctccacatgcgtttgcacgcccggcagaattcgcccacagcaaggcccccctttctaagaagggaggagaacccacattggagcaaagaaaacggtggccaagaggtgggggcctcggtagggcaaggaggcaaggctgggttccaggggacagggtcagctttgggtggggcccagagccccgggtcgcagtgacggccgccgcaggggtctccccccgcgtaccttcgcttctgttgaaggcagtgagatccgcaggcctccgggacagctagaggacagcagacatgtcccgtgggggaagcctgggcctgtctgaaaacaccgcctcagctccctccggggtccccctgcgtagacctggcttcaggtccggagaaccggattcttgagggctgcaaagactttctcccccatgcgcggggtcagctggcggctcaggtgcgattggaggcctgggccccgagggaccaccgccccaggccgagccgagtcagcgaccccgagcgcggcgcccaggggtgggggtcgcgcccgcaaggcgggcagagccgggcctcgagaccgttcattaggcagaatgaattgttcaccgtgcccggagtggatgaggacgagccagtgattatatttaaatttgctataattgatttggggaagagctactgtgacaagaacgaattgatcattaaatttattagcgagataaattccgcggcgactgagcggcctgctggaggcgcaggggccggcgcaggtccggggcctggctctgctggaggacgggggaggggcggccctattaacagcgtcttcctttgatgtcgctcttccccgcgtcccagaggaagcgcctgtcccctgggggtagagggacagaccctccgcggaggcctggggcaccccagctccaggccgagcccccactcttccctggctgcccagtgttggtgagggcgctgaggctgggccggctgagcccaaggggaaaat

SEQ ID NO: 233386 - DNA, 3188 bp, Homo sapiens
  chr7:156796432-156799620
  hyper
gcccagcagctgcttctgcccggactcccagcagccgcgccccggccttggatgaggttgattttatggaaggggcccggggtgataatgagttgccagagaggatattaatctccccgcgccctgaggcagaggagtggctgcgctcgccccgcggtaatcacccaaatgaaacgccaggcccttctgaactcattttatccgctgggaggaggggaggggaggagggaggagaagggcacacgcaggtgctgctgagaaagtgacaaacagaaggaaggaggaaggcccgggagaagggataggagcggcgtccccgtcgcccgtctcctccggggccaggagaggccactgggtcatcgatgggggaagggggccgggagtcgcgccgggctgggtgggccgcgggcctgcgctcctgggcggacgagagcgcgggctgagcccgcatgtgtgcagcacatggcgctgggcctggctgcggtgattgatggcgcgcgctgcagaggctgattaacccggagccgctgcagccgcggtgtggagcgctgctgcagtccgccgctgtcctcgcggacttgtttgcacagagccaagaagaccgatcctggccagccaaggaaggttctgctaacagagagggccggggtcgaggagagagagaagcaccgcgcaattcggtgcgttccgggaaatgtgcctcagtagcgcctgaggtcacagggaccccacatgctactaacgcctagtcgttttaagcttattttctgaaacgtccaaatagcgtatttccacttctggagtgccaacgaagcaacagctagcaaggaaataggaaaataaatagagtccacagctccgcttccgagggacacgtgtcccgggacaggtgtgcaccaggcagccgggcatgcgctgacacctggccacaggtatttttgccaacacttcacattgcgactccccagtagcaggcgcggaggtggtcctgacacccacttgagactccgattttcaccctcagctgccaaccgccgagtagacaccctccccatcatttctacaagcaaattgtaatgccgcgggcataatcccccaaaactcgtgcacgctgatccagtacaaaaccaatttattttacattccatcgtgggcgatgggagaagctaaataataatttagcatgcatacgtagacgtttctttttatatataaatacaatatacaaaaataaagacagtacagttttgagatttccagcagtttgaacgctcgtgacataatccccccgaccccagagacgtaagcataaacccttttttctttttccaaatactctgcagaatggcggctccagaggcggtttcaagtttcataagtcaggtaacactgtgggtttccgccttctcggacgcggggaaaggggagacaggaggcttccccttgcgcggggtgggtcggttcttctcacacgcactcgcgcctcccccaacaccaaccaaaattaattttaaaagaaccagagttcaagtttcagccccctgggtctccctctcgctgtttcttgaagagcaggtgaggcgcccttgcttaaaagggaagcgcccaggaccggagccgcggccgaatccctccagccccggcctgggcgaggggtccatggggcggcggtcgagcctgctctcggggccgggccgggtgggtgcgggcgccggggcctccgggagaagccgccggccggggcgctccgtgcgcgccgcacctgctgggccgcggggctcctactggggcgcgggctggtggctgggccgcgggggcggcgagtcgtcctccgaggagcagtcggaggaggcggcgtggacgctggcgccgttgctgtaggggaaatggtcctcgtcgtcctcgtcctcgtcctcctcggggtcactgtccctcaagtcccgcaggcggcgtccgctgcccttgtctccgggcgctggcggccccagcagctcctcggctcccggctcctccgcgccgcccttccccgcgcccccgccgccgcccttctgtttctccgcttcctgcgccgcctgctctttggcctttttgctgcgtttccatttcatccgccggttctggaaccaaatcttcacctgcgggcacaagcgggcgtgagaaaccggccaccgccaccccagggcttcctgtccccggagtcccccggccgcgtgcgcctgggccccattgggtcggccctggaatggcctcagggtgagacgacttagaagcagaatggggagggggctcgtagcttcctcctccccgcaaccccccactcagcagcaaaccccagagctgggctggagctccgtgggagctaggactatgtccccaacgacccaggccggggacttttctacccgcgccctccgtctgcggaggaagggtcagggcagctggctacgtcgcggtaaatctcaggatgttccctcctctctttctggaacaaaatttctcgaatgcggcctggggatcaccttcttcagaatgaaaggaggggtggttaagtgctgattcttgggccccacccgaagctactgaatcggcgctctgggcaccttagatgaacccgtgcgcccgccgtctgaaccgtcgaggcgcagcgctagatgcctcagaccgcccgtgggtcacaagtgcaaaggtaacagtgtcccctgggaggccgggatgcgtcgggggcggggagggcgcgcacctgggtctcggtgagcatgagcgaggtggccacctcgaagcgcttgggccgcgacaggtacttgttgagcttgaactggtgctccagctccagcagctgctggctggtgaaggcggtgcgcggccggcggcacttccccaggaggttcgactgcgcctgggctggggaccaaagggcagtgaggcccacagccggctccggtcctcgccccagcccctcccgttgctgcttgtaccactacactcaaggccccagcgccaaggcctggccctgcagagggcggggctgttccctcactatcagtgcccactccccaaggaatgcggactcaggaccaccaagtggaaatggatagtttggagttaatgagaccaatttttttttttttttttgtctaggagacgtctgagtgtccctgttaaacagggcccatcgcaggaggcttcct

SEQ ID NO: 233387 - DNA, 244 bp, Homo sapiens
  chr7:156800318-156800562
  hyper
tatttacataatttcgcacggttacatcacagagaattttatgacctcaaaacgagacttcccttgatttcccaggagcctgacaagtgttggacaataaaagaaagaaagcaaaggaaagaaaggaggccagccccaggcctggatgagctcaggtcccccgggatgggcagtttgctttagaggatggcccacgccccctgctttagtcaaacaaggccccgaattcccaacttgacaatac

SEQ ID NO: 233388 - DNA, 799 bp, Homo sapiens
  chr7:156801398-156802197
  hyper
ggtctctttgtttgggtgttcggcggctgaaagcgttgagccatatacatctgctcggcccgactcataagtagctgaccccgatggggcgagcggggagagccagagccccagagagccagagccccggagccccagcccggagagtccgcgtgtgccaggaaagcctgaggggcccaggcctctggcgaggtgtcccgcccggatggagaggaagctgcccgaagcccagcggctctggggtggggagaacaggggctccctcggccccaccttggaggggcattcgttaccttgttgggcgcccaggattccagggcaggcacctactgttgagagtccccccatagctggttcaagccaggccacctgcctcggccatcgcaccccggatccaacgcccttccagaggagggcagcgccctggtaagagccgggggttccctgggccttggccttgcctccccgggcctccgaagcccatttctcttgtttgctgctcctgaagcactccctctccctggaggggccgcgggtctctctaacgccccagtgggggacctggcccaagttcctttccccggtgataagccctgacccccattcccgggcctgcctaattcagggcgctctcggctcgccttcccccggcgacttccttctcctgcagccttcgggttaatcattagatctcagtctcacacctccaactgccccttcccgttaagagaggaagagaaggcaaggcctgcgcatggccattttaataattcgctgcccgtctcatgcctgggggtcc

SEQ ID NO: 233389 - DNA, 36 bp, Homo sapiens
  chr7:156802677-156802713
  hyper
ccgctgcgcccggatgcgcgtggtggtggggccccc

SEQ ID NO: 233390 - DNA, 941 bp, Homo sapiens
  chr7:156803673-156804614
  hyper
gcccaagacccgctcccgagacacgtgggcccctccggacttggttggtccctggagccagctgcgcgcgtcctctccggcctccttgtcggcgctggagtgggtccacgtctgccttgcggagcgcggtggttccacgctcctgagcgcccacgctgcgcagacctggccgctctgcgaggcgacggcagcgcactgaagaccgtggtgtttcccaagccctccctgctctcgggcctccagggcgcagcaggggagggttttgtccccgtggccaaagctctgcaggtcgaaccttatctgctatgggaaggccccgcattttcaggtgtgtgtgcgggggtgtgggggtgtaaacgcgcatgtgagtgtgagtttggcctccacgaatcctctctgggagcccctgccccagtcaaggcggagacggtagatctgggcgctctggcctgcagaacccaagtcggcttgcagacgtcgcccacgtgcctgctcagtggagcgggtcctcggtgacaaggctcttcctcgctgccgagggatgcccatgggcttgcgggagtcaaggcccacacacctcggccctgaaaaacccgtggggcccggcatccttcggaagccctgccgctgcgacccccggccagtccccgggcaggagcggggaaaggctatgtctctcgtgctgccggggcctcctgggaagtggagaggaaagggcttcccgtgagtgagcgaggcacggagtgagcatccaggtctcacccctcccccacacgcacacttcaaatatttacagtaaaaccacttccaagggcgtttttgaagctgaaagaatccacacaggggtcgggaagtcaagcggcatcaacaccaggctttgtcaatagcgccattagacccagttatcttccccagcaagcgtgagaactgggagggagttc

SEQ ID NO: 233391 - DNA, 365 bp, Homo sapiens
  chr7:156808858-156809223
  hyper
tagcattggcctgggcgcccaggcactcctttagaacccacctgttccccccacccaccctagtgggaggaggagagggttacactgacagataccggcagctctgcaacccgggaacaacgcagacaacatacaactcgacagagtcacagaaggtggcgtccatcgcgcctggatggtgactactgccctgcgggctgctgggtgggtgaaacacacagggaagaagcacaaatacacacacagatgtggctcagggacatttgaatgcttcagtgtgtgaattttttagcgcattctgactcgaaattatggctgaatagtggcgcactaatgtccaagtccatgttcgataatggcaggaa

SEQ ID NO: 233392 - DNA, 205 bp, Homo sapiens
  chr7:156809440-156809645
  hyper
tgaagagccctccccgcccccaacagtgttcatgtcccgggctgggggcccgcctgggaggggctctatatgccggtgggacctggctgctttgcctcgcattctccccactcttccccttcccagggcagcttttctccccgcaccccatctctctcccctttgctttctaactgggttgggaagctaatctgccaagagcccg

SEQ ID NO: 233393 - DNA, 2278 bp, Homo sapiens
  chr7:156810032-156812310
  hyper
cacctgggagcagcatgggccgccctctgcctcaccgaggggcaaaccggctgaggacccaggcacgaagagtgtcaccagctctgaccacaagccccgtagaccagggctgcgtccataatcggggttgatggcattagttattatattataacctccttgttgcgtgattctagtaatttattttcccacttggcctttgactgggctgggctcctcccagtggaacaacagggggtgtcgtgtttgcagcagaaacgcacactgggatcctttcttgcaacagctgggccggctgggtcttttctcttgtcttctgtacacaggcccctctccgctgtttctgcagagaccgaggtgggagggagaaagaccctccagccctctgctcccaccctccccgcagtctccggggccctgtgctgcaggcaagataatttggctaatgaactcgttaaagggcccctggtgacccgccccggcttcccctcggcccatctgggaaattccattgaaaggctggagaaggttcctcagccccgccgccttctgtcgctgctagaggcgcgaacccggtgactctgggccccttacattaaaataattacccggcggaacaggtggcccactcccggcgcctgggtgcatctgggcccccggagccgcagcccgggaggaggggagcggcacgcccaggggagggaaggtcaggcccgctgagccgggagccgggagggtagagaggggctttcctagggacagacggtcccggggcacccaggcctccgcggccgagcgggctgaggcctaagcagggaggccgtcgccttcaggcacaggtaagcgcagcccgcgcaccgcttgggacgcacctggccacctgcgctgccacccaagcttggggtatgcgggtgcccgagcagaaccccgaactcgcaccgggctccgaggttggagcaactcctaacactgggctcggagctaggggcttgctggaggggcgcttgccgcgccggccctcggggctcacagccgggcacgccggactgcggcgagcgcgtgggcgagcgtgtcaggagcgtgcgccctgggtgcgcgcgtgcgagagcgcacgtgtagggtggcttccagtcctcccttcccgcctgagaagcgtccacgcggagttccaggccgggcgctggggaaggaggtcccggggacgctgctgaaaagagagcggccagcccaggcgcggggccaagcctattgccaaaaacatattaccctgcgacattctgtaaatgagataatgatccataaacccggatgatagatgtggcgtgcctgcgatgtcttctctaaatgagctgctcgcatcgactgctaataatggtgagtttatggaagcgatttcagcgcaaactgcgagagggtcttcttactctaatcagcctgcctgagctaatggacgagggggtcaggctgagagttattgacacgcccgtgcccttaacctgtttcccaataaagctgattagtttttgtcaattcatcagctaaccactcttgctggaactgcatcaaagccttatttgctcaggggaaatcaacaagtcacagatcagctccattaaggggcccggcccggcaaggacagtcctggagccgagggacgccccgacggacctcgggcctcccccgaggttcgcagaggggctgacagcgtggccccccttaactccgagcaccacgacccggatgcacataactgtgtccggaaacttctctttctctgcaggtggagcagcgcctgtgcggctccgcgctatggctccaaggctccggccctggcgtctgggctcggtcggggacagtttccacgcgaggcggagcctagctggaggtcacagggcggtggagagcgagggcatgagggagggagctgggaaccgcgcagtgtccgcggccacgaatctctcctacgcgtccccatgaggcgacctaaggggaagagtgcaggaccctaggacccccccaccccgggcagcgcgggcctgagcttgggggacaggcagaaggggatcaaacccgcacccagcgcagactcctacttgctcagtgacttcgcaagctcgtgggagggagctgggcgcgcccgagggcacctgggctgaggttccagtagctggctctacctgcgcttcaggtgagcggctgcaggaagggccctcccaggtatccctcggctcccgctggcaggagtgagcccatcggccgccgccggcggaggtgaccc

SEQ ID NO: 233394 - DNA, 769 bp, Homo sapiens
  chr7:156812847-156813616
  hyper
attttgttgtaatatatctgcgaaccggggactcccgggcagggaggcaggattctcccggctggggcggtctgagtagctgggtctgagcctcgggctgagaagagtaaattctgcagaaagggccgcgtccgatcggcgcaaacgttcggttcgtagcaggagcttctccaggcggccaccgaacccaggtccaggactcggcactcctggagccctcctccccacgcagaccgcgggggctgatttaatagaatgtcgatagaatcattcgatgccttttagcttgtgatctttataaatgtccctctattaaattagaaaatgattctcttctcgtttaattgtattctttcgtttcttatttccaattaattagtcctatcgacgttgcaatattttaagtgacttgagtccgtttccagttagaatatatgggtcagcacatgcaattttatacccgacaggactatataatgtgggttttaactactcgttcctcatctgtcttaaacatctggccaggatgcgccacccggcctcctcgcagatccttcctggggcaggtgggcaccacgcgggaccctcccgggggctcccgcaggcgcctcttgctgcccggggccaagggtcgggcagcccatagcgtccggcctgggcctttacttggaattctttctgttgaagacttggtcccagcccagtggttctgggataagaagaccccgcagaggggcccagcgccgcgttcctacgagacacctgagct

SEQ ID NO: 233395 - DNA, 96 bp, Homo sapiens
  chr7:156813796-156813892
  hyper
aagaggggcgccaggccgggctcccctacccgagcacgtcagttccaccccctcccttcttgctgccctacaaaactttaaaatcactttttaaaa

SEQ ID NO: 233396 - DNA, 42 bp, Homo sapiens
  chr7:156814252-156814294
  hyper
tggcccgagggaagagggcagctgggaggggccccggccgcc

SEQ ID NO: 233397 - DNA, 445 bp, Homo sapiens
  chr7:156814654-156815099
  hyper
tttctaagcagctgatccttcaggcccaagactcctagagtggaaagggttccccggaatagtaagcgcgccgtcaccttgggtttcttcttcccagagcaaggagacccccgttttcctcatgacccgcgtcctaaaaggtggggaggtgagattcactgggaatcgtgaacctgcccccggcttctcccggggcagcctcccccggtcaggggaggagggagcccttcccttcaaccccgaaaggttccttcctggtccctagctttgctctttgcaggcagggatggggctggcacgccttgcggagaattttaccgttttaaatatggacctagaggccaggtcggaaaggggaaagaagctgcgccttgccgagggtcctgtggccggagcagggcctgactcctgactcccatccagcgccccttctagaaattgtccc

SEQ ID NO: 233398 - DNA, 92 bp, Homo sapiens
  chr7:156815538-156815630
  hyper
atctctccactccatctgaacgtgatcggagctatagctaagaggccagcccaagggtgacctgccagacttgagtgcgtgagcgctggctg

SEQ ID NO: 233399 - DNA, 400 bp, Homo sapiens
  chr7:156870959-156871359
  hyper
ggcaagcttgggggcagggacgggaagcgaacccacgaggtgcagagagcagagggctcccctaaatccgaagctatcccctgccctcccttcctcgcgtggcttcccgggcgcgctctgcctgtctgcggggactccaggcgtccttgtgttttcagctcccggctcttgcccgcgcgtgtggcccggctgggcgctcgggcttcctcctcccaggcccgcggcggcttcccgtcctcgcaggcgcgatcttaccccggccggacagttaggacgcggttgtgctgacctgaggcttggccctgactcccgtgcacagcgcccgagctccagaggcgggggatctgaacactggcctgtgaaccccgagaaaacccccggtttgcagaccaggtgtcct

SEQ ID NO: 233400 - DNA, 76 bp, Homo sapiens
  chr7:157129624-157129700
  hyper
gaaactgcgcatgcgcggcgtcagggtcgggcggaagttgacgccgccgtgccgccgccgcgtgacgcatttcctg

SEQ ID NO: 233401 - DNA, 396 bp, Homo sapiens
  chr7:157130634-157131030
  hyper
ggggcaggaaacagcgcaagtagaacgatcgtgccaccaccgaaggggtgccgcctgcgagctcggaggcttcagcctgtttgggaagagtaggctgagcggcgctctttgtagttttcaacgtttttattgagttgcgaattttagtaaggatttgtcgctacaatttaagccaaattattgatttagtagaaaagttagagtgaagaccgaagaaaggaaacagacgttaaccattaaagcttgattgctgctgcttcgtgtttaaccgcacttttccaaatagtgttgcgtatcagaacgattcatgatttctgaaaggaattatatgcagccgccttactcctccgccagtccacccgtcccgcgttctctctgggtttactccagacttcc

SEQ ID NO: 233402 - DNA, 439 bp, Homo sapiens
  chr7:157361386-157361825
  hyper
ctgcaggctcggcacgcagaggcaggtaacaaacgaccagcctcagaagcagatgtgcttgctgcaaaccaccttcctacggcccagcagaggcacaacaagcagcgaattttttccagggcctcccgtgaacacggcaccctacgttgccatagcgacgccatcccagctctgagccgcaacaaagcggcagtgtctgtgtctcacctttggccatcttgttgagaaccatgtcgatcaggacgtaggtgccgctccggcctgcaccgtcactgccaacagaaggagagaaatgaaagtgctgccgtccacacggaagcccgacccacaacaaagctagtgacagttcatttccttcctgcttacgggggccggcgagaggaaaggatggcggatgtgagagggggaggaaggacgcgggctgggagaatccaagtga

SEQ ID NO: 233403 - DNA, 849 bp, Homo sapiens
  chr7:157476560-157477409
  hyper
tgggggagcacgcccggccttggtcctggctgctacaagatgagaacaattagcaaacccctttccaccacctaatttcgcgtggtaacaaaatggatttttccccatgaatgcctggccggcctattcattatctctcttctattagtaattttctgctccgtattcagcctcccaactcttcatttcctcccgtctcccagcgtacacagtgcctcttatgtcaggccgggcccgtttttatcttgtaatcataaaggccaccaaagcaattatcgccggtcttgactggaaaagctggtcattaattagcctccttttgccttcggtgcagcggattagctggtgccgggactgagttaatggaaacgcgggttaaatgagaaaagacgcccggattttcctgcctggatgcgcggctcggaggaggaccgcgaggttctccagcggcgggaggcggtggagccgccgcggagagggagggaggctttggagagggagggaaggaaagggggagggagagggaaaggggggagagggagaggaggcgcggggtgggggaggggagtgagcagggagccgggagagggaggaggggcgggaaccaggggagcggcccgaaccccgtttggtccggaccccgcagccaccgctgggtctcgccgccgggtcgcccttcgcgtggagatccggtccgcgccccctccccggtctcctcccctcccctcccctccgcccccctccctccggcccacacagcctcttccagaaagaagtcactctagagccgcgcgacccagccccagagtccgccggggtccgcccaccgggtctcctgcgcgcccctcc

SEQ ID NO: 233404 - DNA, 5317 bp, Homo sapiens
  chr7:157481399-157486716
  hyper
agaagccccaacccaagacccgcctagcgtcgcttgtcagaacccctctgtggcacgactttgagcagagggcgagggaaaggagggtcagcgttcggccccgtcccctgcctgggctttctcccccgcttccccgtccctcccccctcgccggttcaccgcatccccacaggagtcataaagatcaggccccagcgccggacacaaaggccaagggttcccgggagccgcgggtattcagagccaggagaggggtcccggcgcggagggtgctgcggcccagcctcctggccacagagcgcgccggccgcgagggaggaccaaggtccccaaccacgcccgcgtccacccgtgaatcccggcgctcgcagcccccgggcggcgcagccgccaccgccgccgtcttctctggagcgcagaggggtgtgcttgggagggggcgggagggcactttcctctgtgtcggtgaaaggaagagcttccagctccctcctccgcacaaaccttcacttcctctcttgttcgatcgcgtcctaaaatctgggatcggcgacgcaaggacagcctggtttggcgaagacccctcggacaccctgcgctccggactccaggcgggtggctccacggtgccggccgggacgcgcagctcggggggcgggaccacgtccgggaccccggggccgctgtccgaggacggaggtcggtgacttgaaccgcgtcgtcctcagggctgtggcggggcccctctcccagccgtccagcccgcagcgcccagctcagcgcactgaggaccaaaaagggcgggagactctctccggccctaaaaggcaattgtgctgagattttaactctaacttgggggttcgcccgattccctggagcaacgcttctctaaaaccacggagcaggccagtgttcggaactgcacaggtagttacgaaggaaggaaatgaagtccctcgttccaacagcttcgggtccagtcacaagtttctctctggcgagcacgcggccgcctcacctggggtgggggaggcgctgagaaagcgcagttctctttgggggaggagagatggcctctcagaggcgtccccacctgcctctggaacgcctctccctgcaggccccctcggttccctgcaattcgccgcccgctgggatactcccatggctcggaggcgcgctcccggaccctggtgaggagggtgaagagcgccccaaaatgggctgagaggaaaatgcgcccacactggcgcctctccatcctggctgctcgccccttccctcctcctttcccacacgcctcccatctccgtgcctgcacccccccacccccagcaccctgcaatggtcggaactgcagggagtggggagcaacgcgaaaggccgagagaagagcgctggggagaagtcccggaggtcctagactccttggggcggtctctgcggggcgctgggccaggacagctgccaaccctccaaatctgtgcgctcagaaggagctgccctttgcccgctcctcctcacaggcccaccctagacccacttggggatgatcccaggcgcagctctcccctgccggcccaagcctttgacaggagtcctgcggcgaggcagagaccccctgaactgagctctccgacgccctagttgcccgttagagcccccatgcgcgccctccagccttcgaaagctctcttcctcgccccaccacctacgcgcctggtgatgctctcgtgggcccttcctgctccctccgcccccatcccagcctctctcgcctcttccagggcccacccaaccgcactacgagcgcccgcgccccgcccggcacccctggttacctgcagctgggccggcgcccagcgcccgcgcgggaggaggtgggggcgtgcgccgggccgagcggcctcggggcgcagcagctgcgggtagcggcagcgccatcatcacagccagctgcttccctgcgctggagccacagactagcggggtcatccgcttctgaccacaaacttctagggcggccggaggagacaaaggtgccgcgcgtcgctgctccagcagcagcggctgcgcggcggcacgggctcggagcccgcaggcgccggagctctgcgcggccgctcggcccagctccgcgtgctccgccccggcccggcccccgggctaggcacgctgggccggggcgcggcgcgggcgggctcagggcgggctccggacggtcccggtagggccgccggccgcgcgcgtagcaccaaccagcgcggccgccgcgccccgccttatatccggcccggcgcgcacccggccggcggcggcgcggctcgcggcccagccaccggttgctatagcgatgtccccccccccccccacatgttgctgacagcaattggctaaggggccgcggctctccaaacaccctctcccgcccgagactatgaatggacatcagctttgtcagtcattggtacaacgccgaagccagggccttcgccttttctttcttttcagtgtttctccctttcatcgttcatactgggcaagttcagggtagcaccgaggggagagagacctcggccagaaaagtcaaggcgcgcggctctgctgtgacctttgtcctgggaggggtgggtggggtgcgtcgccactcttggcaagagaaaattgcacggcatatcgttcttcccagttaccttttccagtgttgccgttcgggcctttttgctccctttccaaatggaagcaggccaatgattcagggcgagtagacgagagcccctctgctcactttaccagggtcctcccgagtgtttaggtcccgatgcgcgtagaaagtgtcttgcgagacgcggaactggtgagactttgccaccatttggtccaggccaatgtcggccgccagcccaaaacgccgaagggagacggcggtgaaaacccaggcgtgcgagctgcgtccttgcccttccccctacccaggtcaatggtctggcctagaccaccgctctgcgggcgaaaggagtggagcagaatcacaggccacgctcccagtcgttcgagcctgcccacataacccccggcccctggcgcagtcaggcccgcagcgggcgagaagagctagggtctcggggcgactaggaccactgagcacctcccccccgcgcctcccgcccatgctctctctccccaggccctggaccccgggccacagccacaggttggggcaccccggtgcgcggcgcccccgcggagctggcgagagccggagagctgaaacccaacatctgtgtgtacaatgcgctctccgaggcccacagctgcaggaacaaggagaagaaaggaagaggggggcgcagatcttgtcacacgcagatgacagtctgcggagggctctttagtttctccttttctggaaaccccagcggccccctcctaggcccccctctcccaccgcctggccattgttccctgcgcccgggacagctggagacggcggcccgcgccactcgacgcccctcccgccgcacacccggctgcccgcggcgcccgctcccggcccctccggggccaactcctccacaccccccacctccccaggccaggcccaggcggcgcttccacagtctcccctcccctcccttgcactctggcgctgcccctagacctgctcggtgcagagggccttgcctggcgcttttctctcacaaacctagttctgtaaaacctgggggcgagccccagggggcagggctcagaggcgggggttgtccacagatatgagtacggtgccgtccgctgcaggcccctgtctaaaagtggccgaaggaccccgtttcctctgactgcaggcccaggctgagttccgcatttatttttgtatttatagggcaaggccagagcgcttcataaagctccagggcaaagaagtggcctcgcatcgggccatggttcccgcaggcctgagcgggctgcaggaggcccggtgcggctcggcgggggcgcgagaggcgagaaactgcggcgtcactggcgtcctctgcccatgagtgaacccctccagtaggcggggacggggtacatcaccttggccctctcgtcccccctgcccagggcaaggcccgcaaaaacccccgcaccctggctcgggggcggcgcggcggcgggcaggtcagagagaagcggtactcgggttcccccagcgcccgggatgccctcccagggaccttctcgggcaaagagtcgagtggtagcggttcctgtccctccccgccaccctcctccggtgcctcggcgtccccagccaggctccagggcgaccccaggcccggccctgggcagagacagaggaggggaggggaggtggcgctggggggcggggggccggagacggcgggaggaggactcgggagccggggcgggaagaggggaagacagcggagagaagggacggggaggggagggggctcggaggaggggacctgctgccctcagcctggctggtaaccggcctctccatagcaacggccagcgcgcgcgtctgtgtgtgcgcgcgtgtctgatgtgtgtgtgcccgtggtgttcccgggactccccgcgggggctgggaggggatcgcagaaccctagggtggcgacagagcaaacccctccaggactggaggcccgacctccgcggtgctgggagcgccctagggtctggctgcgccgcgctggcgacggggtaggctcggggaacgcgcgcaggccccgggatcggccgctggggcattggggcatcctgccctcgctgccccgaccctcccgctgcggtcgcagggccttggggcaccggggagtgggcgggtcttcccagcgacccggagcacaggggcgggcgacggcgcccccaccatggccctgcccggcccgagcgcccggcgcacctgaggtctgggccggggagcagctggggaaccgcgcgtcgcctcggggagctcccggccaggccggctccgggcagaggccagaggggccctggcgcaccctccccgcccgcggcgacctcgcaccaccttccccgccagcccgcggctctcctcgccctggatcgccggagcctcatccaggctggggtctccagcaggcggccgggagctctccgaggtggccaggagtggccggtagccgtctccctcggccaggccgtgtccagcccctcagtctccacggcggcgcagaccgcacgcggccaccctgggcctcggacagggctagggggacgcagaccctgccgtctgggggtcctggggcggccacggggccggcgaccccagagcaag

SEQ ID NO: 233405 - DNA, 385 bp, Homo sapiens
  chr7:158380261-158380646
  hyper
ggagctgccggccgcgggggacggacgaaggggcggcaggcaggacgcgtggcggcagcagcagcagtagcagcagcagcagcgggagcggcggccccatccccgcggcctggccggcggcgctcagtccatggccgcgcgggaggcggcgggaggcggccgagtccgggcccagggaggcgcgcgccgccggctcctcccgccgcgcctctcgcgctcttgcggcgacgccgggccgagcttcagcaccggacagcgcccggccccgccccggccccgcccccggcggcagggccccgcccccggacgcgcgtccgccctcaggccacgcccccggccagccccgctcgccccggccacgccccccgcccgcccggctcccttc

SEQ ID NO: 233406 - DNA, 195 bp, Homo sapiens
  chr7:158380863-158381058
  hyper
gggacggcgggggcctaagccgcgcccttggcccggacgggaaggcccgaacctactctgctggggacctgggcaggcggcctctacccgcggggccccgcgcgcgtcgaattaacgccttccaaccgtttctttaatttaaacgtaacgggccacttgcgcatcggggcgcgcggaggtggacccagtcgacct

SEQ ID NO: 233407 - DNA, 223 bp, Homo sapiens
  chr7:158769733-158769956
  hyper
attcttcctagacgcaggacaagagctctggcaaaggcgctgcagccacagaggtttccggccggaaaaatcggcaccccagagatcccatgagaacgtcacgtacagcactgagacggagccctaatgaaaactgtggctctgggtgataatgacgttactgtgggttcatcaactgtagcaaattcgccctctgctgggcgttgttggaaatgcagaggct

SEQ ID NO: 233408 - DNA, 525 bp, Homo sapiens
  chr7:158823224-158823749
  hyper
tggaaggaggaagccggcgtctcagccccgcagaagccccgaaccgtgggcctcccgccgcgtccgacaggcaggggtggggctagatgaccgaggtctccgtttgcaggaaggactgggcgcgggagccgcggtggaactgcagggcgccctccgagccgttgcgggagaaggaggaaccgcagaccctgtaatcccggctcgcggacggggtcgggcaccggcttcgccattttcgcttcagctcgcactgcacctgggaggtgagggcagcgggaacgcccgtgagcctgggcaggtgcgggcggctgctatgggaagcgcggcccgcgagcctccagctctccctcccgcctgctcccgtatctgtgttgccagcagatggacagaaacagaaacggccttgggggcagaggctggagggagcgggaactggacggccacaggagggcgggggacgctgccagactctaagactgtgcgtgggtggttcggggatcgccactgccgcggtaagcgcagtcc

SEQ ID NO: 233409 - DNA, 104 bp, Homo sapiens
  chr7:158936845-158936949
  hyper
ataattcagaactccatgtgcgaaggcacttaatcaacaaacttatgagcagttagttcctccagtgcccttgggaaaaagcaactatttccaaaaggaaactt

SEQ ID NO: 233410 - DNA, 384 bp, Homo sapiens
  chr7:158937909-158938293
  hyper
ctcccggccgcgcctccccgatctgtgggcggaggggctgggaagcggggtgctcagtgcgcgcccggctccgagtagagagaactgggggagagcggccggcgcggggccgggagaggaggaccgggccaggtgtgcgctcggaaggggcggatgcctttgcggccgcctgtacctgcctttctaaacaactgcggaagcccaagaaagcggccagagacccgtccggggtgggcgcgccgtctttgtagccagtggggctaggttggggcatctgaaaatggagaaaatcagagtgctttttggtggggatccccgcagcctcaaagaggacatcaggtcgaacagaaagctggagaaaaacgcagacgggggtataggtgg

SEQ ID NO: 233411 - DNA, 76 bp, Homo sapiens
  chr8:356768-356844
  hyper
gcccccacgcctccacgcccggcactctggacgcgcgcggacggaggggcagtgcctactacgcaggcgcacgctg

SEQ ID NO: 233412 - DNA, 271 bp, Homo sapiens
  chr8:494135-494406
  hyper
gcccacttaacattgagctacggtcgtccaaagctgcttagtgtccgcgaggaggccgtccggatgcgcgatgattcaggccttctccgccagctccacccgggacgcgagcacccggcgtggacctctgcgtcccgggcccacgacgcccgcgccgcggggtgcgcgcactgcgtccccgctctcctgggactgcgccccgagtaacacgtgcagggggcactgggtcccctgcaagcggcgagaacgccggcagccctggccagttaag

SEQ ID NO: 233413 - DNA, 69 bp, Homo sapiens
  chr8:495956-496025
  hyper
tggttcccaggccgaaaggagccggcgaggcgacccccgatcccgggacggagccgcgggaacggggga

SEQ ID NO: 233414 - DNA, 164 bp, Homo sapiens
  chr8:681198-681362
  hyper
gtcctgagctgagcgccgtgccttccgggttccgccctcctgggtccgcccacaacagcaggaatgcccaatccgaatacgggaccccgccacgggcggtcagtcaactacatcacggccgtagattggctgatatcgagtctgtaggcgtgtcgcgaggctcc

SEQ ID NO: 233415 - DNA, 34 bp, Homo sapiens
  chr8:688734-688768
  hyper
cctcagcgcgcggcgtgtgcggtgcccgaggctt

SEQ ID NO: 233416 - DNA, 339 bp, Homo sapiens
  chr8:1771704-1772043
  hyper
tagggtctgcccggcgcaccctccccaaggggcgcagctctgagccgggagcaggctctgcggggaggatccagatgttgggggcggggagggcactcggtctgcccagcgacccctcccgaagtgagcgcggcccggggtccgcggggcaggagatgatccgggggcgggagcctctgccgcgcgccccctcccacgcgtgcgcagcctgggccgggcgttgggcagcgggagggggcgcgggcggccacgtggcctcgaaggaatgcgcgggcgcgagggcagggcgctgccgagaaaccggcaggctctgcggccaatgggcgcccggaacggtct

SEQ ID NO: 233417 - DNA, 296 bp, Homo sapiens
  chr8:1772286-1772582
  hyper
cgggccccgcggaccgtgggtcccctcgcgggcttctggtttcctttgagagttgcacttctgcccggctcccccgaaatcgctgggtcccacccggaggtggctgcgcccccgaccccctgcgcagatgtttcagggaaggggctgagaccccctccccccgagcagctcccccttccgcggcgcccccggcccctcaggataacggcgcgggcctgggcggggggagcagggactggcagcagggacccctggccccaggggcaggagcgaactccgatcggcggaaggagccc

SEQ ID NO: 233418 - DNA, 158 bp, Homo sapiens
  chr8:2970509-2970667
  hyper
tggcatcaaaggcacgtttgcatttccccaagtggtggcgtctcactgagctccgcagagacgggggcctgtgatctgccactgcaggaagtgtgcgtgtctcggcaggaagcgtatcccccctgccttcctttccctgaaggcggggttcaaagtgg

SEQ ID NO: 233419 - DNA, 1618 bp, Homo sapiens
  chr8:4848954-4850572
  hyper
agtgacctcaactgcgaccgcctccagcctcacgactccgcaaacaggtcacgaattatgccccacgcatcaaaaactctgcgcctgccttcgccacagcgggagccgccacccgggcgcgcgcggcgcagctgcccacggcagtggccgggcgccctcctgccggagcgctcctccccgggaaagccctgctgcttgcaagcgcctccggtgggccctggagcgcgctgccgagccccggggcccagcgccgacgcccccggggggaggcccgaccttggtcacccgggctttgctaggcaaggggaacgcgacgccgccccaatggccagagcgcacaaacggcgactccggcgctggcgtcaccagcccccttcctgcctgcagccccttcccaggccggtacaggagctcgcacttgaccccgcaggcgtggaggagacacggtccctggtccctgtggggttaatgaaggagctccacggacccactgcctcgtgggccagacaatagcgcagtgagagctacgtccgagcgtcctggaccccctccgcgcgcacacacttgcgcacagcacctctccagctccatgcacgccaggggcctgggaccctgggctccacttctcggcttctacagccaggttctgggacctgcagcgcgcaagaggagctctcttccacggggctgccccgcagggcccgaggcgcccaggactttgcaacccctgccctgttcgccccagaatcatccagagcagcccccgcccactacctggccctccacaccctccctcccgcctccgcctcagcctcatcctagcgctgcagcccacccgcgtgggggcggaatccgcccggcacacacgtgtgcggattattaagcagccgagctagggccgccgcggtctccacgcagcaacctctgctaattgcgggggaaggcagccggagcgtgcggaactcgagggaaccgagagtgagctcagaggctgagttgcctgcctggaaaggaggaagccccgggcccagttaggcttggagtgcaggggaaagggcgggaagttttgcggagttgcgtggcaggtgtttcctctccacgcaggggctcggctggaaaaagccaggtcctgtcccttgggctcctgccctcaccccgctgcgacacacacgccccagcacacctcacagggcacaaccctcttttccctagactttagctgcctcgccttccaattcccagccagtccagtgctgaccagaggccgctgccagtcgggccctgctcagcaggcgctgcctccgcagccggcaatgtcagaggcaccggccaaggcatccggactgagccgggcgggtgggcagagggtcggcgtctgcaagaagctccccagtcccgagcgaccacgagcttgggtgactaagacccactgtttgcgatccccgagatctcggggcgcattcccgcagacacccccttgtgagggtggatgccggtgaggaggagctggtgctgagcggtcagctttcacggagccctggacgccccgtggaggcaagtgcagggaggggaagcccaggcggcacgtctctcccccgctctccaggcagatctggag

SEQ ID NO: 233420 - DNA, 1681 bp, Homo sapiens
  chr8:4850994-4852675
  hyper
ccagccttgaggtcgcagcctgtaggctacttagaagaaaacattccccaactcattcagggagaaaaccaagctcacagagccccaagcccaggagccacccagagaaactccttcccctgaccagcgtagaaggaggatacccgtgcgcccacagtgaatgtatctgacttggaagccggtccagaactcctagcctgtttcacgcaccttgccaacaccttacaacttgcaaggagcgaagtccgggggagaggaaagcgggggcgaccttctagaggcagctactcctcgccggctgaggacgttggagagggaaggaggagaggaggaatggggtgtatgggtgcgaggaggccgggccggcggagacctttgcctattggtaccaaaacccccgtagagagcccgaactttccaggccggcttcacccgggacgctttcccaggcgcgtcgggtccggggagaaagtcctgggaactgcccctcagccaccccgacccgtggagtccacgtctcggaggaggcaacaccgccccggcggagcacagttccagcccaactcgtattgggttcctttctccttgacaccctgtactgccgagaaaaagagatctctcctgtgagcccaagagagggggaaggaatggcggggtggggcgggggcccaggagggctggggagagcgcgatggaagctccctcccgtgcatcgcgttccccgagcttcggcgatggagcagcgccgggcagaggcggccactccgtaccctgcggtccccaaaacgcacactcgcgtccgcacacggggcctccgagggctctaccgcctccccggccaggagcaagtccgtcttacccttcgctgcagtgaggagcctcgcgcacagcaccagcagcccgagaagcaggagcagcgactggaatctcctccacgcagtcatgtctgcagatactccacacgcacgcgacaccgatggctcctccgaggaaggcagggctatgagcggagccaaataatcacccgagggcaaggcgagccggagagagagcccggtcccaagacccgccgcgcatccgacgcctcctgaaggtctgggcgcccggctcgcttccctctcatagcatcgggtcccgagccactgcagggctgagctgctccgagcgcggagacccgggctggcggggccggggccggggacgagcgccggccgagccgggcaggaaggcaccaaggcggcgaggctgcgggagggggagaagcggggagaggagcgcgcgcagccaggagagacctggagaggaggcagctggagagagagccagcgagtgggagatgcggggaggggggcgcgggggggaggagagatccagtctagagagaaaaggcggagagcgcagaagaagggctgctagtggcacaaggagccgctgccgtggaggctggactcaaccatccttacccacagagaggggaccgaggctgggcacggcgcagtcccagacagacagagcccagcctcggggcctcgggctgcccgcaccgtgctgcgcttcattcggcctcagcgcagcagcgcgcaggctggagaaaggagacttgttgggcgctcgggtgggggaagctcacgccgcacaccggggaggaacaatgtaatccggcaactccagcaaactggag

SEQ ID NO: 233421 - DNA, 41 bp, Homo sapiens
  chr8:6264167-6264208
  hyper
ggccggatcccgccgtctgtcatggcggcccccatcctgaa

SEQ ID NO: 233422 - DNA, 149 bp, Homo sapiens; identical to SEQ ID NO: 201286
  chr8:6673901-6674050
  hyper

SEQ ID NO: 233423 - DNA, 1537 bp, Homo sapiens
  chr8:6691844-6693381
  hyper
tagaccgcggggtccgggctcaggcagcccttagcgcccaggctgggtccggctgtcaccaccccgagcgtcctgcggcagcctcccttgcacgaaaagccttcggtgctgcagggctggggaatgctgacacccagtccgtgcccagctggagggcaagggaggacacctggggtgggtgccgacccccgcaggtcctgtctcagcccttccagtccggggcgcggagccagggcgcttgcgcgtcctccgtgtgcgtcctgctcggcgcgcctcggaagcagcgggacctgcggggacgcccgcgaactcagggaaaagtcccaaggcggcgttcccagggtaccccctcttccaccccagggactctgcccgggaaaaagcttccgcagggagcccggcggaagtgggcggagacgctcctcccggcactgaaggagttacgcgttcaaaccagaagggcgcgaaaaatggggccatcttgctccgccgcggctggcgggctctgggttccccctgcgacggaggtggcctcgaagggccgcgtcccgccccgtcctaaaccccgaagcggagtcgccgtcctacagggccgcgtggatgcggagccctgtccccctccccccgccaccccttctgcgagcggcctccaagtcgcagggtccccctggacggccgggggtcgggggagagcccgggcgcccccagacttgcgctcagcacatcttggcatcgcagcactttgcaaagcttgtgatggaaggaagggcggatacatctcccctgcttctgcgaggggatcttgcatgcgtggggcggggggatcgtgcatgggcgggaggaagtcaagcaccagtcgggaggggggggaaccgagcatgggtggaggaaaatcatgcatccttggggggatggtgcatgcgtgggcatctactaaggacgggaggacgtgctctgcaggtgggatggccaccaccgtgcgtcaccggcgcgcagtgctgggcgcaggctggggcagtgcccgcccgggcataggcagcctgtgcggctcccggcgccggggtggggttaggggctgcaggggtgagcacagcctcgggctgccgcactcacgcgcgctctgctcggccgcctgcagcagggccgagagccccaggagcctcgcgtgcatcttccgtgccgaccccgcagcctgcgcccgccccttcccctgcacgcggccccgcgtcggggaggtttccggcccggggcccgactgcgggtggcatttctggctaagccgttaggcgcgaattgtatgtctggtttattcgtagtggccagcaggggagggagggaggatgcttggggtttctggcttccagggtgggtggggacgaggtggtggagtccagctcaggtccgggctcctgataagggcagaagcgggttctgcgctgcccccaaccctgtaaccgccaggaaagcgcttggtgagcgtcgggactgcgcaggttcctcgggaggtggctaaactggccaccgcctctggggccgc

SEQ ID NO: 233424 - DNA, 456 bp, Homo sapiens
  chr8:8559447-8559903
  hyper
ggcgtggcccagccgcccggctgcaaggtggggtgtccccgccgctcggatccccatctcacctgccgcgggcgaggtggccccgccgcttcctgcgctcacctcgggtccctccctcccgggccaggtttggccgcggcagccgcccctgggcgcccgcgcccggacccgcggtttcggtcagacccgcccgcgggctggtttcgattagggccagtaggagggcggagcggccgggacgccaggagggaactagcctaagtggggacggtccccgtgcaggagacaaagagcgtccctggagcgatcagggctcaggagcccgacccggagcccggggcgtccgcgctgacttcgggtccccggagcctggggcacggcagggagaagacgacggcggagaaggcgacagcggagaaggaaggcaggctgcaggggcgccgtcggcgcggcggg

SEQ ID NO: 233425 - DNA, 69 bp, Homo sapiens
  chr8:8750451-8750520
  hyper
ggccccggcggcggtaagcgtgagctggcgcaggttgctccgcagcttcctggcacgcagggcggcgtc

SEQ ID NO: 233426 - DNA, 531 bp, Homo sapiens
  chr8:9756017-9756548
  hyper
atgtatgggcggggcgtcctaatggggaatccaggaggatgcactgagacggaccccccactccagcaaataaaacccaacccccaagcgctttcgcggcggggtcctcttcccaggctgcacctgccagcccctctttcttgcaagttctgaggctttccgggatgcacggtggggtcctcgaggccgcaggtactgaagtggatcagagagaggcccggagccgcactgcgggcgccgggcgcacaggctgaccggctgcacggccgggagggcgcggcttctaggcccaggcctgcggctggggagcgctgtgggtggccaggggaggacgtgacctcccgcccaggccttcggtctggctcggccacccttggaagcaaaggatgtaccctcgtctcaattcgtcccgcttcctgcccccgactccggaaaaatctctaacgttgaccgtcgagtgtccatctggcgctagagtgaaatcgatgtgcatggaaaatggaaaaatgacctctccggggacagtccctg

SEQ ID NO: 233427 - DNA, 567 bp, Homo sapiens
  chr8:9760514-9761081
  hyper
aaaaacacagtcacggaggaaggtgttgacccacatacaatgagtcctgagcccagagaaaaatctgcacacacaagcactccgcaatgcgctcccaggcgaccccctccccacgcacaccgcatctgtgctgcacagatctgcttctgtcacagaatcagcttctgtttctctccctgagtctgtttgcatctctaagcccctgtctgtcacaggctgcacacctccccaccccacgggctccggtgcgggacaggcagccggagggagctccagacccctcccctcgcgcccgcggccgctgcgcggaggtctgcggagggcgcctggctcggtcggtcgctccttccttggcgggccctcgccgacccacggtgctcagccagccccattcttggcattcaccgcgtgccttaattgtatggacatttaaatcaaggtccgctgtgaacacggagagagaggcctttctcctgaggaaggaaaggaggaaggaaggaaggaaaggtgaaagaaaggaagaggggtgggtagaagatggaataagaaaaccaggaaaaagaaata

SEQ ID NO: 233428 - DNA, 207 bp, Homo sapiens
  chr8:9761261-9761468
  hyper
tcctgcaaagcggagggggtggagggatgggggtgtgggtggaagtgggagacggaggggtgcctcccccgtgttaattaccccggctcccctcgcccctttccccgcgcctcgcctcccctgcagctccagacaatgaaaaaacaacatcgaccccacctcgccccagcgcagcaacccacccacccatgtcgccctctgcttcgc

SEQ ID NO: 233429 - DNA, 110 bp, Homo sapiens
  chr8:9761648-9761758
  hyper
gggacctggggattcagccttccggaactcgcctgctgcagtcctctcgctcaggtcccaagtggtggaggggggaaaggaagagagacgagagagagagagacagagag

SEQ ID NO: 233430 - DNA, 72 bp, Homo sapiens
  chr8:9762043-9762115
  hyper
ggtaaagggtggacgtagatttaaaaggtcactcgtgtataatgcggctggatccccgggtcaaaaaaaggg

SEQ ID NO: 233431 - DNA, 960 bp, Homo sapiens
  chr8:9762785-9763745
  hyper
acaaggtcttcggctttttgttctccttttttaagagactggccgcagtccccagcgattcagccggcccaaccaaaggcagtggatctactgaaatgaaaaggatcgagataatacacaggcagatgaataaggggggggatgctggaggtgcaggaagcatcctgggagcggccgccacggccaagcccgaactgcttgctgccttcgctggggaaggcgcaggaggcgagccggcgctggtggtcgctccacctggcaggaggaaatgataaccatgataaggaacgtgatgatgatgatgatgatgatgatgatgatgatgagcatgatttaaaaaaaatcagtctccctcttggtgaaccagagcatgcgtgccggagggactgcactgctggcggcggcggccgggggaaggagagcggcgcaggaggcaaaggttgaggaggcagcaccctcggatgaataataacaccgcgccgcgcaagttgcggagccgcctggaaatccagcccttcgcgtgaactcgcgtcgagcgcggattgcaggggatgaggaagaagggggaggggaggggagggtggaggagggagggggaggggtagaggggaaggcagagagggacagagagaattgggagccttttaatttttccttaccaagccctaatctcgtgcgccgtcctctttggctgaggtcgagctcctttttaaaaattattactcctttaaaggattattcaggtaaaggaagccgcatctgctgacggttccgaaaacaagaggattaggagcccgtccacagatccaggcccgcagacccccaccccctctgcaccagcacacgtcattctcactgcccccgggtacctccctctccttcgtgctcggggagagctgtgccaaggaaaatgcggatttggggaaagtgagaagtgggagagctcggaagagcgggaaa

SEQ ID NO: 233432 - DNA, 161 bp, Homo sapiens
  chr8:9764585-9764746
  hyper
tgactcagaatgaatccgcctataagagccaaactaaagacgaccccccgccccagccccccaaccataacccaacgcctgccatgagaaaccttcggactttccaaggggtcagtgcctcagccacgaggggcagccctgacccgcgcggttcacgcaca

SEQ ID NO: 233433 - DNA, 217 bp, Homo sapiens
  chr8:10447760-10447977
  hyper
agattatcctgggcgcacaaagccctgtcgtatccgcacttgccagcagagggcgacacacagccgcctgcagggacagagctggagaaggctccaaggatctgtcccggaccagcggggccaccaggcggctttccctactgcacccacgccccctgacaaagtggccccatctaagacgacagcagaggttcctgggcccgaacatctgagccag

SEQ ID NO: 233434 - DNA, 80 bp, Homo sapiens
  chr8:10587212-10587292
  hyper
tcttcgggaatattcgttaattataatttcatctgtgacagccttcctctgagatggcccaattgtaaggtccagggaat

SEQ ID NO: 233435 - DNA, 97 bp, Homo sapiens
  chr8:10587652-10587749
  hyper
ccgcccgccgcccgcccccggcccccagcccgctcggccgcgcgctcactcacccagcatcttgctgagctcggcgttgtgcaggtccgggttctgc

SEQ ID NO: 233436 - DNA, 467 bp, Homo sapiens
  chr8:10588109-10588576
  hyper
tcggtgtcggcgcgggtcccctccctgcgtcccgggccgccgccgggtccccgctccgacctgccgggaggaggacggagggagggagtgagggagggcctcctccccgcgcctgcccccggcccgcccctccgccgccagggcccgcccggggatctgcgcccggctgccccgggccgcctcccgccccctgccctggacccgcaggtgccgcagagacgcaaggcaggcgctggaggcccgctccagcccctgcctgcccgggccagactccaccgccctccctgcgcgtgtggcctcagaaaatcaacccaaccaggtttcgccgagcccgcctgggtgtgagagacattgaccatgaacccctcagagcagccgttcttaatactccgactgccattcctttcgaaaatgaccgggcttcggccaccgcagccccagtcaacttgggccgccacagaggccgg

SEQ ID NO: 233437 - DNA, 54 bp, Homo sapiens
  chr8:10872634-10872688
  hyper
gcgcctctgatcgcgtgatatgggtgccctgcatctggccgtgttcactcggga

SEQ ID NO: 233438 - DNA, 346 bp, Homo sapiens
  chr8:10873136-10873482
  hyper
agcggggctggctgcgttcgggacccagcgccccccaggccctccaaagactggttgagctcagaaccagaaggagcgagggagcagagaaagccgggggcgggctcggggtaagacaggaagggagtgagattaaggtgagaagtgggaggggaaggagggaaaccgagaggaattgagggtgggctcggcgtatctagagcagtccgcggaggacgctgaggctcgccggggaagtgctgtgcccgaggcgccccaaaggtgggcggcggtgccagctcagacccacgcctctgtccaagtcccgactcctgcggactcggctgcaggcgggctccatgagggc

SEQ ID NO: 233439 - DNA, 513 bp, Homo sapiens
  chr8:10873782-10874295
  hyper
cccgcgccctggatggggagggtctgggctccgcgccgcgaggcagcgcgacggctgcgggcgacttggcgtgcggtgctgaggaccctgggggagtgtgcgccgcggggacgccggggactcggggtcctagtgccaccggacgcagcgggagtagcgcaggtctgggggcggggtctctcgaggcgcagacaacaagctagatcctgagccctctgcttcaaagcgggtagcgccttcgcccacgccttccctcccaccatccctgcctggctgccacccggaagtccccgtccgcgccccgacagcgccgccctccggctggctgcagcgcgggccctcggtagggggcgttccaaggccccgcctcctcgtcactgccacggatgacgacgccccaggcccccggccccgcctccgcctctgcctccgcggccagcactggggagcgtcctggcctgcgcttgctccccaacccctccttgccccgctctgagccggcgcgtccttgct

SEQ ID NO: 233440 - DNA, 358 bp, Homo sapiens
  chr8:10916680-10917038
  hyper
ttcgagggctcccgcggtttgggcgctctgcccctgcgctccccaagctgcgaccccctgcgctggccagcgtcgtgtaggccgggcccagcgcggtcctggcgcctcagaaatctttgttgagcgaatgaatgaaggaacgaatgacggaagtaaaaggtatgagcgccccggagactctggcttgcgttttccctctccagcccccagcgaactggagccgggctggcgcccgaagggagtccccggccgagggcagcgctcagctccgcgtccccgcgccggcgccgagaaggaggccccgcccgacaggcagctgcggagccatctgctgcgcgggcggcgccgctccagtgtt

SEQ ID NO: 233441 - DNA, 191 bp, Homo sapiens; identical to SEQ ID NO: 201298
  chr8:10950049-10950240
  hyper

SEQ ID NO: 233442 - DNA, 213 bp, Homo sapiens
  chr8:11059169-11059382
  hyper
ctcttccgttgaccccgaaacccatcaggttgacccctcggcgtttcagaatccggctggcccgagtgaggcggtccaaagtgatccctggagggggcagtgccagacgttttggggtccccttcctcagcgtcgcagctcacagctttcctcctggagaaacgccccctaacaccctcccggctgctggtggaggggcgggacctctgaggg

SEQ ID NO: 233443 - DNA, 108 bp, Homo sapiens
  chr8:11204655-11204763
  hyper
ggtgacgctgactctgctggtctaccgtcttgggggtcacctaatttttcagcgatgcctcccagctggggaggccaagaagtgcctcgctcaaggtcttccaacacc

SEQ ID NO: 233444 - DNA, 166 bp, Homo sapiens
  chr8:11205543-11205709
  hyper
tgtacagactttgggaagccatcgcctgcggagggtgggaccccacagcttgtccacctgcccaggctgagacctcgtgtcctagtcctggatgccccacgggtttctcgtcccgggcagcggcgcacgggaggagaagactcccggtctgcagtcagacctccct

SEQ ID NO: 233445 - DNA, 198 bp, Homo sapiens
  chr8:11205994-11206192
  hyper
ggcaagaagccaggcgcacacagctaggcgggccgcgggccgcgaccccctggctggtccgtgctctccccctggggaggggtgcaggctgccaggaaaggtgccccctgcgtggccctgggggtgtttcttcctctttgtctcttcttaggcatctgatctcatctcttaagtgggaagagtcggggtggtggaagt

SEQ ID NO: 233446 - DNA, 1608 bp, Homo sapiens
  chr8:11536631-11538239
  hyper
ccaattgtctaaacactacacgaagtggagattcgaggcaattatccgaataattgcgggggggggcactttcgcctgaattatctagataaaagagcgacacaggagaatgtcagtggccctgaaggccctgcctcggatctccacggtcgcgcgaattcgggcaatttttctgaaggttctcagactcggggatgggggaggaaggggacgtttctagaagaaacttaaagggggctcgcgccgcacgactgtaggtggagggcgtgcgccgcgggacgccccagccgggtctgataaagccccgaagccgatctaaggtcaataaaccaggcggcgtcaggcttgggccgagggccgggaggagaggagagtggagccctctcaggctggcggcggaatgaaaaggaaccccgactgctggggtccgagccctgggccgcttgcggggcgcgcagccggggagaggagctgggcgcgcggcctgggccccccacctgcccgaccccagggcagccaagcacccgcggccttaaaagtatcccggcgagccctgagtgggccgggtgctgggcgaacagtcctagccctgcactgaggttggaaaagcgaacggaaagtgacatttttacaggggcgaggttgggatcgggagggagatggagacccccgaataatggaaacgcagaagcctcagagacaccagcaacagatagagaagtgtccctaagaggggaaaatgaggaagagggtaacagtattgttaactggccatgaattttaatccctgttgtgtgtcgccgaatagtttacaaactctttttgcactggggttttgtttctcccactccccgcatgatgagaagaaagaaagattgggagaagttaatcagctcaaagtcacatcgccggggtctcctgccagggggcttggaccagttgctaaaggacttcccgccggagaaggtcttcccaagagagattcccacccagagcgcgcagcccgcggggaaaacataacgcgcgcctgtaaatgacgccgctcccacctaggccgctctggggccgcttaacgtccggaatgtcccgacccccggctcaatctttggtgcaaagcctgagtgggcaggcgggagaccaggcggtgccggtggagcaggctacttcagcagcgcgaggctcggaagatccccgcggacaggcgcgacaacgggccctggagccggggaatctctgcaagtaactaaccaggcccctcggattcattgccactttcccgccctcggcccacgaggctgaggagctccctctcatcgcctctccgttcctggcaaggccgaagccggtttgctttggatgcatttcgatcaatctggcgccacatgggccaggtcacctcggacgggtgtcgcgccgacgtccttcgtggtcgcacgctggtgggccaggaagcccaggctatgcccagccgggtccgagcggcggtcggtggcgtgacctcttgccacgcctggcgctgctgggaacgtgtctcgggtcgccctttgcgtcagagaccccccccttggggagaccggaatcctccagccgctgcgcacggataccctg

SEQ ID NO: 233447 - DNA, 146 bp, Homo sapiens
  chr8:11539330-11539476
  hyper
gccgtgggcagacccggctgatgtaaggactgcagcttttccctggcatactctgcgccttcagatgtggtctgcgtctgcctgggtctcttcccacctcaatctgagatccttgcccctcacaataaattcgtttttattcattc

SEQ ID NO: 233448 - DNA, 873 bp, Homo sapiens
  chr8:11540256-11541129
  hyper
ttactatcctactggtcagacgtagtagtccccgtttgtgcaaaaacacctcttggccgtggcgatgtggggagggagtgtggtccaatagtccttctcacttctcagaggttgacacagaatctaacagttaccctcttagaactactccggagaattcggtaggtagtagctagtttccacaccggggacctgctttgttaaatgctatgggtgtggggacaagatactgggttcagagaaagttctgggaagagtcttgaggtggaaacagcctcggtgcgcgggggtttctcgacagctctctggtgtctcttaccccctaggttttcccagccttctcgccggattgccttggaaagctcttggtgtggtggccactggggtttgctccagcagagataatggaggggctcgctatctaatctggacagcagcaggaacaatccattagacctcagcatttatccggagcgggggaggacggagggacggggctggcgtgctccacctggccctgggaggcgcagagctgccccacaggtggcagggggattaatcagagagttttgtgctaaatcaaaactcaccactgcgtattatgcttgctgatgccggtaaatagtaattctacccattgtgactgttaggaagtagcagaatccttttgggttggaggtatcgttttttttcttttaagaagttcaatgagctttacattgtctcattcaaactcacccatcaaggggcgcggttcgattccaactttcaccgtattccttgagactaggtagactaaatccatccccccattctttcattcattcattcggcaaacatttaccaagctttcctctgcgctgggcgttatgc

SEQ ID NO: 233449 - DNA, 238 bp, Homo sapiens
  chr8:11550500-11550738
  hyper
gctgcacccccggccgcgcaccgaggcttctgccagcgcctgcggggcctctgcgtggagtgggccggcagcgtttttctacccggcaacaaatacatggctttattccacttcttaatcccagtgtctgttaacgatgtggtgttcatttgttcctaaagagctgtaaggaagcttagaaatgattcggcaagctgggcgcggtggcgcatatttgtaatcccagcacttagtgagg

SEQ ID NO: 233450 - DNA, 972 bp, Homo sapiens
  chr8:11554711-11555683
  hyper
accagaagtcccactctaaccggagagcccctgtccttctgtcaaacacacgcacaggactaacgagggggatgagtggaaaccagccgcaaagaaatggagtgggaggttcttctttaaaatccattccgttcagaacacagtgaacaccctttgacagaacaaggactatctagctattccaagctccgtgcctcccctttcttgagactgttgttacaagaaaccgatgatttctaacaataggaacctcccagctggggaagcggtgttcggaggggagcagcgctctcggtgggcacctgctgcagttggggagggagaggtggtcgtggaggccactttcccctccaccgccagggaagcctggtctgtctgaaggggtcctcgcctgcgccgaggatggccggacggccgggcctccggccccagcacagcccccctttcagaggaccccgggtcttcgcgcctgcggaccagaggctgttttcgcacttgggcttcgcgcttccttgacactttcctgtctctgctcgccgcgccaggtcgcggcgcctgcctgggcgtcttctccaactccgggtcacctcggggcgagggcaagggtgccgggccggtggggcgttccggccaccacggggcggaggagggagcggcctttgcggaaacgggccgagctggctcagggaatgccagatctctgggggacccaccagtcccctgatgtgcgcgttgaggtcttgggcctggcggcgctccagccgcgggtgtccctaccataaccactgtcctccccgggagctgggcaagaggagccctggactctgggttgacctcgtcccggtcgggttctctctcctcccacccaggcccggccgctttctggcgtccgtcctctcccaggaggtcctggcctctctctgcgtcgccaagtctcttgactcccagctcgccttaacttcccagggtctg

SEQ ID NO: 233451 - DNA, 318 bp, Homo sapiens
  chr8:11557848-11558166
  hyper
ctctcgtctgtaaccggctgcagagcacggttccgggcgaacagggcggaggctctacgtccactccgtatccccaagaaagagtgtccgaggcacggaccatagcaagtgaaggaaggtaggtcgacgtggccttgcagctgaattcgttctccatttttccttcagcagggacgcatcctgctctgcaccctggttctcggcgctgcgcccgcggaggctcgtgcagggcaggctgcccgtgcgggtgaggactgagtgccgcgcagggaaggagtatcgcagaccggcgcccaggcccagcgggggaatccaagg

SEQ ID NO: 233452 - DNA, 42 bp, Homo sapiens
  chr8:11559701-11559743
  hyper
gaggacgtcagatggcaccccgccagacactaagccccaagc

SEQ ID NO: 233453 - DNA, 784 bp, Homo sapiens
  chr8:11560082-11560866
  hyper
cttttccgcagcgccggcctccgagatccccagcaccccttcagccttaagttcccacgtttcgggtccgtggcgccaattctgctaagtagcaggctaggaattgggggaagtcggagaagaaaccctaagtgtgtcgcccccagcttccgggatgcaggcccgccggggtctagaggggcggctgccgtgcgtccagcctgtgcgcaggcctttcgccgctcggcgccccaggcagcctcagtttcctttcctctgtttgcgccccagtgaacctccgcacctctcattcagggaagagaattccccgcgcagccgcgctcgtttcttcctctgggattttcctgagaatccccaggagttggccacgatcccatggggggtttccttctacccagccccgcgtcctggcctcgtccttaacccccgggttgccttcactcaggctgggaatccacgattgatttcctactacggaagcgggtggcgttcccagcctgctttcggagcagcacgggtttcgtgcagggtgttatcccgaccccttcccccatccctctaatctggcttgagaagcccgtgctggagagaaaaacgcggccttaaaaaaaaaaaaaagtttaaccgaaagcgtgagagccacccgccggctgttatctggggctgaaggctgcggtaatcgatgggttatttttacgcggtaatagggccctgtgattgctctattaacctttagacctgtctgagggactctccggctcgcagccccgctgcgctggggcct

SEQ ID NO: 233454 - DNA, 1795 bp, Homo sapiens
  chr8:11561268-11563063
  hyper
aactagcatccagccgggcaccccgggtgacccagtgccccacacaagatcgagagttgagcccaagaggtcaccttcttctctactggccccgcccctcgcccgccgctgcgggatgaggaccacaggaagggggggcggggagggagaaagggaactcattaataaagctgaccctgggcaccacagcgaacccaatcgacctccggctgggttgcgggtgattccccgctccctggcggtagcacttgggcattttccgcggagaccccagagcctggactttgcctgctgggggagctttccgcacagtcccgcagcctgcgcccagcggaggtgtagccggggccgcgcacccccgccccgcccttgcacgtgactcccacaggccagtcagcgccctagggccgagttgctgggccggggacccgagccgcgagctggggacttggaggcggccggcgcaggggccgcgagaggcttcgtcgccgctgcagctccgggggctcccaggggagcgtgcgcggaacctccaggcccagcaggtagggcttttttcttccctttctttgctccttcccgcggtcccccaaactcggagcttctccgcctttgcttgtctggaggtagagaggtagctagtgggaggaaaagagacgtgcgctactcacttcaccgaaattgcccaacccctgctctgcttttgactttgccttagcaacttctttaagtcaaagtaagacttgggggcaaaacagagaaatattggaagcgcctttggattctttccgtgtgaacttgaacgctttcaatccctgtccccgtgtgcacattctccaacccttgtttgcatatcgcaggccggggcctgggtggtgatggtggccgcgtgaagttaccgggactgacgggcccgggacaggctgcacggcagctcgcacatggagggaagtagacggaggcttgtcgcccaccagcgactccggggacgcagggtggcagtgccaggcagctccgctgggcctcaggggcccccgggagccgctctgaggtgcggagaggctgctgagtggcggaactattcatgccctttctggccggcctcctcgccctcggggctggggtccagggactgaatgctcctctggaagctcaccaccccacctgcccgcgctgcttctacctgaaactggccaagggcccgagcccggaccggagccgtgacttccctccgccggccacggggctgcccggatccgccgggttatgtcgcttggctttgggctcaggggtcaccgtgggcagaggggggtgccggggtcgcggactgccaccaggttgaggaaaggaggggccttttggctggggaaagagcgtggtgggggacccgcggccgatggaatccctggggcagcgcggcccgcaccgtggaggttggggaagcgcctcggggaagtgtttcctgtgttcccagaaaaggaagacaaccgagagcaggtttcaggcttttaaagaaagcctggggtgtggaggtgatgctccgcacacgtctgtgtctcctcccctgctgcggccggcttggttgtgccggctagcgtgcgaccgtcctcctcgctgcaggccgagagcggaggcgtaaacccaggccagcgaggagtgtcctataaagggacggggacttttcggcgcttgcaattctcccattctgaaaaatagatcggaagagggctattggttgattcttgaaaggggagcgcatttcctgttggcctgcgaatttggggtgaactgggac

SEQ ID NO: 233455 - DNA, 95 bp, Homo sapiens; identical to SEQ ID NO: 201309
  chr8:11665928-11666023
  hyper

SEQ ID NO: 233456 - DNA, 152 bp, Homo sapiens
  chr8:11801273-11801425
  hyper
gggaatcccaaactcgctgctgagaacagaacagctgtgccctcgccgactgggacccgagtgacatctactggagcaagcaggggctgcacgtgagcaggcagccattcggtcactccccgtcattccaacacaatcgaatttgtgtagaa

SEQ ID NO: 233457 - DNA, 1015 bp, Homo sapiens
  chr8:12808844-12809859
  hyper
taagtgagaagagccgcgctaaagccaagcgtcgtcgtcacccaaggtactgcgctgatgcgctgcgggccgaccaggtgctcccgccggggcgtcttctcctacgcaggaagggccacgccgagagaggcaggcaacaagggcacggctggaggccggaaggtcaccccgtccccggcggggcgggcgcggcccagcctcacttcccgggcacgttcgggcggggcgattgcagggaacggggcggggaggcgacagtccccggctccgccgcgcgccagcccgccttcgctgcccggaggcgccgcaggcctgggttcccggacagctgagcccgagcgccgcctcccgaaaggtgaaggcggcccggggaggcggggacggtgacgggggcgggggccgcgggcggtctcccgacggctgtcgcggggccagcccaaagcccccgatccccggtagctgcgcttcccgcgcggggcgccggagtagggcgggccaagctggcctgcggccgcggcgggaagaagggctagcgaagcacccccgaccgggcccaggcgccggacgccggggggcgcctcgctgcaacttctctttggaagccccgacacgagccccggcccgcgcgcgcgctcccccacggccacgcgcgcaccctgccgcccgcacccccgcgcgccctccgtctattttttcctcttcctttcatcctcacactctaaaataggtcaaggggtggaagttacacctggtgcagccctcggctctgatgcaaaagcagcttttgcccctggctgcgggacagcgctgtgactactcgcaacgggagagctgctgccagtcgccacaccgtgcggaaagcgccggcgaccggagcactgacaatggtctgcataggggagcggagagaagcttctgttgcgccctagatccgctgcctcggcgcccgcccgcagggaggagggggcgcgacaggtcgtctagcgcgtgccccggagcccgcgcccgggtctgg

SEQ ID NO: 233458 - DNA, 2078 bp, Homo sapiens
  chr8:12989416-12991494
  hyper
cgcagcaaactacacgcagcagggtgctgcagagaggaggggtgcacctccttcggagggatcaaaggctcgccccaggactctggaggtggggacagcgacatggagtgggggcaggcttccaagaagctgtcgccttgttacgaaaatagtcgggtcgggaggcgagcttccttcctctctccggcccaggaactcgctcctcggcctccttgtccgggtcaagggggtgggcatccccaagggggcatttcagggacacgattcagcgacccatctccgggaaaaaaaccaaaactgtgtgtgtgtgtgtgtgtgtgtgtgtgtgtgtgtgtttcctagcaagaagcacgtttgcaagccacggggcttgctaaactaccccaacactctccaggtacctgcggccaccaaaccgagacttccctggccaggtctgagttaattcccagcgcttaaagtatcttacccaaaaatggttgaaaaggaaaacaagtttttggtgaactttcaggcagtgatgaaaaaaaaaaatttccaagcgccactagggtctaaaatgttcccaaacagtaaactctcccggagttcactttgattttggactaagctggtgaatgacaggagatcagtacgagcgcagagcagtccccagaggaaaggaaggtagaaggcggtgtcgccgcgcccctcgagccagagccgcgagcccccgcccggctcaaggaggaaagtgaaccagggcttcccttcacgggttgcgaccgatccggagcccgcctggtgcgctggcccgcggtccccaggcaaaaggtaatcaagagtcactcctccaaaattcaaactccctccccaaactgcgagtcctgctatccccacaccacctccaagaaaatccggagactctgcagaaagcgtttaaagagcacagaacaggcaccgacttgacaaggcggggtgacactttctcgcggcgggtcccctccgcagcccgctcccgcggccagcccgacggcaagacgcaagtctagcttacgtgttaggatcatggtgtccggcttctttctgcacatcaagcacggcaggcggcggcggaagcgctgtggggaagtcgaggcaggcggaggcggctcggcttccgcgtcgggacccacggcggcacccgagacgcgcgccctcgcggtcctcaacgcatccttgctcgccgctccctgcccctcgtcacggccccagaaagaaagcggggttttctaaagatcgaaacgagggagcgctcagggagttgggcgagaagtccgtgagccggcgctcctgatgcggagaggtgcggccatgtcctggctgggagcgaagcgccctcgctcgggcagtcggagcgaactgtctcccgcgcgctccgccagccgggccctcccgctgggcccaccccccgaggggcggggccagagcgggcggcaccgcctcctccccgctgtctgggtcgcaggccttagcgacgggctgttctccggccccgccccattcccaggctccgccccccgcccctcttcctcgtggccgcagcctcaggccgccctctagccccgccccgcccaggccccgcctctcctctgtcccgccccctcggttccctcctcccccccgccccgccccgcgcctcctccgccgaaggctggaatgtttcccccacgggcctccacgttcccagcgggaagcgccgaaaagtcgccaactattggccccgggtgcaaaggcaaaggtcacaaggcatttacttggcggaggtgtccggcctggaccctagtgtgccttgagcgtcccttctttttcttggtagctctgcgtactttttacctgtcttttatcctggcgggaaccacgtaaatttgcgggaacggaggggaagcggagaggaagggatggtcagtgtttccagatctgtaaaaacgagcgaagggtacctgtcccttggacattggttatttattgctaaaacccgcatgggtacggagccaatgtaggtgataaatactgccttagaggaattgagctttcactcggcacgtgctgggggtcac

SEQ ID NO: 233459 - DNA, 508 bp, Homo sapiens
  chr8:13133802-13134310
  hyper
atgacatccagggctctggccgtggagtccctgatgtgatcgctaaaggacctccggagaggggctcgcagggggcgcgccatcacgtgggccttggggtcccccatccgctcgcagacgccttcagcgcagcccgggcgccgcgaccatgcctcggtactccgccccgcgctgtgctcccggccgcaggctgtcgcctgccttcaggaggccggcattgcggctggcactgcggccccgggaagcgccaactgcaggcggcctcctggcccgcggccaagcgcgcgcggcggccacatctggaaagacttaccctgcgccggcgacaccctcgcggggcgcgcgagctgcagcacagctatccggaggcgtctcgcttcctgtgcaacccaatgactcacctgggtccgcgccgggctgctcctgggtcacatagcaggtcttcccttcaggggcagtccaggtgacctcgcgttttcaaagggaaacgcagcgccgcaggcaagca

SEQ ID NO: 233460 - DNA, 43 bp, Homo sapiens
  chr8:13424066-13424109
  hyper
agatgcatttaggcgggcgtacacgttcggatttgtcacaggc

SEQ ID NO: 233461 - DNA, 1076 bp, Homo sapiens
  chr8:15094312-15095388
  hyper
gcgcggggaacccgcggagcggcggggggctccaggctggtgggagaccgtgtgcggccggagcctccgcagatgccgcccctaccagcccggctcccgcctccccgccccctgcccgagtccccggacctgctcccgcgcctggggctagggcaggctagccgtccccggcagcgggggtacctctccagcccctgcactgcaactgcgggaggaaacactgcccgcgggcggtgggagggaaaaggggtctcacgaagttctgggataaaaacgggctgtcgttgcagatgcctctgtcacgcgaatctccgagcggaaatgcactgtccccgtgccgggctggggcacaggcgggatcggagccgggaagaggaggcaaagtggcggcgcagctcggacaactttgctgggaaagcaggcgacagcgggcagagctggtgccgctgccccccccggggagacgagccggcaagaggcgcagggtctgcaccccaaatgctgccgtcacggaccaggaggaggacggggtggccgctggcgggaggagcaggcggggagggcgcccagcccgggagtgcagcctggctcgggagaaccaccctccgtgtcctcggccccagcaggggcgcctgcgcccgggtgcgcgtccccccaacgccccctcgtcgtcccgcgggaccaccaactactccgcgccgctggaggagccgcgggaaggagaggggagagcagggagcgccgagaagcggccgcgaagcccgcccggacccgcacgtaccttgagctcctcaatgtccaggttcgttgatctgtccatggagcgcaactaaacgaagtggagaggaaccgggcgagtggcacccaaaaacaatctagtcttttagtttccagcttaaactcagctttatcctcctccaagccccggcagctcctctcagtctcattctccgtggtcacgccgcctccaccgggttaaaaataaggaaaataaataaataataatgataattcactttattttacttcctcaaagatttagtgacaggtgatctctaccgcggtgcaacacagct

SEQ ID NO: 233462 - DNA, 692 bp, Homo sapiens
  chr8:15397656-15398348
  hyper
gctccgggcgggagcgcacgccgcgcccccgaagcctggctccctcgccacgcccacttcctgcccccatcccgcgcctttccaggtcttctcccggtgaaccggatgctctgtcagtctcctcctctgcgtcctcggccgcggcccgggtccctcgcaaagccgctgccatcccggagggcccagccagcgggctcccggaggctggccgggcaggcgtggtgcgcggtaggagctgggcgcgcacggctaccgcgcgtggaggagacactgccctgccgcgatgggggcccggggcgctccttcacgccgtaggcaagcggggcggcggctgcggtacctgcccaccgggagctttcccttccttctcctgctgctgctgctctgcatccagctcgggggaggacagaagaaaaaggaggtagaatggatccccttggccttcccctgtgggcgggggcgggccagggtgggccgcgttgccaggcagccctgccgtgttgctaggcagcctggtcgccggcgtgggcgatgccggcgctggggcgggagccgcgagggtgggaggccctggggcgtttccgggacgtggagttagcagggttctgacttgaaaaacgacggcaaagcgtgttcttgactgcttctgagcacctcacacctttcagacccagggcgcctttattcccagc

SEQ ID NO: 233463 - DNA, 128 bp, Homo sapiens; identical to SEQ ID NO: 201317
  chr8:17013473-17013601
  hyper

SEQ ID NO: 233464 - DNA, 918 bp, Homo sapiens
  chr8:17354226-17355144
  hyper
agaatggaaagtaaacggggggaccaaaaccccacttagaactctgcttagaagattcggaaatgcccttgaggtttggtcctcccaggagagcacgaagtttatcctcgcgcgcagcctctcttccccggcccgcgcccaccggcctagcccggggctagcgcccgcccacgtgtgctcggctccaggcaaaccccgctgagcagcggccgcacaccgcccaccccggggattggtcagcgcggccggggcccggcgggaggcgggctcggggtcgcgttccgggagcgcggaggaggcggtgccgcccggccccgcgccccgcccccgccccgggtggctacacagaggggcgcccacgtgcccagccctccttctgcagcgcggccggcgggcgctcctcttcgcgggaccagcgaggcggcggccgctgctccagcgtcccccagccgcgggcccccgacgcgctgcagccggcagcccaccgccgccttcttggcgcgaccccaacccagccccagtaagttgctaggtctccagccccgccgagaggccgcgggcgaggggcagcccggacgctggggccggcggggaaggagcggggcgagggcgccctggggccggcggggaactagagggtcgagggctcccggggacgagtccagctgcgcgcagctgccctgaggccgcgctccagcgagtcttcgtcagggagtcggggccgtgggctggggctgaagccgtggaccttcgtcctcggggctgcgccccggaatgcgcctcgcctcgtccggtccctgtgcagccggctctgcccggggacttcggggaccgctggaactgggagaggggctggcacggcgacttcgcggggacccttcagtcactatttccagaggagctcggcgcacccctctc

SEQ ID NO: 233465 - DNA, 36 bp, Homo sapiens
  chr8:17434527-17434563
  hyper
ggaagaagtgctgcgcaccgcggctccgccaggggg

SEQ ID NO: 233466 - DNA, 123 bp, Homo sapiens
  chr8:17434803-17434926
  hyper
gcgctggaggatggtgagtgactctgggcgcggggccacctagcttgtgccctgactttagccgggacccgaagcccccgccgccctcctgccagctcttggtctaacgttcggccctcggtg

SEQ ID NO: 233467 - DNA, 1491 bp, Homo sapiens
  chr8:17657928-17659419
  hyper
gtatgtgtaactacgcaggctaaatgaattaacctcttccttcctagtcccaaattactccaagtcaaaaatcaacaaacaacttggtagaaaggagtacgtcttcaaaaaagaacaaaaacgttcctcagtgaacacctaagtccactaagcactatagagtagtcaataaggtcaccttaattaagatgagatttttctagagcgtgaaaaagtgcaaacaagctgcagaaagtagcgaggcgccacgaggggtctttgggacctgcagcaaccctattccacccgctttctcggccccgcttgcttctgctgagaaggggccctgcgagaaggctgggaccgccgggcccgggtgggcggcgtaaggagtccacagtcaagcccctcggtcactttcaaggtgacagcgacgagatccgcatccgtcccttccgcaggctctgcgctggcccacgtgagacccgcctccgctccgccggcgctgccgccccctttagccctcagcttcggcccccaggcccctggaacgccccctcccctccccgaggaccggtcccgtcaccctgggcggcgcgctcgcctgtcccctccccaccccggccgccgggcagcgggaacagattccagcgcgcacttacccgcagctccttcaagcgctccgggagcaaagacgcagaggcggggagggctggcgccctttgcaccactggcggggtcgccgagaacccgccccggaggtctcgggggcggcgtctgcacctgggggcgcgcggcgcggcaccaccccacgcctgcggcggctaccaggcgggacccggagccccggcctccccgcctccccgcctccggggccgccagggggtggagcagggcggggagttcgggaaacttgtaaatagccgaactcgggcctcccgccccaacccggggcggctccttccgaaggctccactccagcggctcgctgcgggagaccaaggccagccgccgtcccaggggacggccctcggggaacctgaatgacgtgcgaggccgtacctcggggcgctggactccgctcgggcgctcccgctctccgctcccgctctcgggtcccaatcccgacgctccgcgcgctcccggactaagtgcggacgcgccccacgccccccggcgccagcccgggacagcgctgcacctgttgccacgtgcgacgcggcgctcagcggctgccactgccgccggcgcacctggctgcaccgcgcgtcccgggaccacgctcgtccccgcaggagcccggggctccgccgcacccagcgctagggcccaggccgggccgcggtaggtgggggatctgactcctgcttgcctctggccacctgcaggccgaggggcctcgcaccgcggggcgtatagaaggtgggaaggttgcagaattatcagggcggaagcttgcaaggaaggagtcgtgattgtctcttagaagggctgattcgcagtctgtattat

SEQ ID NO: 233468 - DNA, 91 bp, Homo sapiens
  chr8:17780092-17780183
  hyper
cgcacagcgcctccgctctttctccacgggctgagggatcaatgcacttccgcataggcctagggccccacgctccgcgatcagcgccgga

SEQ ID NO: 233469 - DNA, 294 bp, Homo sapiens
  chr8:17940760-17941054
  hyper
ggcgtcaagaggctcggacgttacgcatgttcagtaaacaacagtgtaacctctggctaaatattttctcactctaggtctacttcctcttctgtaaaatgaaagagtcacgctcgtccctcactgtctcttgcagttaggaagtccgtagccctgtgacttgctcgtgggaaagagccacgggacaggcgatcccatgacttgggtgcaaaaggccacagggggccctttggggcctgctctgggctgctcgcaccgcccaagcttgggaccactcagcgtttcccacggccc

SEQ ID NO: 233470 - DNA, 40 bp, Homo sapiens
  chr8:17941543-17941583
  hyper
ggcgacgcaactccggcccggcatcgctctagcagccaac

SEQ ID NO: 233471 - DNA, 373 bp, Homo sapiens
  chr8:17942225-17942598
  hyper
cctcggtgaaaagcgcgctgagacttgggtaggaggcccggtgggacccgcgagctttctctcccagcccgatgcagcagttcattaagcggctgtgtttcctcctaactggcgaaggactcaggtgggcggagcagagctcagcttgggaggaggcggacgcgagtagctcggcagggggactcgcttggctttcgtgccatccgtggacacagtcgcgcgggtaggtgaccgggttggatttcaaagtccagcaggaaatcctgccctctgggttgcacttcctggatgagcctctgacgtctcaagcagcattgttttaatgctttgatgaagctcagcacgctgccgaaatctcggcagtattttttct

SEQ ID NO: 233472 - DNA, 529 bp, Homo sapiens
  chr8:18870212-18870741
  hyper
atactcaattacaacgaacgcattgaggcatttgttgccagaatcccacttacagtaattttccagatctccgtcttccctacaccaacacctggacccactcaagagttattctggagcggaaatcctggatcccgctatcgggagaaccagtgtctagaaaatgaaatcgtggtgcccattccatcctctgcctagtgggcgtttaacatcctttgacatcgaggggaatggcaaaacgaaacatttattatttaggtcaccaacaacattctaaacccacgtcctctaatcggtgttaatgtgtttaaaaaaaaaattcagaacatcattcgccagaacggaaagctgaaaacggcggataaagttaaatgcatgtaaaacagaatgacttaaacatctgtaaaagctcctgggaattgcaccgaataatcttcccttgtccgtttgctcgctcaattcaagtttgtttagtttagtctttttttctttctttctgacagaaacgtgatagtccctaaatacaagc

SEQ ID NO: 233473 - DNA, 376 bp, Homo sapiens
  chr8:18870921-18871297
  hyper
aaaaatcgcaccctgcacctatccagacagcacaaacccaggtggccccgggatcctgggggacagagcggcgacaaagcaacacaaaccccacgtcgaacagcggcgccgcgtgcgcaccccgcgcccgcgccccggccccggagctcaccgctgcgctccttccttccatcttccatcgccagcccggccgcgcgccgaaaccgccgccgggcgctccggggccgcagcctcagggcgcgagtgccggcggccagcgccgcgtgctctttgttgagctcccgggactgccgagaggcggcggcccgcgcgcaccctggcggaggctggcgaggctgcgagcccgcggcagccgcccgcccggcccccagtaacg

SEQ ID NO: 233474 - DNA, 454 bp, Homo sapiens
  chr8:18871513-18871967
  hyper
gcctcccgcagccgcgcgcccgccctgggcccagcctccagcccgcgagcgaaaacctgcctgttgctttgtcttcttccttcacagttttcccaccctgagaaaagtgagaggtgctttccctggtgtttcctctcaggaagggccgtgtgactggagccgcgagttgggcgccgtctcgccggggctggaggtacgcgggcttcgggacacgcacctaggcgtccctcggggtcccggcctctctgaccgggctcccccggcaccgatccgcggccggagcgtttagtcccggggacccgtcgagccctgaaagggccatttccccctgaggcgagtccccccaggcgccccgcagcctggcctcgggactgcccccaccgacagtgcgtgcgcggggagaggtcacttaaaactgcattttcgaacattagtgccccggacccgcaccttt

SEQ ID NO: 233475 - DNA, 70 bp, Homo sapiens
  chr8:19125228-19125298
  hyper
agcgggtctcctttccgactgtagccctcagaggacttctgtgtattcccggagccggtggcttccagag

SEQ ID NO: 233476 - DNA, 1009 bp, Homo sapiens
  chr8:19171054-19172063
  hyper
ccacgcagcctcgccgacgagtggccctggagagcctccaggcgcccgggtggggccgcgattgcgccccgccagtcaccccggcatgtgggcgcggcggggcggcgcgggcgggacggctacaagagctgttttgcgtccgggccggagtatttgctcagcccgcctgcgccgcttgggacgcctctgcctttccctccctcccttccccgacggcttctggcggccaagtggatgtggcgggtgatcgagccaccctgcccaggggcgcccagcactggtaggtgctgggggtggggcgaggctttggggagagtgtgcgtggggtgggagtagggggaagggaatttcctcggaggttgcatgggtgcatgggaggcgcaggggccagagcgggcgggcggaagcctcacccccgcctccaccccttcgcggcgcccggggcgggctcaggtgcggggttgggcggcgagagcggccgcggcgggtgtccggtgtccggtgtccggtgtccggtgtctggagccgctggctaggtgagcggcggtccccggggcctgggggcttgcagggggtggcgggggaacttcgagggagagggtctgccggggctgaggaccttcggggaagttctggaatccggcagggacacgcggcgcgtgcttccacccgcggggagtgcaggccccgggagggtccgggctggcctagagtttctagactcctagcaggagcacgtcctcgacttgcgcatggaaatcttccaggagggaagtcccgggaaacggtggcagctggcgcagcacccccgcagcacgttccccgcgcaccggcacccaggggcgcccccacgtggggtctgggagcgcgcggaggccagtgcagcgccgcctccctcgggctgcagcggcggggctggcccagacccagaccgggtgcccagtgcgctcagccaagcggcgcccctgcccgctcctggactcgggggtcacgcgggcaccggaaggag

SEQ ID NO: 233477 - DNA, 1309 bp, Homo sapiens
  chr8:19614011-19615320
  hyper
tgcaggaagtgcgacggaaacaaacaactttgcctccgcttcctacagctttcctctcctccccgcccttctagcccccatcccaccccaagatcatgccctcgaacagcttctgcccaccgatcgcacgtcccctgggcatgttcgggcagcggtgaccctcagccacatcccccactagcccggtcccgggcaggcgagcgcgctgcccaccggccaccctcgtcacgccccctccaccctctccatcccagccacaataatacaataaccgcagtcatcgcgcggcacgtggaaaggctacttttcagtgggttttgcagaaagcaatcagacagcggaaggccacgagaaacgctggtgaagccaaaccgaccccgggagcgcagcggccccggaccctccctggaagctccctccgcgtccccgcgcgcccacctggaggcgccgcgccctccgcctgccaagccggtccccggcccctgcccgtgccctgggcccccggcgggcagcggcggagggaggccaggcgcggcaccgtcctccgcagctgcacgagccaccccgaggtcgcggggtgggcgggcgcgagctaggcgcgcggggctgtggggatctgccggcgccactgacgcccccgcgcggcacaccgcgcccggctggcccgggaggggacccgactcacccgaagcgccctgctagctgcccggcccggctccggccgctgccgccgtcgctgaactttccctcctgcgcggccgccgcggactcggctccacctcccgctccggcagccgcggagcctccagggaccccgggggcggggagcagcggcggcggcggcggctcgggcgggcgggcgcaacagcggccaagcctggcgccccgccgcagggtaggtccggcgggggcggccaaggccgggctggggtcgcggttggccgcgtacctccgcgtcacccacggcctctctgcagtgcgtccctgcgcccgtcggagcggcgccctggccgaagcctgtcactctcggaaggggccgcgctcggacaccaggggcggtttacgcgtgactggacaccaagagccggagaagtttagagactaggacactgtggcgtggcccgagttgcaggagagaggtgtccaatctccatggggtccttactcttgcaggacagagttccccatccccctgctccacccgctctgttcccttggctgccctccccgccgagcgccgacttccatgcaaaaactttgtaaatcgcacttcggggaattcacgctttagtcgcggtctctgctgccc

SEQ ID NO: 233478 - DNA, 163 bp, Homo sapiens
  chr8:19674699-19674862
  hyper
ctgcccgctcccgcgcatgctccctgacttcaccaaggtcacgctgcagcccgcaggaatgaaaatccacttctccgcattttcgaggtgacctggaagcggttcaactgctctggcttctcagaagaggaggggaccgggcggtaacgaggagccaagggga

SEQ ID NO: 233479 - DNA, 508 bp, Homo sapiens
  chr8:19796823-19797331
  hyper
ctgccatcccctttaaagggcgacttgctcagcgccaaaccgcggctccagccctctccagcctccggctcagccggctcatcagtcggtccgcgccttgcagctcctccagagggacgcgccccgagatggagagcaaagccctgctcgtgctgactctggccgtgtggctccagagtctgaccgcctcccgcggaggggtggccgccgccgaccgtaagttttgcgcgcaaactcccctccacctgcagacccggcgggtggccactgccacccgaactgaggatgagaagaaggaagttggaaggggcggtggatgcgcccagggactctcccagcctgggctctagccccgaaacggtccccggagtgggatccaggaggggccgggagggaatctcctcccgatcgtgaagcggcggcgcccagttcccgctttttctctctgccgggttcccgcgctatcccttccactctggctgggaccgcgttcccgggctcgcaggct

SEQ ID NO: 233480 - DNA, 86 bp, Homo sapiens
  chr8:19797511-19797597
  hyper
ccgactgtggccccttctggggaagccggggcgcggggaggcgttccgggcatctcagccgcacggggtacgctcgccctcggcgg

SEQ ID NO: 233481 - DNA, 147 bp, Homo sapiens
  chr8:20054942-20055089
  hyper
ttgtcaacggggccgcacccgagctacccgtgcccaccggtgggccggcggtgggagctcgggagcaggcgctggcagtcagtcggaactacctctcccagcctcgcctcagtgagtatcagagagtaatacgtctccggtctttgc

SEQ ID NO: 233482 - DNA, 215 bp, Homo sapiens
  chr8:20126214-20126429
  hyper
agggggtgggggaacgtgggcaacatgaggaggggctgaggttgctgaggtgctggggggagaggctgctggtgggttgggagcaggggcccacgcagctctcaattaagtgcacttggattccatggaaaggcagaaagtgaaagggaaatcgctggcaggctgagtcattccatcgggtcgaacaatcggaagcaattcggcttcccactgct

SEQ ID NO: 233483 - DNA, 241 bp, Homo sapiens
  chr8:21776837-21777078
  hyper
ggtcccggggcggcgacagacctcggcccccatccaggagccctcaccacgcaaacgagcagaaggcagcgccaactcccactccagcgcccgcctgccggagcgagcgcggcccctttaaaaaccatgtaaacaaagctttgttcccccagctgcccctccttcgcgctcccccggcccgctccttcctcccacccggcgtctccgggccgctgacgttgcccgcgcctttacgccgtcc

SEQ ID NO: 233484 - DNA, 363 bp, Homo sapiens
  chr8:21779567-21779930
  hyper
taacactaatcaaacgtgaagtttataaaggtgtctgctacagattcatgactgattattggagagttgcatttgttgaactaaatagtcgagtcattatgttatctagtgcttttctgaaccaccagggtgagcagttttttcataattgaggctgagtgtcatatgattctcgggttctctcaggctgatgtcttggatatctctcttctaaggatatgtattttatggacgattttaagtgctataaaactttagtaatgggaaaattataatatttggattgccctttagctctgttgatgttacaggcaagtgtctgtagaagtgtgcccttaagcagctcctcgatgtgatgggttt

SEQ ID NO: 233485 - DNA, 577 bp, Homo sapiens
  chr8:21881968-21882545
  hyper
ggtccgcaattggccgggacagcttctcacgaaaggtcctgggccggcatcatcagcctcacctgggaactggttagaactacaaattccctcggccccacccagaccgacgccaagggcagctgtggagtggggcgcggcaatgcgccccttaacagccctccaggtgattctgccgcgcagaggaggaaagaatgggagaagggaaggggagagggaggcggcttctttgcgactaattggacacctgcccttccccttcccaggcttcttagcccgggcttggacagccgccttccggccagaggggatgaggttgcgctgcgctccgggagcgccgatggcgtgactggccccgcgcggagcagcgacagtaaggctgtgtggggggagctgggacctaagccgcgcgcacacccctttctctgcgtctggtggaggtgcacagaggcttttgagtcaggcccaagcgcagccaggtgacctccccgcggcctttcaagcctgagctcggtggacagctccctctcccgtgagtcccgctgtcctgtacgcgcccggtcgagccccgggctgc

SEQ ID NO: 233486 - DNA, 913 bp, Homo sapiens
  chr8:21987761-21988674
  hyper
ttttctggagccaccgctccgccgtggtctggccgcgtcgggcttcctaactttcaggtgtcagaatgtgtggcccagcccacaggggcacggggaacacgctccgtacgggcaccgcaggctcggctcagaaatcccccgccacgagtgtccccagacggcgcgctcctggcgcttacctgggcttcaccggccggtcgcggcgcgggcggtggcggtcgtcgtggccggcaccgggcgcctgctccccatgggccagctccggggcctcccggccggcgggcgaggacgcgttctcccgctctgtctgctcagcgcgctcgcgctctccttcccccggggcggcgggggcgctctagggccgcaggttggaggggtcggactccgggatctgcaggatgcggcacacggcgcggatcggccgcaccagcttctgggccgaggccgtaggttgcgccatgggacgccgagactccgtgctgcgccgcggggagggccgggccggggctagggagcgggtgcccccggagggagagaaggcgccgggccggggggaacacgcgccccgggtcggagatggccgagttgggggaaaggccgaggggccggggaagggggtcgtgcctggatggtgggggccgatcctgggacccaggagagaggcaccggcgagggcgcagcaccgcgcagcgcggctaatggaggtagagcgcggcggagagcgcagcaggacctctgatcgccatcgccagaagcgcaactgagagtggggaagctgctccgccggtttcctcctccagcaccctgcgggaaacaggagcccgtgattcggcggccgcgcctgggcctgccccctcccgggccccgggggcttccgccaacgccccggcgatgccaccggctgcgcacgggg

SEQ ID NO: 233487 - DNA, 219 bp, Homo sapiens
  chr8:22089410-22089629
  hyper
gtcacgggcagtggcgtgcgcttgctcctctcccggctgccaaggaggctgcttccatgccccgcagccagctcctgtctggctgtgcagcgcgtcgctgctgcccctggtgagacgatgttcccagctgagcagcgcaagaagagaggcaagagcgaaatcaaagcagcgtggaggagagagaggcagagaagggagaaagaacgagagagccagacc

SEQ ID NO: 233488 - DNA, 328 bp, Homo sapiens
  chr8:22102411-22102739
  hyper
ccacgccaccgcccggaggccaagacccccgagcgccgcagcatagcgtagcccagaccagtcacctcatcctttttcgccctctcaacccagcttttcccgactccgggaagaaccgggaagagaaggcggaggggagcgaagcgccgcctgataaatactgtggcccagtcccgcccccctaacgtcacttccgccccgcgccaagatggcggcgcccaggccctgccacgcagacttccgcccggcgcggagaccgaaggctggcggctggtcgcgttgcaggtgaggttgtgacgcgcggtgtggagccgcggcccgggtgcgt

SEQ ID NO: 233489 - DNA, 451 bp, Homo sapiens
  chr8:22224959-22225410
  hyper
ggcggaggagccccgcaccccaggctggggcagtgggtgggggcggggacagccctgcgccgaggaccgggcgccgctcccgggcaccggcacacgcccggacggctgggtggaggctgcacctggccgtggtgccgcgctggcgaggggagaggtcaaggcgcggcctgtccgcctggagggtgcgggatgctagagccgcagaagggtgcccagagcgtgggtcgccgcgccgaaggctgagccaggctcccggattccccgcgcggacacggacgcagaacgcagacagtaggtggccaatccgaggggcggctcttggggcggctctatggggctctggggtctggactttgcttttcaggagctgcgtccccgggcccccgccggtccatctcccctctgaaggtacatgtacccaatcttccggctgagcgaatctccaacctgg

SEQ ID NO: 233490 - DNA, 244 bp, Homo sapiens
  chr8:22298226-22298470
  hyper
ccaggaggcggcgcggagccgctgcgaggccgcagggccgggtcgcaagatggccgggccggcctcccgcgcgggtcgcgcgggccacgcgggcgggtttcagatgttccgggcccgggtaggggctggcaggagagaaggggccggctgcggggagggctggctgagaagaagcgaaaatgggcggttagcagcagggacccggagccggaggagccgagagcagcgcgtgcgccgagctcta

SEQ ID NO: 233491 - DNA, 235 bp, Homo sapiens
  chr8:22298921-22299156
  hyper
catgtccgggaggcgcttccacctctccaccaccgaccgcgtcatcaaaggtgcctggcgggccgggccttcctctgggacccgcgggaaacggccttcggctgggcggcggctcggggcggagggaggctggggccgggctgcgcccaccctaggagggctcggaggggtgtagacagagccgggcggcagcctccgagagcagccacccggacccggcgttttctgctgcacc

SEQ ID NO: 233492 - DNA, 442 bp, Homo sapiens
  chr8:22299371-22299813
  hyper
acccttttttaggacgtataccatgtgccttttgacccgctttctctagatcattgcaagtcactgctattactggaataaacttagtatgaacaagtcagataaatccattatatgatgtttaaaataagtttacggagctcttgacagggtaatggtattttattttccctttggttataaagacttggagaatgacgttttctgattcatatgtgtacctgcgttagatttctgttgttgttataagaacaaaatgtaaagggctctttgctctctaaatcttgtagagttttaggttatagttgtttctccctttaaactaagaagatggattacacataaccactaatttatgtgctgcttttattcagccgtaagtcttaggcacaacccttctctctgagattaacaatcggtttgaaagcgctattttgtaaga

SEQ ID NO: 233493 - DNA, 70 bp, Homo sapiens; identical to SEQ ID NO: 201331
  chr8:22419405-22419475
  hyper

SEQ ID NO: 233494 - DNA, 133 bp, Homo sapiens
  chr8:22436799-22436932
  hyper
gcgcccctgtcggcgcggaaccctggcctcgtccgcggcccagctccctggagcctcgcatcagcgggggcgcccccgcgagctgcgctctccccggccggagcgctcctcctccagcccccagcccgcaggg

SEQ ID NO: 233495 - DNA, 155 bp, Homo sapiens
  chr8:22437592-22437747
  hyper
cagtctgtactggtgccagcctgttccttgacccgtcactcctgcttcctgagccctgctctccctaggccactcaccagccctcccccagagtggagaggaagtaccgtgtgctgtgggttttggggacaggaagcaagcgctagtgggactga

SEQ ID NO: 233496 - DNA, 226 bp, Homo sapiens
  chr8:22552610-22552836
  hyper
ccgccgcctctcccgccaggctccccactcctatactagggagccacagcgccccccgggctgtcctccgccagcgcggctcagggagggagagcgctgcagcggtcccgcgctccggtcagaatcagggcaggctgcgcctcccgcccccggctccctcccttagggggggcgcgcggccggtcggggggcgtgggcggcggtgtgagccgggctaggtgcggga

SEQ ID NO: 233497 - DNA, 491 bp, Homo sapiens
  chr8:22562110-22562601
  hyper
ccagctatggcctcacgtactgggtgccctttgaaaaattctatgtaaacagaatttttgttaaaaaaaaaaaaagcgtcaaagttcacaagggaaagtctggtctctgaaggcaaagtcacctgcgacatgtcccttacccccggcatcagcccctcttcccctgggtgggctttgccgccctgccaccaggtggcctgagatgaaattctgacagtgagtgaggacagggttgttttcagaagccagccgtggggagagatggcagcggaagaagggtgactgccgtcgcgctgtgggtcccccagccccaaatctcagagccgcactcccctctcacacaaacactctctccaagcggtaggaaaggtgcttctagaccccaaacgaaagaaaaagtatgccgcaatggaaactcgaactaatcttcccctcttgccccacttccctcccgcggtcacacttccggcggccaccacagggtattttgg

SEQ ID NO: 233498 - DNA, 253 bp, Homo sapiens
  chr8:22613669-22613922
  hyper
ccttgcgaggctagcgtgggatggtctggagacaaggtggcaagactcaggcaggagctgaacagctggcgcctccttctggcctcgcagggctggagcaggactggggagggcgggcttgtgcgagaacctctgcccctgggctcccaggatgtgaccctccctgccagagacccttaaccccggacagccccagctcaggagagctaacagtgagcgagggaggctgttatgtaaccgactgaactcctcg

SEQ ID NO: 233499 - DNA, 188 bp, Homo sapiens
  chr8:22722335-22722523
  hyper
aacaccacgggggccgctgggcaccgccgagcgccaggctggtgaactgacccgcagcgcaccccatctgtgtgggaaggtcggggcaggggacccagggcgggatggcggtgctggaccccgatgaggccccttcacggccactagggggcaggagtgcggggcgggcagcacgagggggcaggtgt

SEQ ID NO: 233500 - DNA, 604 bp, Homo sapiens
  chr8:22722724-22723328
  hyper
agcctggggggcggcgggagggggagggaaggtgtttttgcgaaaatgacaaaacaactccttgctcagggcagcccgggaagagcggcgggcggatgggaattaccccgggtccccctgcggcgtctcccgctgcccacccacgggcggtgacggtggcggtggcggtggcggcggcgggaccccgggcctggctgcgcgctccacctgcgcctccagggcgttgggcgggggccgcactttccccgccgcgaggtggagcgcgccaccgcccccccggccgcgcagcgagaaggagcctcggggaagagctaaaaaaggcaaggcgctgctgccggtgccggtgccgcagccgccggggaaggaattccctccgcccgggcgcacgcggccccccgcccccgccccatcctgctcagaaaagcctcggatgctgcccgggaggaggaggcaaaggaagactccgttccagccacctcccgccgcccggatcccagaggaaaggggagaggaatctccccaccggatctggtgggcggaagatgggccacgcgggaaggagatcggcggccactcccgggggcgcgagcggcggcgcctagag

SEQ ID NO: 233501 - DNA, 31 bp, Homo sapiens
  chr8:22926895-22926926
  hyper
tccgctttccaggcgcgtcttgatcttctcc

SEQ ID NO: 233502 - DNA, 518 bp, Homo sapiens
  chr8:22960452-22960970
  hyper
cctctccacgcgcacgaactcagccaacgatttctgatagatttttgggagtttgaccagagatgcaaggggtgaaggagcgcttcctaccgttagggaactctggggacagagcgccccggccgcctgatggccgaggcagggtgcgacccaggacccaggacggcgtcgggaaccataccatggcccggatccccaagaccctaaagttcgtcgtcgtcatcgtcgcggtcctgctgccagtgagtcccggccgcggtccctggctggggaagagcgcacctggcgccgggagggggcagggagacggggacacggcagggatgcctggccctggtcacctgcggccgggcatgtccgggcaggacgaactcgccgtcggagtcaggggaagaactgggtccccgggctgggcaggagggacccggccgcgagggagcagagaggcggtccccctggctgccccgagcccgcgaagggagggaagttccagaatcgagagagggagggagtcaagg

SEQ ID NO: 233503 - DNA, 95 bp, Homo sapiens
  chr8:23021630-23021725
  hyper
aggctgggtctcccccagcacctccaggagggcccaggttgtgtgggtgggtgcatggacggacaggaactggctctttccggcagcggtgaccc

SEQ ID NO: 233504 - DNA, 346 bp, Homo sapiens
  chr8:23082555-23082901
  hyper
tagctggtggtggcgccatcctgccaggtcaatccaagaagcagcgtgcttggctatgacaagacagaacttcgcattcggagttcagggcacccctgaccccgcccccttttcggggcacctgcggctcctgttggctaaccctgaacttccttcctctgtgaccgcccttgccgctctcagcttctgttcctcaaccacggccgccgcgtggatgccgctgcattcggagtcgttttgccacttggtcccagcgccaggcttctcggtcgggagttgacctcagcctttctgtgacccagttcctggcacccagcaggcgctcggtggacggatgggtggcgga

SEQ ID NO: 233505 - DNA, 1190 bp, Homo sapiens
  chr8:23260563-23261753
  hyper
catctctattccagcgctgattcctgggacacctcgagcaggcagccacacccagagggcttccaaatttgggctggtgagaaggggcgcggtgggcaaagcgcctgcgtaaaagttgtaggcacttcagaccaccggaccaacggctcaagattgggatcagctgtagccgtgggttcgctcgtgcccgttctttccaactccagggcttctaggtgatgaaggcgggagagggtccctggtccccggagaggcagggcgacttgggagtgcatacctggcgtgccgagagcgcctctgctcccgcaggactcacggcgctcccgcgctcccaacagcctttcgagcaggctgggggttgaaccgggttcaagcagtggacgctacagctcccgggcgcagcccccggggtccccgcccccactccgtcccagcccagcacgctctacatccccaaaaccacagccccgagggcagtcactgtctcccgacccgtcccccgcgtgccccactcctcaaagccagaattccggagacgctgtccctggagccacgctgcactctccaagacgcccagcacacaccgagacttgacgggctctgtcccgcctgattacgggcgctcgggacgatccagggacccagcgcctcgctccccgggcgcgccagcagccgcgccgcgcccggcccgtacgaggtggggttgggcggggccgcccggggcggcaggaggacccgttagcctgcacgtcctcgcatcgctccccgcaagaagtctttgggaacccccaggcactgtcgagaggcagccccgcgcaggacgaagcctggagaccccatagggacgctcccgctttctcgcgaaccgcttcggggagggggtggcgcgggaagcgctcttacttggtttcagggatccgcagtggccgggctgggaccgcgctctccacggtggtccccctccgcttccgccgccgctgagcccctttctcgagcagagggggcggctctggtctccgatggctggagaaagcaagcaccaagcgtaggtagccgcgcgctggagtcgcgcgtttactcttttcccccttacttttaactagaggaggatggcaaacccctccccggacccacccccttccccgaaggcggccgccgcagcaggcccggcctccggcctcttttgttgt

SEQ ID NO: 233506 - DNA, 144 bp, Homo sapiens
  chr8:23386286-23386430
  hyper
cacacagggaggcgggtccccactgtcccgcacaccaatggcgcggcggccgccggcctcttggttcccggcgattggtgtctctggccgctgcgctccaccccagcccgccatggcgtcaggcgccgcggccccggggaggtg

SEQ ID NO: 233507 - DNA, 44 bp, Homo sapiens; identical to SEQ ID NO: 201339
  chr8:23539860-23539904
  hyper

SEQ ID NO: 233508 - DNA, 47 bp, Homo sapiens
  chr8:23540842-23540889
  hyper
caggggatgagcacgcagtcactgcagccgcgcggtaccgtgagagt

SEQ ID NO: 233509 - DNA, 983 bp, Homo sapiens
  chr8:23559444-23560427
  hyper
agcaggttactcttcgtgaacttcccggatcctcaagttcccagctcttcagcccccttcccgccctcccgtcctcttctctttcttccccaacagctgtcattaattggaggatggtaggcccgctagatcaccatctccattcaccgccgatgccccggggctgctgcgtacagatgcaagagcctctcgggcctctggggttgaagccccaaaagtcacgcgccttagtactgctcccacaccccaaactgccagccagccttggtgttcttcagtccctgtgttgcttggtgggtgaccggtggaggggtcttcttttgggggaagaacgtcccaggcggggcctttaactgggtgactgtggtgcagatcgcagtttcagagatccctccggaaagaagcgccgttgggtagcagcttccttccagcgccgcgtcccctccttgtcacgacctgcgggcggaggggaagggaacgagcatctggccctggttggcagagtcaagccgaggagcctcaccaggccctgacaccctgcagcgtggctgccagatggccctgcggggtggcattctggccaccgtgtccgaagcccgcgctggccagtggtgtgtgtggcgcaggacccgagggcgcgcccgcgtagcaggtgccgtagcctgcgccgtagggtgctccgctgtagcctccgtagcaagagtagggcgacactgctgcactgtaggggctggggaaggcaggtgcgccgggcccggggcccaggcagggcttgccatcgcgcaccaggacgggcacagctactcggcgcggcgttagagggtggccagccagttccagcgacttgtcctggcgctgtctcttgcatttgtagcgtcggttctggaaccagatcttgacctgcgtggacgtgagctgcagcgcgctggccaggtgctcgcgctcgggcgctgacaggtaccgctgctgcttgaagcgccgct

SEQ ID NO: 233510 - DNA, 385 bp, Homo sapiens
  chr8:23563062-23563447
  hyper
gcaacacaactccccgccagccccttcccttccagcgggctggacacaggtgcgtgggcctcgcagcccggcgcgcacggttgcgcctttggatacctgcgacaggactcggccagaaccgtgtcccagggcagagaaaaccctggcaacctttaacgttctccctgacgcggagaatcctgcgccaacggggccttccacttcgggagactcaatcgccacccggtccccaactttcgtcttccagaagaaaaatccatgaggaggaatgggggggtcccccgaccagaccagcaagaaagggcccagttaggagtgacctcagcgccacgagggttccactgctttgatggccacacgcttttgcaaacggtttgggggtgga

SEQ ID NO: 233511 - DNA, 1410 bp, Homo sapiens
  chr8:23563699-23565109
  hyper
ttttttggactcctcgagagaaaatggagagagtctcgaacccaggagataggaggcgtattttccccatgcacccatggatcacgcccccgcccccacattccccccgtaggaggcaagacctgagcgcttactcacgtggctcccccatccgttccgcgtccatctccaagactgcctcacagggacccccaggaggctccgaaccatccagctttctgtcaccgccgccgccaccagcgttgtgaacctctgaccctcgcggctctgcgtccattctcaggtactgaaagttttccgggctcttccgcacccgcggatgtggcgaagccgcggggcagctccgctcgcgctccagtcgcaggatgtccttgaccgagaagggggtggaggtgacggggctcagcagcatcccgaaggcggatggggcggggccgaggaggtccgggtgaggagcggcaccctgaacttcccgtcttgtcgctgcaggccccgcagacagacccaagctctgggacagacgcccagcgtcccagacagcgccttcctctgggccatgctggtaggcccgggtccagggccgggtgacgagaccgtagccccccattggttctcgcagaaaccacgtgctagctctgcaccttcctcccccagcgctttcttcccgcgcccgtcgaatcctctccagtccccagtcgccttcctgggaggtttggttcgtattgacggttctcaaagcaaagaaaacgtggagagacagtgctgcgcgcggcttggatctccgtcaatacggtactagcgggagcttccgaggtcaacctagggtccacggggaccctcctagtggacatgcggggattggaggtggagtccttgctgtgcaacccgatccggtccatccagcctggtcttagctcaactctgcattcttatggcggaggaaagctaagatagagacagctgggacccgcggaatttgaggcgcgcgctgggatcttacgtgcgcagaggccggaccgcagagtagaagtgagtcttgacccaccagggcctatattgagatggaaacctctctctttgaacagaatccaggtctgcggagtcccgacccgccacttcctaggagcagcttctcagccccaggaccgaggaatgggtgtgggggctacatgtggggagccctcgacctcttaaagggctccgcgaatggtgggggagactggaaggcaatctctgcggcccgcgcaaagtggtcagaggcgggagtgggggtgggggggggtgggcttccgtcgcccttggcgtccccacgttctttttcttcctctcctttatcctccttaaagcggattgcctggagcgtgccagcttgtgtgcgcgtataaatgcggcgcccgccgaagggctggg

SEQ ID NO: 233512 - DNA, 681 bp, Homo sapiens
  chr8:23566785-23567466
  hyper
agtgcctggtctacgggtgtttacaatcatcaccgggcacccacaagagaccctgaacttagaatatttccgcggtaggagttccgcctcgtccttccaggggatactgacgactcgctgggttctcgccttccaagtgctggaggggggaagtagggccacccggggtagaaacctaacgccagaaaccttccagcgccttatcagttggtggaattttcgtggcagacagtcgcgctctacctaagtcgtagaagaaaagacaccttgtgggggacttggcgtcggaagccttgagttcaaatcgtagccctaggtccccagccttgcccttcctggcttgctgcgaggatgaaatgagatttttgtacgtgaaaatgctttctaacccctctcgaggggtggaaacgtctccattcgaccagagtccgggtctgcggagcaatttacccgccgctttccaagagcaggctccccagcgtagcgagtccttgttatggaaagggtcgtttcggctcaggatgcgcgctcccggcgtagacctggggataggggtccctgtcgcgctcgccccacccctgcagggagcaaggccgtccttctgcagcaccgcgccacgcggcgggaatttgcagtgtcctgctttctggtttcagcttcttcgctcgcttgggtctctct

SEQ ID NO: 233513 - DNA, 159 bp, Homo sapiens
  chr8:23568380-23568539
  hyper
ggcgtgaaccaccgcgcccggccctgaacctctacttctccgtggttaacaaaagtcattatttcctgtttctttcactctcctgaaacgaagggattccctccagcaagtaccatactcaacaggcaattcctggtaacctcgcggcttagtgggccc

SEQ ID NO: 233514 - DNA, 892 bp, Homo sapiens
  chr8:23571718-23572610
  hyper
agaggcgctccgcgcgaaccccgaaaatctgtgcaaaattctcagggttaggggaagagcatgggtggagagtaaagtgaagcgggccgagagatttcttgcattaaatgtttagaagaaccaaccagttaaaggaaataaaaatctgccggtatgtaaccgctgggtgggcttctccatttctccgtgtcaccctcccccagccggcctcttagcttctcggctttgggtggcggagaccgtttagttctgggacagaccgtcgggggctgactccgggggtttgcgggcgccgagctgcctccgcgcgcgttccactccttcagcgtggaaaagaaaaccctcagcggccagagaggcggcggggccttcccggatcgctgattcggggagccgcaggcggggacgctgctgggcgacgcttatctgcgccgcgctcgccagctccgtttcaattaacattccagtgccgccgcccgccgcgggagcggagtccccaccagcccctggaaaaataaactctaggcctagcggctgtgcgtgcgtgtgtgtgtgcgtgcgtgtgtgcatgtgtgtgtgtgtgcgcgcgcgtgtgtgtgtctgtagagccgacagagtcccagatcagtgcagtccagagctgcctatccccgggtcgcggttccctgcggggtcgagcctgcgccgggctgcagctctctgtcccactgcgcggcgggatggcagctgctcttttaataaactagcagtcggcggtctgagccctacaatatccccaaagcctggtgtgcgatggaacacatggctgcgtccccagaccccgagaggggagttgcacacacattgctgaccttgagggtcagacagaccctttctcgtctagtttttagca

SEQ ID NO: 233515 - DNA, 815 bp, Homo sapiens
  chr8:23583966-23584781
  hyper
ctgagtacctcttattgcagcggggatactaaggccgggacaacaaaagtacgtcgctgactcgaagctgggcggcgggtttcagaggctgagttcttaacaccagggcacttccttgtagccaccacgcccggctgcatcctccacccggccggtttctagaaataggagataccgagaagttagggtggcccaggtctggccttagatctgcagaggggcgagtgcagattgcgcgatggcgaggctcctgcgacaaggcgaacaccaaggacgcgagctatctggaaccacaaataaaacaaattcagggacggcgttgacaccgcggccacctcctaggcgcttcttggaagggcgcggctgtggtgcccgctctgcccgtggtcccgcttacttttggactctgtcccccatggggctggggtccgggtccgcgccctgacccccgcctccgccgtcagtctctctccgctcccagccgggtggcgccgcagggggtggggttgttttcgtttggccccggggacgtccttgtcattccaacagcctcccggtgcggcccaaacaccctgggccacccgacacctcgcgctgttgacgacgcggggccgccggcgccagggcgggtggtggagctccgcgcaggccggggggaaccgcaagaggagccggggcgggcggcggccccgggcgggtcaggggcggcgcgagcccacacagagcggtgaaactaccaggggccctcccactcttcccggactccggaggagctaagccggcagggatcgctcgcccaccctgagcactttacc

SEQ ID NO: 233516 - DNA, 51 bp, Homo sapiens
  chr8:23585198-23585249
  hyper
acctgcacctgccccgcacctaccccacatctgccccgcagctgccccaca

SEQ ID NO: 233517 - DNA, 144 bp, Homo sapiens
  chr8:24272688-24272832
  hyper
accttttacgccctcgtgtggccataatgttgacagcagcaaagcccaggtctccatcttctgttgaatcctaggtgataacgtaacccgcggagaacggctttactgcaggcctccggctgtgctggtcgagccgtatgtgag

SEQ ID NO: 233518 - DNA, 202 bp, Homo sapiens
  chr8:24770328-24770530
  hyper
tcgccgacctgggcgctgtccttggtgctgccggcgccatagcgagcacaagcgccttaccttctgcccctgcggaagctgcggacgtcccccaaacgttaaaaacgccatatcccactttttatacaaataactaccccggcctgttctctttgtccccttcccgaagccttcaggcagaccgttccgcaaagtctttttt

SEQ ID NO: 233519 - DNA, 2274 bp, Homo sapiens
  chr8:24770944-24773218
  hyper
agaaagggcgctggcgatattcgcaccaagggtgcgaaacgcaatcgggaggtgagaaatggaaagaaggcgaatgcccggctacaagtagcctgggactgaaaggggacctgggggaggggctgggcccagggcagaaaagtccaggttcccatgcggcctgggcccacgtggagcgggcgctgaatcaccgttcagccgcccccctcccctcctccccgaccggtgcccgcagtccccgcctcctcggccgccgcctccacggggcggggccctggcccgggaccagcgccgcggctataaatgggctgcggcgaggccggcagaacgctgtgacagccacacgccccaaggcctccaagatgagctacacgttggactcgctgggcaacccgtccgcctaccggcgggtaaccgagacccgctcgagcttcagccgcgtcagcggctccccgtccagtggcttccgctcgcagtcgtggtcccgcggctcgcccagcaccgtgtcctcctcctataagcgcagcatgctcgccccgcgcctcgcttacagctcggccatgctcagctccgccgagagcagccttgacttcagccagtcctcgtccctgctcaacggcggctccggacccggcggcgactacaagctgtcccgctccaacgagaaggagcagctgcaggggctgaacgaccgctttgccggctacatagagaaggtgcactacctggagcagcagaataaggagattgaggcggagatccaggcgctgcggcagaagcaggcctcgcacgcccagctgggcgacgcgtacgaccaggagatccgcgagctgcgcgccaccctggagatggtgaaccacgagaaggctcaggtgcagctggactcggaccacctggaggaagacatccaccggctcaaggagcgctttgaggaggaggcgcggttgcgcgacgacactgaggcggccatccgcgcgctgcgcaaagacatcgaggaggcgtcgctggtcaaggtggagctggacaagaaggtgcagtcgctgcaggatgaggtggccttcctgcggagcaaccacgaggaggaggtggccgaccttctggcccagatccaggcatcgcacatcacggtggagcgcaaagactacctgaagacagacatctcgacggcgctgaaggaaatccgctcccagctcgaaagccactcagaccagaatatgcaccaggccgaagagtggttcaaatgccgctacgccaagctcaccgaggcggccgagcagaacaaggaggccatccgctccgccaaggaagagatcgccgagtaccggcgccagctgcagtccaagagcatcgagctagagtcggtgcgcggcaccaaggagtccctggagcggcagctcagcgacatcgaggagcgccacaaccacgacctcagcagctaccaggtaggaaccgcggctgcgcggccagcctgcgccagcgccagcgccgcgcgcccccgacacttgggctcgtgcccaggcgccctctccgccgcgctccctggtggccgctcgctagagcacgcgcgccgcagacctagggtatttgcggatcagcgtcctcgcccatctcatcctccacactccgcccccacccacctgccccagctgctaagggtcttgacctttttcagaaacgtgcatcttttccagttctaattttgcacgcttgcacgtttaaagcaggagggatgaattcggtagtggataaatcagcaactttaggatagcttatgcagaaacgcgtgtattctctacttttccggcagtgatcggaagagctctcaaaattggcttcagcccaaagggctcagatgggaatggccaggtcagccatggagtttccccatgcatgtttgtgtcctgttgagacgtgttctaagtccactggtctccgtgcgtgatgtgcccaggaagtgtcctattgtcttactgatcttgtatgttcatttgagaatcgcttagatttaaaagaaaaagggggtgggacggggggctgggagtcaggtgtcagcgaggtttgcagaagtggagggagacgggaggaggccagggggaaggggtagcaagtggtttgcgaaggaagttgctgtttgcaaggatgagtctggggagattctctgtgtctgtttcaggacaccatccagcagctggaaaatgagcttcggggcacaaagtgggaaatggctcgtcatttgcgcgaataccaggacctcctcaacgtcaagatggctct

SEQ ID NO: 233520 - DNA, 1638 bp, Homo sapiens
  chr8:24812770-24814408
  hyper
cggtgcagcagcacggagcacactcccagactacagtggcgcccgcactcacgcccttcaagtgccccacccctcccacacagtggccaaggagccaagccctatccctaagagctgcgtgcagccgcaccacccctggtctccactttctgggcgcaccaactcccccccttgctcgagtcccccgcccccctgtgtttctggccgtgccgcacctgcatagcgctgatgtcggcgttctgcttgtcctccagctcctgcagctgcttctccagcgcttcattcatgccccggcatgcttcgatttccagggtcttggccttgagcagacgacggctctcggacacctcgtccttggcggcgcgcacggcgtcggtgttcttggcggcgctctcggtcagcacggtgaagcggctcttgaaccattcctcagcgttctgcatgttcttggcggccagcttctcgtactgcgcgcggatgtccttgagcgcggcggaaaggtcgggcttggtcacgtccatctccacggagatctgcgcgtactggatctgcgcctgcagttcggcgatctcctcttcgtgcactttcttcagaaaagagatttcgtccatcaagctgtcgatgcgcttctcgagctcggcgcgagcgagcgccgcctcgtcggcgcctttgcgcgcttccatcagccggccctcggcgtcctcgcggctcagcacctcctcttcatagcgcgcctgcaggttgcgcagggtctcctccagcccttcgcgctcgccctggagcgcctgcttctcgttggtggcatcttccgccgccaggcgcaggtcgcggatctcctgctcgtacagcgcccggaagcgggatggctcggagtgcttctggcgcagcaccagcagctcggcttccaggaccttgttctgctgctccagctcgtgcacgcgctcgatgaagctggcgaagcggtcattgaggtcctggagctgcgccttctcctgcgtgcggatggacttgaggtcgttgctgatggcggctacctggctcaggtcgaggttctccagactgggcatcaacgatccagagctggaggagtagctgcggcgcacggacagcgaggaagacaccggcgccgagtagctggagtaagctgagcgtgcggtgctgtagccgctgcgcacgctggagatgtgcacccggggcgtctccacgtagcgccgcttgtaggaggtcgagtagtacggctcgtagctgaaggaactcatggtggcggccggtggctccccggcccgcggcggcggtgggagcccggagagagaggacaggggagagagggaagggggaggatggatggctgtgtgcggctcggcgccgttctgccacccctatttatacgccgggaggctcctgacgcagcctgcgatcgatcacggcacgccggccagtgggggcagcgcgctgctgcagccaaggcgaggattctgcgcaaaagggaaggcggggtcgagctacggcccgaggagctgcggcggtcgtcctttccactttgctcagagggccctgattttctctgagatcccatgccccctcactcatttcccttctgtactcactcacgcagcccctcccgtcctgcattgccca

SEQ ID NO: 233521 - DNA, 701 bp, Homo sapiens
  chr8:24814787-24815488
  hyper
cacacacacacactcgtgaaactgcggcactactgcaggtattggtttagcatttttaaacctttacagcagttaatccgcctgttagtgtttctagattttcacatttcttaactgagaatgaagccgcagatggctttaacgtgttgcagtgtgtgggtggtggagggcagagaaagagttggaaacacagagactgacttgctgaggcagccgcgcgctccgcagccgggagcttcaagctgcctggatcctcaccaagctaaattcctgcttgctaccaccaaccgcagcacatttaaagtccgctttcctctttttacacatgtgtagcacacgacctgatgatttcgataagccttgcagttggctgattttcagggaagccgctgcggccagccctgagcgctgggtgtggtctctggggaggagaactcggcacccaggcttcttcaggaacggatagaaaatagccatagccgcgtgactcttcccccgatacaatgtaataacccgaaaacagatgcagtcaggaatgcatggatttccttcaggaagcacccagatgcttgaaactggcgcacgcggtagcgcacgtggatacaaccctacggtttgcagggcattttcacacgcatgatgttaggagtcccccaggtttcatggagggattgcagagatttacacgaaacacctaagat

SEQ ID NO: 233522 - DNA, 373 bp, Homo sapiens
  chr8:24816311-24816684
  hyper
cttaagtccatcagcgttttttttctttctttctttctttttttttttttttttttttctttttttccgcggctcctccctgaagcctttgactgcagaggaggctgcccagaaaggagaggggcggcgggtgctgcagagggatgcttcagagagaagaaaccattggggcacctgctgcctgccgtcccctgggtagctggaaaaaagaggaacacaggagcaaagggtgagaatgggaccctttcctgtgctgaacccggcccacagagtgggggaaggggcagatccacagcgtttaggcttatcgatctctggtctttttaaatatctcctggcctggccacctcatactccacgacagccttgcttt

SEQ ID NO: 233523 - DNA, 1945 bp, Homo sapiens
  chr8:24857495-24859440
  hyper
tgaactggtgcaggcgtgcaaagaaagctccgtgccacgcccggcagcctccattctttggtagaacgcagcgcagcaatagccgccaagtcccctcctgggtacagtacagctccacagcgcccctgctggtggcttgggaagggcgcgcaagcagagaaagcaagtgtcagagccgggactggcctcccagggcatcgcctacagcttgtgctctgagagtcggggtcatcatagctgcgctcttcgatggacactaaatgcgggacatctgttttacactcaccctccctccccgcgtggcaggagacctacactctcccgctatgcgcgctccgcggcagctgccgctgcaccattcattctctcctgcagaagttcaatattgctgcaaatatcgagaaaaaaaaaaaaagcgctgagagggggagggagggagggaggaagggagggacagcgagccagcggccactgcaaaggggcgaagggcagtcccgcggtcagtaagggccactgaactttctgcccaccggtcatccggagctgaggactgggacatggtggggtgcgtcggcgagggtcccctgaccctgcacaaacccaggggtgtggtgtggatgacccgggaagccgcacccagagctggcggtatgtcaggccatagagaaaaagggatgttcctaggctaaaggagacatcggggctggggatgacatcccaaaactcccagcgccggggagctcaggctcgggcggtgcctggctcccctccccggttcccgccgcaggaggctgctgagtcactcccgcctgagccacggccgcccccagccagccacgcgattggcgggttagcccgggcgcagcgccctcttcccagctcccgcacccccagggcttcccgcaggcagagggtgggagccccggcgagcgaccagttggggcttggtaggaaccccctaaaaatgcgccccacttgtgcattcgtgcatgggcgcattttgggagtaaacaatacataaccttcttcgcattcaaagggtctggactcaaaagagggctcagccttgctcctcgggagcaacccctgttttaaatctgggaaatggtgatgccagtggggaaagggcttctccgggcccggggctcccgagctcctggtgccagccgtgttgctctggcttttgtattttaactccgtgggcttctgtccccatccccatgtaaggccagtgcccccttccgcgttttgccgaaagtatcttcaatgcccgtttaaaaaactatgtctgcgatttctccatctctgctctttcccagttcctctcttttctcttcttcaggccccctcctgtccttcctcatcctttcactgagcgggttcaggccctagttactaccgcaggcaccagccacacccggggagatgtgtgctgttttgtgcaagacgctgcggtcacccagtccggaattctgctggtctacaccgagtgccgcaacaccaccaccacctccgcacacatacgccctccttgaacctcttccccatgaatgctttggcttttaaggaactttgtggcgtttctgctctttcggaggcagctgcccgaggcagcttcccaaggcagaacagggactgactgctgaggttccgcggggtcggggaggtggagaagccagttcccaagtggctcgtcgcgggtgttagagtccctcgttactaaggacgccgccgcccgcgcgccaggcttggggaccagggtgactctgccctttctgggcggaatacgggtgaaggctgtctttggggatccacaggtgatctgtgccgttctcattgtattctcaactctcatcccttccaggttagcccgatccctttaatgcaaggatcggtgccgggaggaaagagagcgtgggccactctggaacggaggctggtgttt

SEQ ID NO: 233524 - DNA, 1681 bp, Homo sapiens
  chr8:25041594-25043275
  hyper
ttgcaccagctctccggtgataaaagttctgctttccaggctctaagcggtggccccgggagattcagtctgccctgagtccggcttctcccgctcgcggcgcgggttcaagctccagggggtgaaggcagaagtcaactgctcattcattcaacaaatatttattgcgcgcccgcttagtgccaggcaccggaggtgccccgagcaagaagccgctctcgctgatccgtttccgctccccaagtgtccggcgcgcgccgtgggagcgcagcccgcatccctcgcccaccggccgcccggcctgggcgtgcccggctcctccagcgcagccctctgtcgggagccggacccccgggacccagcctccggggtatcagccgggtggggagggcgggagaaaggcaaagtgccgccagcgtcaaagtcccgccggcccaggaagccgctccagggaagcgcgcgaggcggagccgcagtcggcccccgcccggcagagcgcagagagcggcgcgggcgggagaggccgggcgcccgcggctcggaggcggccccggcgggcggagggtgcggccggcgggagggactggggcggcgccaggaggggcgcgcactgctgcgctgcagcccggcccagcaggtgaccgcgggcggcgcgggcacgggcacgggcgcgggcggcgcggcgaggaggcggcccgcggagtccagcgaagtttggcggaacatggcggaagcgtctggggcacgcaggagcgcggggcggcggcggccggagcccgaggagctgtagcagccttagtcgccgccgccgcggggcgaggtcgccgccatggcccgctggatcccgaccaagaggcagaagtacggggttggtgagtgcgcgccccaccttgtcccggcccgacccacgcggccaagttcgcggacagcggccctgccaggtttgcgcagagcccggcggaggaccctggccgggggctcggcccggctgcgcagctctgggagccggggacggtaggagtcctctccagggagcgccgatggggaagtcgcccagggtttggggactccgagtgcttccaagtgcagctgagcttcgggaccgtaatcccgctcttgcatcccaatctccggcacttcacaccagggaaatgtcaacgcgaggggggcgcgcctgctgctcttttggggccgcagctctgtggctcgccccggtgcgcccagcgtgggtttcacctgggagtaggtgaccagcccgggtcggcacatggactggtgctcattgtcccagtgctttctgccccccgctttcgtaggttcttctcagacgccccttaagtgaggagttgagggtggaaagccgccctgccccctttcctccagagactgggatcttgatgacagttgtgagctggatggaaactagagtcgtggcgtggaagtgatggaagggacaggaagttgtggcacgggaagggggtggctggcccctggggctgtttgtgcgcactcatcccctaacggagcctgtctggagagggtgtaaggctgccttccggatcctgagtttcatcctggagacgagaagaggacattttattaaggaaactgtgccagaccccgtgctgggcacttggcattcagaacagcggtgctggagagccccgggttgtgcgcaggg

SEQ ID NO: 233525 - DNA, 121 bp, Homo sapiens
  chr8:25316378-25316499
  hyper
gtaagagccagctcgtcgctctgttaggattggttgaatgagtcttttcgaagtttgcagcatccaatagaaaggtgggaggcggagttaaagcgctaagagaagcgttactccgcgagac

SEQ ID NO: 233526 - DNA, 486 bp, Homo sapiens
  chr8:25897085-25897571
  hyper
ccccggaaatgagccgctggaccctctggtggtccctcgcccagactaggagtcgttccagggctttcactcagtaactccaagtggagttactggaaatctaccacaagaggcccggcgggaactccagccgatcccaaacccggcccggggttgcccagcccgcttccaccactaccactgacaagggcacagtggagactttccacgtagccggaggaaactcctgcgacatcagagaggtggaatcccgagtcgttctgagtcccaatggttatgctttaagacacttgcatgaaggggtttccgtggatctacactctgcgcccgtctgcccgcgaggcctcccagctgcgagcgctcagtcctgaaagttagtcccgggaacgcggcgcgccaaggcggggctggagcacctgcgggctctccaggaaggcctgggaaaaggcggctcttacctacacatcacttcgtgcgtcaggagaa

SEQ ID NO: 233527 - DNA, 382 bp, Homo sapiens
  chr8:25898087-25898469
  hyper
gggtcagagacaggcgaagagaagccaagtggcctccggctcacctgcttggtgaccgagtcgatgagcctgacatagaggtcctgttccgtgcggacacctgcggggaccggaggggcacgagtcaagggccgtagagccccttccgggcaccccaaacccttctctgccatgggtctgaggcccaagcagcctctccatgctgagccgccctggagacggtgacctcccaatcccctgtcccaggcaagcctcccgccgccctgggctccatgcgatccctgagagtgatcatggcaaggtcagcgcgtgcggcccggaagccggctgctaggcgccggctcaccgttgctgtagaagagctcaccgttgctgtagagga

SEQ ID NO: 233528 - DNA, 636 bp, Homo sapiens
  chr8:25899444-25900080
  hyper
gaggttcgggaaatcgactgatttagaggctgggggtgagtagcctcgatttatcatccctgatggtgagagtggaaaagtgtcgcgagagtgacagatggaatctttagtgcttcgcaagagggagttattaggccgcggggtttggggggtactttccgcttactttgtcattctccacaaagtccacgaaggccgtccgctcgatctccaccggctggccctgcctgtcatagagcgccaggacgaagtgaaagaagttggatttcctcaagttggaaggaggctgtttctcaaagtgggcccgggacagggcgaccccgctgcacagggagaaaaacgggggaacacaagacacggggaagcacaaaaaggcgatgttactaaccgcccacaacactgcagaggggtaaggggtccacttcccaggtccagagttctgaacccttcgggccttttttccaattcggataaggaagaggagactccttaaaggagtcaccgtggccacgggggttgggtggcagggttgatacctggggtctctgacaccaccaagtggtccggcatcccaccgctgggccactcaccatcccgtctttagtcgaaaccgaaagaccccggctgcagacagag

SEQ ID NO: 233529 - DNA, 1257 bp, Homo sapiens
  chr8:25900418-25901675
  hyper
cagggcggaatcctcgcgaccagccccggggatcgctggccaccacaaatgagatgaccgacatagggggccctccctcccagaggtgctaggtggggaaaagccaaactgttaaaaggcgagaacctcctttcctggggccaacgcgatccccactcatgctgcgttttctggcggcgccagccgaacccagtgactgtgaaacccaagttgggggacccggaaggcgccctcgagcgtgctgagtgtgtgcacacgcttcccagccaaccggtcgcagtcacagcccacctggccatcagatcccatttcaccgaagacttggggctgaggtgaacgcacagattgcgggagctgccctgcggcgctggggtctcccaggttgaaccccggtgcgcaagcaccttcattcactcttttgaaaggggtaacattttggctaagctctcccccactaagtctgctccttccagcttcaacaaactttttgatcccgggaaggaaggaaagcgagggaggcgtctttaaggagcccagctaaggaaatgcgcggcacagttggctctgcggtgctgccttatttcccttagctcgcaggcgggccagtcccgaagcgctgcggaaagccgcggccgccgcgctgtgcggtctgccggagggaaatccgcgctccccgggccacaggagggagggaaccgccgccggcccaagtcccggagcgataaaacttctgctttctccgctccaagggtagaggccggttcgctctacccgggacacctggccagtttgggaaagggatcatttctccgtgtgatgttggcacttaaatgtgggtggccaggagggcagcaggggaagcgagggtagtggaagaagttcatcggctctttgggggtagaagggctgcctctctcgcagacaaggacctggaggccacaaatcccaactcagtagtggtgatgagagagtgggaccgtaatgtcttcgtagggtggcaccccggacatggtatttactatcccagcacgcagacgcctaaacacaaagtcaacttcagggatccgcaaaaccagaggctggcgatccctgagccagtctagctgctggtggccttttctcgcctctttcttcttccgcaactctttctactgtgactcagtattttctcttcttttaaatctcttcttttctccagttccctagctccgttcgtctggctcactgttttatctttgagccgggaccctccagcct

SEQ ID NO: 233530 - DNA, 160 bp, Homo sapiens
  chr8:25901855-25902015
  hyper
ccggctttcctcccgcgccgccactgccagcgccggtgttcacgctccgttcggggccaggccggctcggcttgcaggactaggggctgagctgggagatgttgggggctactttatttttccttgcaaagagtggactgtggtaaaggagagggagaga

SEQ ID NO: 233531 - DNA, 1583 bp, Homo sapiens
  chr8:25902869-25904452
  hyper
agcgccacggagcccggctgcagccgcgcgcgggccccatgaatgggttactacggccctggctgcgggaggcggagctgcggcccgataaggagcctcatttgcatggacgcgcgggattggccggcgcctggcaagccgggccgacgtcctccggcggcgcgcgccacgctctgcgttgccgggactccgggaggtgaaaggggacagaaagctgcgggcgtcgagtcctagcacgaaccccgtgtgcttgcgcaggattggggggcccccacaccctgcactgacttagggtagcaggtctctgcgggctggggacgcaggggttcggcctggctgcgggaagcctccctggatcctgcctctagatgtaggcttttgtagcctgccgggaggcacgttcgttcccggggttcggatctgtgtgcatgcttgtgagcgtggccacatgtgcttatgttttgcgcaaacgtcccccagagcacccagctccctgaatggctccccaggtctcctggagttccatggtgatatcagatgttgtgtgcggcttgcacgttgctgagagtggagaacatatgaaagaaggcgggggatggggtggggcggacaagcgaggggcaagtgctgctcaaatacagtgctggggaaaacggtccaggacctaaggaaaacacccgcgggcgggcgggcgcgagcggcagtcgcacccgtgtggaggagaggttgctgacagatcgaggcgggctgagtgcgcgagcggccggggagtattcccgcgggtcctccggttccctccccacctctccgttcccgaagcccccggtagtgggcggggagggacgggggagtcgtggaaacttcgcccaccgcgcgcggtcgccgcggtgctggccgcgggctggtggccggcaggcggtggcagcagcctcaccgaacagctgaaaccctagacggttttttaactgcgcggggctgctcgcggtgcctattaaacatcctcctggctgggtgtcattttcttgcttctccttttgtattctgatctgcgcatagatctgctgctgctgaaatctagaacaccagcgcgaaaacagatttgaagacaatgaatgcaaatctgtgctcaaagaccatctgccgtggaggagacaatcagctgttcgtagttcgagcgattgcgccccagtctcccggtctcattacggggagggcatttgcgagcgcctggactgcgttcagggcactttctcccctcttgggtctcagatttgagagaccagatcccttaggtgtaggtgagcgctcgcaaatgaactgctagagtttgccgctagaggacacagcgccttgcaactggtttgcctaggctgacaggaagcttgcacttcaagaaaactcggctctctcgagaaagggaccggtgcgcgcctccacctccccaagggacaaaccgcggcaccacgctgcgtgcgcgggattgcgactaggaagtgctggtccgaactgcggagattcgcttgaaaacggatagggggttagggagtttgcggggcgggtgcacggaccgtctctgcacaggc

SEQ ID NO: 233532 - DNA, 313 bp, Homo sapiens
  chr8:25904804-25905117
  hyper
tttataaatctctccgaacctcaagcaactcccccccacccccttcgtctggggtctgcgcccagcggggccaaagccttgagttccttggcagagagtgtggaacagccgtgagcccttcaagacatgcctatgagcccggtgatttttttttcaagggggctttgatcagctgtacctccacgttgccccggaaaggtgcgcagggcacccggagaggcctctggtcagcagtgggcctgggccaagccccaacagtttacccctcaggctcaggttggctggggttaaagggcaaagtcagggtcgaggg

SEQ ID NO: 233533 - DNA, 691 bp, Homo sapiens
  chr8:25905477-25906168
  hyper
cgtgaggggacaaggactgccttgggcccagcgtggcggcgtttcggccaacccagttggggttaattgcgtctgtataggttttgggtaggaatgctcgcggagtccgccacccgcgcgaaacatgcgttggttgggggaatgagcagcggcggctgcgcctggagggttgctcccacctctgtcgcctccagctacccccaaacaaacctccttttcgatctcgtgcaacacaaaacctgccccgagctgtgcgggggcctggcaagcgcagctgcggccccgggaagcccaatcccgcgggactgcggagcccacgcgctcctcaggctccggccaactagctcggttctgcctctagcccgggtcaagaaaaatccaaaatgaacactatgattaaaattattcacaatctatttatacaaaactgggggtgtctgtcttttaccctgtccccttcttcatttacccttcccaaatgaccctcacccccgtttttttcatgtttctgtttcacgtctgcaacccagtgcggtatgttcgatttccttttaattggttttaagcccctttgctcaatctcgtccggtccagtcatctgggcgccaagtctctcctcccgatcagaggttcggaaattttacttagaaactgctctcctggctgtgttcctgtccggcaggacactggg

SEQ ID NO: 233534 - DNA, 244 bp, Homo sapiens
  chr8:25906743-25906987
  hyper
cagaaatactgagtcgtggaggaacgttttagagacacttgatgtcggttgtatccaggccagtcggggcactgcagtaagtttacccaaaatagactggaggagccagattcaccgctaccctaacacttggcaactccagaaagtcttcctcctcgtcttcctctcctctgctcctcctccccctggtattctccttcagaaatatccctctttcccatctccttattccgggtgcagaacg

SEQ ID NO: 233535 - DNA, 284 bp, Homo sapiens
  chr8:25907017-25907301
  hyper
aacaaattctcgcagcagcagcttggggagcgcgggtgaccacgcggaaatagaggcccgggaggtgtgtgtgctgcggaacaggctgtctgtatagggaagtgattgatagcttccacgcgaacctggggacccgatttcccaggtgggaggggtgactttcacgtgaagcccctgctgggggccttgctggggtaaatcggctggccgattacagcccctttcagggaactgtgcacgaaggcggtggcatctgtcatcactatttacggtgcagcgatcag

SEQ ID NO: 233536 - DNA, 893 bp, Homo sapiens
  chr8:25907885-25908778
  hyper
caagcagcgccccgcgcgcccggggccctcctcggataagggaggggtgacaaaagtctcccgctcactgctgcctacccacccccaacccggctgccttttcctccaggcccccacaaacacccttggctttcagatccaactttcttcctcataatatactagtcaccgcgactcccgcctcccggatttgaggatgggggagactttggcggcgggggtcagctgcaaatatggcaccatctagaatttcattccatttagcactaggcaacctcctcctccaacacacacacgcactcgcacaccatcacgatcacctccacctacactggcacacctcactcaggtggcaagagagaaaatccaggaaagtcacttgcatagagtgcacggatttcaagaagtctttgacggtgcaaactggacttctaatcatgggatctctccaaacacagcccaaggcctagaaattccatttctggctcacggaaccttccacccccaccccctcacctgccgcgagccgggcaatcatttcggggcgccagtgggtccagggcgcacgggacatggcacccacggaaaacctcagagccagctgggaaaacagagatcgctctcctggccgggcagctccataccaccctcgaagggggacacaacttccacttactcttttctcccaaaggagagcagatgggggtcacagggcttgggggtcactgcgttcagacagtcaccccgcgcggtaagtgcttagagcaacgtttatagggcaatgctggcctcgccgcgtaggggtcgctggactaaatgcccagaaaccctcacaacccgtgatgtccactttccgtggatctgaacccgggcaagttcggtcgtttctgttg

SEQ ID NO: 233537 - DNA, 104 bp, Homo sapiens
  chr8:25909230-25909334
  hyper
ctttttgtttgttccgcatggaattgcatgtgagaaaagcgctttggaagctgtttggtgcacgcgggcgtcagagggcaccgtaggtcactgagcggggtctc

SEQ ID NO: 233538 - DNA, 82 bp, Homo sapiens; identical to SEQ ID NO: 201354
  chr8:25910858-25910940
  hyper

SEQ ID NO: 233539 - DNA, 105 bp, Homo sapiens
  chr8:26148965-26149070
  hyper
ccccctccgctctccgccccagcccggcggctccgccccctaggtgacgtcactggccaggccagccggcgccattttgaaagtggagtcgcctgcccctgccgc

SEQ ID NO: 233540 - DNA, 66 bp, Homo sapiens; identical to SEQ ID NO: 201355
  chr8:26150336-26150402
  hyper

SEQ ID NO: 233541 - DNA, 144 bp, Homo sapiens
  chr8:26305932-26306076
  hyper
tggtgcagccggctcgtttttacctcgtctgtgctctgtgtttggggtgtgtcctgcggcaccgtccctgagcgctggaacgtgcgcggccccgcagggcagtgcggccggggaatgcaccgagctgcgcgcttccagcgccgt

SEQ ID NO: 233542 - DNA, 254 bp, Homo sapiens
  chr8:26370013-26370267
  hyper
ctgtgggggtggttggtaaccgcatttaatcctgggctgacaatgggactggatccctggttacacggccctacgcggtggccctgcggtaaacggcctctcagcccaaacccaccctggttactgagcatgcccagaactccctcccgggccaccaaaggaggggcaccatttctgcaggattttgccactgtggaaagagaggcggagctgtcatcgcgcagaggcagggactgatacgcggaaaggacgtg

SEQ ID NO: 233543 - DNA, 286 bp, Homo sapiens
  chr8:26370481-26370767
  hyper
ttactccccaaacacgtggcatctggtaacccgggaaacgctgcgactgtggcgcagtgcgcaacaggggcgggggaaccaggcggggctctggggcgcaggggaaagctggagatttgggaagggggtttcagtttgttttttctctctttttttttttttttttttttttttggtggaggaagcagaataaaccaaatcgcgacacgttcctgcgcccttcttggcgcagtggcgcagacacggtccatggcgccttgcgcaatagagtcggtctgcaccccgt

SEQ ID NO: 233544 - DNA, 254 bp, Homo sapiens
  chr8:26371163-26371417
  hyper
ccagggtaacggggcgggacccctatccacagtgcgccctcgcccccggcccacctccgccatgcggcggggcagaggcgcctgggccaggcaggtggaggagaggggcactggggctgggggctgcgtcctccggtcctcactccgcgtgccctgcccgatacttacccaggcgcggagagcggtcagcgggccctccgctccgcatccattagctggtggtctggccgcttcacttccggagcgcggggcta

SEQ ID NO: 233545 - DNA, 337 bp, Homo sapiens
  chr8:26371676-26372013
  hyper
gtgggtcgccggctcgccagccctccttcctttctgtgcaccttgcggtgggcggcgaacggcagccgcggcagcagctagggggcttgtgcacacagcgagggagacttagggactggcagacggacggacggacggcgaggaccctacccgagcccccgagccatggccgagagaaagcaatccgggaaggcggcagaggacgaagaggtccctgctttttttaaaaacctgggctccggcagccccaagccccggcagaaattctgtggcatgttctgcccggtggaagggtcctcggagaacaagaccatcgacttcgactcgctgtcggtgg

SEQ ID NO: 233546 - DNA, 199 bp, Homo sapiens
  chr8:26372193-26372392
  hyper
aggtcggtgtgggggttgggggtggagacggaggacggggcgcggggatcgcccctccctcgcccctgagcccggcgcgcccgccttcatgccccgccctggacctcgcctcccgcatctgcacgcgcaccccgccctacccgccccttctccgcgcagggtgcggcgaggctcgggctgggcggtgggcggccgtgcg

SEQ ID NO: 233547 - DNA, 220 bp, Homo sapiens
  chr8:26435404-26435624
  hyper
aaagggagtggctggcggcgcatgcgccacggtggccgacttgaaccgaggcttttattgctgtagtttatttccacccccttccctcctgtttctctctctccttctctctctctctctctctctctcttttttttccgccctagctggggctgtgttggaggagaggaagaaagagagacagaggattgcattcatccgttacgttcttgaaatttcc

SEQ ID NO: 233548 - DNA, 116 bp, Homo sapiens
  chr8:26436299-26436415
  hyper
ggagcgggtttgagccctaaggcgtaatgacagcagagggatgctgaaaagggcagggtgtaccggaatggtgtggaaacgggaaggaaaaacagggacgaggtgatgagcagagg

SEQ ID NO: 233549 - DNA, 2037 bp, Homo sapiens
  chr8:26722956-26724993
  hyper
agatcagccgtcgacgctcaaaggcagggaccgatggttgggtagcgcagcgctacaggttgggcgctgctcctggcccgcagttacctacattttgagctgccccaccgaaggctcctgctctctccagcttctaggagcacaggtcaggggacgtaggtgtggaatatgtgctgagacccaggaggctgcggggcatcgtttgaccgcgtccacctgaaagagcgcaaagagaaaggcggctttgagctaggcgccccagggaaagaggctgtgctgagcttgacgggttgggggacaccagttgggagccgggttggttctgcggtccagaagctgcttcgcccggcagcggtggaggcgacttcggagctcatctcgcgcccccaccactgggaacctgcctagcgcactctactgagtcacctctgcccgagttcaggatccgaagcgaaaaacaaacaaaaaaacaaatccccaaaaccccaggctccagcgctcgaagtctggatttcgagcgcaggtaccacgaaattaaaatcctcgaagccccggaggggcgactgcggctggcgagtgtgtcgcacggatcctagccggggaattctggaggatgtactcggtttccgttagaacaggttgcctcgcagtcacctggagggggcggcctgggagagggaacagctgcgacccagggacctcagggccaggaccacgagcacgctcactctcacgccggtggaattcgcactcgggtgtgcagagcgcaccggtctgtccaccagccaagctggcttgagagccaggtcccgagcgaagccgggagggacccgaagacagaaagcgacccaggtctgtccacgacgcctttccaagcctcactgttggccacccgaggggctccagctgccagccgtagcgggactggcgggggacggggtggggaggacgtccctctgcagagggagctttgcaagtgacagtcactgcggattttgcaggcgtaaacattaagccggcatgccagcgggcaggggccgccttcgattttctgggctgggggccaccatctgcgtaagaaacctgggtttccacaactgcgaacctaccgcagggactcggcaggacagcgcggcgtgaggaagtgcccaccttgccttctggggttgggccctgaggtgggacctcgggcaaagactcttgttaaaatcgcaagttggagacctcacaggtggtattaaaaacgtgccactgcagaaacccttttcctcctacctcgagggtgataaacacagggttaaaaagacacttgttcagtagaaggcaacttcgcagaagatgtaagggaatcgggggtggggtagaggggccggtataaaacctggtggaaaaagcgggaggcgctgggaaaagtgggggttccgtctcaccagacggcgggggaggtctgccctcacccactcggccctgcgggacgccggccccggcgcactcacctgaagcgccgctgctgagccaccagctcgcgcgcgggggatgtggacccggcttcggtcccgggagctgcctgcctgctcttctctggaggcggagaggggaccgtgtctccgaggcaccaaatccttgtccttttgcacccgctgactcacccctccaccactgatgtctttaagctcctgaaccgctgtcactttacctgcattttttaaaaagagtcaaaataagaaaagaaaaaaaaatgcagataaccggtaactccacaatcacccttttaatattcagctccccgacaccagaaaagaatagcaaggaactttgcagctctcgctgacgtaactcaggcagtagcccagctagtaccgtaatctcctgctgctaccgtattactctacggcaacaggcacaagtgcgtatacagctgtaatgttttcctctggcctagagggggttgggttctagcgtttctttaaaaaggtttgtgtgtgtgtgtgtgtgtgtgtgcgcgcgcgcgcgcgcgtgtgtgtgtgtagagtcatt

SEQ ID NO: 233550 - DNA, 156 bp, Homo sapiens
  chr8:27168866-27169022
  hyper
cgctgagagacagcggcgctggccaatcgtgcgggggggatggcgagggggagggagggggcgctcggaggagccccacccacttccggtgtgcgcgggaaatcttgggagagcggggtgggccttctgcccgcagttcccgcctcctcaggtccg

SEQ ID NO: 233551 - DNA, 204 bp, Homo sapiens; identical to SEQ ID NO: 201365
  chr8:27348568-27348772
  hyper

SEQ ID NO: 233552 - DNA, 249 bp, Homo sapiens
  chr8:27449813-27450062
  hyper
ccccgtcctcaggccgcttcctttcctggtttccaggtcctcgtttctcccagcgctgccctccccatctaagcccaagtcgccgtgagcccgcgctgcccccttgtggccaaagccctccccagctcaggaaacgggaacgcttggcggccaggctgagagtcggtgcgcgtgacccggcttctgctcgcagcatccaagaagttgcaataacgtggaaggatggggaacggcgcctccctggctagc

SEQ ID NO: 233553 - DNA, 90 bp, Homo sapiens
  chr8:27472371-27472461
  hyper
accgggctgggggcgccggggggcgcatcatcaccacgaatagctgtgctggctccaggagagaccctgaggtgcggccgctcggcgctt

SEQ ID NO: 233554 - DNA, 594 bp, Homo sapiens
  chr8:27491097-27491691
  hyper
atcaaggagctctcccggtgagcccccccattgcggccgcagcgcgggcagggaggacgccgcgggagcccgggttcgaggctgggctgtggggctgcgggggcgcacgggcgaggtaggcggggcgcggggcccccgcggcggcacaaagaggccggccgcggcagttttgaaaataccaaggaagttgatctgggccggggcccaagaagtgacgaggagggagggaggcttgcgagcgagggaggaaaggagggagagggagaggagaaggcgggaaggagggagggaggaagggtgcgcggggcgaggggcggcggcagacctcgcggggccccagcgggaagcgcgggcggcggcgggatgcgcgctctgggcggcggggcgcggcgctaggcgcccggcggggcttccccaggctgcgaccccgcgggaccctccactcctcccgccgcctccgcagcccgcgcgccggagcatgagtcccggccggagccccacggccgcgggcggcgcctaggacggcgatccgcgccctggaggatccgccggccgcccggctccactacagctccagccgcctgcagcggggcc

SEQ ID NO: 233555 - DNA, 31 bp, Homo sapiens
  chr8:27950284-27950315
  hyper
ggtctcgcccattcgcgttcccacccaccct

SEQ ID NO: 233556 - DNA, 74 bp, Homo sapiens
  chr8:28242659-28242733
  hyper
ctgcaggaatcccccgcgcctggtagcctggcatcatgggaacgcctgcccggtggaagtcctccaaggccaca

SEQ ID NO: 233557 - DNA, 384 bp, Homo sapiens
  chr8:28347827-28348211
  hyper
tctataaatcccgtcgctggcatccggggtctcttaggcaacaatgtgtgggctcctgattggccgcgagatccaggagggctggctacaaaattgggcacggggataaaattaacaagtgtggcggccaagagcgtgggagggactgcaatgtctcaatataaccctagaatgaagacgcgtcgaatcctgaaacaagtagcgttgaaaaccttcattcaagacgtagtgtgtcccaaatcagccctacctacggagcacgcccagtcacattgtcctggtcactccggagctgcgaaatgcaggctccactgtgccaggttttaagagtggccaacaggtaaacagagggttggaggaaaaagaattcgagactggttcaat

SEQ ID NO: 233558 - DNA, 113 bp, Homo sapiens
  chr8:28352545-28352658
  hyper
atccccgagggtccgcatctgaaatgaagctgctgtgaaatagccagcaaggtgaaggagccttgtgtcctttcaagacatgtaaacatcttcctagcggtgttttacatctt

SEQ ID NO: 233559 - DNA, 126 bp, Homo sapiens; identical to SEQ ID NO: 201369
  chr8:28560085-28560211
  hyper

SEQ ID NO: 233560 - DNA, 562 bp, Homo sapiens
  chr8:28747285-28747847
  hyper
ttgctacccctcccgtgcgacgattccctgcccaacgtaggaaaaaaagaggtccaaaaggttatagcatcacctttgccctctgacctaggagcgaagactcaccagtttcataatggacttttggtggttcaatagcagtcactgaactcctcaaacccaggaagcgtcttccggtgcaatctccgccacctgccagccgagagcatcgcgggacttgcagtctttcatcctcacgtcccttccaggggaataatgggaaatgtagtctcccctccaggcatcatgggaactgtggtcgcctttccttttcctccctttcctctccgaacgcctccttccgtcagctcaaattcatcccagccgccaatgcatcctccctctccaccccagcatgatatcatgtcttccttacgggcctggggcccatggtgttctgggatgtgtagtcccgacggctccgactcccctttccctcctcccaaagggaaggcggatgggcacggggcttgccggaagttgtagttcccttggccctctaggcgccgggctccgcaatttt

SEQ ID NO: 233561 - DNA, 45 bp, Homo sapiens
  chr8:28749197-28749242
  hyper
gggagagggggtgcgccgaaaggcgctgcttgtatttttcttcta

SEQ ID NO: 233562 - DNA, 62 bp, Homo sapiens; identical to SEQ ID NO: 201371
  chr8:29120734-29120796
  hyper

SEQ ID NO: 233563 - DNA, 341 bp, Homo sapiens
  chr8:29205973-29206314
  hyper
aaagacagccctcgcggaaaaagaaagaaaaatcagcaaaatcgccttagcagttcaaccaaaggtcaacagcagcgtttccccagcagctgacaggtcaaatgggcaggaaacaactgcggggaacaaagccccccgctgtccggcaggggcgaacccggctcctccgcactgaacagttttgttgtgctttttggaggggagaggtttccgccccctttccagctcccttcctcccgggtggacaggtcggaagaggagcggaaaggaaaggaagggagggaggcggcgaaggcgcctgcgggggggaggagcggctctttgatgggtgtgggggggtc

SEQ ID NO: 233564 - DNA, 116 bp, Homo sapiens
  chr8:29206794-29206910
  hyper
ttgggcagcgggaacgcagatacagatcgctctacacagtgtgtgcaacccaatctccctttctgcatttgccagggtcttgttttcagtgaaactggcaaggccaattgtacctc

SEQ ID NO: 233565 - DNA, 31 bp, Homo sapiens
  chr8:29208230-29208261
  hyper
atgctcctccgcgctcccgggggagggggcg

SEQ ID NO: 233566 - DNA, 413 bp, Homo sapiens
  chr8:29209537-29209950
  hyper
agcaagggagttacaggactcgctcgcagtttcggaggctgcagagtagcgtattccattccggggcgcgcgtggaagcccgacccaggcagcgagggcaccggtacccgccgggtctctcccgcccaagctcaccctctccccatgcctttgttccgggcggagcggctttcccgagctctcacctccggtcccgggggccatccctgcactccccgaccggagctcggcggagcctccacttccgagaccttcgactggcctcgtcccccactgggccccgaatgcctcgacccccgggccctactcggatgagctgtaggggcaccgcttgggcaaggtgatatttccttttgctccgggctccaaaatggcttacgatggcactgcacggatcctttctctttttaaaa

SEQ ID NO: 233567 - DNA, 645 bp, Homo sapiens
  chr8:29387043-29387688
  hyper
ggccctgcgccatccgtcatttctcggcttcctcccacgcgccttcatgcggatgtgtaggtatctcctctccctggctgagtcaagtcactcagagactgaaaagagagagaggatgtggcgtgaagctgaagcctgcacccagggcctggcacctactgggttgggcttggcgctgcgtgcttgcatttccgcggatagaccgagatggcatctgggctgtgacactggctgcccagcttttcttttctttttttccaacagcatctggaagaggctctgggagggtccaaacaacaaaccacgcggcgttctctggtggctgtgctgggacgagtgggcggaaacagccgcaggtctctctcttctcttcagcctgaaactcactgcacaaataccagaggttttttttagagattagataaatttgcatccttctccccccaaccccgcccctaagccagaggaagtgcttgaggaagtaatgtgtttaaagaatgtgggggaggggagcttacattaggaagcaggactcttagcgtgtagccagaaaccccaataacctttaagctgttaacccttgaggatacggctcaatggtgtacccacgtggagttcattatttatctccgaaagccctgtctg

SEQ ID NO: 233568 - DNA, 135 bp, Homo sapiens
  chr8:29952641-29952776
  hyper
tccaaaggacggccgctacccgcgaccccttcccaacgcacgcgggaggttgcgggatcagggacaggggcttcagcagggagcccccagaccggccctgacaggaattcaagacctggcgcctgctcattcccc

SEQ ID NO: 233569 - DNA, 435 bp, Homo sapiens
  chr8:30241417-30241852
  hyper
ggggggccgcgggacgctcaggaagcgaagcggggaaggctccgggcgcgtcgcaggacccgcgctggagatgggtttgaagccctgtcctgaaaaagccggcccggagtgggctgtccccggtgtccctcgagttctcatgctgtcattcaagcagcagaggaagaaccgggtctggctcgggaagggtgggcttagggccaggggtgcaaatccctcggtaaaagccggcaaactaaaagtcgcacacatcccaggtcccggtccaggccccggcggggcagggtccccgaagtcccggggcgcgcagacgccggggcccccgggggccaagggaacggcgggacccgacctccctgccctcggcctcccgggccctcgccctccgaccagccgctgagtcgggggctggggtcgccgcttccgcccgcggcc

SEQ ID NO: 233570 - DNA, 817 bp, Homo sapiens
  chr8:30242032-30242849
  hyper
agctgcttccatcccggacttcccagagcctgcctggagcgcgtactcagcggctctcgggtcccagcgtcccagccgcggcccgcgctcctccgccccgctcctcctcctcctcttcctcctcctcctcctctctaggcacccccgtcccctccttccagcggctgcagcccccagccccaactctccgcgcttactcctgggacgcgcgtcctcgccccatcctttgcttccttccttccttccttcttccttcctcccctggctcccgccctccctctccaggtcgccctcccggggcccgattgtctcggtgccccgctcccggcccgcgccctgccccgtctctcccttgcacttcctgagtcgcccgccgccgccgtcgcagactcgccgcgggagccccagcccaacccgagcccgacagccactgccccggctccagctccagccccacagcccgcggcgcccgcccgagggagccccggcgcccggggaaggctccagtgggctagcgcgccctcgcccagccccgcgccccagccctgcccggcccggcgaggaaggaccgggaagatgaacaacggcggcaaagccgagaaggagaacaccccgagcgaggccaaccttcaggaggaggaggtactgggcggctcggtgtggtggcgggggcgacgcgggacccagtgcgggcggccggcggggcgcgggcccggggcgcggcggtggaagaaggttcaggcatggcccgtgccccggacgcagccccacagtgtggcccggggagggtggatctcgggagcgtgtgtttttgtgt

SEQ ID NO: 233571 - DNA, 346 bp, Homo sapiens
  chr8:30243329-30243675
  hyper
tttcataggactttgacttctgagcatgcattttaggtggtgcgtccgtaatcatgatgaaagttttgtgactgcggagcgttccttcggtggaaacaaaattgagtagatgtggtcagaaggggagtcggactcaggaacaaacgtttcagaattcagtaggatatttgtggtatcctaccaaatgactctttttgcaggtacgttatctggagtccaagaaattatttctggcgtacttcttaacatcccacacagttgagttcttaaacattctagaggaacttgagagtgtgtgtagatgcaggaaagtgcacgtctaaatatgacccgaaaagattcacac

SEQ ID NO: 233572 - DNA, 385 bp, Homo sapiens
  chr8:30601508-30601893
  hyper
ttcttctgaaacacggctacagactataactttaaaacacggggcttagctccccctcaataacgacacggccgtcagtatttaccacgttattgaccctctcccagccggcccgcggcaagaagagttccacttccttcccggaaaacgcggccggaaggggcgggctttccgcctgcaccaggcgcttccgccaccatggcttcacgtggggttgttggcattttcttcctctctgctgtcccccttgtgtgtctggagctccggcgtgggatcccggatataggtaagtgtgactttttcccttcgacagtcacagctgggtaattttcacaggaatgttgcatagaacgaccgcctcttcggctgcgtggcttcggagcag

SEQ ID NO: 233573 - DNA, 825 bp, Homo sapiens
  chr8:30769300-30770125
  hyper
gagcattccaaacgcggaaactcaaccccgagcgcggagaggatggaaactgcctgaaaggatctgtgcagggctgggcttgggacgcggctcacacgaaactgaggcaggagtctcttcctgcacccgcaccacgccgggacccgaggggtttcactcccttcactgagccgagccaggaagccaagagccaccagggcgaagcagccctgcaaaacctccactcagccttacaacagccacagcgccgggacacgcggcaccgcatcccgggcgcgccagtcctcctgcagtcgggggacgctcccctcaggcgcccgcgtcggagcccagctacccccgcgccgccctcacctaccgaggctcccccgcgtccaccggctcctgcagcgagacagccggcgcaggcgggcatggtccgagcgcgggctctgcaggggagaatgaggcgcgcggactgccagtcacccgggcggcgttccccgccctagcgctccagggtcgcgagtcccacaggagtcccgagttgcggtcccggggcggcggggctcccgccccctccccgcccccgcggatatccccacgcaccacgaagatccccacgcgccctgcgcaacgcggctgctccgcgctgccttctgctgactacaaactgcgcctccagggagccagggcgaggcggaggccaccaccaagttgtggcgctctctcctctcgctgcctcagagcagcgagtttctcctcagctgcaaacaaggacgcagggccagctccgtggggctcagcgggggcagagggagagcgaaagcgcgggaacccgcgcat

SEQ ID NO: 233574 - DNA, 211 bp, Homo sapiens
  chr8:30890058-30890269
  hyper
ggagctttgcttcacgtctaggtaaaacctctttttctggatgtccactcgtttggaggccagctcctggatttcggctgcgcccccggcctgattaggggtggctgaggccgcgtagtgggggtagtgggagtgctgggcctggggatagagtctactcttgcttaggccagagccccctacattcttgcctccgcggccgcggccgccg

SEQ ID NO: 233575 - DNA, 94 bp, Homo sapiens
  chr8:30890541-30890635
  hyper
gccgcccgtcccgcgctccgcggccccaggtctccagccggcgggcactcacatcatctctgccatcaccgccgccgccgatgcccttcacgac

SEQ ID NO: 233576 - DNA, 239 bp, Homo sapiens; identical to SEQ ID NO: 201380
  chr8:30890888-30891127
  hyper

SEQ ID NO: 233577 - DNA, 1867 bp, Homo sapiens
  chr8:31496428-31498295
  hyper
aatttcagtaaaagaaaaggcgggggtcatgaagaccgaaggatcaaaggagcatggagtagaggaggcgtcacatctgaagtgcacactgtgtgtgcgcgctgcaaggagagagagcgttataaagttgttgttttaatcgctgcttgtcgcctgcgaacatgttgctcccttttaagtgtcaagcaacgggttcacccaaaacttttctgcaccgaggacccgcacgcccggggtcccacctgcccctctctgcctgcctcccaccggcgcctgggcatcctgcgccggctacaggtccttgctcactgaagcgtcacctctcactccccagtaagcctccgcagcccactcggactgcagcctgtttgccgcccgtcctcccattgcagcactcggggcgacagagagggaggaggcgcgcggggacggggacgcccaggaggacccactcgcgggtcccgctccgctccggcagcagcatggggaaaggacgcgcgggccgagttggcaccacaggtaaacaggctggcgaggcgcaggacgctgtcgccgccgcggccacccagcgatttccaggcacgcaactccgcctccagggctctctccctcgcgctctctcccagccgcttgctcgcagccccagcagccgccgcagcatcacttcacacaaaggactgtcacccgcggagcagctcctccacctccacgtcctcctccggtgacagcagccccgacagcagggctcgggcgcggcggcggcgcggggggtggggggacctgtcactccctgtaactgaggcggcggcagcggtttttttgccttttctattttgccttttttttttttgcccttatacctcttcgcctttctgtggttccatccacttcttccccctcctcctcccataaacaactctcctacccctgcacccccaataaataaataaaaggaggagggcaaggggggaggaggaggagtggtgctgcgaggggaaggaaaagggaggcagcgcgagagagccgggcagagtccgaaccgacagccagaagcccgcacgcacctcgcaccatgagatggcgacgcgccccgcgccgctccgggcgtcccggcccccgggcccagcgccccggctccgccgcccgctcgtcgccgccgctgccgctgctgccactactgctgctgctggggaccgcggccctggcgccgggggcggcggccggcaacgaggcggctcccgcgggggcctcggtgtgctactcgtccccgcccagcgtgggatcggtgcaggagctagctcagcgcgccgcggtggtgatcgagggaaaggtgcacccgcagcggcggcagcagggggcactcgacaggaaggcggcggcggcggcgggcgaggcaggggcgtggggcggcgatcgcgagccgccagccgcgggcccacgggcgctggggccgcccgccgaggagccgctgctcgccgccaacgggaccgtgccctcttggcccaccgccccggtgcccagcgccggcgagcccggggaggaggcgccctatctggtgaaggtgcaccaggtgtgggcggtgaaagccgggggcttgaagaaggactcgctgctcaccgtgcgcctggggacctggggccaccccgccttcccctcctgcgggaggctcaaggaggacagcaggtacatcttcttcatggagcccgacgccaacagcaccagccgcgcgccggccgccttccgagcctctttcccccctctggagacgggccggaacctcaagaaggaggtcagccgggtgctgtgcaagcggtgcggtaagttcctcgcccttgggggcgcgaacccgcggcgaggagggcgcatc

SEQ ID NO: 233578 - DNA, 627 bp, Homo sapiens
  chr8:32077881-32078508
  hyper
acatttgcccttgtattccacgcatcaccttgacagcctgcataatataagggacggagcggagcaggggctcggggtgggagcctggaaagaaaactggggctcaaggaggtttaatatcggttagtagcttgggatccttcggataacggctgggcaatgaaaataaaaagccccatttccagaaatcaaagaacttggggagaaataaacacgctggttcaaaggaggggaaaatatatcagaactagtcggacctaagggagcagatattttccaaaaatatccttcccaccagccatgctgcagatgtgtcactgtggctcagaggcaggccatctgctgcagtgtttccctggaaacccccagcaacgcccctcccggagctcctccgcggtctcccccactccatccccgcgcagcggaggagcttgccggtgatgtcactgctgctagctgggagggaatcccaggacctgcgtccctcgggtagagccaatcatggtcggctctggatgctggaaacctggggcttttaaccagaaagaattgcaaaagcaatatgcaattcatcacagtccacaaagcacagttcctaacagattctgaaaacgtgattttaaaaaa

SEQ ID NO: 233579 - DNA, 1772 bp, Homo sapiens
  chr8:32405171-32406943
  hyper
cgcaacctagcatctttaaggttcgcttagcccttcctgtgcacctggaaggaagccttatcttaaactcccttccacctagagtttattttcgcctgcgtgcgacagggcttttgtacttaagtgagttaaggaatgaaccccgaactcttctgggaaagccaccaacgttccccccgcacccctcccagggttcctgaccacggagactctgcttggggcacaggtgtgggagtcgcaaacttttctctgcgccgtccttttccgcgtggaatgggacggagcagccctcccaggcgctgcctggctgcggaggggagcgggcagcgagagcctcgggtctccgcctgggttcccgggtctccggggcgctggcctcggtctccgcgcagcgtccagcgacccctgtcgggggttcccggcagccgcgccgccaccccccgcccggccagcgcgggaggaaaaggggctgcgcccgggagcgccgagcccaggctcctcccggtggcgtgtccgcgcctcggggtgggggtgtggtggggaagagggagggggcgaggccaggggagggtgcgaaggaggcgcctgcctccaacctgcgggcgggaggtgggtggctgcggggcaattgaaaaagagccggcgaggagttccccgaaacttgttggaactccgggctcgcgcggaggccaggagctgagcggcggcggctgccggacgatgggagcgtgagcaggacggtgataacctctccccgatcgggttgcgagggcgccgggcagaggccaggacgcgagccgccagcggtgggacccatcgacgacttcccggggcgacaggagcagccccgagagccagggcgagcgcccgttccaggtggccggaccgcccgccgcgtccgcgccgcgctccctgcaggcaacgggagacgcccccgcgcagcgcgagcgcctcagcgcggccgctcgctctccccctcgagggacaaacttttcccaaacccgatccgagcccttggaccaaactcgcctgcgccgagagccgtccgcgtagagcgctccgtctccggcgagatgtccgagcgcaaagaaggcagaggcaaagggaagggcaagaagaaggagcgaggctccggcaagaagccggagtccgcggcgggcagccagagcccaggtgggtgcgcagcgcggcccgggccccacgatcctcctcctgctcctcctactcctcctcctcctcggatgccgtggcctctccctccccctctccctcgcccgtcctcttcgccctgcgctctgagcgcccgttgagtcgcgcggtgcttcccctcctgggggccgccgctcacctgggcgccgagtcctaccgggcgcctacgcccagagctcagggcaagggacagcagtcccggccgcaccctcccagagtcccgggagcgcttcgctccctggcacggcccctccccagcgccttagcggctgagcccagcccgggagtgggacctgggctataggagtcgaggctgcgtgcgcgcgtgccccgcgccataagcgctttgcacgggggccgtgtgccctctagcgggaaacgctggaatgggccgcctggagggagagccggtcccctcggtgtgcctggcagcgcagaagtgggtggtcgagcaagaggccgcgtgggaagttagcttcggcgttttggggcacagggcaagcgatgtagagtgcgcgccggttcatcttgattcagtcctgtgctacggagactcaagagca

SEQ ID NO: 233580 - DNA, 43 bp, Homo sapiens
  chr8:33330280-33330323
  hyper
agaggctccggcccggcacccgcctcccgcctggtggatcagg

SEQ ID NO: 233581 - DNA, 102 bp, Homo sapiens; identical to SEQ ID NO: 201383
  chr8:33370085-33370187
  hyper

SEQ ID NO: 233582 - DNA, 144 bp, Homo sapiens
  chr8:33372307-33372451
  hyper
gggagcttcggaccctgggaggggtggcgcgagagagacgtgtcgccagctgctcggagagggactcttattcagcctctaaggcgtcaattgcgcctccagggttccaggagtccagagaaagcccttcggggtcttctgacc

SEQ ID NO: 233583 - DNA, 308 bp, Homo sapiens
  chr8:35092689-35092997
  hyper
cccaagaggccagccggctccgctcagctccccgcggcgtggccgcatccccgccgcccgactcccagcccgcttcctctctccgcgagcgggggggggagctgcaggcggggcccgaagcgccccgggggcacgtggagcggcctctggctcacctgcgcctcccgggccccagcccagcgccgccgcgtcaccgcccctcccgcggccccgccccagcccggctcattggctgccgctcggaggggaggggaaggggcggctgcgggggtctcattagcgatgcggactctcgcctccgctccgta

SEQ ID NO: 233584 - DNA, 49 bp, Homo sapiens
  chr8:35093177-35093226
  hyper
atcgtggagcagagtcactctctgaagactcccgagacccattcgactc

SEQ ID NO: 233585 - DNA, 152 bp, Homo sapiens
  chr8:35093916-35094068
  hyper
tggcacccctcgggcgtccttagcccgaggtcccagccagccctggagctcgggagagcggcgtgcaccatcccagtttaaccgcgcctgcagtgcccagccgggatgagcacttggcccgaggctgctcaccaggcgcctcctctcccttc

SEQ ID NO: 233586 - DNA, 492 bp, Homo sapiens
  chr8:37552073-37552565
  hyper
gcgcctccactggccgccgagcgcacggagaagtgggctccccagagttcggcacccaaaggaccaacttcgcctccggaaaagcggcggatccggaacttggatgtcaggactatgactacgtaaaatctctgcccagggcgaagctagcaatgcacactgtatcagaaaggcgcagggagtcgggaagggtattgttatttttaattaaaagtttttatcccgaaatttgcctggggaaagcaagtgctttttcccccggagtgagaaggatgggggggcggaggggttgtgttgccgagcagcgcttagagagagatccccctccagggacacccgcctcgcccgtgatctcggtctctcctcgtagcagctgggcgcggtacagtgaggaacttcacgcccctcagcaggacacggtaagaagcctgtaacacaccagacaccgagcctctaacgcagggcgcaggcacagcgcgcacagcctggggt

SEQ ID NO: 233587 - DNA, 479 bp, Homo sapiens
  chr8:37553705-37554184
  hyper
agccgctgtcctccactcccgtcagccccattgaggtcagtccccggccgctgcccccgggcgccggccccattcctcccaccgcgaccgggaccctgacccagctcccagcgccccggggctcggtgcgacacccaagtctggtcacgctggcgggctgagtgaggaggggaagaaaaccgagggatcagagcccaccagggcttccccaggcttccccgtggaagggtctccttccacgctcgcccttcggagctccgtgttttctctcggattggatttgctcctggagtcccctctgggtcctttacttttcctctgatccccagtttccagccaggagttggtctctgctgggtcttccccgccccccacgccgggctgttttctttgaagccctggctgcccgggtcccacttcgcctctgtcccatccggtgagggcgcacggcgccctggcgctcccgatcccggatcttt

SEQ ID NO: 233588 - DNA, 209 bp, Homo sapiens
  chr8:37595169-37595378
  hyper
tctcccttgagcaacggctgtatccggagccagtgcttcctcagtgcggtgggggctctaattttacagttaaagaaaggggaacgttgactgagaacgaggaggaagcgagttgtagatctagccttgtgttcacacgacaccaggctggatatgagtcactcgcagggagctcagcttggtgaggtcctctcgctgttgtggccttt

SEQ ID NO: 233589 - DNA, 265 bp, Homo sapiens
  chr8:37655254-37655519
  hyper
ctgcgggggacaggcgcaccccagagaaaggcaccgcaggcgcccactcacctgcacaggtgaagtggagagcacgcctgcagggcacccacgccccggatttccagcctggactagggttgcggactttggggacctgagaagggtgagagcggggaatgctcaggaaagatcgacgctcgtggcccaggagggggctgtggtcctaaccactacggtcgcgtcccggactgggctggaggagtctccggatttacctggctgg

SEQ ID NO: 233590 - DNA, 1005 bp, Homo sapiens
  chr8:37756348-37757353
  hyper
aaaaaaaaagcgccccagatacggccccttcttccaagaagacccaaagctggcagagctgggcgggacagccgcagaaggggaagccaggtgagaacaccagcaccggccgagggctccgtcccgaaaggccttccccgctgctgcccggcttactctcgaagggtccagcgcccagaccgccctgccggaggggtccgcgcccccaggccgggccctcccctccccgcccgcactcactgcgtcttcctgcggccctggtcgcggtgcagatcccgcaggtccacctcggcgcggcccaggaacttgtcgaggccgagcagcgcgcggtgcagcacggtgagctgcagggtggcggcggccgcgggtccggaggacagcagcgatggcagctcgaaggtggcctcctcgcgccacacgggcgcgcccaggctgcgctccgacacggaggtggcgtacttctccttgcccacctggatcaccgcgtacgcgtcgctcgtgcccccggggcccttggcccgcaggccccgcgcctgcagcaccgtcacctgcacgtgggttggggaccacacggcccccaggccccggccagccgagaccattagggacatggtgacgataacactccagaagcgaggagaagatcgccgcgactggcggcctccacggcccgccccggcgaccaggccactttaaggcttccggccacacccccgccaggccacgcccctcatggccaaggccacgcccctgcccgagccgcctgctccacctgctgcgccgcgccccgccccgccccgccccgccccgccggcctcagcagcgcgggcagctccgggcacccgggcgccggaggcggggctggcgcggccaggcaggcaggggatcacgtgcgcaggggcgggcgcatcgagaatctaatctgagaggtggtaggtgacggatggggtccccagctgccaaaggtcgcacggcgggaaggagctggccgaagcactgacttgg

SEQ ID NO: 233591 - DNA, 1234 bp, Homo sapiens
  chr8:37822627-37823861
  hyper
gtcccattttggttcgctactcctcgttcccttttctctccaagcaaagccatcccaccttctcttaataaactccacactcaaaaagttgacccacggacacatcgcatgcttcccgaccctgagccgccggtccctctgccccggttacctacccgtcgagccgttggcaaagcctgggctgcgctgggctgctccgggccgcaggaacgcccgaggggaagagggccgggcgggcggcggcgcagggctccggaggcaggcgacggccgcagcggcacagaagacggcggaaggcgctgcgaaagtccgggctgcggcagtagatgagcgggttgaaggcagaattggcataacctagccagttcagggcaaggaaagccgggcccgggactagagaggggccccccagggcgcgcagcacgttggccagaaagaagggcaaccagcagagagtgaaggtgcccatgatgagacccaaggtgcacagggcccggtgttcccggagaggcaggaggcgcgcgggccgccggccgcaggcgggcaccccttcgggcggagcgcacgtccccaccggggccggggccagagagcgcgacggcgccggcggagactcctcgggcggaaagcggcccagctccccgcgcagcaagcgcagctggcgcgtagccaccacgaaaacccgcgcgtagacgaagagcatcacgagaagaggaaggtagaaggagacggaggaggacagcagcacgtagggcatgttggaggcgaaggcacagcagcgcgggttggagtggcagcgctgcgcctcggcgtcggcccctacgcgccaccactggctcatgatgggcgcaaacgacaccgcggccgacacgacccacaccaggaccacagctgtccgggcgcagcgcttggtgaccagtgcgccgtaacgcagcgggttggtcacagccaggtagcggtccacggccagggcgcacagggtttcgatgctggcggtcacacacagcacgtccaccgaggtccacagctcgcagccagtggcgcccaacggccagtggccagtcagcgccaaggtggccgccggcggcaccaccaggagtcccatcaccaggtcggctgcggccagcgaagtcacgaacacgttggtcatggtctggagtctcggagtccaggcgatggccacgatgaccagcaggttgcctcccacggtggccagcaccgccagcgccagcag

SEQ ID NO: 233592 - DNA, 109 bp, Homo sapiens; identical to SEQ ID NO: 201391
  chr8:37887621-37887730
  hyper

SEQ ID NO: 233593 - DNA, 215 bp, Homo sapiens
  chr8:37888750-37888965
  hyper
cagcagcgcctcccgggcacctgtggcacgttccccatttacgcgagtgggatctccgcgggggggaccctggcgccacggccagggctgtgcagaaaaacacgttcttctgtccggggagaggaggaggcaccgtgtgacctccctgggagaggatgaggaagaggaagctgagctggcacgggtgggggggccagcctcgggctgccctcagg

SEQ ID NO: 233594 - DNA, 62 bp, Homo sapiens
  chr8:37963270-37963332
  hyper
cgcccgaggaagacgcgggagggaggcccgcccctcgcgaatcccgcggctcctggagccct

SEQ ID NO: 233595 - DNA, 427 bp, Homo sapiens
  chr8:38008204-38008631
  hyper
tgggtggcctgagcctcatccgctgagagctggccaacccctcatcgcctccttcccgcagcgctcacccttcatgttgcgcatgtgtctgtaggagctcccagcgcacagcttgaatgtcgctagcagcattgtttcctggcaaatgtggcagtggtggggtcgctgccgctgctgctgccgccgctgctgctgcctcttctctcaagggtggttcttcgtccttcctgagcccctcaagcttcgcctctgagtcccgcagctgcagcctggacctggtgttctgcgtcttaaatgtcccccgctgaaggctgtgcatcatcatcaggagataaaaacgccatcactcactgtgcaaaggaaggggtcaaggatagagcgattgcctcacactgctgctttggccgtttgtggggagcttggggcg

SEQ ID NO: 233596 - DNA, 42 bp, Homo sapiens
  chr8:38034153-38034195
  hyper
ctcttaaggaacacggtgtcttccttcgtctccgggttcccg

SEQ ID NO: 233597 - DNA, 43 bp, Homo sapiens
  chr8:38034987-38035030
  hyper
gcaatttatcctgcgtggctggcaggccggctctcccggggaa

SEQ ID NO: 233598 - DNA, 43 bp, Homo sapiens; identical to SEQ ID NO: 201393
  chr8:38089777-38089820
  hyper

SEQ ID NO: 233599 - DNA, 254 bp, Homo sapiens
  chr8:38240655-38240909
  hyper
tcgcatcgagggacgtgagggacatttgtcctagagggcccaagataagaacgagaggaagaaccgggaggcaactctccgtcatcctctagccccccgcatcctaggaaacgtatggaaaacaatggaaggttaagtgtgtgcacagtgatctggccctgcaggagtgtgccgaccaggtgatatttcctggggcctggtgataaggatttggaaggttacagcacagagacgtgaacgtaaaaaggaaacag

SEQ ID NO: 233600 - DNA, 1180 bp, Homo sapiens
  chr8:38323127-38324307
  hyper
gccatcggcaaagacggccggcaatagcagaggctgctgaacctcggtcaccgagaggaaggtggatgacccgggcgtgggggtgattacccagaccaaggcgcgtcccacggggccctgctacttcgcttttaaacaagcctcagggaggaaaccgggagcccgggccaagggaggaaaatggccactttctgctaaacagtctcaaggctagatagtattccaaaaaaagcgctggtccggaggtgcaaagggtagggcacatctgcggaggaaacagtcaccttaattaccacgtctagagaaagtgcgatttcattacagcctccaaaactaccgcccaaagaaggaaaccagagaagtgttttcaatttgaaagaggctggaaagaagcgggtaagacaccgactctccccaccctcccggcaactttggaccacaaggcgctttcctgcctcaaagactattaccaaacacaactcgaaaatccaaccccgctttcaaacctgtagccgttatttaaacggtaaaacaccccactttagtttccgggggatgcggcccaaatcagtccttaaaaacacacagagagcgcctctggcagcagccgcccacgcccccggccctgcgcaccgggcttgctccgggaggggcgcgtgacgccaccgcggggcagccgagaggggaccgcgggctccgggcagggcaggcgctcccgcagctccagctataacacaagggagagaaagcaacgctttggttccagaaacttccatcgtcaaggccagttctggccagacgcacagccaaagagcccccctagtctagcggatgaaccgttcgcgagtggcaccccctaaaaccttggccccatctcccaagatgcctctttactgcgcaatccagaaagcacccggaccgccgccacccaccagcggcggcgaataacttggtgagatcttaaataactcgggatccaagggaactttcttttctcccccgaatctcaacgccgcatctccaagtctccagaaatgttaaggagggaggtggtcaagacaggctgaagaatctgagttttaatttgggggagggggaggggaggaagagggaagttaataatgcggctgcggtgtacccgtgtggggtgaaacggaaccagatgcggctgctacatctg

SEQ ID NO: 233601 - DNA, 740 bp, Homo sapiens
  chr8:38324508-38325248
  hyper
cgcaaacatgggtcgtagcctcacttttctcccaaccccaaacataacggtaggggaagcgaggtgcagaggggtctgggccagagaagcatacgcatcgctgccgagtgaaccacaccggacaaaaaccctcatcccttcccccacctctaggaaccagattgggaccgaacggtccttccgcccccatcccacacctcggcttaacgaccgtgggttgtcctcccgttccccaaacttccgaccctttcagagaccgtccaagtcataagatcaccccttctggaaaggggagtcgtttttcgctctcagctcaagcagattcagccatttggtgacgacacctccttaaaacctattccaagagaagctaacctagccctccacgtcctccgcagttcatctcccaccccatccgaccccaacccgcaccccaggctttcccgggggtggaaaaggacttaggaatgccccggatttttagcgttgagcccaaagctacctgctgaattgggggtgaatccccaaaaggggaccaaaaagacatggagtggaatgcaacacacacacataacacacacaacgcatcccacctcgccgcccactcccgccctcctccccagtccaggaaaccgcgggcctcgccgccttcgccccgggcctgtccctcccgggactcactgaggagccgccgccgcctcgccagctcccgagcgcgagttggaggaaaagttgggcgg

SEQ ID NO: 233602 - DNA, 161 bp, Homo sapiens
  chr8:38325728-38325889
  hyper
gggagggctcccgtccgccacccggggtctccagaccttgtgcccccctcctccagaacgcagcggcggcgcctcactttccttgcagaccgggctccatcgccctgcggaggccccggcgccgcggcgtgcccgactgcagcacgggtaccgtgcgccct

SEQ ID NO: 233603 - DNA, 247 bp, Homo sapiens
  chr8:38326069-38326316
  hyper
caccggcgtcccggctcccgctagctgccgcccgccgccgaggacgccgcgcctgtggccgcaagagcgctccgagcgctatgcgccggcggggcgcgagggctcgctctctcactcccacccgcgctggtccctcctccgcctccgccccctgcagctgcctgctgggccttgtagttccccagccgcggccccaaaggacggggagcgggccgagctgtccggcgctctgcccttctcttcctac

SEQ ID NO: 233604 - DNA, 118 bp, Homo sapiens
  chr8:38614705-38614823
  hyper
gcggggaccctacggccgggcgccccaccccgccctccctcgccccacccttcctcccgccccaccgcctccccgcccagggtctgggcacagccgcccgccgcccagcacaggaggg

SEQ ID NO: 233605 - DNA, 124 bp, Homo sapiens
  chr8:38645089-38645213
  hyper
gagccgcgctcatggcgttcagcccgtggcagatcctgtcccccgtgcagtgggcgaaatggacgtggtctgcggtacgcggcggggccgccggcgaggacgaggctggcgggcccgagggcga

SEQ ID NO: 233606 - DNA, 245 bp, Homo sapiens
  chr8:38853840-38854085
  hyper
cggtcgcattttgcgagtggctccgagacacacaatgcagcagaagtaaattccccagcagcaaagccgcctggccgcacagaagtaagtaactaaccgggcaaccacctagcaccatcttcccgggcacaggagcggagacccggcctcaaccacaaccccaggccagcagcacagacccaagaactgcgtggtcaggcctttccgcgtagccccgcccgcgtagccccgccaaacagccaatg

SEQ ID NO: 233607 - DNA, 117 bp, Homo sapiens
  chr8:38965123-38965240
  hyper
ggcccttcgtgttccggacgctaaacaccgagagcaccccgtctccggggcctccggagaacgctgtcccatgaacgtgcggggagcggcccccggcgtccgcgcgtccccgcgtcc

SEQ ID NO: 233608 - DNA, 140 bp, Homo sapiens
  chr8:40809174-40809314
  hyper
ggtgaatgacagaacgttaatcatcagttcacctccaaactcatccttgtgaaatctgaaaaccactgctccctttctggaggggtccccaccaggctctaccaacaggggccgctagagggtaacggaaggctggagga

SEQ ID NO: 233609 - DNA, 666 bp, Homo sapiens
  chr8:41165685-41166351
  hyper
tctgaactttctacgctttgggtttttgttttttcctcccgtctcagaggttaaaaacttcgatagggactcggagtcctcctagaggagagggaagctcccctgttatttaaagcgcaaggctttgtttcaggtatgggaaaggcgaagttggatcccaggaagagcggctccggggaccacagcgagtccctgcgaggccaaggcgcagagctgccgctcccgggccagccccgccgtgcacctgggtcgcgaggggcgctgagcgatacctgggacagaccagacgcgcttaggaatcacgtgcacagcatgcgagcaacctcgggccctcagtccccagcaccgggacccagcggcgggcgggcgtagggtggcgcgggttctcctgcagctccggccgggggatggagggggcggctcgcgcacgtgggaggaggcagccttaccttggggcttggaggcttcggtggcattgggcggcgtcatggcgatgcagacgtccccctcggggaacttgtcacacttaagcatctcgggccagtagaagccgaagaactgcatgaccggctcgcacgagtcgcgcacggcctcgcagagccagcgacacgggtagatgggccggtccaggcagacgggcgcgaagagcgagcagaggaagacctg

SEQ ID NO: 233610 - DNA, 217 bp, Homo sapiens
  chr8:41167131-41167348
  hyper
ccagacgcggctcaacaccccttaaaaaacaaaaccaaaaatacataaataaaagggggaggaggaaagagacaaggggagaaaaagaaggggaatggatcacggcgtggggtggagagagaccagggcggacgctgtaattaactcgcattggcttgcagagaagcggggagcctggatcatacttgcaaacccatgaaattatgaagactttttt

SEQ ID NO: 233611 - DNA, 264 bp, Homo sapiens; identical to SEQ ID NO: 201397
  chr8:41168154-41168418
  hyper

SEQ ID NO: 233612 - DNA, 240 bp, Homo sapiens
  chr8:41168656-41168896
  hyper
acacggtgattccacggtgcacacaggaggcttctgcagatggatgacttctctgtcatttcgtggccaatggaagatgccttgacactcaaaaggtgacatggaggctggaaggaaaacacagagaagagagagcaagatcgggatggccaagggttaatcccaagacaattggtgaggccggcctgtggagctgaggaagacattcctcacagagaataagaccgcaggagacccggc

SEQ ID NO: 233613 - DNA, 39 bp, Homo sapiens
  chr8:41347781-41347820
  hyper
gaagtgacacagccgggaaactccgcccctcacaccccc

SEQ ID NO: 233614 - DNA, 47 bp, Homo sapiens
  chr8:41436144-41436191
  hyper
gagggctgctgggcgttggagcaccaggaagcgccttcccctgtcat

SEQ ID NO: 233615 - DNA, 168 bp, Homo sapiens
  chr8:41511161-41511329
  hyper
agcttccttgggccgtcaccgaatcggtcccagccgcgctgtgcggcccccctgccgtggcccccgggatgggggaggatggaggggggcgcctctgcgccctggaggccgggccggggtggcctctggcggagacggcagccgtccgggctcgccctgcagctcctc

SEQ ID NO: 233616 - DNA, 795 bp, Homo sapiens
  chr8:41624598-41625393
  hyper
ctgcctcccaaccccggctccagcccctccgcggccgcagccttcaggccagaggaattttcctctggatcctgctagaagcctcggcagcagaagggcagccccagcgcgcgcacccgcacccgccggggaaagttggcgccgggcagccgggcgcggagccacaacccgcaggacggacgcagagccccggccccggccccggccccgatccccgcgccccggccccggccgggcaaccgcgacagctcgtgcactcaccgcagggtctggcccggacctgccctgtcgcgctgccatcgtccggcgcccgcgctgaaatccgagcccggctcccgctccccctcccggttatctgctgggcggcgcggggagcgccagcaagttacgcggcatctggctaaaaatacaggcgccctccactcgccccggcccggccctggccctgcgctctcccgcccgccagcctgccgctaatgggatctcttcattttctctccatgattatgtcagatgggaaagttaatgcgaagcgctctccggagagcaggcacctgctgccaagccctgcgaagggggtgcgcgcgggggcgcgggcgggggtgcagccccagctgcaggtgccggccggcgggctcggggcgggcgtcctgcccctgcggaggggaggcacacacgtccagtggaggtgaggagctccaagctgcatggcctccctccctgcctcccgcctccccgaatgccctggtgaatgggccccggagcttgccgagacgtggccggggtgagctcagc

SEQ ID NO: 233617 - DNA, 856 bp, Homo sapiens
  chr8:41685765-41686621
  hyper
ctcccgctccgccccgctccgcccgtgctgggctgtggcctccacaccaagcagccgccctgggccgccttccttcgtctgtgcgtgcagcgccgcctccttcagcttaggcccgacactccatgaactctcattttccaccttctccgtctccagcttccaagctgcacagggccaggccgaggtacgtgatggcgggcactgaattacagatcccgtctgtggccgccagcctctgtgtcctgccacctcctccgagaggacatcaccgccaccaggtggagcgagtctcctcctcggcgctccaaccacgtgctgtttattactctgtggggattcccataccgaggcctcttcagttcctggaacagtagcactaaaaggctcctgagtgcctctgttaatttgattgttctggttcgcactacaatgaccgggctggagagggggcgctcgtaatgaaacaggaactgctcctcgcgcccgctccagagtcctttacatctttggggagagggcatacggggagctacatttcattttcctgaagattttccacgcgaaagtgctggggagagagttgggcctgggaggctgcgccttcttcccgcgaatcccgaaaactgcgcggcaaaggcgggttccgcagaagtcgcgcgtgacccggggcgccgccctcctcggggcccattcggatctgccgcccgtcctctccagagcgccccctggcgccctctaggccatcttgattccaccgccgcagttgaaagaattaataaataaatcctagtctcgcgtctagaccggtccgtgagggtcccctgctcaccggacaccctgccgcaatctctgctgt

SEQ ID NO: 233618 - DNA, 141 bp, Homo sapiens
  chr8:41753393-41753534
  hyper
acctagggagaagccgggcagagctgcccccccccggcccgctccccggagcctgcagccgcgtttacccaaaccagctctcctggaaagccagcgggtgcggcgcgcccgagcagggcagcccaccacccgcagccggca

SEQ ID NO: 233619 - DNA, 54 bp, Homo sapiens
  chr8:41755154-41755208
  hyper
gctcagccaaccaccccgtcacgccgcacaggagccagccggggtccccggctc

SEQ ID NO: 233620 - DNA, 114 bp, Homo sapiens
  chr8:42010325-42010439
  hyper
tccaatcaggactcggggtctcggagctgtaccaatcggagatgaccgtggcctcaacagggccaatcgggggactcgagcccgacaacagggcaagccgccaacagcgatcaa

SEQ ID NO: 233621 - DNA, 146 bp, Homo sapiens
  chr8:42751623-42751769
  hyper
tacctctccaccgcgaaggaactacctcgccagttcccggcgacagaggacagattatttccaggaccgctcccgccacccctcccgggcaacccactagacgtcccctttctaatttggagtgcgggtgcgggcgcacgcgcact

SEQ ID NO: 233622 - DNA, 52 bp, Homo sapiens
  chr8:42997115-42997167
  hyper
caaggctttccctgtcacctggagcccatgtttgggccgcacagctttccta

SEQ ID NO: 233623 - DNA, 757 bp, Homo sapiens
  chr8:48100165-48100922
  hyper
gagccgctgcagccgctgcacgctgcacacacacggcacagtccctgggtccgggagccagagcagcgccactcggagacgggatggttccgtgggttgtgtaggagcacaggaaagcggaggccgggccacacagcaccgcgaacccagcagcccaagcccagcggaccaagcagccacccccgggagccgccactgcctggagcagtcaccggcgggagcctccatttccaggagccgccaccgctgggagctgccacagccgggagccgccaccgccagaagcctccatctcccgggagccgccatcgctgggagccgccacctccaggagccgccacggccaccgggagccgtcaccgcagggaacctccatctcctggagccaccaccgctgggagctgccacctcaggagcagcggcagcactgggacccgccgggccccctcgcacccagcggctctgcaggtgccctacacccgggaggggccgagggagcccacgccgccggcgggaccgcagggatttgctggctctttctgcgctgaggggtcgcggcgcggggcggaggtcgggtggggaaagctggagccgcagggaacgcgcaggacaggctcgctgggtgtcgactctagccctctgtcagagaccttgggacccgcgcaatgtggcagtggaaggcgcagggtctgaccccggccgcggccgccgcagcagctgatctgtcaaccccggccagagccgagccgcctgaggc

SEQ ID NO: 233624 - DNA, 76 bp, Homo sapiens; identical to SEQ ID NO: 201400
  chr8:48604790-48604866
  hyper

SEQ ID NO: 233625 - DNA, 50 bp, Homo sapiens
  chr8:48649725-48649775
  hyper
gctgtagcttctttgcgctcctatgtcccaagaaactgcagcgggcaccc

SEQ ID NO: 233626 - DNA, 62 bp, Homo sapiens
  chr8:48650075-48650137
  hyper
tgttgttgcgctcgcgccgctgccggtactcggggctgccgcggtccgggcccctcttgccg

SEQ ID NO: 233627 - DNA, 416 bp, Homo sapiens
  chr8:48650437-48650853
  hyper
aagagctcgtcgtggcacagctccagggtgggcacggcggccatggagtcgatgtaggcgctgaagtcgatggcgctctcgtcgtcgtacatggcgggggcggcggcgcctggctcgcctagggcccctggctcggccccgcggcccggcttgcccgcccggcccggttcgtagaagggcgcaggctccgcaggccagggcgcgccgcgcgccgggccgtccaggctgaagagcgcggcgctcatggcggcgtcgggccgggctctgcgtccaagcgaggctgtcacctcgctgggcccagccccgccgccttttctagccccggctgacgtgcacgccccgccccgactccggcaccgcgggggcgccccggggccgcgggggaaggggcgggggcgccctgggagccccccgga

SEQ ID NO: 233628 - DNA, 355 bp, Homo sapiens
  chr8:48651093-48651448
  hyper
atcaaaaccaggacttggccgcagcgcgcgcgtcccaggccggctcctgtcgccggagggcggggggtggagacccgtgggagaggacccgcgcgtccaaggacgccccccgaccgtgggcacgcgcgtgaggccctcgccccgcgcctccaccgtgggaccagatgcgggaagaggcgtgggggaccagacgtggggacagcggcggcctggcaggcggggagggctgcccgcaccgcactcgggcgcctcggggaatccgggccggttctcgctgctctcctcggaggtcccgggtccggccggccctgggggtcgaggcccagagacgcggctgctgcgtcctggccgaaag

SEQ ID NO: 233629 - DNA, 50 bp, Homo sapiens; identical to SEQ ID NO: 201403
  chr8:48872787-48872837
  hyper

SEQ ID NO: 233630 - DNA, 69 bp, Homo sapiens
  chr8:48920804-48920873
  hyper
ttcattttgagagcgggattcacaagggaattgcggaaacagcagcgaggccccgcgacccctcggccc

SEQ ID NO: 233631 - DNA, 50 bp, Homo sapiens
  chr8:49292489-49292539
  hyper
cctgtgcgcggccccgggggccacatgtgcccggccgcctgccccagccc

SEQ ID NO: 233632 - DNA, 625 bp, Homo sapiens
  chr8:49292889-49293514
  hyper
ggctccggcatgggcgcaaaaacaccagtgcggaggagttctcgggaccccccggggctgcggggccttgcggggacagccccaggcccggagctgcagaaacacccagaccccgcgcctcccggaaccacgcgtctctgtgcacagacattcctgggggcaggctcctgtcctttaacacagtctcaaaggagtcttcaaaaacaaaaagtttacaagcactgatagggaaaacagaaggatgataacaccaagagggactttcccgggagaggacggcttccagggactgagaaaggatgggcaagtgggcggggcccggcgccgtgcgggcagggctggcgccgggagtccccagactcccccgcagtgggaagcacctctcccattcacgccgggcaggacacctggccgggcgggggaggcagcgcaagggccggccggggagtacgggactcgagccggggacctgaggcaggagccaagcatcgtcgcagggcaaccagcagaacggagagggaggcgcgggggcgaaggctggcgggagccgcgctgagggcaggagcccggagccccctagggcagcgccgatccgcccgccccgtcccgccgagctgggcctccg

SEQ ID NO: 233633 - DNA, 653 bp, Homo sapiens
  chr8:49309322-49309975
  hyper
tgagtcccggggcacgtccccggcacaccatcccctctcttgggtgagagtctccgggtgactccccgcagctccccctgctctcacctccaccggcctccccccgccgtggttcccgcggtgcgccctccccaagtcccttcctcccactgccctgggtcccagagcacatccgccggcggcccccacatccctctgcctggagtcccggtccccgcgcacccccgcccccgccctgccttcacctgccgcaggccgcccgccagccccgctgaccgccgcccccgcgcttcgctggcgccagcctctcgatgggtcttgcactttgattatttgtgttagcagttaatttagcaccgtggccacgtgtgccaaagctgcctccacttcctccgggctcccaacaaacggcacttttatgagatcctttcaaagcggctcccaggctgtctcccgcctcctggtccccgcctctcggtgcagactccatttctctgccctccgccctccaccggggcgccccctctgcacaggccttatggcagctgcgatctttcctgccgttgcaggaaaggagctatttctggcaactctgtccctccacccagggcactcagcctgatctaatggagatttaccgagcaggtccctgc

SEQ ID NO: 233634 - DNA, 47 bp, Homo sapiens
  chr8:49469144-49469191
  hyper
ttaaacagcgaagaagccagagggtcctgttccgtatggggggaggg

SEQ ID NO: 233635 - DNA, 172 bp, Homo sapiens
  chr8:49647749-49647921
  hyper
gggcgcgcggctaccgagaccctcgcgggacccccgcgagccctggtgctgggtcaacgcggtgaggtctcagttactgatctcgtgcgcggccctaacagacggtgtagccaaggcaacggctcagcccgccgcggattggctcccaggctgcccgcgacgtagccaaagc

SEQ ID NO: 233636 - DNA, 513 bp, Homo sapiens
  chr8:49782679-49783192
  hyper
ccaagcttcgcccccggctaaacacccccttggcgtccgcctgggggtccccatgaaagtccccgcacgccctccccggccccgccctcctcagagcgtgggccccgcgcgccgccaccgcccggccgggaggcgcggggctccctagaaggctcgggcatgtcggagggagccgcggtgcagagacttgccacgcggctgcccgggcggcgcgcgctggagcagctttgtttcctctgctcccgacgggcatcctgccctgcggaacacccacccgagccctgcgcgggaggggcggccgggaggcgcgcgggcatgcggaggggaaacagggctgcagcttcaagcccaggcaggacgcccttagtcaccttatcggaaagtgggcagcgccgcgtctccggttagtcagagccccaggtaaataaagagctcggtgtctgcggggctctggcctcagtggctcgctctgtcactccgctttccaatacacgcacccgcaggactttcttt

SEQ ID NO: 233637 - DNA, 168 bp, Homo sapiens
  chr8:49833818-49833986
  hyper
cggcatcttgccagcgggtctggcgggcgcccggcgcggataacggtccggcgggaggacacggcggtccctacagcatcgcggcgggccaggctcgggcaggggccgtgctcaggtgcggcagacggacgggccggcgcctctgaagtcacccggctcctttacgaa

SEQ ID NO: 233638 - DNA, 447 bp, Homo sapiens
  chr8:49834211-49834658
  hyper
cggtgagccccgcccgcgatccacgctctctgggagctaggaggggcgcaggagccggggtctctgccctgcccgcctggcttccagatgtggtgcagcgccagcgcgcggggacacagtgtccgccaggagaaggaagggccgccctgcaccacaccaggccagcctctggtgttaatgagagcctatatttggaagtggcatctggagaggtttgccttgcacaaagaccaaataattacctcttggcttttgaaaaaggaagggggaagcgggaagacaaaggcgcctgtgagcgcggaggacgctctcctgggactctggcctggagcgggactgcagccttgcgtgcggcgagggcgctgcgctactcagggcttccgcgaagccaggggcagcgcggccgcgtgcaaattaagtactcatgtcaccgtgttagctatggtg

SEQ ID NO: 233639 - DNA, 1450 bp, Homo sapiens
  chr8:50822181-50823631
  hyper
gattccccaaacacggttttagagagaatcacaacctttaatagatcctctgttaaaaaagactgttagagaaagttgaccaagggcttcgttccacggcgaccgtttcctgcgtgtgcagctccacacagcgaccgcggcctgcaatgtgcggagcacagcgcggccccttccagccggagctcgcgagccgcggtggcggctggtggccaccccagggaaataaagccgttgctgctgcagcaaaatggctcaaagtccaaccaaagtctggccttttcctgtgagtaaatacgcggcctgtttggttttccgtcccgagtgattcccggctcagtaacgtttctcctccagggagcccactggaactccactggctgtgccgcctcctcgcccgtcccccgcgcgcgccgcaggccggtgcttggagagcgcaatgtccccgggagggaagatcccctacctggaatggatggttccagaccagcgggaacgcgctctaatccttgatggaagcaagcgtgggaggaaagcacaacgtctaggacttccctgtagtgtcagaacaggaagaagaacctgagaagtcgccggggaagggaggccaggagcaggcgtccggccccttcccacagcccgggagaaattagtgttgcgccccgcccctcccggacccccgtccccaccacacacaccagcgcccctcaccagtctttctcgaatttcctctcatgtctatcaataacctccttgtgcagaaatctacactgcacaagttaggagtctgcaagggcgggcggtgttacagtctcgctctttccattttccccttttactccacatagtttcaaaggtccacatggccctggttttgaccagttttccaacagtttcaacgttatgtatttcaacttcccgtctcagttcactggcgtctgcacccgttgccgagtgtgggtggctgagccctgggtgacagcactcgggaccacgcacccatacccttctttatgctcgttgtcagccagttgccaagagcgggagtgaagagcctgcaaggcccgggagagcgcggattccggagtagggaggcgagggggcagcgtgggagaccagagggaaaatgggctgaaaagccaacaaaaaaaacaacgtaaattgggctttgctctggctttacaaaggcagagattgtcgagccctctgactgtctttgtgccttctttatcccgtcctttgtgaaataagccgttttctgcccccactgcaggagcctaggctgtgggcgactcgctagcactgccctgggcctccaagctgcctgctcgctgagctcagcgctgacactcacaggagctgcgttcgccggatcctctgagaggctctgcaacgatcccgatccaattcagcagcgttttaaaaggtagccgagtgcagatgctttttcctg

SEQ ID NO: 233640 - DNA, 519 bp, Homo sapiens
  chr8:50823925-50824444
  hyper
cgtgcgtgtatgtgcgcgcccctgtgcgtgcgttttctttcatttctggcattaggaaactcgtgcagggccactgaaaagtcaggggaggctcagatgttatttcccagggattcctgtttttccagaaacgttgtcaccaaataagtatgagactgttaatttggagaaacaattagcccctacaaaaaaaaaaaagaaagaaaaaagaaaaaaaaaagaaccggaggggagaaggctagggcggaagacaaggaagctgctgcttggattcgctggtggaggaaagtgcgacctggacctgcgcttaggggctcccgtccccttacttcagcaccagaggggatggacagcgtctccggactgagctgcagccacagggacggaactacgctgccgccgccgctgtccttgccgccactgtcgtcgccacgggcagctgggctacttgctcctcgcagctaaaaggcggtgcctcctattaccccctcgcctcccggcccccttccttaatggatg

SEQ ID NO: 233641 - DNA, 86 bp, Homo sapiens
  chr8:52811697-52811783
  hyper
agctccccgcggacgccaaagtcaacaaggccgggagacgcccccatctggccccgcccccctcagggctcgctccgcccccaagc

SEQ ID NO: 233642 - DNA, 1219 bp, Homo sapiens
  chr8:53477524-53478743
  hyper
taatctcaggcttcccaaagcgagtgcctcgcccagctcctaggggaatccacggagccccaggcgcagggcaaaggatggggcgggatggggacatcgtacctgcgctccgggagccgctgggagtccggccggccccggccgcggggaggaaaagcaacggcttgggctccttatccgtgacgcgcgctcccctgcgcccccggggcctcccgtgggctccgtgcggggacaaagccagcgccagcaggaagagtgcgggcaaaggggcgccgggcttaaggggccgcatgttcgcaagccgggaggagagagcgggagactccgggaggatcccgacgcaggtccggagggtgcgcggcccaagagaaggccagcgggaccacagcgcggctacgcggccggccgcagtcttcaccgcgcgcctgcccttgtctacgtcccgggggtcggctggagctgcactgggactcggtcctcagtgtgccgaagcctaagcgctgcggggcgcggggcgggaacgggaggcggtgcctggggccacggggtcgtcccccaggatgagggcgtgtcccagcgcgcgggaccctcggaagtccgcgctgggccgggcgggcaccagcctcggactcagcgggtctcagggctccctgcgcaacgcctgcctcggatccggaccccgggctcgctctctggtcgccgtccccgggaggacccagtagggtaactgccgcgtcgccccggcggttctccctgggctctgtctcccgccgcctccaccccccgagcctcggggtccgtcacggcttcccctggctggcggggtcagtagaacccgcggcgcctaggtccggacggaaaaaagcagggccggggtgcggcctggatgagcggagatctccgcgccttgggctcaaaggtgcggggtgcgctctgctgccgagcccctgctcgctcaggaacactggccacgccgtcacgccagccgcccctgccccaggtctggaggcccgacctgctctcctaggcgcagcaccgcgttctcttccgcgtgggggagcggcgggcggaagaggtctggggctgggcaccggggacacgcgcccagctcccctggcctccctggggggagtggccggtttcagtgcttccccaggtgaaatcgccaaggttgaccagtgcgcccaaaaaagcagccggctggatttttcttcaaatt

SEQ ID NO: 233643 - DNA, 433 bp, Homo sapiens
  chr8:53854083-53854516
  hyper
gccccatcggagtgtgtatacacctgtgtgtgtgtgtgtgtggtgtgcgcgcgtttgcggaggcatgaaatgcggggaaagaggctggcgcttggcagtgactgcctagaatatgatacgaatagtgatccttctttctgtctgcccctactccttttctttgccttttccctttcctatccgtgatctcccctgaaaatgtcagactcccggagcaaggaacccggagtagcccgggcgcgcggttccggcgccccctggaggagccagcggccgagtgcttagcgtcggaggatcgcggggctttgtggtggagcactccggctgagcgcgcttcacagcgctgtggcacactggtcatcgttgcttatagaggatgccaagccccacccccattcccccaattggcctcgtctcttgtcttacttagatc

SEQ ID NO: 233644 - DNA, 69 bp, Homo sapiens
  chr8:54163283-54163352
  hyper
ctgaccctcactccctgccccgcccagcccccagcgctgcgctgtccccgcgctcaccggatgatcacg

SEQ ID NO: 233645 - DNA, 48 bp, Homo sapiens
  chr8:54163532-54163580
  hyper
aggcaggcgctcggggcgcaggtagggcccggctccccgcggaagatc

SEQ ID NO: 233646 - DNA, 151 bp, Homo sapiens
  chr8:54163880-54164031
  hyper
ccaattctaggcaccggcccctggtggaactgtccccagactgcctgagtccccagggtcaagcccccttcccacctcccagcacggagctctacctagaactgcacctcgaaagcccaaagcttacctatggttcccagagacaggcgaa

SEQ ID NO: 233647 - DNA, 86 bp, Homo sapiens
  chr8:54164331-54164417
  hyper
gcccgcccggagtcagcccccagctccccagcctcccagccccgcgtcccctccagccccgcaggctcgcccggcccactaactgc

SEQ ID NO: 233648 - DNA, 341 bp, Homo sapiens
  chr8:54570291-54570632
  hyper
acgcagctcccacccggcctcccctccgcagagctgggaccgtccccccaccccccatccttgctctgtgggcgccgcctgcactctctgaagcgcgaggctctgcacggtgtggggctggggcctttcgctccccttggctggctctctcctcctttgtcatttgcctttgtttgctgtgtgtgtctggttcaaagggcacgcctaccgagctggatagagtaaaggaagaatcagaaagagaaagcgctcagcgcgtgttgcttagcagcacagactcaaaacaggacaaagcaattagagaaaattatcacgggcggaaggggcggatcggtcccctg

SEQ ID NO: 233649 - DNA, 75 bp, Homo sapiens; identical to SEQ ID NO: 201410
  chr8:54754915-54754990
  hyper

SEQ ID NO: 233650 - DNA, 293 bp, Homo sapiens
  chr8:54755405-54755698
  hyper
ggctccagaatttcgcttaataaacctggttgaggcctggaagaaaagcaatctggcaaccgggggccgaagaacaggagaggaccaagcggcgagacaccagcacgcaccaggcaagctggagaaactgcaagagtcgcctgacctggtctgcagcctgagaccaaacaacgcgagggcggccttacctcgcgaatcctcgggaccccacaacgcacccaaagccggcagggagggtggtccggggcgccggggacacagccgggctggggcgccgcgtcagagccaagtag

SEQ ID NO: 233651 - DNA, 1768 bp, Homo sapiens
  chr8:54789094-54790862
  hyper
ctctctgaagtgcagcccttcgggcagctgaaggtctttctgcagataacttttctcagatcgaattttttggctacattgatactcttcggctctgtccttgccagaagttcggaaggattccagcgccccacaccttgcttgattcaccctcatcccctcccctaactggagaagccgctgggtcccgcgccaggctcgcggtggcttcagagtagcaggggagcaggcggctgatccggaggccagtgtggggccggcaagcggtgactgtctccagaggagcaaaggagccgagtcttgtttttcttggatcaggtttgggacttttattctgtctgaccatttccaccacttgcctcacaagagtctctgtctcgaagcacaggaccgaagcaaaatgcctaatgaagcgtgcctgaggaaggggcaggggcttgcaagtgacttgggaagaaggactggggcgaagggagaaaggaggttacgagttcgcacgttctcacaaaaccatttgaaaacatgagctggagacgccaaattctgggacccacgaaaggctttggagctcgctcgggctcctcgaagttgggcgtgcgtcgcagaacagtgctgggcgctctctttcagcattttcggcttttttcaagcccttgcgtagggtcgggaaggccgtgggtgggctcagtcaggctttaggtcgccaggaacccggctggtcctctctcgacttcttagcgtggggtcccgccggccctgccgcccgtggccgccgaagttcccgccctcgccgagggccctcgctccggagtggggcgcagacgcggccgccggcccgcagtcccccgcaggtgccgcccaggactagctgcccggcggaggccgagcacgcttggcggcagctgagcctccaccccaagccccagccggaggggcgcgtcccctgtcctcctcccgagcgagacgaacgctcagcagctcgttccctgggcgccaagaccgatttccaagtcgcccactttccccctcgagggagctgttggcgcttctccagaagcctcctcggctcccagctccagcccctaaaataaaagcaccttgccagagagcgggggaggggagcagctgaacgaggagaatgaaaatactgggagaacgaccccattctccaggaaaaggtaatgaggggaagtgaaacagtgtgaacttactcggaaatgcaaaccgagttcaactcacccaggagcaaacaaacgacagcaagacaaatcagccaccgcactcgcggcttcccagaaagggcctcatgaatgagaatgggttgctaggtttccttccctctctcctgacaatcgcttcccacaagacttccaccgccgaaagaatacaggccgggcctggtgactgcggagtgagggaaccgcgccaggcccacgaggccgctcgcgaccgctcccgccttcaggaccctggagagcggccgccgcgcccctgggacccacgcccaacccagaacacccgcgctcgcctcccgcgcctcaccaccccagcactttattcgctgcttcccgcctccaccttcattttttttggcaaccaccgctcttgtttttcacagacagattaaattgttttttgtttggcatgagggggtgtttggattggccgagctacattccggtttgtaactacactaaacgttagtgtaccaagaaactaagagcgtctcaaagatgacagtctgaacgtggcaggtgaccttaaaaag

SEQ ID NO: 233652 - DNA, 779 bp, Homo sapiens
  chr8:54791911-54792690
  hyper
ctcaccttctccggcgaccccctcccgaggctccccggaggcgcctggacttctcccccctgcttcccgccctgccggccgcccggctctcgagggggcacgaggagctgccgggccgcctctcgctcctgctcggggcggcgctggcactgcccggccgaccctcggggggtcgtccgctgaggcccccccatccggtagccaagcccagggaagaagacgccaccgctgggcagagctcgcctatgccggtgagtaccgtggtctccactacgccccacacccagcctccccaggacaccagcctctcccgattcttcctaaccccaactgacccgctccgctggggctagcagtagggagggtggcaaggtcgggaaggccgggacgtggctgggcaagtcctaggacgggacattggcggctcccgggacaccgcccctccccgcgggaagacactccaagctactttttcctgggccatttcctttccatggtccaagaaaacgggagggagccctcgctcttccccgaggctgcctttcaaactctcagcgtgtcgctctcctccgcctactccgagcctcccccaaacgcgcctccgcctgctcccagcgctcgctctcccactcccctgccctctcggcaggcaagggaggaaatgacgtgatgttatttttgtgtcaggtcagtttccagcttcagcttagccctccgggctccagggaactaaccccgcggccccaccgggtcccactcccgaagggacgctgcgggct

SEQ ID NO: 233653 - DNA, 73 bp, Homo sapiens
  chr8:54792870-54792943
  hyper
ctcggttgctgggtggggcctccgcgctctggctagctgggagggggcgagggccgctttccagggcgggaag

SEQ ID NO: 233654 - DNA, 1218 bp, Homo sapiens
  chr8:54794143-54795361
  hyper
cgcctccttttaggagaagtgcaaccagggcaggggcaccgaggggcagggtgaggaagtggacgccccacgcgtggaccctagaagaccgactaggtatgggcgttcactcggagcctctgttcacgctcttgaaaaccgaatgaacagagaagtgccctccacccttcgcctgcgccagggcagttaacgtgcaggcgccgccgggattttcctggaacaaacccgggcacttgatcttccgcaccctcggagctgccctgggaagtcgaaacaagtctgggcgcccggactgcggagactggaaagcagggggcggagggcgggagactgggggcgggaagtggaggtgcaggctgcagctggggaccgcggtgggcgttggaggggagggtctgtgtgcgcggctgtcctccagcgctgggggagcggacgggccaggggcctctagggaagcggcgctccgggaccggggtggctttcccgtctctgtgtgcgcggcgatccccacacccagctcgggcggaggagccctgagagaagcggctagctgagagtggggtgggcgttttggggaaaggtttgcgtgcgctgcggccctaccgctgctagagaagtggaagagagagagtgggcgccgggagggggtctataggcgccgcgacctaccccatctccctccacgcttgtgggggagtgagtggggaaggggctttgggagaggcggcgcgcgggcactgaggtgcatcgtgagcttcccggacttgacagcatcaaaggaaaatcctggcgagcagccagggccagcgagcgaccccagcagcagggacgcggccgtgcgagagctcgcggacaggcgagggggatcccaggggagcagctgctgcccacgggccacgggcgatgcacggagtggagaagtgaacgtggtctacaggatttctgtccggaaggtggagagcgctacaggggaatctcctcgattcctgtccgtctcgtaacttggcaaaagctcgcgccactgccctccggcctgggcgacagagcaagactccgtctcaaaaaaaaaaaaaaaaaatggcaaaagcctatcgctctttgtcgaactccccacgttccccagtcacctggctggggttcgttggtgtcaaaaccccagccttggtgccctcggtgccagcaggaccctcgcccactggctagcggaattaggcacct

SEQ ID NO: 233655 - DNA, 262 bp, Homo sapiens
  chr8:55366131-55366393
  hyper
gagatctaagaaacactccacggatgagtttctgaagagggaagtggaccgggaacagcgcatttcctgcttcgcctgtgcaaatcccaggcggggccaagcgggaacggggacacggtctaagagtcgcccgctgccagggaggggttggggggcagcctcgaggggacaccgcggaaccagggagggatgcgcatggagggagtgggagaaggcgtccaagtaaaatgcatgctccggtcatcgggggtaacgcgcgtcc

SEQ ID NO: 233656 - DNA, 90 bp, Homo sapiens
  chr8:55366993-55367083
  hyper
taggtgcccacgggtccttcccgatcgacttgagtgtccttcctccagcccctgctttcccagcatcgaaaacacaaaagcctgccggaa

SEQ ID NO: 233657 - DNA, 385 bp, Homo sapiens
  chr8:55367263-55367648
  hyper
gagcctcgggtccggcccaaggacccggggacgtgagcgcaattagtagccaggagccctgcgaccctggaccgtgcagtgctaacgcacccgaacggctatgcgagcggtgtactcggctcttacttgtgaaagttgtttcccccaaccccctgcgtaaatctcttgtgttgagaaaagcaaggcttgcaggaagccactccggatgtttgctgctttacatgtggcatctgtggctggctctgataacgtcccggggcaccacgtattaaagtgaagagactgaaatagaaggctccacacaccgcgcgcgggtcagcgacgtcgccgccctccacactgccccccgaaatataagacaagcgaatgatcagaagaaatgaga

SEQ ID NO: 233658 - DNA, 993 bp, Homo sapiens
  chr8:55370185-55371178
  hyper
tctaaacgaccttgggcaagtacgtcgattccaaggtacaatcagccctcccagacggcttttcgagtctccctaaccccggtgggagaggacgcggcgccagagcccagctccggctagttttcccgggggcaggtgtagccttgggcgcggggccgggggaggggcaaggggcgggcgtggggttggactgggacgtgggactcggaccacggcctgggcgtgggcctaacgacgcgggaccggcccgccctcgccgctccattggccacatctgtgcagaaaaggccccgcggcccaggggcgcccgcagtgtcactaggccggctgggggccctgggtacgctgtagaccagaccgcgacaggccagaacacgggcggcggcttcgggccgggagacccgcgcagccctcggggcatctcagtgcctcactccccaccccctcccccgggtcgggggaggcggcgcgtccggcggagggttgaggggagcggggcaggcctggagcgccatgagcagcccggatgcgggatacgccagtgacgaccagagccagacccagagcgcgctgcccgcggtgatggccgggctgggcccctgcccctgggccgagtcgctgagccccatcggggacatgaaggtgaagggcgaggcgccggcgaacagcggagcaccggccggggccgcgggccgagccaagggcgagtcccgtatccggcggccgatgaacgctttcatggtgtgggctaaggacgagcgcaagcggctggcgcagcagaatccagacctgcacaacgccgagttgagcaagatgctgggtgagtccgagtcgcagacccaggcggccgggcgcgctggcgcgaatcgctaggccgatttcttaaaccccaaactgttctttgcgagcctgacgcccaaaaccaggggtgtgtagcggccacgtcctttcttaaggctctgggttcccttcccgcttcccgccctccgaccc

SEQ ID NO: 233659 - DNA, 1153 bp, Homo sapiens
  chr8:55379017-55380170
  hyper
agaggtcaccggagcgcgctcccctcgccagggacctacactcttcccgctgctacattaggccgcattaacaaggatctggattcactttaatttaaaaggtaaaagatcttaggtctgatgggggagtgcggcgaggagagctcggaccgcgacgtcgcgcgcccgcttcgaggagttttgagctcttagcttggtgccggggcccgcccggcgctagatgaagtgctcgtttactcggcctaagccacggtgactcgaaggtgagaatgcaacttcgcggtgcaccggctcaggggcctgcctgccgcgccaaggcttcggaagttctcagcgggaccgctgggacaggctttcctctgagggaagaggaggggatttgtgcctctgcacgttctttcctgtggaggggaaaatcaaaccctgtagccgtccgctgccgggtagggatcgggcgatgctcggcgcccgagttctccgccgttgaggtggagcccggcggcgggagcttagattctctgtgggccacatggtctcagaagaggccccgcggcccgggggcgcccgcagtgtcgctggaccggcggcagcgctggccacgccgtgggctgggactggcccggaacgcgggtggcggttcggcctcggagacccgcgcagccgtcggagcatctccgtgcctcgctcaccaccttcttttcctccgcgtccggcggagggtttcggcgcgcggggcaggcctggagcgccgtgagcaggccggatgcgggatacgccagtgactaccagagccagacccggagcgcgctgccggcggtgacggctaggctgggcccctgtccttgggccgagttgccgagctccctcggggacttgaaggtgaagggcgaggcgccggccggggccgcgggccgagccaagggcgagtctcgcatccggcgccttccaggtggggcgaaggtcgagcgccagaggctggcgagggacccccgcccagcttgacgcccagctgcgcccgacgccgggggaggcggagcgcggggaacccgggcgccgggaaccccggacgtgggagggctgggcttctgcgcggggagacgccgggcttggcgaacatcctcaagaaccggtcggtggctctacctccgaaaac

SEQ ID NO: 233660 - DNA, 46 bp, Homo sapiens
  chr8:55382669-55382715
  hyper
cctccgggaggcggcgcagcgcggggatcttgcgggaccaggccag

SEQ ID NO: 233661 - DNA, 93 bp, Homo sapiens
  chr8:56014480-56014573
  hyper
cccgccgctcctctcggtcccggcccctcctccgggtccctcctcctccctcgcccctcccgagccagggtgggagcgacggcagctggaaga

SEQ ID NO: 233662 - DNA, 249 bp, Homo sapiens
  chr8:56686112-56686361
  hyper
ccgagcggaggcccggcaggcgcgacccgggctgcgtacgtcagagctgcctccgaagtggtaaaatgtgctgcgagaagtggagccgcgtggcggaaatgtttctcttcattgaggagcgggaggattgtaagatactgtgcctttgctccagggcatttgtggagtaagtagaaaagagaatctcttcatgttctagcacagtcattacccagaaatgtaggtattgcaaacgtggttgtaattgat

SEQ ID NO: 233663 - DNA, 75 bp, Homo sapiens
  chr8:56791850-56791925
  hyper
aacggagaacttgccgggccatttgactctacgtcatcccctcccccatcaatgccctgaacagcctcctgtaca

SEQ ID NO: 233664 - DNA, 124 bp, Homo sapiens
  chr8:56987181-56987305
  hyper
ctagtggagttggcgggaaaggcacggctgcgggcgccccctgtccgcacggaggagccgaagtcccgcagggtggggtccccgcctgcgccgagagggccacctggtcgagagaacaggcgac

SEQ ID NO: 233665 - DNA, 267 bp, Homo sapiens
  chr8:57025552-57025819
  hyper
ctcggcctctgcgccgcgctgggtctccagcagcgctggatgacgtccccaaggcgctgcccggggagcgagtcctcgaagacggcagcggagagggacgggcgcaggtcgtaggccaccaccgcgtacagtatgtgctgccgctcccccgaatacggcgcctgcttggtagtcatttgccagagagtgatggcaaaggaataaatgtcggctttaggcgtcacgccctctcctttcaggagctccggggcgcggtgggtgtatgtg

SEQ ID NO: 233666 - DNA, 473 bp, Homo sapiens
  chr8:57026043-57026516
  hyper
gtgaggctcccctgcgtccccctcagggtggccggcggcgccatagatgacttggtgtaaagtgacgttgccaccgaactccatgatgatggtccctaggctattggaccctgcgggcgtgcgcgtgctggcagccaccacgcgcacgatgttatcgtggcgcagccttgctacgttgagctcagcccagaaactccgccgagatgctagtcggttcttggtgcacttgttcacttgctttatggccacaggaacaccgcggtaagtcgccttgtacaccgagccaaaccctccagctcccagcctctgcagcaagcacacctgctcccagtcaatggagcaccaggccagccggcgcggcagccgcggggcccgaggaagagtggcccccagaagcagcttcgcaggtagctctgagggactgctgcagggccgcgcgtccaccgatggggaaaactcgctccggaggtagg

SEQ ID NO: 233667 - DNA, 705 bp, Homo sapiens
  chr8:57069523-57070228
  hyper
aagatgaaaacaccaataaacgaaaagtagaaaaacctatgtggacgcatcaacagatgctgaaaaggcatttcctagaagtcggcagccaaacttggtaattcttgcgtgtgataaaggcagccgtctgttctgctcagaaggggtttcctaacaggaggggccgaatgcaggcgtcacatccacgccgccccaggtcgtacacctaggccgtccgggctgtcccagagccgcaggccccgcatcatccgcgtccttagcgcggggcgcggagcccgcagccaggtgcggccgagacccgcgcgccagggaaagcggcgcagcggacgcgggagaaggctggtgggtacaggttgcctccgggccggagcgcccatgcagggcgagctgcgctccgcacaaaattgcggtgggggcgccagaccgccttgctccgcccctgagcggggcgccccggcccaaccccctgagggaggagggtccaggtgccgcagactcttagcccctggcccggcgtccgcccggcaggttctggcactcctcgttggtaagccccgttatttcgtgcgcagtgtttacagaatataaagttcttcaggaaacgatgttataggagaaacgcctggattttccccaaactatcagagagtatcttaactatcaaaaaaaaaaaaaattcatttcagttaacgtcgggaatgagac

SEQ ID NO: 233668 - DNA, 90 bp, Homo sapiens
  chr8:57122656-57122746
  hyper
cgttttctcattgtcggttgagttataaaaggcttttgcccttcgaaagttttaaaaaataaataaatattaactccttggtccctgcaa

SEQ ID NO: 233669 - DNA, 141 bp, Homo sapiens
  chr8:57122926-57123067
  hyper
gtgccgatctcctgctttcatttagcaccccctccccctaccccccctcgcagccacacaccccgggctcacacctccctgcagaccccgcaccccgaccccggcttgcccacctgaggaaagggcaaaaacaaattcatt

SEQ ID NO: 233670 - DNA, 540 bp, Homo sapiens
  chr8:57232275-57232815
  hyper
agcagggaacctgggcagaacggaccgaagaagagggtccggggaggcatcctgccctctgctccgggtggggagggaggctggcagctcacccccgggggcgaggggtctgcgttagccgtagccacgggagcccgggcttctgggacgctcagccgtgcgctacccggtgcagctgctttctcaccagctcgcgggtgggtcctgccgcggctcggcgacccgcgcccccttgcgagcgacccagcgtgaaaccagcccaaagggcggcctcgcccgacccccgccagcgcgacctcctccgggagccagcacccaggaccgacgacctcggcaacttacccaggacactctccctagctgtccgcggagaagccggcctcgtctgccccaggcacccgagtccctggctcggagctcagtcaggttcaggtgtttatccaggcgccgcccaagtccaagggcgggactgccgcggcagcgccaggggtggggccggccgtagccccagtgcgcgacgtgggcagcactcccatcttc

SEQ ID NO: 233671 - DNA, 1496 bp, Homo sapiens
  chr8:57358115-57359611
  hyper
cttggtttgtgcggcgacaccgctacccttaccggtccccagatagtcgcggatccccgaagctaagagccagggcaggacttcagtcagtgttccaggaacagctgagacacccaggtcaccacgggctcgcgccgctgcggctccgacccggtgcgaaccgccatacgcgccgcgcggtgggccggaggcagtccgcgtactgttgcggaaactctgtctcacaaggtgcgcaacactcgccgcgcgcaacactcaccaggaagttgatgtcggccgggcgcactaggcggtagctgcacgtcgcgcaatcctggctgcattcggcccgcacggtcgccaggagcccggggccgagcaacagcagccaagtgcaaagtgtcaggaaccgcgccatggactgcgaggagagagggacgcgtgcttcgagcctgcctgggcgcagaacggggtccctcggcaggaccctcgccgcgacagcctcagcaggggatcgtcgagcaaaagcccgcaggaatgctcctttctggggccccgccctcccggccgacagcttttaggtagacgtggaggcgactcagatcgcctcgcggttcccgggatggcgcggtcgcccccaacgcgaggctgcctggggcacccggctcttttcctgggcgtccgcggcccagggcaagattccggagagaacgccgcagaccaggggcgagagagcgggagccgggggaggcaggacattgactggggtcacaaagaagaaccagggaacgctgttggggaacccatgcaatgaaatgtgaagggaaagagggcgggcagacgtccccaaacccgctcagcaaagacaagcttcgggcaaattcactcacgttgacgctgttcggatggagcaggccaattggaaaagccgggttcagacacgactctagagggaagagaagaaggcaagtgtgaggagggcgggcgtcggggagaagcgggcccgggtgtgctggcggacgtagggcctcaccgtcgcggtcctcagcgtctctgcggggtcacgggccaggctgcggggctctgagcgcctgcctcgccgtcccggggcttaacggctgctggagccactttataattagccccaaaccgaaggaggcgcgcgcgccccaatcgccggcgggctgcagctgacgcaggccctacgccagccccgcgccgacgccttcgcgggaggggtcggtcccccagcacccgcgcgccgctccccccgccgagctcgggtgggggccacagggggcgctcggtggctccccacacggccaggtgacaaacccaaggcagttaggaagtttggggagagtgagataggatcaagtttctccgcataaagtcactgaaattgcaccgtgggatgcgggctccagggagggaagcgaggtgggggcgtttggaaggatagatggactggcttagacttctggaatgtgctggagacccagcgggccggtgaacct

SEQ ID NO: 233672 - DNA, 91 bp, Homo sapiens; identical to SEQ ID NO: 201417
  chr8:57906841-57906932
  hyper

SEQ ID NO: 233673 - DNA, 1280 bp, Homo sapiens
  chr8:58906790-58908070
  hyper
ggtgggggtgcttgcgtgcggacataggtgggagtgggggatagggaggaaatggaggcgccgaccgagtggaatggggggtgggtcagggatggggtgggatgggcatcagtagcggggtggagatgttgagagagaggcagggcttggagtggaggtgcgagaagggtggggacccggaaggtggggtgggggcgggatggaggcggggcggggtgtacgaggggcgtgtacactggctcagggacacgcgctctcggccacagcaactggctccaagttccctccctcactctccggcgaagcctgcctgagccctcccactcggtgcagaccgaaccatcgcggccgccgccagccgggcccttcgcggccgcgcgtcctgggcccgttccgccagccccgtctgctctctacccgcggccccgcggcggcgaccgtgaacactcggcggcccctacagcccgctctcggcccttcgtccctcgcgggccccgactctccctccttgcagtcccccggagcctggctcccggctcgggccgcaccgccagggactggggtgagcggcccaggtaagactgggccgtgggggccgggagagagactgctgggcgggggttgggattcgggttcagtggtcgcgccgcgccccgactgcggacaatgcgggagctgcgcgcggccaggcggcgcggagctaagccggctctgcgcctgcagcttccccgcccggcccgggtctccgttgagcccggcctcactggcccaggcggaccccgtccggctttctgggctgccgggggaggcgcagcgccgctgcctgccccgcgccccctctgcgctcggcttggctgcacgtcccgggctcggctaggaggctgggcacggggccggggctggagccggggttggagccagggcggggggaagctggccgcgctgcggagcggaggtgggctccgaaagcgcgccgccggttgctgctggaggagtgggactacgaaggatggggactccgctcggccaccgctcctgaatggtctctaatctcggtgttaaatactttatgagagtatcaataccacctaatcctttgctgagaattactgctagaaatgtagattctgaggttccgaaagtttgtttttggttaccccctccagctcctcccgtggcctcaattgtctctattttctttgaaagcatacagatttgaaatagaattaaattctccttggctcactcgtgtctccatcacccagcggagctcataactt

SEQ ID NO: 233674 - DNA, 697 bp, Homo sapiens
  chr8:60030068-60030765
  hyper
gaggagcttctccacggggaagtgtgtgtgtgagagcctgcctgtgtgtcaacactgtccaagactcggagctgcgactcggtcgcgtggtgcggagtccagggctgagaaggcagcgcactaaatatctctgtatcaggtaaaaaagccgtttggtgatgactcgccaccaggcaaatgttgggagtcccaacgatttttcccgtggaatgcaccgagggtcgccatggatgtgcctgcaggggctgtgagtatcaggcagatttatcaccaagcgagagttgggcgtctaaaaggcccgcccagcgttttagagaactcaattctctctgccaacgttcatccaacgggactgcttagacacgtccaactagccctaggcgtgggcagtcgtgcccctgcgaccactctgggggaccggtccctgcgtgtcctccctctctgggatgagagagttcgagaagccgggagagtaaccccctccctcgtaccccctgactgtcctataggtggacccagccgaactccgcagcagcccaggccagcgccccacctccgggtcaccggcatgatccgcctctccccgggcccccgcggccctggcacccgaggtcagcgggccgtgggtacagctcagccgcggaccctgctccgcgagtgcgggagctttggacttgaacgcgacgtgctcgcccgg

SEQ ID NO: 233675 - DNA, 193 bp, Homo sapiens
  chr8:60030945-60031138
  hyper
ggcgcctcccaggtccctgcaccccgactcccggctgctcccctggcaactaatccggagaagggaagtggtgccacgagcccccactgcccggggagggagggagagagaagggggaactgggaaataaactgaattctcttactctgcctccgttcctggaccccagacacacccccaaagtattccacgg

SEQ ID NO: 233676 - DNA, 60 bp, Homo sapiens
  chr8:60031618-60031678
  hyper
acggaacagagtgaggtgtctgggctcaggagtaaaagaaacaccttccttccctcacat

SEQ ID NO: 233677 - DNA, 828 bp, Homo sapiens
  chr8:60031858-60032686
  hyper
tcattgtcccccccgcccgcccccccatccccgcctcccgcgcccctcgcagcccggcacacgcgctcgggctctaggtactgggcgttttattggagattctgagttgttctgcttgtagtttattttctccaccttggaggcccgggatgtggggggtgggggggtggggcggggatccagaagggacagggcgggaggggggcgagcgtcccgggccgggcggggtagggagcgcggccggacgcgggctcgtcaaggcccaatggctgctgttcggaaccagaggccggggaccggagaaaggaggagcggagaaggagaaggaggagagcacggcctggctgggacagaagcggtgggaccctgggaggcctccgctgtgcccgtgccgcgctcctcgggaccagcgcgtcgcacacaaaggggctgccgagccagagccaccagcggcctcagggcaccgtggggagcgcgcagctagggggcgctgtggcgcaccccgccccgcagccccgcccccggccctccccggccccaccccactcccaccgccctctccgcggccgtccccacccctatctccgcgacccccactcctcctcggctgttccccaaccctgtcactgtgctcccctccctactcccggcccgtagtggaggtgactttcctgcgcagcgccgcttctgagggcggagaacccacagggagtgcgacccctttgcacgctgtgagtgggcaactgtccgagggactcgagccgatcgaagggtgaggaccagctcgcctgggggtggacggcctggaaaagccgcccctctttggct

SEQ ID NO: 233678 - DNA, 39 bp, Homo sapiens
  chr8:61193215-61193254
  hyper
aaacgaattcttcacgctaacactgtcttcctcaggtgt

SEQ ID NO: 233679 - DNA, 467 bp, Homo sapiens
  chr8:61822239-61822706
  hyper
ggggacaagagttgcagtttcgaaacagagtggaggctcctttaatcttgacagcccgaatgctacaggggtcacagcacatctgctccggaggaaagacaaagggcaaggtggggccacggtagcccgcgcggggctcttggcgggctgggggcggcgtgcgccgagctgggcgcgagtggaggggccggcggctttgtgcgcccccgccagtgcccgcccgcagccccgccgcagcgtttaaccttgacttctccctcctcgcttctggcacgggaggaaagcctgtccagatgggcgtcctgagtgtgacgacgtcccctcccgcccccgcgctctcgcgcagatgtcgcacgctgccctgggtcccgccacaccgcccaccaaggccgcgggccctgcgcgcccggggcaggcgggcacatcccgcaccctctccgcccgcccgcccccggcgcccttcgcat

SEQ ID NO: 233680 - DNA, 680 bp, Homo sapiens
  chr8:62200449-62201129
  hyper
gagggttgtggtacggaggcatttaggacccaggggaaagctaggctccgtatagaaggacagagaatcgggcgcacacgcctcctaccaaaatcacagccccttgtggagcccgagctctcattcacagctttctagagaaatctgagcccgaacctgccagaataggggatctcacccacccagttcagcagcgaggacacctgcagaaatacattcccaaagcaaggctgggcggccgtgtgaaggtatttgttaccttttttctcccctctgtatttgccgagcctccccgcctttcccccgctctttcgatgccatggctgcggcgtttcagcacttcggtatgtggacagctcccatctgcaatccctctgcactccatccctcccgcaccgcaccccgctccccgccgcctccgcggtccatcctcctcccggcgcccgctcagcctgcgcccccttacacatcagcacccccatctccaccatcaccgtcatcatagccaccatcaccagcgcggtaactatagtcacacaactgtgtcttgccacttagacaaagcccgaggtccgcagggcagagggaaagagctcaagttgacaggcataggaaggaaagttcaggtgaacaaacccctgaaaacaaagagagacgcctgtttgcgagaaagggaaagt

SEQ ID NO: 233681 - DNA, 1688 bp, Homo sapiens
  chr8:63160324-63162012
  hyper
ctgcagaacgcctccgctctgttttattaggtgggagagagcaggagagtttccacaggattcagagagagtttgtccgtatcttaactatccgagatcttctttccaaatccttctcaatttatttctgtgaagatatatttatacctattccggaaaccttctccatttctagaaaaagctacgcatcttcttcttcctcgacttctcttttctccctcccggtgaggatttcaaagggtatgtgagaaaagaaccttaagccaggtctccccgcggcgtcctggctagtcccggcgccctgggcgggtgcatcgctccgccgcagcgccccttgccacccaactctgtccaactttccctttcagactccagcaggggcgccctccaggcaaccggctgtggcgggcagaagcaagctcggatgggagacccccgagctgcgtgcccagcgccggctcaacagacttgcccgcgcagcgcccgcgggccccctcgcatccgggcaggttccggagctgggccttgcgctccccggcgcccgcccaccctgggtgtctcgcgtcccggcccttcctccccggaacccaagctaacccaactcccatcctcgccacctctggggcagctcaactaagccgtgtcccctcccttgcaaacgcgtccgaccaccctcccaacccccagcacaaccctcagcaagaaagcccagctgggtctacccagttacaccggtcaacgagggtctccatcgccgccggccgccctaattcacgctcattcatattcattctcttttctctctgtccctcttcctttctccccaaagactcttaactagacaggccgatcctccccagcggcactccctttcattcttcccttcccaccacacacacacacacacacacacacccggacccagacagcccactccactttccagacgcccacctcctacatactcccctcccctaaacagacattcacccactcgccatctgtagcctccttccaaccccccgccccgcccgcctggctccccctccccaagaaacagacctgcacagtgggacgcagggacccccgccagacgctcgggtcgtgcgcaccgcactgacctcggcccgccccgccgggaaactaacaaaggcgggcgcgagccccgagccctggagccgcgagcggcggccgcggggccgaggagcctgggccgggccgggcggggactactccggagtcaggaggcagcagcggcggaggacgaggatctctggcagtcagcgccgctcggacgccgccggcaccatgggctgctgcaccggacgctgctcgctcatctgcctctgcgcgctgcagttggtgagtgccccgagggcccctgccccaggacaggtccctgctccaggaccggcctctgcgactccctctgcggttccgcagctcccggcaaggggcgaacgggtgaacagggcgctccgcccgcctcccaccctccccaccgcctggctgggctcgcactgctctccagccgcgggcactcgccaggtcgcccctgccctgcaggagggcgcggtctcacccccggtcccatgcgctggggttcgccgcgctcccgccgggcgtcgccacgcggtccaggggccaggagccggcggagtgagggattttcccgccccttgatccga

SEQ ID NO: 233682 - DNA, 255 bp, Homo sapiens
  chr8:63951628-63951883
  hyper
accgggtggtctccgcgtccttccctttcaactgttacgtcgatgtggacttcagtcacccgtacaaagctgggctggccaacccaggtcctcgagaggggaggttgggtgtccccggccgagtttggtaaccaggcagcggggaggctggcaggggattctagaaggcgcctgagaactgcgcgccaaccgcaccgcccccttgaaggtcggggccctatctccgggaatggtgacaacgttcgctgtacggac

SEQ ID NO: 233683 - DNA, 732 bp, Homo sapiens
  chr8:63998150-63998882
  hyper
tttctagctttgtcgtttccatgacccagagaaactggaggaccagctctggattctcggaacatctacagcctcagcgcccacgccgggtggttaggggcgcgttacccgccagggtcctgcctgcaccctgggcttcggcaggggtcagatatccggggtcgtggggcgggggacggggcgggtgaggtgcgcactgccgagcgccctgggcacgcacgcttacccgccaggccaggtccagatcgaaatcccgggcgcgcaggaaccgcagcaggaaggagtcggtgagcggcagcggcgcgagcgggacgccagcttcccgggcccggcgccgcagcgccgccaggcccggctgcagcaacggagagtggtccggtagcgcgttgagctgcggccccgccgagggctgggatcgcgcctctgccatgcccgccgccgctgctgcggccgcagctacccgggcacccgggaaaagcgcgcgccccgcgccaccctcggccccgcctctgcggccgctgcccgtcgcacaaccactctccagcctggcagggcggtctccggcctcgcacgccggacccgcggcgagcagagctgcctcttaaaggaaaccgcacagtgtccccacgggtgctagccacctgtttagcagctttagttagggaccccagctttttcccagcgagggaagccactgatgttcaaacaccgaggaaacgatgtcaaagttag

SEQ ID NO: 233684 - DNA, 239 bp, Homo sapiens
  chr8:65281383-65281622
  hyper
aatagaggatggccggtgacccagtaaggactaaaccttgcgctggtttattgtggcaagctgagaaaggggctttaggcccgggaccccaggcactgacccgcacacatcccgcggatcgcctattcattcgcacagccctccagtcgcccaggctcccattgtttgctgagcaacaatggagatttcgcagggaaagtaaagctcttttcagattcctctctgatgttttgcattta

SEQ ID NO: 233685 - DNA, 49 bp, Homo sapiens
  chr8:65281826-65281875
  hyper
tgtgtaatgcatttagaggacgggagctgcctctagggagaaaggggag

SEQ ID NO: 233686 - DNA, 994 bp, Homo sapiens
  chr8:65282055-65283049
  hyper
ttaacattccttccccgagcctttccctgctcctccgctctccgagcccggggcggccccgcagacaccagcgcctctatcctgcgctccttggcgtacgcagccgggcgaggtcgcggcgggaatgggcgccgaggccctgcccgccagggccgcatctgcggcccgagacttacttctgctttgctttcctgcacctggcccggggcaggctttctagtttctgcctcggccagaggagccgacttccgcaggacgggcttggggcagggggtgccggtgggggcagcggggcgaggcgaggtcgcagggagacgaccaggcctgcttgggcctgggccgctccagccgcctcgcctcttcagggacctcgccccgggaccacccgagcggacccacagcttctgaggaaacagctgcctcgggcctaagggtctttgctttcccccaacgcatgcaagcgtgggtcgccagcccagcatgtctggcgtggaggccggaggagggtggggagctggcggtgccctatggccagacgagtaaaagtcggttagtgttttatgcgcctgggggaggcgaagggcgcgggcttgcggggcccgggctgcgagtattgggagggggcgcctcgtgaggccgtgcgaggccgccctccccggcaggcctcgtccacgcccttgtggcctcccagacccgctgcgctttggctaggcgtccctacgcgcctccaccttctccaggtgcacgcctgggcgcggagctaggctgagcccccagcgaggggcgtggggcgaggggcgaggggcgagggcgtgggcgccacgcaggccgcggagcctggtgggcggcgtgaagcgtgcactgcgcctgcctgcccggtcccagcctgccgcccagagctccccgaccaagccttgacagctctcggagcagcgagaagaagaagaggaggaaggacacaaagaggaggaggcggcggcgggcggcgaactga

SEQ ID NO: 233687 - DNA, 842 bp, Homo sapiens
  chr8:65283249-65284091
  hyper
gagcgacgaggtgcgcagggcaggaggaggtttgagagcagggcaaacccgaaacctggcgctagaaaggaatcacccgctcactttcctaggcatagggcgccaggcggggatcgaaagcgaaaagtgtccggaaaaaggttcttaaggctggggatggggtgaggtggggtggagttgatcgatttgggcccagggtggctgatgaccttattggacccgattctgtgatccccatcccgagagctgcacggaggcggagactgtggctgccgtgcaggtgtcccggcccagccatctgtatggggtgggggtggggtgaaagtcttggactaatggtggggtgcttgcctgtgatctctctcacgttttcctttgaggcctccactcggaataagccgccggcgagggagcggcccattcgtgggaaacgcgcccaccgcttgggttctttcctaaggcctccccaccaacaaggctgaaattccaaggccctggaagatgaggcaaagctagcattgccagagtcgggggagaggggaggatgctgggtaaagtgcccacccggggtggtctaaagtcgtcaccccacagagcagattctgctgctaaccagagcagagagccgcaccttcccagcggcgggccccagtgcgcacagcgtgactttgcctcccccaggctcagcaagtcgttgacgatctttagcagtcccgcatcccaggtcaataaactggaaacggatagaatgagaatcatggatgagagataaagggcagcggggtgatgcgcatttcttgtagtgcctccaaaaaaccgtggtctctcgccgctaataaaac

SEQ ID NO: 233688 - DNA, 207 bp, Homo sapiens
  chr8:65284403-65284610
  hyper
ggtgatttagggtagaagagcgaatattcagaggcgggaagtggtgagttatattgttacattccctttcgatggaactaaatgcggttatctgcggtcctaacctctctcgcatcggagtgcaatgtttctgaacaagctctgttagaactggaaaatgggagggggtgagggagcccactgacgacttaacggaatcttactgaa

SEQ ID NO: 233689 - DNA, 1127 bp, Homo sapiens
  chr8:65285899-65287026
  hyper
ctttccttgggctgcgtgtgccgagcgtagacaatgaaaatcttcatccccctcccccattctactaggctacaagattcttgttttcgttccttctcaccggtggaagatgtgtaaaatcaaagatgtagaggtgtgtagtgatttttttaaaagccaactaaccaccgcacggactgcgacgcggattacccgagcgcacgccggctgtaagtaccatcctttcctgcggtagccgggctctgcgtccccggctgggctgggagtgttcgctttgtgaatcgggttgttgcttgtgttttggtgttttggttcacaggggcttcttcgaagcttacacttttcgcacgtgagcgggagaagcgtttcgccggttgtgggcgtgcagaacacgatcctggttgactttgatgcggtgacttggggtggcgggcggggggcggcgggaggcgcggagtcgaggagttcccgcgtcgcgagcatgcttgagagccgccggctcagctccgggctgtaaggttggttcctggcaatggatggaaatcaggtcacagagatccctaagcttgccaggctctcagacacgcttgggagacagaatggaattggaaggagggatctgaagaggagggaggggatccgtgttcccccaccccgggcctagaatggagccccggccagccgcgggccgggccccttggttttcaggacttattcttgccggggttggctcgcacgccagcatcgcgccttcggtgcgtcttttatctccatctcaaatatgggatcttcttgggacgaggactgaatgagggtgggagagagggtgtgtctcacggcgcccaggagggagaaattgtggttctgagaaggtattttttggcctcttgaaaatgtgcaagaattccgcgggcccaggctttctttgtgtggcgggcagcgccaagcgctttgtgcttcacaaggagaaaatggcgagtcctattgtgtttaggccattttcttccggtactaggattttcccaagttcgaaatacttcttgagaaagtagccttctcgtgcccaagaaagtgtgaatcgctgaggctcggccccatggcctggcgtgggtgctgacctcagttta

SEQ ID NO: 233690 - DNA, 1823 bp, Homo sapiens
  chr8:65289134-65290957
  hyper
tccccgtggttcaccgagtggtggtccagggctctggttgggacgctgagttaggttggcaaagcgtcattgttttgaaaggcacattcgtccggaatggcattcgtgataagattaaacataaacctaaaccttggcctcgggggaaggcaggctgcggggttgagaagaggagatgcagattagctctgcttttgctgcttgcgcacataattaagaggcggtccctcagctggagcgtgggctgtgtccggcctaaggtgcttattttcctgttacttggccaaccgagtgtgagtgaacaggagcccgagagcttaaatgtgggatctagataaggtgtcgactgggttgtgggcgtttgtctccatgttagggagaggcaactgagaacggtgactttggcttgttttgagagagcctgggttttgacagcaggacggcgaagggagcgcttggagaggctggaagctcgacgtcttagggagctgcctgcgggcactgggttgacgccaagaggttgtcggcaagggcagggctcttgccctctgctgtacctaggctctgcaactgggggctgcgagccttctgcggctctttggtttcaaggacacagcgagctgctcaggactttgggagccaacatctgtctgactggtgacgtcagcagcccgtgtaatcctcttgtgctgaaggcagatgccttatttgtttggctggagcgagccattaatccctaattctggatcagcaagcgagggggaaagaccggaccgctccgacccaccccctccctacccccacctcccaccttaaagcaccttataccacggaaggctctcagcctcttctttcctctgcgaacgcgctgagcagcgattgaaaacgttttggtcctctgcaggtttgaacagggctagcaggtctctctccggatttctagggctatgggtatatgtaattctttctctcatcgatcgtttcgattctcttgccggtcttgcagtttgcagggtcctaaacgaagaggggtggagattcgagagtgcgggtctggcgtgtggtccaagggagggggtgaggctgggaaagggggtgcagaatgcgggaacggctgggactgcacagaaggaccatctgcggactcgttttcactgctccagctcccgaaatcgtttctctggacgcggcagtatccgcagcgcatgcaccctcctctggacttccgcagcccagacctgcgcttacagtcatcgcgccaccccctccccccgggctgcgggccccgcgctccgtgggctcagggtcccctccgcgtccccctgaagcctggggacggaggtcgcgaccggccgactggggtcctgtcctcttgtcaccttgtatccctcgcatgctccctcccgcctcgtgtccctctccccaccctccccctcctctctcccgcctccctaacactgcgctttgattctgtttttcaggggcgcattctggggtctctgcgcaagaccagctctcagctctctctcctttcctcggactctggagcgggagcgggcctttccctcgggtcgaccacgccgtaggggacgccgtgaaaagagccgtcgcgcccgctgcctcctgcccgctgcgcagagggctccgcccgtagaggtcaacttccctcacccttttctctctcctgcttgccctccctccgcccggcccaggcgcttccagccccagactgtggccactggctgaggagtgcgagtcggctgcgctgccctgagcctaatccctcttccgggcccagacccgaggtccgcgctcctgggcag

SEQ ID NO: 233691 - DNA, 469 bp, Homo sapiens
  chr8:65292258-65292727
  hyper
tgaagaacacttgccgcccgcatttccccttgacttctccctttttcttcccaatctcgaggcgttcatgcctggctttaagacgccaagataactctcttgttttggcattgtcgcaatgtccaaatcggtcaaaggagtgggataaggtgaaaggaccaggtcagaaactttagaaggactcggtaaattaatttgtttggaagccagtgaggtggactatgttgaggtagcagttccgcaccacgactttggagccaaagaaaaacccaggccgaaaaagcgagccttgatgtctttgttctgccttggcctgcaggggttgggaacaaaggagaggagctaagaggatgcaccaaagtagccgcgccctccctgcctggcgctgtccgcggtgctgaccgtggcccttttctctctccgtaatcaaactggaaaagcaataggaccgtcccgtccctactcaaaa

SEQ ID NO: 233692 - DNA, 177 bp, Homo sapiens
  chr8:65293196-65293373
  hyper
gcagccttagtagacgggtacagagggctgagctctgcagaccgctctgctgcgcaggagcctgctcggcgcatcccagccggcgggaggcactggagggccaggaggcctgaaacccgcactgcggaaaaaccgacctcagccacatcctcatagctcacgcgacggaaagaggca

SEQ ID NO: 233693 - DNA, 857 bp, Homo sapiens
  chr8:65488197-65489054
  hyper
ctggccttcaaagtcgccaaagtggggaaagaccacgcaggagccaggtgagaccctcgcggtgggctcggggacttgtgtgtgcacctcgcgctgagaaggctgcctcccggggctcagggtttgtcttcaaggtctgttcaaatttaggctaactcgtccccaaacagtagtgaggaccagtatgttttctgtaaaatagatacagacaaggaaaatcttttcgaaagaacgctatacgaacaagtttcaactttcccacagtcgaaatttttggaattgccaagcaacttggaaagactagcaagacggggggcccttggctcactgccaggaatgcgccagctcgcgctagtcccccagcgtcgtcaccctcgctgtcctcctcctcatgagcccacacatgtggacccagtctctctgaagtgagctttgtaggactcggcggcgaaggggacgagaaaatacagatgacaaaacgacgccgaaaggcttgacctctggggctaatctctctgcctccgagtagatcccgcgctcccaaatccggcgggggcgcagtatggtgaaccccacacctagctccctcagctgcgtgggtttcaagctgacccaggcgccaccaggcagccccgagtgggcgagtcaagtgcaacttcaaggtcaatgtgcctctgactggggcctggagagctgccaagaatgctgggcttggagcgctggggtcgcgccccgctactgcgccttggaccccgcagtggagggcgctgagaccgcacccccctccccgggcagttttcaggagagggtccagctggggtctccgcggtggggtccagaaacgatattccgggttg

SEQ ID NO: 233694 - DNA, 1366 bp, Homo sapiens
  chr8:65489463-65490829
  hyper
tcaatgcactaatttcaatgcggtgctgtctgctgaatattttaaactcctttcaaagcagtaggtgtattccctcccgcagtaacaaaacgatattcatctttacacaaggtgctctggcgtttataatttggtatccaacacccggccgagaatgttccctttcctgatgctttggccaaccggcctcgataagccaaccagcccagaaccaggggcgctgggctgggtgttcctcggggacggcgcccactgcccgcttggtccctggagtgtcccgagctgcctcccatacccctgctgcggacagagtgggggcagtcctctgcctctgtttcccaactgctttggtaactcagtgactctctgtgaaactgcagagtcagaggacttcccttccgtagttttcattctaagcggtcatctgtgagtcagaagatttcgccgtggcctgatttcccaccctttctgcccgcgcaagccgaaagcgctcatgttggcttttcctttgccacttttccaacttgccagttccatcaggagcccggatccttgcccagcttcttggcggagccaagttcgagcgcacagatttcccgagctccagcggccagggggcactgtgtgagcggctgacgtcacccctccgcccggccgaaaccaggcggcgggatcccacacagttgaggagagggagccgaggccgtgacttagggctggcgacgattaaaccaagtaacgagacaccgggcagatgtgttttcattgccctgtaagataaatgcagtgttaagtgcctgacaacttcccagaagcaatcagcaaaagtttacgagtgcataaacctcaaagaccattccctatcggttgttataaggccggtatttagagcttccataaattcttcggccttttcccaaagcaaagttttcagcgactattaagcagccacctcctccgggaagactagggggattttcttgaattacaaaaggaagaggcttttggctcctaccgagtaaaatgaagttgtgcaaaagtttgttccagaagcttggatggccagggagaggagggaggtggcaggaggtcgtggagatggggtcgggaagggccacgagatgcgctcaagtgtttgttgcctaagggcgaaagacaaaggtcctgcgaagatcctgggtctagctgagctggcagggcctttgccgccctcagtgtcgcccctgctctgccatcccggctctgccgctcacagccccgcatggcaccccccaccagtccctgacatgatcgatccttcgcccttcaaatgtccacttcgggccggcaagaatcctggcgccccgcagaaggtggcagcccacaa

SEQ ID NO: 233695 - DNA, 319 bp, Homo sapiens
  chr8:65491108-65491427
  hyper
aggggtgcggtgagcgaggggctgccctgcatgtaaacagcctcggggtcccagacgagacaagtgggaccgctcaagcctgcagaacccccggtctcggtcccaggcacaagagcctcccgtagccccgcctgatctttctcagtctttaggttccaggacatccaaaggagcgtaggtaaccgacgtctacgtagtatttctgtccccggaagactggatctcagggaattattatggaagatactgctgagcccctttcatcctttccaggtgaaaatacagacatttttgtgtcgccctcacccttcctttatga

SEQ ID NO: 233696 - DNA, 605 bp, Homo sapiens
  chr8:65492340-65492945
  hyper
acaccaccttctctcggaaagtcccatccccaaatccagaccagtcatcctacgaacaggggtggagtataattctcgcccggaagggtaatttagcacaagctgagacagcagtggcgagggaagggcagtggggggtggggtgcggtgggtgggggcgtctgctttccacaggactcccaggcttcgccgccgatctacaatttgctgaaggagcaaagaacatcctcggctctaagtagggcttttagtgtgctcattgatgagtgaaagtcgccacacatgtcaagctaaaggcagttgttgggttactaacaggacccagcgccttgcaaacatatgcgctaagctgtgtatacagatggcaggcagaataatggagcaggcgccttttataaagctctagctgctgcctgtcttcagacctgggaaatgaaactattcagacttgcggccagatagcgcctgcgattgtttgttaccgttttaatcctattaattaaaacgttaacctgattgggtagaaagcgctgtcccaacaggcgagtcttcttcataataacctactcagagataatgatgtaaaagactcccccgtctgtggc

SEQ ID NO: 233697 - DNA, 118 bp, Homo sapiens
  chr8:65493725-65493843
  hyper
ctcaagtacggcgaaagcgcgagccggggctcggtggccgagagcagcggcggcgagcagagccccgacgacgacagcgacggtcgctgcgagctcgtgctgcgggccggagtagccg

SEQ ID NO: 233698 - DNA, 276 bp, Homo sapiens
  chr8:65494323-65494599
  hyper
ctgcagcggcagcagctgctgccctgcacccggcgctcggcgcctacgagcaggcagccggctacccgttcagcgccggactgcccccggctgcctcctgcccggagaagtgcgccctgtttaacagcgtctcctccagcctctgcaaacagtgcacggagaagccttaaacacacccccgaaaaacacaagaccgacccaaaatctagaggaaagcgaaaagctgctccccaccccctttattttggtcctctcgtagttgtgaaacacttgcag

SEQ ID NO: 233699 - DNA, 80 bp, Homo sapiens
  chr8:65498472-65498552
  hyper
tagctttgcgtgtacgactgcaggaccagcaaatgatcatcttcgatagagctctctagttacccgtgcttctccctccc

SEQ ID NO: 233700 - DNA, 500 bp, Homo sapiens
  chr8:65498612-65499112
  hyper
gcacccgcacgcagtctgcaatgccctcaccagtccccgcagctgggcaacccctccaagaccctgtgttacgcttaaattcctctccctcctatcgtacccaccatccatccttacagcagggaggccgagactcacagaattcccttctccaccaactcgcactcttggtctagcacgcggaaaccgaacctttctacgcggcccgaccttgcgattgctccagcatgagtggcattgacttttccaatgtaatgacttatgaaagatataatcatgtgttaaattgaatcctccgtttaactgttaatggtgtgctctgggcacatttacgtatttgatgctatggtaactaattaccactagaaaaaaggataatacacttcccagactttgaaaaataatcatgagttcacttcccggctcgcagcacatcgtggcggccctgccgggaggagcgaggaaacgagtggaaacccgaaagtgtgctcatggaatgc

SEQ ID NO: 233701 - DNA, 393 bp, Homo sapiens
  chr8:65499629-65500022
  hyper
aacagggctgggtaggataacgaggagagtgtttgtgctgggacctggcaggactggaggaggaaaggagccgccttccagcaggtccagcatccctaggttgcaaacacaccaaatgacgtccacgcagcactcgcgcccaccgcgctgtttttgcttgcgcagtgctcccgaagggattcgggatccgcatccggagggattcgggatccgcatccgaagagcaccccttctctcaggacttcccctgggaccgacgtttccagtcacccctgcgggcgcaattgtccttcaaccgccaagctccttgggacaaaaagagaacttcaggggctctgcctcaaactgtccttcgagggtggctcgaggatcgggttgtcccctgtatggcag

SEQ ID NO: 233702 - DNA, 584 bp, Homo sapiens
  chr8:65710822-65711406
  hyper
ctttaatatgtacgcgtatgtgtgggaaaaagacagaagaagcctttgttattacaaagtcccaaaggaagccagtaccccgcagcaagttctgactgtctgcactggaaatcatggagggggactcccctcgccatctgggtcgcgcgcggcccgcggggcccagggcgcatgcgtggcctggcggccgaggcgcttacctggtgcgccggacaagcaagcagagggccaggagcagcagggccgcggcgagggccaggcccgggaggcccaaccgctccagcgaaaagcggcccgtggccgcggacacttctcctgccatccggcgcgcgctaggccgcggtgggcagcccggggtctgcctgcgaacagcgcggtcggcgactctgcagcctgcggcggcttctctcggcggcgccccctagtccagggccggagaggctggcctgcccgcagcgcagacaggaatgtcaccgtggtctcccaggctgaatgacaaaagttcgtggactgccccctccccgcctatcctccacccacgcgtaccgccccgttcccccaccgtttccgacccggcagcttct

SEQ ID NO: 233703 - DNA, 183 bp, Homo sapiens
  chr8:66546065-66546248
  hyper
cgtgggggtagagcgtgctaaagcgcctcactgggacccactactggatctgacaagaggcaggcggggcgcccctcccaggcggattcgctgcctcggtacaggggccgcttcccgcggccttcccggctccactgctttgtctgccgcccgtggaccccacataccgctccagagctttag

SEQ ID NO: 233704 - DNA, 162 bp, Homo sapiens
  chr8:66546468-66546630
  hyper
ataatgagtccaacgtgaggataaagtatccaatcagtgaaggtctttttagagtgaagcgctcataggtggtttagggaaatacactaagagtcaagggactgatccaatgaggacccaggaacactatattggccctaactactcgccgtccaccaagcc

SEQ ID NO: 233705 - DNA, 194 bp, Homo sapiens
  chr8:66556751-66556945
  hyper
acaaagcaaggtccgcacaaaagcacacgcccctctcagagctccgcgcgtgcgcacaccgactgtgactctcagcagccggcttgcggagcggttgccgcgtcctctgccgagcttcttgtgcccgcctccgagcctgaggaaacagctgattgatcagcctggctcaggcttggggcggggattggctgatt

SEQ ID NO: 233706 - DNA, 423 bp, Homo sapiens
  chr8:67024905-67025328
  hyper
atgtcttagtagatgcggtggaaccagctctgtctacagaaccccgggcttcagtggcgtcttcctaacccggcttgcctgccgggggcgttccgagaccctcggggccttcccttcaccccgcgggagttggaccggtggcgctggtaaggcctcccgggctcaaagtgcaacggacactgcagaaatccaaactgctggcattcgcggtttggggacgccagaggaggtaatgatttctggtttgttaacctcaagtgacaataatgccgagccaggcaggagctggacctacaatcttctgatgcgtggtcagacacgttatcccttgcgccactggcctaccacgctactccttcagtcgccgttggattactgtgtgttgagaacacactcggcaaccactttaaaggacaacgcagg

SEQ ID NO: 233707 - DNA, 920 bp, Homo sapiens
  chr8:67025508-67026428
  hyper
attacgcatgctcagtgcaatcttcggttgcctggactagcgctccggtttttctgtgctgaacctcaggggacgccgacacacgtacacgtcccttcgatagctcagctggtagagcggaggactgtagctacttcctcagcaggagacatccttaggtcgctggttcgattccggctcgaaggagacaagtgcggtttttttctccagctcccgatgacttatggcactttccttgggtgccttcagtgacacattgcattccaacgagcagtttgaaagtctagcgctttctccccattttgggcctcccagcctgcacggtaattctttttagccattcgccctgcgggaacgtgtccgggcaggttcccagcgcagctgtgggtctgcgcttggccgagcgactgccgggtcacgacttctgcgtcttcttaacccgtctttggcattgcccgggccccgagtcacacaggaggcagcgccggctccagggggccaggcggggaccttctcctcagagccccgggcagcttctgcgacccgagggctcgcaacggctgccgtgaggaggtggggggtccgcgggaagaggtatctggcgctcccggaacctgggaatcagaaagagagaacacaatactaaaaacacgaagcctaaaaatgacacaatgttatggagacaaggcggcacccgggaagctgtgcccgctcccttcgatagctcagctggtagagcggaggactgtaggcgcgcgcccgtggccatccttaggtcgctggttcgattccggctcgaaggagagacacccccccccccattattttgttgctttgaaccaaaaaagtctgtcttcagcgctcaatgttctgacccttctctaaaggaacagataataagccgtgcccagccgtggggg

SEQ ID NO: 233708 - DNA, 502 bp, Homo sapiens
  chr8:67026488-67026990
  hyper
atcctccagttttccttcctgtcccgtacggtttttctttcgattctcagcccaaactagagctgaaaagtcagacgaagtcaggtgaagagtagggcgagctccagcttaccactctaaaacttcccagacaatgagtggtgggcgctagcagtttatccttctagctttaaatttttagacccatttaattggggggaaattcacgaaactggttatttttgcttcaaaaatggcgacagattgccgtcacatgtattatcactcagaatcctttatgatttgtgataagatgtctgcatttccagggactcatctgaggctaagctgcccatagttcggggagacccacagggaaaacaaaacaagaaacagagaacttggaaacggacgctgattactttgaacgtttgctcaaccgaggaagcaggaactgttcggccccatctcaagtccgcagggcggactgcctggctctgggcagatccgaggtggataggac

SEQ ID NO: 233709 - DNA, 796 bp, Homo sapiens
  chr8:67089301-67090097
  hyper
agcgccgcgctccgcgagagccgcggggctgtcgagcgagcgccgaggcagcagcagctgctgcagcaacacgcggaaaaagttggcggtcgcctgttccggcgaagggcggctgccgctgcctccggcgaggagcgaggaggcgggcgaaaggggagcggccgggctcttgttgaggttccccaggcggaggaagtactcctctcccatgcggagcaggaccggccgagcctgcggctgctggggctgctcggactgcggcggcggctggaagaaatccaagggctgagggtgctgcggcgcctgccgagctcccgggaccggcccgcggctcaggagcgccctgcatggcgggcagggcaggagagccaccagcaggactcccgcggacacaagcagcggcagccgcatgttaggggcactcgctgcggcacagaggtgggcggagggcggaatgagagaggggaagagagaaagaaagagttggttagagttcgctcagctgggaggtgcacacggggtcttcctacgggactgccttagacgtgctgggctttggcctcagtgattcggatgggcgctgtccgcggtgctgaagcgcctggggagcggggaaagggggcgcctgcagggctccgcacctaagctcatgcgctcaccggccaggagtgacccttctttctagactctgaaaggacggtccctgcgtcctcttcctaacgatcctcaaaactaattttcccgatcctagagaagagccacagatttaagatcccacccgcgctgactacctccc

SEQ ID NO: 233710 - DNA, 32 bp, Homo sapiens
  chr8:67090319-67090351
  hyper
agtccgcgaacacgcgcgcacacacacacgca

SEQ ID NO: 233711 - DNA, 92 bp, Homo sapiens
  chr8:67090411-67090503
  hyper
cacgcacacacatgcatacacacgtacacaggcaggggcagccggctccgcggcgcacatcgcggcagctcaggcaacgcaaagttggtggc

SEQ ID NO: 233712 - DNA, 602 bp, Homo sapiens
  chr8:67344492-67345094
  hyper
gaacccgaggcctacggagcagttaccttctacggcaatttcaagggtggatggtgcgagcgccgctggggcagctggcgttctggttcttactccgtgggaaaatggccctgagcccgactggcttgaggcttagacaggtgaccccgcgaagcgggtgggcaggcgcggccgaggggcgggaggcgggcagcctccgtgattggccggcggagggggcggtgtagcgacccgaggagggaagaggactccaagcgccatggccgctgccgcccgagcccgggtcgcgtacttgctgaggcaactgcaacgcgcagcgtgagtgcggggccggcgggcgggcaggggaccgcagggtgcccacgcagccccctgggtgtgacccgctcagatcctgcgcagtcttctccgcttactttcaagaattcggagaatttggataccgccctgggctcccaccgcgcgccaggcggaacagcgaggtcacagagtgcgcgatgcagcctctcagggcgcagtgaggcagcctttactctgcttgtctaccgttaaagaaactgaggcccagagaggacctggtcccacatcgtagcaggcagtgg

SEQ ID NO: 233713 - DNA, 51 bp, Homo sapiens; identical to SEQ ID NO: 201441
  chr8:67524786-67524837
  hyper

SEQ ID NO: 233714 - DNA, 148 bp, Homo sapiens
  chr8:67687304-67687452
  hyper
ccggcagctccttcgggggtgtggccgaagagctccgagggcggggctgaccgagccatattcgggcgtggccggtggtgattggtgagggcggggcctgccgcagggggcggggcctgcaggtttggcccccgcagggagcgcagct

SEQ ID NO: 233715 - DNA, 43 bp, Homo sapiens; identical to SEQ ID NO: 201442
  chr8:67837266-67837309
  hyper

SEQ ID NO: 233716 - DNA, 863 bp, Homo sapiens
  chr8:67874819-67875682
  hyper
gcggcttagagggtcattaatcaaaccctccggcggggcgggctcgggggcggggcgtcctcctggccccgcccctcggctcactgcctcacgctgctttccccgaggcgcctcgctgagggcggcgtgtggagagtttggggtgtctgccgccggctgcggtggggccgggctggaggccgcgggtgaggcctgtggttaacctcgcgctgccgaggtcttacctcctcgagtccagtctgattccaggccgcttccaggccggtgcccagctgaggcgggaacgctgcagtttggttgagcgtgacttttaggctctgtgaggaaaagtcgagcgcgccacatcgaggcgctagccgtttattctaccacaaggtaaaagattcatgctgtcctagttaccctaaagctgggagatacactgcacttcctaccagaccccgaatgctctcagtgtctgtaattctttaagaagttcctagagcagacagcccttggatcgtgggcacttctccccggggacggggaccctgctgaccgcctccgctgcccccgcgggggccaccgctctttaattatttgggcgaaacattcttttctggttttgcacttgtggactcacgggaagcgtgacttgcagcgaggcaggacccgatcccaggcttctttagaaagcggacgctgcgccccaaggcctgttcagagccgccccaggaagccgtgggtccccgaccgccccaaaccgcagcggtttctgcaggtcctggacccgtcgccttcgtaggtgaaatctaagtacttttcagcaacataattagaacacactcgaaacaatgcctgcagttctccgagtaggacatttt

SEQ ID NO: 233717 - DNA, 247 bp, Homo sapiens
  chr8:67974199-67974446
  hyper
ttctgggccataccgctcccggacgccgccatcgccgaggaagcggagaagttgtcgtctctacaaccaagacgcaactttacctcgctaggtttccgggtgtgggccttgaccctccgcaccacgggaacaaactcttacctagactcttggggcagccatgacacctagaaccggaggtgaagttggtagagaccattcagggaagacagggacctttccgggacatgacgatataaacagcagt

SEQ ID NO: 233718 - DNA, 143 bp, Homo sapiens
  chr8:68256145-68256288
  hyper
gcccgagccgcagcgctacggcggcccggcggggcctccagcgttcgcctgcagggcggcgtggggcgtggcgggcctctggtggcaccgcgcccagcacttcgggctcttggtggcggccgagctgcgggaccagagatccc

SEQ ID NO: 233719 - DNA, 60 bp, Homo sapiens
  chr8:68864140-68864200
  hyper
tgtgtgtgtgtgcgtgtgtgtgtgtgtgtgcgcgcgcgcgcgtgtgtgtgattagccagt

SEQ ID NO: 233720 - DNA, 280 bp, Homo sapiens
  chr8:68864980-68865260
  hyper
cgggggccttggagacctccaggtctgaaaagttagctctagagaagagagctccagtccagggaatcccggctgccctatcttccctcacttttcttttacccgcctccccagtctgctcaagtgcactgtgtaattgattttccttcttgttctttcctggagactttgttttaaagctttggttttgtgattaaaggtccagtcggctacatccaggtacactaagttaaaaaaaatccttgaatgtgctcgagcttgagttcgttactcagataac

SEQ ID NO: 233721 - DNA, 60 bp, Homo sapiens
  chr8:69243552-69243612
  hyper
caagatcggtcccctgtttgaggtaaggcgctgtggaggagggcagtcccgttgtcttta

SEQ ID NO: 233722 - DNA, 1219 bp, Homo sapiens
  chr8:69243792-69245011
  hyper
aggtgagctcgggagggcccagcctcagcctggcaggggaagttttggccctctgactgtcctgcacctctcagctacatgttcaggacccgggcaggctgaggcaggcgacgcatacggatgcacacactcagactgtgttgcacacgcacactttcttttttgaattcacgctatcttgagtgttcgtgttggattttcttttttcttttcttttctttccttctttttttttttttttttttttttttttttaatgagggcggtaatagaacccgaaaaggtggaggaggtgcttagcagttaatacaattaactggaagacagctgaactggtgaggagtaggcttcagtcggtgcgggcgtgatgaatgaaattggcaaactgagagactgccatttggtcactggacgaaaggagagtcctttgcactgcagaccccacatgtgttagcaggagaaagggacggagaaaggttctgaaaagcacacacgtatttgtggaagaagactatagctctgagctggttttgtttttttttctctctctcgccattaaagaatttaagacaaaaatacagtagaaggaagagcgcgaggacacgagaaaatgagaacaagagattgaagcctggcaccagcaaagcgtcccgcgggttgccagggtgctgagcaggggtggggcgtgcggaccgtagtcagaagtggaggcccttgcggagggactcccttggtcccatccagttcagggggcactgaccggcggcgagagttcgcgggagggtcgaggtgctcccgccttgcccccgccttgcccccgccttgcccccgccccccacgtctcccagaagcagttgtagctgttcttaacagcttggtttggggtgagggcttggtatggggaggaggttacgtgtcagtgtctgagagaggcagaatcgcggcaagtggaaggggctgcactggagatcgcggaaaacctagcaaagactgaagagaagcaagtgagaactgtggagaacaaaaaaataatgcgagttaatgaccctgcaaaaaaagggcgcggaggacaaaggtgtggtccaataggtcttttgggaggacgggtttcacataacaagatttgcaagatctcctaagtttttttgcccaactttaacgttgatctgtcttagacgataagaccattgtttcaattgaagctcgcattgtggggtgc

SEQ ID NO: 233723 - DNA, 305 bp, Homo sapiens
  chr8:70404914-70405219
  hyper
cagtcctttcagccgtgtcccgaaattcacccttagtgtaacttctgcctctgctcctcctcttcttggaactgccttttgtttgtctggcagcgttggttctatgggggtgtgtgatgataataatacgcgggcttatataaccgtcttcatcttgcgagcacttcgcagaccgtcgctaatgaatcttggggccggtgtcgggccggggcggcttgatcggcaactaggaaaccccaggcgcagaggccaggagcgagggcagcgaggatcagaggccaggccttcccggctgccggcgctcc

SEQ ID NO: 233724 - DNA, 70 bp, Homo sapiens
  chr8:70744866-70744936
  hyper
ctgctctcccgccccgggctgcagtccagtgccttcgtccatggcgcttagaattcagatttgatagctg

SEQ ID NO: 233725 - DNA, 1911 bp, Homo sapiens
  chr8:70745356-70747267
  hyper
gtgttcgccgcctgggctcgcggcaccctcgggagtgaagctgccgacctgcaaagcagaaagagggcggtcagcgaagagcggctgcggcttggggctagcgtcccagcgccccggggaccagggttaggtgaccccgaaccgtccctagagggacggaggagctagtcaggagcggagccccggaggactaggcagcagccggctgcagtctccagtcccggaacaataagcagcaggcggtcggcggagactctccctcattgtctgccgcggacctgcccccgtcccgccccttctgccttaaacattgcgtttgcttttatatgttaataattatcaacctggcagctctgactcagaggcagtgtcttttaatcgagtgaactaactgcagcctttccgtactcctactccattactcaaaatagaaaatgcccaaaagaacaaaggaaactttttcacagacacacaatgtattccctgtcccaatttttctaaaaggaaaaaagaaggtgggggtaaactacgtgtgtagaaatgtgtgtgcacactggtgtgcgttggcacgtgtgcgcgactagatttgaatctgtctgctccaccagagacacacattcaaagccgaaggcagcagcaaaaaggtcaacatgcttgcctctttattcccaacaccaaaaataaccccctgaccgaaagaactcttcaattacaaataccaggggcattcgaggctgtggcccgcactaagtcccagagcgcggtatcaaacgaaaccgaaaatccgtctgctttgccgagagctagggaagccacaaccaaacaaagagatcccggcacgctgtcagagagcgcgcgaggagcccacggagccggctgggcgcacgcgggccggcggggaggtgtgctattgactgagcgcaccccgctagcgtgggcctggggagcgtgtgcgcgtgcgcggccacacacacacacacacacacacacacacacacacacacacaccggcgtactggaacctctctcgcgatcccgcacccagcttgaattcagcaagaatcgaaaacaggtgtgcccccgtggtaagaccccgcccctaatcttggggacccccactccactcctccagcctggggcaaggacggggggcggaatatgcaccaggtgggagacagccgagcttcactacactgggtttcattttgcagcgcgcctttgtgatgctgctgagaaaagaaaggaggaagggcaagggagaaaggcagagaggctgggcggccaagggtggccgctccggcatctccctcggctgtgctgggccaaacccgctcccagattcccggcctgccagccactcacaatcccgggcttccccgccgctgccttacccaggcgccttcccggggaaccccaccagccgctgcgtgaggagccggggaatcccagcaaactctcgccgctcgcggggggcgtccgaaccccctgcttaggcgagcgccctcacagcatcgcagactcggatggacacgcggatcccggcagggagctcttggagcaggcgtggaatcccagggacaccccctgcgcgcacatcacatacacgcacatcctacacacacacacacacacacacacacacacacacacacacacacagagcccgtgggaagacaagaccgccggcgacagcccgccgcgctgcccgggcgctcaagccgccgctactcactagcgagtctgtcagtctgtctgcctggctgagtagagcggcgggaggggggcactgagctacgggaatagttgggagccgcgtgaggaggcagcctccgtccagccgaagagaaatcagtgaatgagactgtgactcaggctgaactcttccccccacccctcgcctgtcacccaagc

SEQ ID NO: 233726 - DNA, 258 bp, Homo sapiens
  chr8:70945214-70945472
  hyper
cgctgcgcgtggtccgcgctcgggctcgcttgccccctctctagcccaaagccccattcgcagcgcctgggctggtcccactcatctgcgccaggtggaggggaaggggaggaggtctaaaggtgtggagtaagggagggagaggagaaaggaggaagggagagactgggcacttcaagggtcagaggaggaccacctgtggtcacagccatcgtcacgaccccctgccgcgcccacgcacgcgtggatggggccagg

SEQ ID NO: 233727 - DNA, 739 bp, Homo sapiens
  chr8:70946876-70947615
  hyper
tcaggttcaagaagcggcccggagttgcaggaagggcgccggcgtcactggccccaagagctcggaacgcgcgcgccgcaggagtgccggctgcggggtcgggttgagactggcgggaccctcggcctctgccggggtgcggaaggtggatgctacgggcaaaggggcggggcttgcggttcccagatccagaggcgggttggggacgtgagccggcgtccatgtgttctgcaccccttctcgcccggtgcctctctcaaggcacgttttccaaagtgtgttgaattcgggaatcgatcgaaaatttcaaggccaattaaatgccctctgatgtagagctccgattaggcccgaaaggcttcaaacagcccctctagaccctcgagggtcttcgccgcggtaaccttaggcgtcccctccccgagaagtctccctgaggctttcacagagggcgggaggggctgcgctggggcctccgttcccagtgcccctgactggtggggagggatggccttagtgtctgagagcagagaccagattgactcccacttgagaccagaaaacgaagaggaagcggaacccgaggtggctgcggctcccccgggacacaaccgggagaggaagtcctggccatctgccggccccgcctgggggcatctgctcgaggatccctgggagccgttatcgtattcctcagaatctgccgtgctgtccctccgcccccaaaaccaacaggaca

SEQ ID NO: 233728 - DNA, 3025 bp, Homo sapiens
  chr8:70981859-70984884
  hyper
ctcagcaagggaggcgccatccggaaggggaaggggggcatggcgggggcagcagacgctgcggcctccagctgccggaaaggttggaagtcttcctccacggtggccaggctgtttctgtagtgtccataggacgggaaaggcgtgtagtacgcggccaggttctgcgggctgctctccggcgggtagcacaccttgtcctgaggcacggcctcacttggccggggtagagccatcccgggaccgcacgctcggcggctctgcagaaaagcgggcgccgctgaggacaccgcgcgggagcttcccggggtccgacccgcgcctccccaccagcctcctccaccccagccagccccagatccaagggaacaggataaacgcccccagtccgatcccgccagcccgctcccacaattaagacaaaacgaaaaaacagcaatagaagcaaacacaaaaaagccccaaacggaaatctgccgggatcctgccctactctaaattccgggttagtgttgccttccccttccctctccaagcaccccttccctaagcccggccgccttcccacacccgctctccgctttcggcccccaacccggttcctgcaaaacccattgaagttccctttccttccttcttctcagtcctacaaaactcgttggtagggtctgtgggagccgcggggccctgccaacctcggggctgggccgggagccgagcgcaggcggtcggagggcaatggagcaagcgacagctccaggcgctcctgggccctcggctgggagggaagagccgaggaccctgggtcgcaccgcgcagatggagacgcgctcccagagcccccgggcaggtccagggaccccgcgacctgctctggcccagcggtgtgaccccgcgggtcctggcggtcctgactgcccgcaggggaggggcgcgccacttttggctgccctaggatgcgccgcctgaacctcttttccctcgcgggcagcgtccgccacattccccgggttcctcggaaactccaatcattctaccaggactattggggcctggggtagcccctcgggagccgcgtggacgagccctggccaggtgggagcgaagagcctcggcgactgccagtcctcccgcccccgcaccgccgggaaaggatggcgttttaatagacaggcagcaagttcaccgaggctgaagaatgaagccccttcagggccggcgggtcttgagatcaatgagcccaataagaaaaccaagcagggtcatgactcagaaattaaagaacacggggtcaggagaagaggtcagccacgacacaggcagcggcccgtctcctcccgatcctccaaaggcgcccttctcctagcctcctccgacctcagggatctgcaacttgggattcaaagcccccgagagggcagaacgaccatccaaaacgaactgcgccagcgagtgctgccgccctccccaacggccctggaagaccaccgccccgggccccaggcgcgtcctgtcccgtgcctacctccgacaccacctccaagagcgccaccgcggagcgggcgcctcctggacgctgcggggccactcgggctcggtaggccactcgggctcggtagacttcgggcgggccctgagggctgagccaggcttaagagggcgggcggggccgcggggcatcgacaggtcgagggtagggaattgacccggcccacgcagatccccgcgtcgtcttctccccgcccaccgcagccattggccgactctcgactcgccctctgtcccctggggtcgctcacttaactcatcagttttccaaaccctccctgggaccctagtggcgagcactcgccgctggccttctagggcaggcagtattgccgctccaggcgtgcggagtcggggagaaaaaaaccgaacacgtgtgctacccagggcccccagataagcccctccgcgcgcacacacaccctgaaccggagtccagaaggccggactcgcgtcccggggtcgagccccttactctccgctcccagttcggaagatcccagcctgcccgaaggcggcgtctgacccgctggtggacctggtgggtgtctgttcctgatacctggggacgaggcgggagcgccttgagcgctgggaagcttcgcctcgcgagtccccggcagtgacacgtgggagcgttgggcccggcacccccgacgcttccgaggtttcgggtggtcgttttgctctctcgggggcttttattccttaagtggctttaaacgaccgaggatgggcctcccgcgccgccgcagctgtcacttccttcgggaaaggctagcgaccttggacgcgcaggctctgaaaaccaaggtccagacccataccgagcgcccaaagaccgcatttgaattctcctcgccggccattgagggagagaaaggaacgcttagttccattcacattcacagaaagaagcgccgagggtgggggaaacgcagtcttgccgggtgagccgggacaggttcctcgcctgccccccggccgctgcttcctcttagctgaatggggagcgacccgccccgggcgcggccttcggggctgaagactgaggtgcagcctcacccccggcctggcagcggcttggaagagagagggaaaggaggaacatctacccggctaagagacgccgccagagtccctaaagctggcgggggacggaggccggggtcccggatcttcagagcgcccgcagccgggcttctgggctcctcggtgcggggaacctgaccctgtagccttcgccagggcgcggcggggctgcaagaagggaggaaggagtgggactagagccttcgagggcgcgggcggcgtgcactcagccttgtctccccgcgcgccctgccgcctgcttgccccctttgctgcaccgggtggccctggtccccgcgcccgcccgcccccgacgccttcgcgtggttccgcgctgcccgcggccagccccgtttcgcttcgcaaggagcgtgttgttttctca

SEQ ID NO: 233729 - DNA, 44 bp, Homo sapiens; identical to SEQ ID NO: 201454
  chr8:71315999-71316043
  hyper

SEQ ID NO: 233730 - DNA, 347 bp, Homo sapiens
  chr8:72273961-72274308
  hyper
gttttgctcctggatgggtacgcgcgggggctctcaggcgctctggtgcagccgcggcgcttctgggagtggagcgcctctgcaggggaaagctcggcgcagggggcaggcgcctggccgctgccgcaggctcgggctgccgagcgactgagcgaaaacgtgttccccaggaagaaacccgccacagtggacggcaacaggaaggcttaaagtcggaagtggcactggagagtttctacctcgccccaaactcggagccatcagctcccaccgttctgtttggtaacagctttgcgcccagcgctccttccccaccaaacagcagcggcagatagcatctgagaacc

SEQ ID NO: 233731 - DNA, 760 bp, Homo sapiens
  chr8:72459737-72460497
  hyper
actttcgcgtacctggcggcggcgccctaggcctcggaggctgcccgggcgggctggggctcgggcggcgctcgctgagagtcgcggcgcccctcagccgcttcccgggcgccgatcgccgccctcctgccccggggtggggcccaggggcatcagcagccgcgggctctcggccgccgcctgggaactcagggtcagatttagtttcacaacaacgtctcctcgtcacggcaacccaactggaggcagaagccggcggggcggccgagcggggcggggcgggagcgcggccgccgcgagccacggtggggagcgggcgcgggggaccctggcgggccccgggcagcgcggctgcacttacttgtgtcacaactgcggcgacggggggctgaggaaccggttcttccaaaagcaaaccgaaaatgggtaacagagaggccggggcagcgctaagaggggttctgcctcggtgtttagggcaaaaaacccggctccggcttccagaaattcgagccagcggtggctttttctttctttcctctctaaacgctcctgtgcctccgggtcgaggggcgcccttcgcgcggctccgagtgcacagcgacaccagggctggcgctggagaggggagccctcttcccagcacccctcgggtctcccccgtacccccacccacagcccctttcctgggcccgacgcccctccgctctgcagccggagcctgggcctggtgcccactgccccgcggggtgtctcggac

SEQ ID NO: 233732 - DNA, 68 bp, Homo sapiens
  chr8:72466269-72466337
  hyper
tgtgctgttggaagcggattgccagtgaggccggacacagggggatataaacgcgtgtagaaaattaa

SEQ ID NO: 233733 - DNA, 396 bp, Homo sapiens
  chr8:72466618-72467014
  hyper
gaagggttttctctcgtcgatttcaccttcactctacggaaatctagcaaggcttatctcgtttctcaagcctaggacgctggtgtattttgaggcagtctcctagaagtcctgggagactctgggagctggtactgtgtgcaggcgcgacctatagctctgcctggtggatctgcaattcgatttcaggcctttttccccctcggcatttttttttccctgactacttgagaggaaaaaaacaaaaactgtataagaaactcgagaagagactgtgggatgcagaaccgcacacgtggtcctgcaaattggataggagactgggggaggcggggaagagaggagaagtgaaactagaaattatggtacagctttagaattcgagaatctccattg

SEQ ID NO: 233734 - DNA, 983 bp, Homo sapiens
  chr8:72468591-72469574
  hyper
ctcctgcgggcgctcgctctctccacgccgccgcccgcgcgcccgcggcagccacgagcgtcccgggcggggaaacgcgttgcctcccggcggcgcctattactagcagctgcttctgcttagcccttcgaggatcggtttgccccaacccacggcctctcccagggttcggtcttctcccgcccctccctcccttccccgcctctcccccaagctcctcagtggccgcggcccgtcaacactgtcgcgcagtcactggcgcaggttcccagctctcagctgggggtttcggggggagggagcagaaggaatgagacagaaggaacgggaggctttaagcccaccgagggaggttagaggaaggcgctgtggctgtgggattaggaggccacagacgggaaccgcgccgagctagactagctgtagaaggctgtctctccaccccgccacagcgctccgagaaggagcgggaggcctgggcaggggagaggcgctcctgcccccacccgcgccctgctggccacctgtggcgtcggggagaccacctgcggagagggtgcagggatgctgctgccctgacgaggggcctcccggggactagcgaaacgtttcgcctcgccggtgccgggggagagcgcatggtgacaccagggcagagtagccatggcggtcctctccctctttctggcactccactgtcagcgtcggctagaagcaaacgcccaggaagcactaaccgatgcacacaaggtttcgatggacagggacaggaaaatcggctctgcagcgcgggggagcgcaggctggaggccgggccactgaggtggccccggctgagcgactggcgtcggtttctcctcctagcgctaggcgggagtgggaccccgggccacagcaagagtcgccgggtgaggacgggcccggcccgtggcgcctagctgtaaagggccctaatgctgcgcgtttgtcgcaaagggaggcct

SEQ ID NO: 233735 - DNA, 1046 bp, Homo sapiens
  chr8:72470186-72471232
  hyper
tgccctcttgctgacagattcgggcgacaaatcccgaactcatctcccttcttttctgatttctaagaatccacggtctccagccctaatcccaacccctcctccgttttcatccctaagctctagactgttttgtggtcagtaccatttccttactatcaaaaacggccgcgggcagaaaattacgataagtaaagcatagtctcttctcgcctttatggacatccccgcattttttggcggtcttagcctcggccaagtgcaagccgtccgtttcaaggcaggggtggagcctttaaagggtcgcttgggccagcgttagcattcctccccctgccgcccgccgggaacatccaatctaagtggtaaaaatgctagtgtgcagtggagctcagcttgaagacaagaccccccacctccagccgtaagacccaaaccaattcttgcccttagcggaggcctcctagaatttctggggccgccactgctctgggggaatcgtgggacacagtccggggaaagaacaaagctaggcgccaggaagggccgaccagcccggacgggtcagccgggtcctagccgtctcgggttctttccaagaaatcaggaaggtgactgtgcaggaggcaaaggacgcccagttaccgtttcctggagaaacacctttgctaatgcatttagggaggttgctaattgttagccatgtgccacctaaagccctgttggagaaagtcagagggcggatggctgtagttttctggaggtggagaaagaagtgggacattttggaggtgtcgatcaacggcttaaaaaaccactctgacagaaaacgtttgtaaaacccgacattcgttgtaagcaccttcaagaaaggcgagttctcgcccctaatatgcccctaatacagagcttgcacacggaagtgccatggccattgaatgaatgcgggaccgtttgcgttaataccggcaacgttctttctccggtgacactacgcagctgtcgttttccctatttctatgatcgttatgggacccaagtacata

SEQ ID NO: 233736 - DNA, 867 bp, Homo sapiens
  chr8:72754395-72755262
  hyper
ttaaaaccctgtcccgacgcggatctcacgtctagacctctgtctttaaagcggatgtagagcgcgttctaaccgttccctaaccattgtgtcaccgcgaaaggccggggctgtgtggaaccgtcccgcacgtgtgcgatgaatctggctccgctgagaacggatccgtgggctgtctggcgcgggctggggcagcagccgagagttagtctacagagctagggcccgagggtggacctgcgtccgcgtctcgtcacgaaaggaagctctttttggagaggcaaaacgtggtcgcccagatccggcgcagctgtagccgtgggcgctgtgcagtgacagccacacccgccacctgtcacgatcacagttccagggaaaggggaagggtcaaggagaatccagcggaaacttcttcccatctcacgagctctcccttctctccgtggcccccaaacactcgcatttaacgaataatcccatcaagtgagttccagtccgatttaagcggtggttccacatagtctgttggctgcggaaacttctttggtgtcagagtccggtcttcccgagaccacgaatggccatgtctgtaaatcaaaaagaacgtgagatattagagagaaacgattgtctcaaaccgaaacagctctcctacgcgaaccccagatattcctgacttggagtagctaagattttatcagcattctgggaatttgcatgtcctctctctgaactaagattttcattttactggaggttgataatccgagacttgccatatccgttcacgcttcttcctggactttgcccgcaggataatttggtgaaactcatctgactttgaggttctgtcgtttagttcccttc

SEQ ID NO: 233737 - DNA, 168 bp, Homo sapiens
  chr8:72755554-72755722
  hyper
aagggagatttgccgtcagtctgcaacctggtggcagatggagatggaaccaagatttaccctggaagtaggatattagtcaatggctgtcactggggtacaatgttcagaacgatgcaaacagacacggagggttgattcttcttcagggaaatggctggccactcc

SEQ ID NO: 233738 - DNA, 69 bp, Homo sapiens
  chr8:72756742-72756811
  hyper
agaggtggggcaggggcgtggaaggggtggggaccgcttttctgcatgccgaagagcggttggtggagg

SEQ ID NO: 233739 - DNA, 679 bp, Homo sapiens
  chr8:72917126-72917805
  hyper
aaagatttttgcttggttttcggttttctttttcttattttgagcagcagaccagcgtgactccacagtttcaaagagcaagcgtctatatttgtgtgacccggggccgagctggggaaggggaagcagagcagcgctgacgcagtcaggtccctggtgcaggtgccagctccccacagcgcgccgaactccccagtatgagcgaacctcaagtcactgccctcgcgcttgtcgagcgaactctcaaggcttgcaggtcgtctccaggagtcagagaggtccggactccggggattcctgctccgcggagaactggggagcccccgttcctgtgccactctcaggtggggtgactttgggctctgggaaggagagctgtgtccgtgtcacgagggggccccggcaggtggcgagcagcaccgaagcgcgggccaggacgctcgtttctcggcgccctctcctgggtcagtggcgcatccacctccccagccaccagtgaccagcgggggcgtgcgcagcttcagaggtgcagtttggaactgccctccccctttcagtgtaggactggcgacactcctttcttcctgcaggtagcaatctccagggacctccctcaaccctgtggagggcagttttttcagtggctcaaagaaaacacgtctttcgtgtccctggtcag

SEQ ID NO: 233740 - DNA, 583 bp, Homo sapiens
  chr8:72987460-72988043
  hyper
cccccaaggaaacctccagccgacccccgcccgcacgtcggaacccctccagacccgcgagcccccagagtaccttaagcgattccttgaaatcctccgtgtcgtccggcacatcctcatagacaacgccctggggctccttcttttctccagggcgccacatcttcctcaggctgcgcttcattgaccccaccccggacgccacctggtgcagctgctcaccacgcgcgcgggcacctggggcgagagagcgctgtcagcctgccaggcgctggggtccgcgcgagcccgagctctcccgcgctgcagctcacaggcagcgaaaaagtcgctctgcggaagccctggagaacttctggaaggagttctcaggcccgcgctacttttgtagtgcaggaagcaggcggggcgcggagaggaggtagaaacgcggagctccttcgcaaagagggcggcggcgccgcgtctgccttggactcgccccttcagggacaaagtgactcgcccgtcccgctgtcctgcagctgcagcagcgcactgacggagtcaagcgtgtcaggtcggggtggattgcagagaattt

SEQ ID NO: 233741 - DNA, 678 bp, Homo sapiens
  chr8:73163573-73164251
  hyper
gcaaccccctggccactccacgctttctccaaaccaagggctgcccgcaaggaaacctcgagccgaaccgcggccggacttcagaacccgtcccgacccgcgaacccccagggtaccttaagcggttccttgcagtcctccgtgtcgtcccgcacatcctcatagacaacgccctggggctccttcttttctccagggcgccacatcttcctcgggctgcgcttcattgaccccaccccggacgccatctggtgcatctgctccccacgagcgcgggcacctggggcgagagagcgctgtcagccggccaggcgctggggtccgcgcgagcccgagctctccctcgctgcagctcacaggcagcgaaaatctcgctccgcgagagccctggagaacttctggaaggagttctcaggcccgcgctacttacagtgcaggaagcaagcggggcgtgaagaggaggtagaaacacagacctccctagcaaagagggaggcggcgcagcgtctgccgaggactcgccccttcaggaacaaagtgactcccccgtcccgctgtcctgcagctgcagcagcgcactcccagagtcaagcgtgtcaggtcggtgtggatgcagcgaatttgttgtaatctacacattaagagcccccttgcctcgccctgccccctccaaccgtg

SEQ ID NO: 233742 - DNA, 187 bp, Homo sapiens
  chr8:73450496-73450683
  hyper
aacacagagacatgcgtgcattttattcttcaagcggtgcgcggtctccgttctgtagcacgattcctgagagggagaacgggtctctaaggaaagagcttcatggctgtttccaacacactctgctaggggacttgggaatacgtttgccctgaatagcaccaaaagacatcgaccatttgcctca

SEQ ID NO: 233743 - DNA, 110 bp, Homo sapiens
  chr8:73920991-73921101
  hyper
gccaggcttgaaccgctcgcccatgtcccgccggcggaagagactctccgcggccacgccccgagccctcgaatgcgagccaatcgttgctcggcgcctgaaggggcagt

SEQ ID NO: 233744 - DNA, 687 bp, Homo sapiens
  chr8:74005172-74005859
  hyper
ccagcctccagccgcgggcgaagcaggcggggtcccggccgggacagcagcgcccggcctcggcgcagccggcctgggccccgggccacagccgcgacagcgcgcacagcgccatccacagggtcctcatggccagggctccggcggcgcctgcgacgcgacagacccccggggcaagcgctctgatcctcggctggccgcggcccgggagctgcccgagcggccggcgaggcacagccgggccctgccctgcgcccggcccccgccctccgcgccgcccctccccagccctggcggcgcgcccgtcgaggcccgggcgggtggcggggctgccctgcccaggtggggagggcgctgcagttcccgggacgggcccgcaatcgacggtccgggcgccacccactccccgctgccagctcgcgccccagctccagcccggggacctccggggcgcgggagcggaaaagcaggtgctggcggggcgggggtcggggtggggtgccggggcgtagccaggagcccggcgggggaggccacatttcctggctctaaactgtacttctaacgcctggggacacattaacgagcgggcattttcactctaaagccatgagaccaagagcactcgatgggcaccaaacgtgtctcagcagcactctgcgcgggccaccccgccttcgcccggga

SEQ ID NO: 233745 - DNA, 165 bp, Homo sapiens; identical to SEQ ID NO: 201467
  chr8:74791235-74791400
  hyper

SEQ ID NO: 233746 - DNA, 71 bp, Homo sapiens
  chr8:74884738-74884809
  hyper
tcggcgttgggaccgaggcagccctgcatcctgggacttgtagtttctcgcactgcgtgttaagattttgg

SEQ ID NO: 233747 - DNA, 244 bp, Homo sapiens
  chr8:74888248-74888492
  hyper
ccagctcagctggcggataacgcgcgcggccgggaaggcggcaggcgggcggcaggcgggcggcaggcgggcggcaggcgggcggcaggcgggcggcaggcgggcggcaggcgggcggcagattctgcgcacgcgcaggcagcccagctgccagtcaggcgtcccgggctgggcatgcgccacttgtgcggcagtcgggtgggaagccgtgtctcgcagtcgtggactcgtgcagctggggcgt

SEQ ID NO: 233748 - DNA, 1184 bp, Homo sapiens
  chr8:75232542-75233726
  hyper
cccataactaggacgtttccaaatgcacccccaaataaggtacaattccccaacatcctagttacggggttctggcttctatctttaggctactggaggaccagaagcgaaatacgactccacgtgaaaccaatcccgggagcggtcagcacggaccgccaacctcacccgctcagggtgttcgctctaactccacgggagtggcgatttcaaacccggccgggagagggagggatcaggaacgtaatgtgacgggctcaagtgacagcgtcctctctccagcccaaccctcccgggcggcgctccctcccggtggcagcgcagcgctggcgccggccaggtacattcacgcctagctcccctgagtgtggatacacggcccgctccaagaacggggtcagatccagccctcgcgccccagtccggtcccagcgccctctctgggaaaggcgggcgcgggcgcgggggtgggaggcgcccccaggtgttttggcgggtttccggacacgtgcgcccggcgtcctccccgcttccccgcagccggggcagagcccaccgcaccagctcgcggagcagccgagccgcccgttacgccgctcacctccgtccccgtaggtctccacgccgtacccgtcttgcagcccgttactccaggtaccctcgtagcgagcgggggtgcacaggctctgccggaccccgtagcgccccttgaaaccatgtgaccactccccccggtacatccacttgcccttcgtctccacccccagcccgtgccgcttgccctgcgcccagtagccctggtaggtgttgccgctgggccaggtgtagcctccgaccacctcgaagccgtgcgaccaggagcccgagtactcgccctggcccttgggccccgtgcagatgccatgcccgtgcgccttgccctcctcccagccgccgcagtaggtgccgccatcgtcgaagtcgaaccttccgcccgtcattcggggggcagccccggcgcgctccccgcaggggcacggacgcgggcagtgctgggcacggcagggtgtagctcgggggtgggggcccggcgggcgagctcacgacagcgccctgggcagctcgcgctgccgctcggctccagtccgacgccgcccccgtcctccctcctcttttgccgccgccaccgccgccttcctcctcct

SEQ ID NO: 233749 - DNA, 225 bp, Homo sapiens
  chr8:75233938-75234163
  hyper
cctcggcaggcgggcgcgcgcggggaccggctggcgcgcatgtgttcgcgcagtgggatgccggtgggagggcgagtgtacccggggacgcacgagaatccctgcctggagatgaaggcgcggctgcctgtgtgggggccgctcgcgggcgccggagcccccggtgtttgtgtttggggtttttcaaagtggttaagctcctgtgagtgcggccacgtgtgtgtt

SEQ ID NO: 233750 - DNA, 522 bp, Homo sapiens
  chr8:75896970-75897492
  hyper
gagccgcagaggcggaggctcgcgtattcctgcagtcagcacccacgtcgcccccggacgctcggtgctcaggcccttcgcgagcggggctctccgtctgcggtcccttgtgaaggctctgggcggctgcagaggccggccgtccggtttggctcacctctcccaggaaacttcacactggagaggtaagggcgattctaaaatgcatcgctgagtcgtcaagctgccaccctttcctatctccctttgccttcttaaactgtacttaaaaaaaaaaaaaagccaactgtacagagtggttgggcgcgatgggtgggtgggctacccggaaagcagcgacgatagaaattagcgggagctctagttcttgtaagtgactttgttggtttcacctactttctctgtcgcgcgctttccatttgagttcagagaaagaacagtgtgtgccttcacacttgagaggaaaagctctcaagttgccggggagctgctggcttcttcgggtgcaggccacagattagt

SEQ ID NO: 233751 - DNA, 858 bp, Homo sapiens
  chr8:76316330-76317188
  hyper
aggcccagcgggggcggacctcgttggaggctacggtgcaggtcggagaagatgaaatggcctagcatcccccttcccaggggctcgagtcggcagctttagagctccgacaatctgtgccctcgctttgggctgcgccagggagcaaaaaacctctgcttttttgaaagaggccggggcaacaaggtagagagccgcggccagaagcagccccgggccataaacccgaggcctggatggcttaaggctgaaaccgcctccgcccccaccctcaccctgctggccgagccctcccccctcctagccacagtgaccggaatcccagacttcccttctgatgcataaaacattcagtggcctccagggagtttttgaaattctggcggaggctgctttatccgttgtttcgccccctgggtcaaacactggtccactgggtgagttggaggagcgagtagctcagctatagattaaatttaacctgagccccggtggccgcgtcccgcccgcggtcctttctatacgagtagctttgaaggtgtcaccgagctgtgcccaaatctagaaaagaatgggaggagaactgcatgagcttttaattttcttccctttttccccccttcctgcgtgtaaactggggtaagggtgggcggtaatccccactgattgagcccgcgcggggaggtaaggactccggcgtgggtgccaccgcggttgcgaaaaatcgggttctgaacccggtcagcaggagtggcagcgccccagcagcacctaggcaggaagaggacacttcccgttcgcgtttggtgatggtttcatgtaccaggacatgggtgcggagttgtcctcagaaatagg

SEQ ID NO: 233752 - DNA, 280 bp, Homo sapiens
  chr8:76318950-76319230
  hyper
atgtttttaaaagccggcgctctggctatatttctggtgaacaaatgcctgaccaagaagatcagcgcatctgggacgggtctgagacccacttctgcaagtcgaaagctaaagggtatgggagggagaaagggaagttttccatcaaatacatatctaaagaggtacttaaagactaaaaccacaggtagctggcacggatgggaacggaaaaccattccccctcctcttcccagaactcttgctgagctaggtggtcaggagcgtcatggtagaatat

SEQ ID NO: 233753 - DNA, 940 bp, Homo sapiens
  chr8:76319437-76320377
  hyper
ccagggttgacatcgcccaagacgaggcgtgacccggggcgggggaggggacttcgcccgcgtcgcgtgaaggatgccctggccttgggctgcaggcgcggacccccgggggctccccagggtgtaggaggcggagactgatccgctctagccccgagcggtccagcgcggggcgactcgcccgcatagtggagattccggcatgaggcggcggcagtcaccgcctggctgccccgcggaggcccgggagagccgctgcggtctcgggaggccgggctttgggacttgctggcccgaccgccagtcgccctggggccttgggaacagggaaatgcgcgcgccgaggcggtggcggcctcgctgctttcagttttcattgagtctgctggttactgtttaacgtccccacccacgtttcagtttgtttagtaaatcgataggactgtgagagtcaggccgctgccctgtcgccattgagcaaagctaatattctcccagcatatggtctaaaatctttgctagagatcgggaaaaagaaacaaacaaacaaacaaacaacaacaaaatccttaagcttcctctcccaagtccccccatccccacccccacttcccacctcctcgctttcagcaaacttcccagcctgggaaaagtgcggcgcgggacagcgcgacggggtgggtgggggacctgctgccgggagatgcggcggcggccgcgcggctgactgcgactcgggagctccgggagcggcccgcgcaggtaagtttctccgccgccgcccggggcccgggctggccgcagcgcaccgccccggcggctgccgggcaggaggagcctcggttcccctcgggcggctgaaggaggggctgagcctcaggacccctaggccaggccgtgttgaaagcagataccccgaggcctcgcccagcctgcgctg

SEQ ID NO: 233754 - DNA, 639 bp, Homo sapiens
  chr8:77585201-77585840
  hyper
ctggaggtctgggattaaagcgggaagaggcagcggccacagcgaatttcagcggcagctgcagcagctagaaacaagaagcaagagtacgaggtctttaggctgcgtccccctcccgcagtcagggctgccagtgagggaaagagaagaaagggtggacggttgaaatggtgatcactcgaagtcagaagatacaagtgagggctttgagacccgctcaggaataactcatgagcaatcagcacgcgctgagaggaaacgtcttccagaattcgttattattcacattagacattactggagtgggtggtgggactgagagtaaaaaggtgttaaaagggacctaaatggttgatacatttccccccacaccctactgttcatttgggcaacgaaataatttcacagatgcaaaggcgctgtacggtgaactttatatcgtggaaactaacttaactccgagaagagaaagtgcaattagacggcaaccgagtataagaaaatagttgccttggacggaggctggcggggcggggggagcgggggcggggaagtcagagagtgcatgtgcaatgcacaaccccagacggaaattgtaaactaggaaatgaaagggaaagaaaccgcttctgttataaa

SEQ ID NO: 233755 - DNA, 559 bp, Homo sapiens
  chr8:77586176-77586735
  hyper
gttcaggctcccagcgtaaggaaaggaggaaacgacaagaatccctaagagaaaaagaggaaaaagctgtgtgctgctgaggcggggcgtgggaagacaaccacagtcaattggaaggagcccgagtcagggagcaattgctaggacttcggacagagagggcagaagattgtgtagacaggcggtcaaccagagcagcgcggggcaggacccacgagcgcgaagccaggtgccgcgcggtccgcgccccggctccgggcgacgcagggactttgctggcaatgagaaggctgctcgaccagcctgccggagtcacgattccccgcgagtcccaaacacacgcttcactaactactttacagccacttccattgattttctttaacaaataaacataatacccgttacagcaacacttcctcttgccgccacagctagaatgccataagctctaatggctgcatttctccggacagcagttttcacatctccaaataaatcgttttccttcacttcaggtttggagagtctagtcctcgcccctctctataatttggga

SEQ ID NO: 233756 - DNA, 181 bp, Homo sapiens
  chr8:77589894-77590075
  hyper
aaataaaatacgccgaagaaaaagtctagaagtggaaattaccttttgtctcaatgttaattactccttgcctccaacactcaacacctaaccacctggtagtcctttttggttctcccctaactcggtgctcaatgtcagggtccgagtgctctgcagtggatgtggctgggctggggtt

SEQ ID NO: 233757 - DNA, 2301 bp, Homo sapiens
  chr8:77593169-77595470
  hyper
tctgtgtttgtgtgtaagagcgcgtgtgtgtctaatgaagtttgggagtcgcgcgcaggggcgcgtagggtgcgagacccggaggtccccatcccctgtcctctccgcggtcgccgcatccggggctccagccgcagcgctgggagctttggaagccgtgaggctccggagctgctctgagtccgggctgcgcgtcatttgcagtctggggaatgttgatcacctcactaattacacctctctctcccccctctccctctccctctccctcgctctcctctctcattcccagagtgcatatcgggaatagacacacaaagacatgcgcactcaacttaatcagccatttttttaaacagggctaaaacgataataattagcagaataaagacatatcggattttcatttcctttcctccttttcccaaccccttcacaaccaaacagcgagaccgcggtcggcacatgctttaactcctcccggacccccgaggaccgctccatgccccccactttctgctccagcgtttttattttcacccaataaagttcgaggattattttttattttttttgtttttttaatgaaccctctcgttttacttggatgtgatcagctgtaagtaaaataaaagcaaaacaaaaaagaggcgaagatcgagtaggaactgcaggggaaatggaaagtaagttttttctttaacttttattgagtagtttctgttaaatttaggtcgagtatcgattatctttccagcctgatcttgcacaatctttgatatttcgctccctctctctccctctccgcctctcttcctctctacccctacctcgctcgctcctgctcgctgtcgcacacatcccctcatcccgaccatctcttccgctctgccccccttttctatctctttccccttttttttggctcaaggttttgctccgctgagggagggagggggcactgagggacctgattttccactttctttaggggggctgcgtttttccggatttaacttttggattaagtggcggaggatcatctacgtttgcttgggcagttttctctccttttccctgtcttttcgggttttgccttccccgcgagccccgggcattctagtggctgggggaagctgtcagctccgcaacggcgcgggcactgccaggggtctccgctcgccccgcgcccctgcaccccgatcgggatgactggtcctccgcactcatcctctgaaagtttggacgttggtcggtggggctgggagcccctctctccctgctctttccctgctttaccctccaccccccaccccaccttattcagcctcgtttttcttcctccttttaccacccgcccctcttccccttctcaagttccccgaaggtcgcttagtgtgcggggctggcggaggcccgggggttcgtgagctctggggaggggattccaagaggctggggtgaacgctggggctggggctgcaggtagacacccgcccaccggagcgggcgcggcaggcactaccgagggctgctctcggcggcgcgggcgcgggcgccgcggaggaaaggcaggtccgttaggaggcgggatcgcccggcctctgggccagggacccgcgaggcggcggctgcttgctccgaacggaacgccgccgggtgtgcgttagaccagcggatagacgcccgcggcttggggtcaagaatcttttcctttttagcaaagggcaaggggtgtgtgcgtgtgcgtgtgcgtgtgtgtgtgtgtattgagtggctgtgttcggctgtgagaaccgattcattcttcggcccccctaaaagggttccatgcctacaaatgaacttcacctccttcgtttctccaagcatcaagtgcgccttctggctgggagcagctaagggaaaagggactggaatgcgccgggtctctccttccttctacttctatccacccccaacccccttctcgctcctcttttctatcagaaaaaaataataaaatctctcatggaattgtataaagtttctctgccgatgtccaagttacagaaggttccctattctaatccccttcccctagaagacggtgcactggtttctatttcttttgttacctgtgatccgggcggggggctcctttcggccgctcgggctggggtccggcccagagaggaggcttctgcgggcgcctttggccgcgacttctcacttccgcgcggttctggtgaggttttagctaccgttcggtgagacaccctccttgtaggtaccaaaggttcagatcgcaaacacggaccc

SEQ ID NO: 233758 - DNA, 271 bp, Homo sapiens
  chr8:77912576-77912847
  hyper
ccgggtcaggggccgcaagtgaggacactacaagtgtcgaggggcctaggggaagccggggcttgggagggcagggctttctctgcttgcggacatcgcgaagggcctctggcaggcgccgccgggtggcggcgagacgcctccgcgcctccggggttccttgttcgctgtcggaggaggaccggctgagggatggcctggtggggagggagccctcgggcaggtggctgcgtcgggcctggggcagttgtgctgcgcttggagacctgcc

SEQ ID NO: 233759 - DNA, 699 bp, Homo sapiens
  chr8:79428284-79428983
  hyper
aatggaacagtccatgcagccggggtgacgggggagcgctcggaggaaggacgctatgcagagaaagcccccctggctcttctctctcaatccataatccagcgatgctgcagctgtaaaagcattaatagaaaatcaatccacaacctcgcggggcagcgatcgtcgagcgccgtttccaggctgccttccctggggtcgggagcggccccgctccccccgtggctggcgcggaatgtggtgatccgtcccggggcggggatgacttcatgcagccggagctccgcggcgggagcggaggctgctgctggcaggtggggcgcgggccggcgcgagctgaccgagcactcggcgggcgcggcgggactgcggcccgtggcggcgtgcgcggggacctgcgctgactaggtccggggaaggtaagcagcccggcaccggtgcgccctggccgcactgcgtggagctttccgcttggttaataatggggtttgcagcacggagggaagaaggggagaaccccgctgcattctgcaatgagaaaaggagcaacaactaggatggaaatgttgggcggccaagtgcagaggttggaggagcagtgttactgggcaaacaaagaaggcgttcttgcctctatactcttttgaacgtgatctaccatttcagtgccagattcgcgtagacagtgaagaggactca

SEQ ID NO: 233760 - DNA, 556 bp, Homo sapiens
  chr8:79716726-79717282
  hyper
gctgcaagagcccagctactcgccgaacccgggccgcctgcgtgagtaacttggggcggccaggagcacgggaagggcgccagacagagagcctttggctgcttctgagaccggctgtgggctgccaccgctgagcggcgcggaggctgcagcgttccctctcaggacagaaagcaggcgttggggactgttactcgcagcctgccaggggcagcagccgccccaggttcaagtggctatgtgccaggatactcaggcgcggctgttggctgcccatgggagagccagtgctctccgcaggtccaaagtgcaaggccgggctattcccggacttgcctaggagcaggggcccccagcgcgtctgggattgccccggcgcgtcgggcgcgcgaacttgtgcgcaagggagaagagcgcttaccatggaacatggtctgcgggaggcgggcgtagtcatgatgaccgcaactggagcaggagcaagctctcaccgcccatagtcactcccaggaccctggtcttccgcggagttgccgagtctgtgttgggcagggtg

SEQ ID NO: 233761 - DNA, 685 bp, Homo sapiens
  chr8:80524696-80525381
  hyper
cttaagttaagccacgcgaaatttccgttttgtgggtcagacagtgccaaatatcggcaatttcataagctcagagagacaagacagtggagacacaggatgaccggaaaagattctggattcagggccttcatccgcaattggtcttgtgccttgagtgcccacggttctggcgctcagtggccccggggtgaaaaggcagggtggggcctggggtcctgtggcagctggaagcacgtgtcccccgggacttggttgcaggatgcggagacagggaaagctgccgaaaggactccatctgcgcggctccgccctgccctaccctccccgcggagccggggagacctcaggctccgagactggcggggaagaggaatatgggaggggcagttgagctgtatgcagtcctggaacctcttttttcagccccgcagtccacaacggcccgagcaccccttgatgtgcgcagacccccggcgtggctctcagccccagcaccgagcccctcccagccaagcgggtggctctgcagaaaagctggctcgagccccgcccggccacacaaaggcgcggccccacccagcccgggcgcgagaccgcagaggtgacccccttcccagggattcagggagggctgtctcttctcgcccacccacggtccgcggagctcggggctttttttccc

SEQ ID NO: 233762 - DNA, 504 bp, Homo sapiens
  chr8:80677512-80678016
  hyper
agacagtaagtggaaggagccgaaagagaaggggaaggccgacagggaggccactgaggagagcagaggcggcgacagtttggaggcggaggtgaccacagggagcaccggtccgaggctgccgctagggggcgctcgcaaagcaggcgcctccggatgtgccgagcccagcctgccctggtggtgcggttccgtgggtgaggccgtggtgcccgcgttcccgtggccgttctggggcagcaacagcgggtgcgcgatgtgcgggtgatgtccgaagacggtcccccagggaatgtgtccgaggcccgcgtgggcgccgctcgcggcttcccgctgggaagcgtagttgttgagatgcgaaaccagtcgaactcgaagcgggtcagaggcatctagtccttcaatgatgctcagataacgcgcaacttctgccaggcattcccgaaatcccaaactccgatagtccatagcaagggcgtgcgcgtcaaagtaacctaagcaaaa

SEQ ID NO: 233763 - DNA, 701 bp, Homo sapiens
  chr8:80695878-80696579
  hyper
gggtgatcccaggttagaggcgcccaggctagaagggcccggctcttggccctcgctgtcctgcccgctgtcgccgctctttggcgcccccgcaacagctccctctcagcaggacgcggaaaggtcagggtccctctctctcgtatataccacaaagaaagcgcgttccccgcggcgccccgagagcccttaggcagacgtcccgcagagtcccaagtccctacggtgggcccgcgggctcctgatctgtccaggcccctaaactatcacaaggaggatatttgatgaccgtctttcttccctcgctctctcccaacaaagggtaactgacctctcgcgtgacctggccagcgctgagattccctcaacacgctttccccctattgtgtgcagacccccacagggcggaggcgagcggcgcgacccactggacggacgcggcccggagctccaggcgcccggacctggcgggccctccctgggcgggcgggtggcgcgtcgcccgccgccgatccgggcggggtgaggggggcgctgtaattgcagcgcagctcgggttcccacgctcctattgttggcgactttgtttccaattcccatcacgtgtgctaattagttagcgctgctggctggctgggaggcgtgtggctggcctaaaagcagaaagatcacttcctgtagggagccgggccggctgaata

SEQ ID NO: 233764 - DNA, 293 bp, Homo sapiens
  chr8:80803351-80803644
  hyper
tttgagtacaaatcgataaagctagagattcaaagactgcctttataaaactggagaagatgcactctggccataggcggagggggcagcccggggcccctgtcaggaagccaagcggcccggggcatccctggaaggctgccgagggggcagcgccttctctggggacggcttcgtggagagtccgggacgggcgagacagaaaaccgagccctatttgttattagtatttttttttttatactctcaaatgccaccggcacattcttttaaaaaaaaatgaaaggaaagaa

SEQ ID NO: 233765 - DNA, 302 bp, Homo sapiens
  chr8:80942032-80942334
  hyper
gtgtggacagacccggcccagtacgcaaatgccacacaaaaggacaacgaaaggaagaaaaacaccaagcacagattctaggggccgagggctgagccacaacgcaccgcaactccggaaaactgggccccggacctcagctccccttcctaagccaggctccgcccctattcccgaccccgcccaccgcgtcgttggcgtaattcccgcgactccctctcacccgcccgggctccaccttctgtaggggctccaccttctgtagaagctccgagtgccgctccaacgcgctcgcgaaaccg

SEQ ID NO: 233766 - DNA, 542 bp, Homo sapiens
  chr8:81397818-81398360
  hyper
cagcaataagacactcggggcggtgcattttctgtgaaatgactactgtccggggcccgaggtgctgcctcgcacaatgcatcaaaggaggttgtgtccgtggtcgtaacctcttcgcgtgaaaggcaccgcctggtccagtctttgtgaaggaacaaaataagttcacttccttgggcaccgccacccaccctcagcaaatgacaaggctggagcgcagctcccaccgcacagttatttgcaaagtcccaggtgaactcgtggcgagagaaggaaaatgcgcgtcccgggcgcgggtaggtgcgtgtgggcagcggggaggcggccagaccctgacactcgccagctgtttgtcctccgcgtagcccggccccggccgcacacgcccgccccctccctgagacccccagcccgccgcccggccttttgtccccaacccctcggccgacttccttccccgcggccgcacccccgcccccaggccggaggcgcagcccagcccctttcccggtcccctggcgcccccaccccaccccagccca

SEQ ID NO: 233767 - DNA, 1702 bp, Homo sapiens
  chr8:81398660-81400362
  hyper
ttaaagagggggcagcggagggtctccccgcactccgctgctcaacttcgaaggcctcgctcgctgcaggctcgctcctcacctctccgccgcccgcccccttctccgcgcgggacgctgcccggagcgcggcggggcgggggtggaggacgagagagcggtcggaggcgtcggcccggcagcggcagcggcagcggacgcgtgcagcagacccgggagcgagcgcgagccgggctgccgggcgagagggcgaggccgagccccgcgagaccggaacgccgggggcgggggcgagacagagggggagccgcggggagcgcgcgggacgcggcccgaggccgtgcgcgagccggggcaccgggcggcggcggcggcggcgcgcgccatgtcgttcagtgaaatgaaccgcaggacgctggcgttccgaggaggcgggttggtcaccgctagcggcggcggctccacgaacaataacgctggcggggaggcctcagcttggcctccgcagccccagccgagacagcccccgccgccagcgccgcccgcgcttcagccgcctaatgggcggggggccgacgaggaagtggaattggagggcctggagccccaagacctggaggcctccgccgggccggccgccggcgccgccgaggaagccaaggagttgctgctcccccaagacgcgggcggccccacctcgcttggcggtggcgcggggggccccctgctagcggaaaggaaccgtcggactctggccttccgaggcggcggcggcgggggtctcggcaacaatggcagtagccgcggccgccccgagacctcggtgtggcccttgaggcatttcaatgggcgagggccggcgactgtggatctggagctggacgcgctggaggggaaggagttgatgcaggacggcgcgtccctgagcgacagcaccgaggacgaggaggagggggcgagcctgggcgacggcagcggggcggaaggcggcagctgcagcagcagcaggcggtcgggcggcgatggcggggacgaagtggagggcagcggtgtgggagctggcgaaggagagactgtccagcacttcccgctcgcgcggcccaagtctctaatgcagaagctccaatgctccttccagacctcctggctcaaggactttccctggctgcgctattccaaggatactggtcttatgtcttgcggctggtgccaaaagacccctgcagatgggggaagcgtggaccttcccccagtggggcatgatgagctttcgcgagggacccgcaactacaagaaaaccctcctcctgaggcaccacgtctctaccgagcacaaactccacgaagccaacgcccaggtacagtatatcctgctcctacttttttgagatcttttagggaaaggtttatcagcactcccttcacccccacccacccccgaaaaaaaacctcaaaaccattttcctgggtgaagacatcgttccagttgagaggtgcgggaagcttaggcgtgggggtttagaaagcctgggaacaagttttataaaagttctgtatgtgttgtggggggaaggggatggaatgacaattgtcgtggcgctggattttcttttttatgactcatttcttatcagattgaatcaaaaagaaagtgaggttgaaggttttaacctaaaaggctgactttgcggtaaaaaaatttt

SEQ ID NO: 233768 - DNA, 234 bp, Homo sapiens
  chr8:81478189-81478423
  hyper
gcagaggctggcgtcgaaggagaggtgctatgcgaggatggccccaagttaaacagtgacagcctctgccctcccagaccccaggcgcgcgggggcgggcgcggaacaccggttccaccgccaccttcaggcctcccggtgtggcgcggttcgggacgtcacacaaataccagggcacccatgtttctgccctgggaaactctcacgtcagccggccccccaattctgctaaag

SEQ ID NO: 233769 - DNA, 47 bp, Homo sapiens
  chr8:81490259-81490306
  hyper
tcggaattccctccgcggccggcgcctcccctccgggggcctggctc

SEQ ID NO: 233770 - DNA, 77 bp, Homo sapiens
  chr8:81490546-81490623
  hyper
ccgcggtccccgccctctccggctcccgcgactccctcccccaggcagctggggcaggaattcggctggagaatctg

SEQ ID NO: 233771 - DNA, 739 bp, Homo sapiens
  chr8:81785645-81786384
  hyper
acacacccctcctggccgggtctctccccggcgccgctgaccgtcctcggccaggcgccttgccccggggcccgggcccgtccccctccccgggctggcgggtcccacgcgcgccaccgcgcccaacacgcaccttcaacgcgccccgggccgggcccctggggactgcgtggccgggtccgaggggcacgaaacgctcctcgccgtcctcgtcgtcttcgtcgccgtccaccacctcgacgaccacctcctcgtcctcctcttcctcgtcgtcatcctcctcctccgcgccccctcggggcttctcctccacacgcccgagccccctccgccgcctgctcccgccctcctcgtcctcgtcttcctcccctagaagcagcagcaccggcgacgaggcggcggcggcggccccggtggcccgaggggggccggtcccggcgctgcgcggcggcggcggcagcggcggcctccagctctccggggcgggcgccggggccgggcccgggacagggggcgggagcccgggtagggcggcttccttggcgggcgcgggcgccggcccggcaggctgcagcgcggcgcccccccggcggctgcccaggctggagcgcttggctagacgccgcgcctgcatgcctgagcgcggggttgcgggccgcggcgcggggccggagagtttgtcacctcctcttcctcctctgcctccgccggtggccgcagggccggggactcgcggccg

SEQ ID NO: 233772 - DNA, 86 bp, Homo sapiens
  chr8:81786744-81786830
  hyper
tcacaaccctccggtccccccgctcagacaaaacccggactggattttttttttctcttacccacagtctccgaaagtctggcgct

SEQ ID NO: 233773 - DNA, 543 bp, Homo sapiens
  chr8:82192866-82193409
  hyper
ctggtggacagcaaaggctttgatgaatacatgaaggagctaggtgaggcacccggcctggcagcgcctgcaacgtggcgtgttgtgcggtcgtctgtccctaggtccccgtcagcgtgccagattctggggcaggagatgctcggcggcctacccccatcccctcccatcttccccaccacgcggccgttgggtgcagcgcgcgcagcaccacgcgggcaggcggcgaggagcagggagcgtgcgcgcctcttgcccgcccgcgggccgcaagattccggaggtggtccaccccgtggtccacctacctctgcttctttcccttcgcccaaacggcagcccttccgcattgcttcctgtcctttagcgcgcgcacccgtcacctcacgctgcacttctttcgaccccctccaggcgaccctgtatttcccttttttccccctttactcatccttccccttcctgccaccattctgtctctcccatttaccccatcgtggcagcacccactcccctttccctccctgtcgcatcttttgttcc

SEQ ID NO: 233774 - DNA, 172 bp, Homo sapiens
  chr8:82543134-82543306
  hyper
cccaggggctgaccgcacaccgcagaccgccctcgcccccaccccagcagagagaagcgccgaacccggagagggtggcgaggggggcggggaaaacaggagcctcacctcgagtcggcgagcggggcggggaaaacaggggcctcacctcgagttgtcctgctagctgggt

SEQ ID NO: 233775 - DNA, 192 bp, Homo sapiens
  chr8:82598487-82598679
  hyper
ttgagtcggaggacgtccggctagctctgtgaacggtgttaccgcactcgtctcttccggaggtagaggggctactcgcaacaggaagttccgcccttaaaaactccattcctgagggggcgtggttgctttgctgggccccgccccgagctgcgccctgcgagcctctgccaggccgggccgggtcctgac

SEQ ID NO: 233776 - DNA, 33 bp, Homo sapiens; identical to SEQ ID NO: 201491
  chr8:82633554-82633587
  hyper

SEQ ID NO: 233777 - DNA, 74 bp, Homo sapiens
  chr8:82692881-82692955
  hyper
ttgtcactgctgccgctcgttgttcccactaggcggcactctaagctcatcgtcaatgcgaggaccgagcacct

SEQ ID NO: 233778 - DNA, 103 bp, Homo sapiens
  chr8:82754299-82754402
  hyper
ccgtacgagaacccgggacagcgaccgcctgtcctgaggtaatgacccagtctttacctcagccccctcggcgatcccgaacgagcgcgcttcccggtgacgg

SEQ ID NO: 233779 - DNA, 656 bp, Homo sapiens
  chr8:85094384-85095040
  hyper
tagaagcccaatgcacccagcgattggctgatggcatctttgttcaggcgatcgatgagcgccctaacccacacgctgggtggagaaatccctctgccaccctcaccttcagaatccactgctcagccacctggctcccgcggggtgcgccaccgcctcactgctggtacacgtctccccctctcgaccgccaagtgcttgctccctccaggcgagcactcacacaatggactcacttgtttcccatgcccctctcctttgacttccagcctcagcgaacaacttgagcaagagtcaaacaggagtctctgccatggagcatagacccttggagctttccagaccagctcagaagcacgggcgcacacacagacaaaacaatgccttgtccacgaatgaataaaggacacccatgcccccacccaccgctccgcaacccgcagaaagaaacccgggacggggtttcctaaataagagattttgttgtgtctttcaaactgcaagcattccccttgaagacggcgaaagagaggctgtgcgttcagatggcaataaagattgacagtggctttgcccgtgacaacgcccccagcatcgcgctgagccaggttccctgagaaccgggagggggaaacgcagatctagggaggagggaa

SEQ ID NO: 233780 - DNA, 749 bp, Homo sapiens
  chr8:85095302-85096051
  hyper
cacagcacacactcccaatgcgaggcggcggcggcagcaacagaggcagcagcagcaatcgcggcagcagcggcagaggcggcggcagctgcgcgcctcgggcccaaccccgctcggctccccctctcgccggcgccctgcctgtcttgcgtgtgcgtgtgcgtgtgctcagcctcagcgtgaggggcacctgctcgtctgggctcacagcgaaggcagcctcgccgcgagctgccgctgccgctgctgccgccactggtgttgccgctctcaggcgccaggctccccgtcgccgccgccgccgcctcgccagccagagttgggctccgtgggcttcccccctcgcagcctcggtccttccccgctgcctgcaagtcagcctggctccgagtcacgtgtcagtgcctgaggcagagactgcgagaaaaaaacgcgcttcattccttcttccaccgccatactgtattttatactaaatctcatttttattccaacattttactcccgctcggtgagtaccttctcagtggcattcttgtcctattcttttttttgtccttttttttggttttttgttttttttgtttttgttttttttctttttttccacttctttgattattgtttatatttgggaaagctggaggagcatggttttgagccttttcctgaatccaagtttttctagcatgcgatcgttctgtagacaaggcgctgtgtctcggagtccgcggcgaccgtgcccgctg

SEQ ID NO: 233781 - DNA, 136 bp, Homo sapiens
  chr8:85096578-85096714
  hyper
ggaaaaaaaaaaatgaagtgcggtttggtttccttgtcaacggaggatgaagtgaacagctgagcagctcgcagagagcaggtacttggtccccttggaggcgtttcccgggtgtgcagtggcaacactggtccta

SEQ ID NO: 233782 - DNA, 435 bp, Homo sapiens
  chr8:85096774-85097209
  hyper
gggcagtgtccgagcccgaggtggggagagcggcgcagggagccagggaaaaccaaagtccgttccctgcttcaggatcgttttctagatgtgcgcaaaatacagtcccctccccccacccctcccacggtgagctgcgcccaggtcgtctcccggcggggcgggtggcgtctgcgctgcgggccgcgccggccgggcactaggcggccggcgggccctgtaagttctccgagggccacttgcacagcaggaggggcgagggccgtgtacgtggcgctggccgtcgggcgggctagaggggaccctcagagcacccgggagatgggggtagaagcggcagagaccgcatattccggaggggctggctccaggccacgcgagccggagctggagacatttccagagccttgaggatggcaccggccctcgcacgct

SEQ ID NO: 233783 - DNA, 196 bp, Homo sapiens; identical to SEQ ID NO: 201495
  chr8:86089319-86089515
  hyper

SEQ ID NO: 233784 - DNA, 67 bp, Homo sapiens
  chr8:86090172-86090239
  hyper
ttctgtctccgggcgcagggacctgagggtaaccgagtgtctgttgctctgcgtccacctgtggcag

SEQ ID NO: 233785 - DNA, 102 bp, Homo sapiens
  chr8:86132907-86133009
  hyper
ggcgtgggtacttgtgcagaaacttcccgaggtgcttctgagactgcacagtgaagaccgccgcaccggaggtcagcgctccgccgcggactcccggctgac

SEQ ID NO: 233786 - DNA, 66 bp, Homo sapiens; identical to SEQ ID NO: 201497
  chr8:86157559-86157625
  hyper

SEQ ID NO: 233787 - DNA, 331 bp, Homo sapiens
  chr8:86350652-86350983
  hyper
gaggctgcaagagccgccgggatgtagattttagttcgtggccaagcacaactacgacaccctgtccctgcccccaccccatccccaagaatgcatggaggaaggagagaggacgaggtgagggccgcctgcatttctgcacgtcggcgccggttagaaaccctgcagttttgagagagaagaagaggagatggaggggccaggagccacgactcccgggagagcgcagggaggggcgtgggtgccccttcgcccacctccgcccccgtcacctcgacagctgtcccgctcttggaattcattggcttcctctacccggcctcccaaacac

SEQ ID NO: 233788 - DNA, 944 bp, Homo sapiens
  chr8:89339037-89339981
  hyper
cctgggtgaaaagcatggaccggctacaattgtgtctttgagcgcgcagcatcgtgctttgtgctgccggggataacggattctgggtctcacacgcatccgtcacctaaaacacccttaaactgaaccagggtctccacagctggaagggaaacaacgtgctgggacccaggctgctctgagctacaaggatcccaggagtgaaggaaatgtttcagggagcagcccaggcagcggggggaggaagaaagccctcgcactcttacctccacattgaaatactgctccgttccgcagactgtagcacataaaatccaaagcaaggtttgcaagaaaaacacccccgaatgatgcacgaaatccaaccgtcttccagtgctgaatgtgagtaagatcatagtgaactgtgcttcaatggatggacgagctccccttcgttttctccctctctccctctccctccctccctcgtttcctttcaaaaaaaagtcctccgggtgggtaaggagcctgcaggttcacccacagccgggcaaggggaggagacaggggccccgcgctcggcagcccccgagaggcagcggcgaagacagggtcagcagtagttcctgttcaccatcctccggggtcagtcaccgggaacgtggcgcctaagttcaccggcggttccggctcaaagagcctagtcgcagccgcagcagcagcagccgccgccgccgccgccgcctccagcccgtgcgtcctcctcctgcactgcctactcctcctcctcctccgccgccgccgccgcccccagctcctgcgggaagggcctccgccgctcctcactctctcgcctctgcttctccttccctcctctcctcgctcccctccagaatgttcatccgtaatctacataactcctccttcccggggtctgcctggctctcggggcccttggcgcg

SEQ ID NO: 233789 - DNA, 943 bp, Homo sapiens
  chr8:89340041-89340984
  hyper
cacacacacgcgcgcatacacacagcccgacacacacgcacgcgcgcttcttaaaggagacggctcataaaggattccccactacggtagggcgcaccggaggtatccagcccgcgacaagggccctggtttgagcacagctcttcgacagtatctcccatcccgcatccccgaggcaggcacccaggaacttgggcggctccattctttcttcccgcccaccctgccgcctcgcatctaaaaacgagtgcgcccctctccagccatgagctgggtggggctcaggctgcggaccctagtggggcctggggagcggcccaaccctggtcctggagagcggtcggcattcctgaggaagcggccctggaagaataggggcgctgggaatcagaggagcgcctggtcactgagcgcccctgggtggctcgggtcggtggccggggctgaccaagtttgggaagactgagatagcaaatcccgaacgtccaaaactttgttggggtcccgagcctgtggcctggtgtcttcctgaatcccctctaccatagctacattccgccttccaggcttgaggagtaggcacagggttttggtggcggactagacaaatacagaagcgggatgaaaacgctcactttccaagtgaacggtggacacacgcgcacagtgggacccgggagagatggtcctgggtgttaacaaaacatccgatgagagggatgggggcgctggaaagaaaccggctgcgggagccaggggaagggttggggaaagaaggagaagaagcagcctgaggaaaggcgagtaaagcagctggcaagggcgggaggaagaggctgctcgcagaccgagcgggggagaggctggcgggagctaggagagctgcaggcaagagggggaggcggctggcaagaagcacgggcgaacgcgggcagggaacttc

SEQ ID NO: 233790 - DNA, 169 bp, Homo sapiens
  chr8:90769556-90769725
  hyper
gtcggaagggagtcggaaagcagaccccggtgccccctaataaagcccccagccggacgctgccgctaccggggtttggcaacttccggaagacctgtggcccaaaggagaatcctgttgggggaggcgggggccggtggtcgctaaccaatccgacacccgccagcag

SEQ ID NO: 233791 - DNA, 219 bp, Homo sapiens
  chr8:90770542-90770761
  hyper
caaatggcagtgaccgcttggggccggcctcacctcgtcacctctagggagcccttcaagcttgggagatagggagcacccacccttcaagctctggcaccgtagggagcacaggcttctctggagatgcagcagttgcattcctccacacatctctccattaccctttctctccttccctcttactcctaggcgttctggctccgtactccaaaaatc

SEQ ID NO: 233792 - DNA, 210 bp, Homo sapiens
  chr8:90914087-90914297
  hyper
gtgtggtctggggcgggcctgatgagcacctggattttcacccggcgtgctggtaattcctacacttgtgggtgtttgagagacatgaagaggggaggatgacctcttcccggaagcgggacttccataaaagaagcgtggtgggcgggtcccgggcacctgtggtttggtgagtcctccaggtaactgtgatgcgggggtcagcgggag

SEQ ID NO: 233793 - DNA, 153 bp, Homo sapiens
  chr8:90996934-90997087
  hyper
agtgcgacttgggcgcttgcccgccacctggtggttggaaaaggaacagcacaatctgtattgaaatgtgctgcgttaaaagggtatgtttctaaggtgtcgctgaatgtaaggttactacctttcctgattatgaacgaaaagaattttaaa

SEQ ID NO: 233794 - DNA, 198 bp, Homo sapiens
  chr8:91012993-91013191
  hyper
tattctcattttacgaatgaggaaagaaatgtgatctgagctaatgccttgtgtcaacaggtatattacactaagatggagaatgatatactgaatctgtgtttgcctttaacgtgtgtttaacttcgagaaaaaagccaaggctgggcggtcgcagtcacgctgcatccggcgacagggggcggtgtgtcctgcgaa

SEQ ID NO: 233795 - DNA, 165 bp, Homo sapiens
  chr8:91014313-91014478
  hyper
gagacgtgattttcgaagttttcacagttctgcaagtttccaacttgtgtgtaaataggtagaaagaggtagggaaggatacggcgcccgtccaccccttaaggagtgagaggggatcaggccgagcgagcactgacctttgacgtcctttgttgtgaggaaagt

SEQ ID NO: 233796 - DNA, 371 bp, Homo sapiens
  chr8:91094841-91095212
  hyper
atcaccgtcagcgtcgaaatggagccagatctcgaaaaactgtgaggctgtgatgagggatgactgcaggtgggattctgccattgtacagcggggtgtgtgtctgggtgtgtgaatatgcgtgtgtctgtgtccgcgcgagggggagtgagcaaaagctcagcgtgtgcgcgagtcagggctgcggagggagacctgggcgcgggcgctgccgggcgctgtcctcggtgctgctcagctcagcgttcctccagagttctctccctacaccccgcacccagttctcagtatttatcccgacggccccaagccgggccacgcctcctccagcctcccattcctcactccccgcctcttgctctcaccagcct

SEQ ID NO: 233797 - DNA, 290 bp, Homo sapiens
  chr8:91657128-91657418
  hyper
ttatctaacaaactctctttcgaggctccgcgttaggtatgttttatgtgtaggacagacttcccaggctgcgatggaaagtaatcgtaactcctgccgtcaatgtcacttctctgctggtatttatctgatagagcgccctcctagggccgccacaagaccgctcaaaaacagacttggagagggataggccagcgggaccccacttaccgaaaacactgcattctgaagcccaaaaggtatgggtgtcagtctggccagcgccaccactttcaggccgcttcctccct

SEQ ID NO: 233798 - DNA, 89 bp, Homo sapiens
  chr8:91657598-91657687
  hyper
tgtagccccagccgcaggggaaagagaccacgatgaagcccacgacgaagagcaggacccccagcagcgagtcaaggctctccacccac

SEQ ID NO: 233799 - DNA, 627 bp, Homo sapiens
  chr8:91803655-91804282
  hyper
gcgtccttaccttgcgctttggctgctcaggacaaacgccctgccattcgtcccttctctctgtccggacgccctcctccatccctgcacttggggccgtcgtggggctggtaggggtccccaggctatctccagccgtggccgatggccgtgccgggggcagagcccgctcccctccgcgcgttgctacgtgcggggatgacatggatccagacgccgtcaactacgggaaggaggaggcgagagttggagcgcgtgggagcgcagaggccggaggagggagggggggacaccgagcgcggagagcgcggagagcgcggagggaggcgcgcgcgggagcgaacaccctcccggatccagagcccggcggcggcgaagcagcagctgcggccgcgcccttgccagagccggtgcgtccgcctagccccgctccgcctgaggccgtcagggctcccgaggatggaagattcccaggagacatcgccgtcctccaacaactcctcggaggagctcagctctgctctgcacctgtccaagggcatgtcgatcttcctcgacgtaagtacagatggtgggagctgggcggttgcttcccagcacctttcttttccccgaaaggaaggggtt

SEQ ID NO: 233800 - DNA, 247 bp, Homo sapiens
  chr8:91996905-91997152
  hyper
tgtaactgtcctttccgtagctttgactaaaacaccagcaatgaaaaccttgtgccaccgggtggagggggcaaatcgtcttgaaagcctcccaccgcctggcaccaggtgctggggcagagccaaggggagctgtgtacttagctccttttttggcgatggctttggtctcggccacttgcccctccgtcgggctcccctggccccctacactttctttcccctcatccgacgctctcgctcccat

SEQ ID NO: 233801 - DNA, 238 bp, Homo sapiens
  chr8:92082264-92082502
  hyper
tctgcgcgcctcacgtcagggccaagagcctagcgcgtagctttatggctgactcggctctggcgctctagccaattccgaggctgcaaactccgcttctccgctcgcagtctggttcctcccctgccgccccgcccatcacggcagggtcacggtagcgcgcacgcgcagcaccccatttaagtttctcgtctttgcagtggctttgcttagatccggtgccgccttgaaggcgggg

SEQ ID NO: 233802 - DNA, 2072 bp, Homo sapiens
  chr8:93113864-93115936
  hyper
ggggagagggggagggaaggcggctatttttagtaacagttgtggctcacatcctacttcccggaatcatagtactcaaacttttccaagggttgaccgcccttacaaaaaataaaaaatagcacgtttcaaaaaatggatctgagcgccttgtgctgacctagccgtatttgctcaaagcaccccagtcagcgccaggtcccccccgggaaagaggtctgggtgcgccaaccaacccggtcctttcaggttcgcaaagagggcggtgagcggcgggccctggagcgcgtctccactggcccgggggcttcaccagaggggtttctggaaaacgaaaggaattatccggacgtggctccaagtctggaccccttcgggcgggagctacagggcacaaggttgtgctccccactcagaagaagcgggcaccgagtcggggccgcgacgggaacacccaggagggccggggcggctgagtccagagcgcgcagaggtcgggcggggacgactctccccatcggcccctgactgcgaagcccgggaccagcctcgggcgggagccgccgtccgcccgctcacccaggagcttcccagtccagcaccccaaacggccaggagtaacaaggaaagttcgcaggcaggcgcagagcgcctgggtacctctaagcaaacccccaccctagttgcagccgggtcccaaagttaagatcccgcctctttactccttagggctaagttttccaccatcaaaacaagtctttgcttccagtttacagaaaaagaaaagaaaaaaaaaaaaaagaaaggaaaagaaaaaaacccacgatgcgggcatagggccacctgccaaatgcactgtgggcacctcgatcggttgttttgtcgggggagaaacccactcgtcatcttcctgctcgcataccgtgactatggagagggaagaaaaattatttttaaaagacactgtggggaatataatagtaaaaactgcatcctcggctgacccgcgaagttcagtgtcatcgcagaccggagtcacccgcgatgttcctctttgccctggtgcgtagtcctaccctaattgagcgacaagtacagcctggagcctcgcggtcgaataatccaaacgaagatgacggtcatcggaacagtaattaataacagtcaggggcccgaccccgccgcccgcccgccggccaagccctaccgcggacacttacactgcacagggccggagagtcccaccatccgccacaggctccgagctgcaaataaaacttcccgtcgtctcggccggcccgcggggcgacggggcgaggacgcggcgcggcttccctcgcgaggccagagtgtccgcggccactcgcccacgcgcgctcgccacgagaccgcggagtcgcgccgcggagcgactacggccgcccggcgctgcgcagagagagctgccgtgcaaaaagcccggggtcggggacgccagccaaacgcaacctccacgcagagcccaagacttgcggagctctgctcccctcctcccgcctccctccctccctccgcttttctgttgttgctgctgtggcagacaaatgtgatgtggggcgcagggaattgccactgtcacaggcggcgtctgcgtctccctcgcccgccctcgctcactctcgaggaaggcgacgcatttatctgcagggcggccgggcgtccgccggggagcaggagcgccgcgcgctgtgcgccgagagcgcccgcatcaggccggctccggcgcacgctcgcgccaggggcgccgcggccggtcgggagggaggcggctgcgcggccgctaccaggtgcaggggggaggacccgcggcggggcgtgggggaggtggaggtgggagacatctgtgttgtgcgggggtcacggaggtcaagtatatgttaacaatgggcaggcccggcacgctagggcgcgcgggctggcgggcggcctccctcccggcctcgccctctcccatgcaggctggacgtggggttggctccctaatgatgccttcccgggccgccagctctcaggcggcccgagtgccctgcagt

SEQ ID NO: 233803 - DNA, 876 bp, Homo sapiens
  chr8:93977674-93978550
  hyper
gtatgcaaatactcgttcattaataagaggaagcaggaaaaagagtgaagaggagtaccatgggaaagggggccccaaaagggaacggcagaacccagagagctgcactgacaagtaagcgaccgcgagtaatcggtcagcacaaaggagccaatcccgagccgcgtggaagaccttgggaggtgggcgggactaacgtgtccagggcccagcggctggcgccagacacgctggcagggcgggaaccgcgcgttccttagcaaccgcaatggccacgcccaccgaacccagcaccctccatcccccatcccgcagccagcgccctactcaacgggaacgggtccttcagtgatcaccgtacctactgggtttcccggactccgggtttctcttgcagagcctccctccgcccagccccaccaagtgccgctcccagggacggaacgatcgtctcccaaacgctttagggctcgctaaagaggtgcgcccgctttcattcccggaccccgagcttcccgggcagggtctccccaatcccctcgcactcgccggacacacacctcagctctgccaaggcaagggccgacaaacttcgtgtcctgtgggaaatgttgctgtccacggttctgtcactcaggggcaggggcgggacaagccagccgcacacccctactcccaaagggtgaggcggaaaagaggcgaggctctgcccccaggggcgggaccaggcctcagcctgctctcggattggtcggcctttctcccgtctgtacgccggtccaggacgcaaaggcgctggccctgaggcctttccctcattttgatgccactccggagttctaatacctgtctcacgaggtgactgtagaaattaaa

SEQ ID NO: 233804 - DNA, 743 bp, Homo sapiens
  chr8:94712353-94713096
  hyper
ttcagcagtgaagcggacgcgtctggtacgagactacaagtcgcacaggcggagagggggcccccgggcctctggtttcacgtctccctcctggtccccggcggaccggcgtcttttctcccctgctcggagtagcctagcagcgctggaggctggctgtctggtaagcgcggctgttagagaggatggaggcgccgtagccccgcggtgcttctcacagccttcgccggcagggacgcgcgggacaaccgcgcaggcggctctgcaggggtgggcgcgccatcacccctctcggtccctgcctgcttggcgctttccgagccccagccgcgctcaggctgcctcgggcattgaccgcgggggcgcgcgccccgtttccatagaaacgcccggcctgccgcggcggcgcgaggggcgggctttcaggctcccggcggctgcttgcgccccagcgcgcgcccaggcgccttggaatccccgtccttgggcccccgcaaggtccccggccgtgcgcgaggcagcatgatgaggcgcaccctggaaaaccggtaacagcccgagcccagctgcccagggccgcccacactggagggctggggtgagggaagtggaagcctctgtccatggggcctctgcgccgaattccgaccctgagtgggaggctgcacggtccccgctgtgacctggggcctaattccttgggctgcagccaccgccggcggcgaagaggagcccggggcccg

SEQ ID NO: 233805 - DNA, 180 bp, Homo sapiens
  chr8:94766989-94767169
  hyper
cctgccaacttcgcgcagggttggtaacctagcaaccaagcaacacgagcagtgacttccggtacccggacttgggttgtccaatcagctcagcgaagccgccgcagaggctgatggggggctggaggctgtgaggcttccagcgtcggtaccatggcgacgcgcggtggggctggggtg

SEQ ID NO: 233806 - DNA, 295 bp, Homo sapiens
  chr8:95003743-95004038
  hyper
tgatttcagcagggactgggcgtctgcacagagctcccggctccccgcggcgggggcaggagtcaacgccgtcagttacatgctcgtcagatgtgcacgggcgccacacacgatcctgctaacgtggtcggagaaatatgacctcagcgcaggtgaagcgtgggcagctgacgccacggtgatgtgtgcagatccggtggggactctgacgcagccccagggcaaaaccaacctgctttctaccttcaatccagcaggatgcccgtcatggagaaaaaggcggggcctgcttggg

SEQ ID NO: 233807 - DNA, 484 bp, Homo sapiens
  chr8:95246499-95246983
  hyper
acagctcccccatccgccctctggcgcttcagagtctggaggaatcccgagctgcgcctccctctccctgcatccctggcagagaatttcccctcccagcgcgggggagcccatccctgaggactcgggcaggtcagatgagaattggtagaaagtgaagcgccttttcctcgcgctgagggcaaagccagtgtgcagccgcctgtgggtgaggagcttttatgacaatgaatcccgtgttttatgggagggcagtgtggagacagcgcgggccgagtccctgggttccggggcaagactgtgggcgtctcccgcggtgactcagagatgctgccctgcctcacaccatctcgcaccatctctgtggaggccgtgaccttcattcactgccgtctgtcactggggggtgacctcgcagttgtcagagccccctctcctggggctcaggactgggatcacccccgcaacccggcgcttccagctt

SEQ ID NO: 233808 - DNA, 778 bp, Homo sapiens
  chr8:95651257-95652035
  hyper
cgcacggggttccgcgtccctgtgaggcggcacctcctgggcccagcagagctgagcacctgggaaccgcgcaccgagagccccacggggaggtggttagggggaaccggctcctccaggcggcctcgcccactgcaatgcaatctgggtggtttttccaggtccctccctgcctcgttccgcgcccagtccctgcccccgcgacgcccgagggcctggacgggtagctcggagttaccggggctggggaggagcgaggctactgcagtaagccagccggaacccatttatgactccgcactctgaagttcaggacagggaagcacccacctctggaactcaagcagtggacgagggaggtcccgagcgccgtcgcagcgctgcgagtgtgggaccctggccttcgcccgctctcaggggacgagagctgccacctgtatcacgggaggccccgcctccgcctgcaccttctcctaccaggaaacgagacggcgcgggcctcgggctcctctcccccctcccgggagctgaacccccactgggaaagccaggtctccagcttcccttgacacgcgtcttgaaaggttaccggatttgtacccggagtgggttctgcagggataggtgcatggttgcccgtttcacatcatgaatatgaacggggctggacacctagagccgaattattaatacttcagacagaattctgttcccaagaacaaatcgctttgagatataaaacccgagaaaacttcacctctggcgcttttctctctaa

SEQ ID NO: 233809 - DNA, 1154 bp, Homo sapiens
  chr8:95652420-95653574
  hyper
cctgagtttccttgcggggtcccccagctgctttgcgcgcgataactgcgtcctggggagtgactaggtggttgggcgtccagcccctggcgtccggctctgccgcgcgcggggttcctctccggaaggtgggcagcgcggcgggtttgggacgagcgtgcacccgggctccggcccggagaagggggggctcgcaggatttctcctgctgtttgcactgaaagttgtgttggctcaggagctgcttttccggggatctgcagttgcccccgccacctcctggctgcggttggcaggtccctccctcagcagttcgtcctccgcctgcgccgcgccctgggcagctccgcgccccgggcctcacctctggcctcctttcgcctccctgcacctggccttttcgcttgaccgttcagaaccttcggcttcgttccctgcagccggtattctccgagcccccctgcacctctcagttacctccagtgggaacccctccccccagcgactccgagccctttacctctctgagccctttccccgtctggcctcgtctaccctctgggtgtcaaccgcctcttccctgcccctcacgtctccccctcctcctcccctgccctcgcctctccattcatccagccattgtctcccgccccttcctccccctcccgaagcggcctcctcccccaccgctgccacgtcgtggtttgaaggagccaatgggccggcgccgccaggtgtctcttacctgcaccacgtgggggagggggaaggggcgggcaggtaaagccacatcccaaaacagaaaagctttcagccattgcgtgcctcccggggggggcagccttgctccaggctttttgcatagacgcccgggcaactgaatacaaaaagggcaggcctcctgcgccctccttcccaccccccttcctgccctgggcgtggagcaccgaccaggtgtgggcttgggtggttggttaccgccttttgcactagcagtagcaaggaaggggggtgggcgctctttctttttctcttagaagagggtttagcacaggttttttcgttctcacttccacaccaccttaccgcctcccgaccccccctctccccctccccacctatcgtcatgacggcctctccggattacttggtgg

SEQ ID NO: 233810 - DNA, 88 bp, Homo sapiens
  chr8:95653853-95653941
  hyper
ttggagccatttcagtcctccgcaacttagctcaggtggagaggccggcgctaccgagccgggttctttgcccgtcgggggacgctcc

SEQ ID NO: 233811 - DNA, 52 bp, Homo sapiens
  chr8:95835299-95835351
  hyper
tgtctcattttctcgctggagaactgtcagggaacacggaaaacccacccgc

SEQ ID NO: 233812 - DNA, 454 bp, Homo sapiens
  chr8:96146528-96146982
  hyper
gccgccgccgcggggggacgggggccgccgggtagggtccggtccacgggtctgcggggcgggggccggcggacgcgggaaggagccccgaggccgggcgagaagttgtggggcctgaggacgggggtcctggacacggccgggggcgtctcagggtcgcgacaaatttctggccgaaaagtttgcagggtctgcgtgtcggggaccttatgacctgaactacatatttgtatgtcacttgggagacgaaaatggccccgcagaacttgctctgatagaagcgatggtttatttatttggagccttttcaagttttatgatcctttgacgaatttatttttctttttaaaaatgtgattgaaggccgagagcgcgctgccggtgttgcttgaatagccttgtgtgctctccgtacattccagcaataacttgagtgtgcggtggaagtgggtat

SEQ ID NO: 233813 - DNA, 136 bp, Homo sapiens
  chr8:96147206-96147342
  hyper
gtgaatgcctaccgcgttttgagcatttactttttttaaatactctggcagctcgtggggtcttcacgttaattcagtattaacgaaggcttcattataatctctttgggtcccgaccacacggggaatgaatggt

SEQ ID NO: 233814 - DNA, 1248 bp, Homo sapiens
  chr8:97156907-97158155
  hyper
gggcggggtggagccggggtccatggagttcatcagcgtctggatgatggcgtggttggtgggctccaggtgcgagcgcagcgggaagtcgcatacaccctcgcagtgataggcctcgtactccaggggcgcgataatccagtcgtcccagcccagctccttgaagttcacgtgcaggggcttcttgctgcagcgtagcctggacttcttgccgtgccgcttgccatggcgactggcgaaggccgtgcgccgccgccggcggccgggcgagggcagccaaggcctggcatccggggcgcccgacggcggcggccacgacccctcggcgcccgcgcccgggcccgcagcctcggccgagcccagctgctcgcgcatctctgcgaacaggttcttgcgctgggatctggtgaataccaccagcagggcccgctcctggggaggccgcaccctccggccgaagcccagactccgcaggtccgggggcggcggttgctggggtccccgcgcgcgcgcctcggcctccccggcgtccagctcgccccatgcggcccgcagctccaagcacagctgcttccagggctggtggcgcaggccctgccacacgtcgaagacttcccagccggccggcggcgccccctgcgggtccagggtccgcgcgtccagcagtaggggcgaaaggcaagggaagagctgcacgtggagcggcccggctggtggcccccagggcgctgagggcgcctggcgaaagagccgcagctccgcgcccaccagctcttctttgtctgagagcatggacacatcaaacaaatacttctgtctccggagaggagtgtgcgagagatcgtctgcgagataaaaaataattacagtcagtttcacttaagggggagatcagcccggtgctcttcggccgccccgggaggaaaagggcggggagtgggggcaggtcggccgggcagtccagcttgcccggcccagggcctgaccaccccggctccccatctggctggtgcatggcgcggggaagggggcgcgccaggacgggccccctccttcgcgtcagctccggactctcagggcggaagtcggtggctgctggcgaggcggcggcggcggcctaccgggttttccccccaaaaggcttcgtaaccactaatgtgccctttgtggtctcaagcctgggccgcgtttcccctagacctcctctgggctgggctggctcgttctcgttgacgtctcaaatgtcac

SEQ ID NO: 233815 - DNA, 276 bp, Homo sapiens
  chr8:97165551-97165827
  hyper
gcttctcttttcaacggggtcccattctgggctcccgaccacagcggctcaaatcttaatttgacatcactgcagatgaaacccaaaccgaagctctcgtactgttcccgcgctgagccctccctccccatctcactgaggcgcgcacgcggcctgcccttcccctggggccgggacctggggggttggctaggggcggccttccctgcactgtcgaccggtaagtcacccgggagcccaggggagcaaccaggtcctccacgaaggctaggggag

SEQ ID NO: 233816 - DNA, 128 bp, Homo sapiens
  chr8:97166408-97166536
  hyper
ctgggctagaggcccgcccctggcctctttcacgcccactctcgggtccctaaaccatgccccgcccccaggcgccggggccactagcgccgccgcgcgcgcttccctaggaacgttgtccagcgccg

SEQ ID NO: 233817 - DNA, 645 bp, Homo sapiens
  chr8:97166797-97167442
  hyper
ggcattccacacctcgagggctcggctcgattcagtcccctggtccaaagagtgtcgtttgacccgggttattcaatacccgaggggttatcgaactaatggctttccttttacttaaaagcccccagggattactgttgatttgctctaagacctttggtgcacgcagtagtcctagcaggaaacaaaagttctcgttctgccctgtttctatcataccatcttcctccccacagtctccacctcattcccttcttccttctccgccaccgccccagaaagacgtcaccactttcgaggaggtgtgtaagaacctcaaggactccagctaagaaaaacatgtggtgttagggcctccgatgcagtgccctgcgttccccgcgggtccaggtgacacgcatcctctccggtcggaaagaggagctttcaagtcctgattcaattggggggtggggagggtggagaagagggattcgccaggcctgtcgtgatctgtggtctgagtgacttttttcttttaatgcgcagaaaccacaaggatgtttgagcacgtttttagatcccctcccccatcggcaactccaccgcgcgaactcccagaggcccgagagcctcccgcgttgaggaaaacgctatgtccgtctc

SEQ ID NO: 233818 - DNA, 455 bp, Homo sapiens
  chr8:97167786-97168241
  hyper
acaaaccccgtgcccgcgctcatgcaggcgcaccctcatacgcacacacttgaacgcttagcaagtcttttccaaggctgttccctctttccggggaaataaagcctagattggaaccttctgcccagcttcctcatttggccgtctggtctgcattagtgtttttataagggactcaaacaaatcgaatacaaggtcaccaaataattaacagttgtgaattccctccgtccccattaaaatacttccctgcttatatttcattttcggtttgccaacgacaacagggtaccggcaaaagcactgctgagttgattacaccactctgcggctcaggtccacccagaaacccgctgttttgcataacatgaggtaccagatgaacttcaatcgcgaggggactatgcaactctctgaatgccctccccgcagccgggctattcccagaatggtcc

SEQ ID NO: 233819 - DNA, 1739 bp, Homo sapiens
  chr8:97169607-97171346
  hyper
actttggggtttccggggtaaggaaggctttttacagatactgtacaggagcaagtcgcccatgcctcctggactgacttcggggctcctttccttttcttcgctcctccccttgggggacccccggctccaccgagccaggccagccccactcgacggcgatttaaacatcccttaggcaaggcgccaagttagcgctgctggcccagctctaggcgggccgctgctctttcctcctcgccaggccgtccacgcgttgggggaggggaccctaggggggttggcgcggttaagagccccacgtgagaggggcggaagtccttgccaggagccggggatgcgcggctggcgggtcccttccatcacgggagacgagacaccgtttgatgtgttatgacatgaaccctcaattagatcgctgagttgaaacactccaatcaggggcccgatgctaagcaagccccggaaggtccagcctgaggtcaccgccggtgacacatcaaatcaaaatcagtgagagggaaagtgaggctttccctttatcaagctggggctgcagccagcaacgcaccccctcctctgcgcacccctcccgcccgtggctccgcactccttcacccccgcgcggcgtgcgacaagccgcaccgccttcccagtcaacgaactgcctttcttcgcattttctgagaacccggagacgcggaggagacagcgcctttgaagatgctgtccgggtggtcatgcagcgtctcctcccgctgtggaccgctcgcatccccagccctccaccgcattccggggttgtagcggtacttgtggatctcggtcctgctagtctggaggccttggctcgggaacagaggcctccccagactgggtgcacatgcaatccctcctctatctccaggatcgggggcatacagcgcagtggcggggatgggggtggggaggctacagggcaaaccagggtaaagtgatttcgcgtctacgccggattggggcccccaagacttttccccaacccttgtctgaatgccacaggcttccggagacacctccgaacagcccgcagggtcttttggtcctgtgccaaattcacagggcgcagcgaaccagttatggtgcccacttgggggaggggcagagattcttgccacttcattcccgggcaaagaaaatccgcgcccaaccgccggccagcctaggcctctgggacttcttctcttgaggaagggcctcttgagcagtcttctctgagcttccttagcctccttccgcaattgtagtagagaaagtgcacgattaacagaggactttgagggacagaaacaactgtagcaaggcgtgcgtcgtggggagggttggcgagctgcacgggcagcacggaggccagggactcagttgcactactacgaagaagccacatgtctttgcaaaggtgactttagtagccctaaaatcatcataaaatacctggcgttaatttgccctctggacctttcagcagctcatgaacctcgctgacctcgggctgcagcggcgagaccctcgagcaaggaacgcgactatgagtgagaggcggggactggagccggggaagagctcggggctgggggcgggggggccgttagcctgctctaaaaagcttaagagatgtgcgagcacccagggtagcagtggctgaagcagcttccgaatcccgaaccccagcgctgcaaggtttccgggcaaccccactt

SEQ ID NO: 233820 - DNA, 1054 bp, Homo sapiens
  chr8:97171599-97172653
  hyper
acgctgcagatcaacgccggtggcaagaaggggccgcaagggtttccgcagacacccacacatgcaggcgttcccacagagggtaccagggatttcccagacccccaccagccctcaggaatagcgtagagagaggaacgtcgcctggctgagaaaggtggatgggcatacccatgtacctttgtgtattaagtacccacaacctccgaacttagccgtccctgtcccggcccgcccaactgctgccgccgcatctgcagaaaccactcgtgttgaggcctcggagcagccgggagcaccacgctggagcaaaaaagccggagggcgcagggctccagcccggctgaccatcccacccagcgcagggaccaacggaaaacccgcgcggcgccaggaccagggggctgcccgacgccgctcgcggactagttcctcagactgtgggactccctagtgccggctttgcccagggctttccaaggctgtctcatgccctagatctgccccagcagctcaggccttggactgcgaacccagtatcccgagacaccgattccatcagtccccatcccgacccctctccagccgggttcatccgcctgctgcctcccgtcctccacgtttcccccaccagccaccaacaagcggcaaccacgctgccttctgcaaaagaggaagaaggaaagaagggagagagaaagaaagggggggaaaggaagggaggtttagagactggaatagaatccgcagccacattcagaaacttactcgagcttgagaaaaacaatttaagaaaagtaaaaaggaagtgtccagagcaggaagggaattcacaaatgtagcctccagcgggaacagctccctggctgccgagctccagcgggaggggagtcgagcgttttctttgccacttacctagtcccctgtctacaaagctggtgatcgtattagccgacttggaagactggaaaaagctggcattgatgcccagcttctcagcgatggagtaagtcctgtagattgacagcatgtactcgtggggcaccacgcgcgg

SEQ ID NO: 233821 - DNA, 53 bp, Homo sapiens
  chr8:97173073-97173126
  hyper
acgccccctcccgcccctcgccgggaggggaggaatggggagggagggcagag

SEQ ID NO: 233822 - DNA, 354 bp, Homo sapiens
  chr8:97173546-97173900
  hyper
gccccaaccgccaggcctgccgtttgcgcccctcaggggccagcccggagccagagaagcctcgccctgggccaggcgcagggcccagctcggaacagccccattttctcggttgggtatcgctctccacaaagacaggcgtctattcccgaccctcgaggtcaggcaaaggccacgagtctttagagtttggatcgatgctaaaagctgctgcgctcccctgcaggccccagcctctcctctcgcagtccccaacctcttctgacgcagactttagctgctccacttcttcgtctgctcccgggatcctctccctctcgcggcctgccccccgcctccactgcatccccattt

SEQ ID NO: 233823 - DNA, 69 bp, Homo sapiens
  chr8:97174101-97174170
  hyper
cttcagcccagcctcgccccatcacgagtttcctttatctgtccccagattccccgtgcctgtcttccc

SEQ ID NO: 233824 - DNA, 2250 bp, Homo sapiens
  chr8:97505579-97507829
  hyper
gaaaagctacatacgtctctcgtttcttcactaattgttctctagaaaagggaaagtgaagaagggaaagagaaaagacaacggggaagaaaagagcatagaggagagaggaaaagtggggagagaaaggaagaaaaggactgagaaaacgcaggagccctggcttgccggtgagcagagccggcgcagccacagcgcggagccgcggcgcccactggtcctcggagctgccaatcggcgtgtaatcctgtaggaatttctcccgggtttatctgggagtcacactgccgcctcctctccccagtcgcccaggggagcccggagaagcaggctcaggagggagggagccagaggaaaagaagaggaggagaaggaggaggacccggggagggaggcgcggcgcgggaggaggaggggcgcagccgcggagccagtggccccgcttggacgcgctgctctccagatacccccggagctccagccgcgcggatcgcgcgctcccgccgctctgcccctaaacttctgccgtagctccctttcaagccagcgaatttattccttaaaaccagaaactgaacctcggcacgggaaaggagtccgcggaggagcaaaaccacagcagagcaagaagagcttcagagagcagccttcccggagcaccaactccgtgtcgggagtgcagaaaccaacaagtgagagggcgccgcgttcccggggcgcagctgcgggcggcgggagcaggcgcaggaggaggaagcgagcgcccccgagccccgagcccgagtccccgagcctgagccgcaatcgctgcggtactctgctccggattcgtgtgcgcgggctgcgccgagcgctgggcaggaggcttcgttttgccctggttgcaagcagcggctgggagcagccggtccctggggaatatgcggcgcgcgtggatcctgctcaccttgggcttggtggcctgcgtgtcggcggagtcggtgagtgggccaggcggaggatgcgcgcgccgtttagggtgtttgaagctacgagaggagcccgcagggaataggggagcgccacctggggaacccccagtccccaagtatacaccggagatccgctgggacaaatgcgctcgtccggtcaccctttccccctcttcccttcctcagaaaagcgctgctcgctggcgttaccccgcggtccgcgggaatgggggcaccgagaattgcggtttggtctagccgcagaggcccctgaagtcactcccaacttcttcgccctcggcgggtcttgctgcgtggtctgggaaggacggaggggaaagggtggcaggaggggggagcctgggtcgggcccgcgagggaacggctccactccgcgcgctcctcgagaccagggatgacctggaaacttcggggtcccttcctccgcacaccatcccccccgcgccagctttcctgtttgactgcatgcaagttctggggagatgggggccagatttaagagacccgcgagtgtccagagagaaaagtttgcaaaagttcttttgtttgatgctccctgcggctagggcgaggtaaccgacactacgtggaatcgcagtaggcgatccctcaaggggatactgggggaggcacggaacgcgtccgaaaatgctgggacgccggccactggattcccagtcctgcggcgaccccctcctcgttgaggggtggaggttgcaccgcggggcgtcagggacgggaggacattttcataggagttacacgggagtgccgcaagcagggcgaggcggggtacgtgtgacacggcgctcggcttcgggtcgcctggccgctgggggacagaggcttccctcccgccacgctcgccctctctggccctggcggggcgcttctggggccgggaggagtctcgtctccggcggagcgcctgccggcacccagcttccctcccccgccctggcggtgggaacttgatttctccttttggtcgcgcttcgggggctggagcttgtttccccacgtcgcccaatgagcgccctctaaagggaactgcctccttggcctcctctcgtccgcagctgcctccacctgggcgccaggagctctgtcgggccaggtggaagcttgagcaccccagatttcgtctgcagcctcagtgccctctggggtctcagggagtgcggctgtttctggcccttctggttccccacgtcctctccctttgccatttaataacgtgtcaatttctaattaattg

SEQ ID NO: 233825 - DNA, 33 bp, Homo sapiens
  chr8:97657330-97657363
  hyper
gctgagaagccttccggccgatctgtggccctg

SEQ ID NO: 233826 - DNA, 171 bp, Homo sapiens
  chr8:97657940-97658111
  hyper
acggtttcacttcccctcagctccagggctcagccccaagccgcccccttcatcccccatctgcaaacaatcctggtccccctgagcctccaatatgccttatgcagttcttttggggttcctttcgcattttaccgtgtactttcgcttttgatgcgtctagtttctgct

SEQ ID NO: 233827 - DNA, 452 bp, Homo sapiens
  chr8:98289902-98290354
  hyper
gcgccagcctgcacctgtgccgcctgggtgtcttccccgagactctggtactgtgaagggtccgggtcgcgcggggcgtcgtccggagcagggcggactcgggctttggcgcggcctttgccccggtttttggcgcgggaggactttcgaccccgacttcggccgctcatggtggcggcggaggcagcttcaaagacacgctgtgaccctgcggctcctgacgccagctctcggtcgggaccgagcgggtctctccacggcaaccgccgacgtcacgaacgtacaactgtaccgtcgcgagaggacgtgatgcgcccggtgattggcgccgccgctgcggctgcgcaggagacgacccccgcgggcgctcccacccccatctcgcgcggactcgctttaggtctcggcgagtttctctgatatgcgctcgcgggggtgctgccatttcatct

SEQ ID NO: 233828 - DNA, 191 bp, Homo sapiens
  chr8:98657023-98657214
  hyper
ccgcggcccccgacgacctggccttgctgaagaatctccggagcgaggaacagaagaagaagaaccggaagaaactgtccgagaagcccaaagtgagtatgggatgagcggcagtagagaacgggcgaagggcgggcgtggagaccctcgagcttgggggaggccgcgccccagccgggaaggaaaagagt

SEQ ID NO: 233829 - DNA, 407 bp, Homo sapiens
  chr8:98657501-98657908
  hyper
ataaagactgcgctcggaagacagatgtctatctcaagtcacattgagacagtaggcagtggaagaagtgcggtgacctagaaattctggggcttacacaggattaaaggtgtccaggtctagacgcgcttccattttagttgggactgttaaagggaaatggttgcccattcttgttctggcaaatgtggccaacagaggccggaacgggagcaaggcaagagggggtcggttacctaatacgctttgaggtgtatggtcctgtgagaaagagctaaggcgagttcaacgaacgagtctgttgcacactctgtggcgtggtagatttgtgaaatagagtaaagggagatgacagggcagaatggtgaaagccgagagaggaattcaggcaccgatttactgggcca

SEQ ID NO: 233830 - DNA, 224 bp, Homo sapiens
  chr8:98787240-98787464
  hyper
aaaaaaaagctaccggaagcacagcgaggatgtccttgacacacatcctattttctgggaaaagattactaccacagtaattgagctgtgaagcggagacaaattgctctcggtggtggttcaaagtactgcaattgactggaatagcaccgcgcagttttccttcctctcgtgcaagataagagtgataggagctgtatcgattacctgcaagatagaagtag

SEQ ID NO: 233831 - DNA, 224 bp, Homo sapiens
  chr8:98787764-98787988
  hyper
aaaagaagtagaagggaagaaaatcgcaaggaactagactaaaagaatctcgacccttgaatggagttacacgaacggccagatgaaagaaggaaggcccggacctccactcagggccgactaggggactggcggagggtgcacgctgatggatttactcaccgggtgcttggagctccagcagctggctggagcccgcgatgacgtcacggactcgggtcaca

SEQ ID NO: 233832 - DNA, 573 bp, Homo sapiens
  chr8:98788321-98788894
  hyper
ggcgtctggtatctggtgagcgcggcgcgcccggcccgggaccctgcgttgcttccgcgcccctagctgggcttctggcccggcctcgcggtggggtgaggcgtgcgctcatccgcctaaagttgtattattagaaacttaattctccgggtgccgcgtccgcacttcccccggctgggccagcgccgactgggggaggccaggagtttggggcgatgggggaggccaggggcgcggggcggagggccgcactcgacccttggcgcccaggtggtgtgggtcgccgatctccagcctccgcgcagccccgcggcctcgcgtagggcgcaccggggcagacaaactgagcttatctgccgagcacgtgtttcctttcttcttaaagcccgtgggctttgtgtttcgacggctgcggacggagcggtcgcggaggtgacggcgcatattttgcagctctgtggttagggttgcggatttgtcaatgctcgttctccctggccgcgtctccgctagggtggcctgcgctttcacgccgtcgcacgttcggatcccgagttgaagtggttgggagtt

SEQ ID NO: 233833 - DNA, 35 bp, Homo sapiens
  chr8:98881200-98881235
  hyper
tccccatccccaaagaggacacccctccttccgcc

SEQ ID NO: 233834 - DNA, 681 bp, Homo sapiens
  chr8:99076662-99077343
  hyper
ctcccgctctcttccgctttgcgctcccaggctccttccacctcctgccagctcccttcctcctccaggtgcgcaccccctaccattagccccgctgcgcgcttgcgctctacgcccaagggagccgggctgcagagctggagaaacttccgcggctacgggtgcagttgccttcggttcccggttccgggccgacacccgcgcagggctgagacaggtgtctgcgctccccgcaatgggctgctccagcagcgccctcaacaaggccggcgacagcagcaggttccccagcggtgagcagggtaccggcgccgcccgcgcccgggctggggactcgggtgggctaactccccaggaggtccaaagggtgtgtcccgtggccaccccgcctggcaggagccgggccttgtcccggaggatgcgagcagaacccgggacaaagcgcgatttccttccaaatctggagcggcgctgctgtgaccgcgggtgcggcggccctggtgcgctccgcggcgctcgctgcgagacgcgcggggcccgaggccgggcgctggattcaccctgtccgctgatgggatctcggggagttggtgttgaggccctaaggcggttagcctcggcattgccttaaacacaggagaaatgtcctatcaaggccttctaccaaggctgggggcggtg

SEQ ID NO: 233835 - DNA, 119 bp, Homo sapiens
  chr8:99129466-99129585
  hyper
actgtagtttcggcgacgctccaggccacgtggaggaagcgcccggtctggcgcatgcgctctccagcgcgctctccaggagctttggctcggtgggtactgtcgcggaggcttgtcat

SEQ ID NO: 233836 - DNA, 175 bp, Homo sapiens
  chr8:99182336-99182511
  hyper
cccagaaggggtgacaatggcgggagagcggggctccccggtgtagtccgggaaggtgcagttcccaggtgtgaccgcggggtggcgcggtgcgccggcgccggcgcttgcagacttcccgggagagaaacctccgtgcagccctggggctgacgtggatgccaccctggggtgg

SEQ ID NO: 233837 - DNA, 112 bp, Homo sapiens
  chr8:99440157-99440269
  hyper
gcttccaggtgtagcgcccccgcgcggcgcgggcggccggcgcctccagcatgaccggccagagcctgtgggacgtgtcggaggctaacgtcgaggacggggagatccgcat

SEQ ID NO: 233838 - DNA, 93 bp, Homo sapiens
  chr8:99951393-99951486
  hyper
cagatgcgtttatgcgtgcattctctcgagtgaaggaagaaggaagaggtagggacggaggaggagagagagcacgcgcgggaaagataaatc

SEQ ID NO: 233839 - DNA, 1412 bp, Homo sapiens
  chr8:99951798-99953210
  hyper
aacaagtctggagacgggagggtagcgctgctcagctccagccaactcactgccgcgtaggaacggaggtcatcggaaatcaagatttccgtttgaattttcccaaagtttaagcgttggcaagtgcgttgaaaaacacacacaatatgaaagcctaataaaaatataggtttgcagaccgtgccctagtcttttccgaggatgttcttttctgtcatccatcgtctacccacgttgagcacgacagccgggccagtcccgccctgggcggttggggccttcccagaggggcccggtgcggagagcccccctctccccggatgtgtctggggcctgtccttcactgcgatgtcatcggtaaacctggtcttccttgtcacggacactgaagcgcttggttcgaaaagcaccatgaattcgaagcagccttggacgcgggatcatgggcgttagcctggctctctccgacgaggcaaactgcaggagatccccttccctggagtcaccggaaggcgaaagcacgctctgtgcccgcgcgccgccccgggagcccgctcctaccccctcggcgtgcggcgcgggcctggagaccgcggagcccgagccgtatccagcttgtgcaggagccggtgcgcccttccgcccgctcctcccccgggaccatcctcacgctccagggtcgcggaggcatcttgcgactagcgaggggctgacggtggcctgggtggccttgcgccggctctgggctccgccgctgcggcagccgagggcctcagctgggaaatccaaacccgggctggacctgggctcaaggaggtttctgtccccaggctagaccaccacggccacggccacgcaacttgccctgagaccccgtgctcggccttcccactgagctccccttccctgtgactcagtgcctcgcaggctggtggccggaagggtgcctgcggctggctggcccggcccgattccgggtggcggggttcctgcagtgaggaacgaccctcagctcccgcagacgcgggaaggcccccgcgccatccgtgggagtggggcagcctgtctgcacgcggtcccctgggaaacccctctgcatctcccgcccggacaaggtccccggccttggaatctgcgccgccccgcacgcgaccgcctgcgaactccctgcgctggggtcagaactggtatctttctcctcctctggggaagtcagggcagcccggagtggcgtcgtgggtccgaaaaatccgtctcagaaacccaccaggagaaaaggctctggggtgggggacaccatgtggggctcccacaaaggacccgacggtgggtgtggagaagcttattggccctgagaataggcccaggccctctccacaggacccctaccgcacacgcgactctttctctgc

SEQ ID NO: 233840 - DNA, 378 bp, Homo sapiens
  chr8:99953787-99954165
  hyper
gagtgggagaggcgcgcggtccgagtgggagaggctgagagtcaactccagggaagtctgtgtctgacacctgctcgctgcttagctggcagagcctcctgggtgggccggggggcaggggcctgcgctgcgcgccccctcctcctccacctcctcctccgcgtttcctgtccctggccttcatcccggcctcccggggcgtaaacttgcagcggttggggttcaggcagccgctgctcgcgcgcccctcgtcagttagccatttccctgagagcgtccttggtgtcgcaagtccagagccgcgaggacagcagatgaccgggtcagcggaaatttcagagccagccagcagctcaggtccccggggccgcggcagga

SEQ ID NO: 233841 - DNA, 453 bp, Homo sapiens
  chr8:99954765-99955218
  hyper
gcctacccctcgggaaaaccaaacggttctgcacccaacgtacacatacttaagggcgggaaaggtgtgaagcccgctgctggggagttgcctcccctttgatgaaaaggaagtgcgaagcgtaggaacgctcttcaggtcaccaccccgtgagtgggaggcttggggagtctgaaggaagagaaagctccctccaaatctcccaaactgagaaaagctgcaggaggaatgaggcagttggagagagaggaccgcaggcatcccgcagctgaggctcaggactgagctctaaaatgaaagcacccctatgggacccaccaggcaaaacgttaaaaaaaaaaaaaatctgaatgcttaggcattctgctgcttccattctgtgtgtcaaatctactttgaagcagttaagtactgcaggatattaaacactcgaatctccgtttcaagctcact

SEQ ID NO: 233842 - DNA, 140 bp, Homo sapiens; identical to SEQ ID NO: 201529
  chr8:99955428-99955568
  hyper

SEQ ID NO: 233843 - DNA, 181 bp, Homo sapiens
  chr8:99955968-99956149
  hyper
ttaaccaagttggtttactgcgtatgaaatgaacatttgccgattaaagcttaaatattggaagaaatttctcctggggcattccacgcgtctttgcaataattactaaattagtcaattgccacctctgtaaacaaacttcgtttagaaaacagcaggcgaaagcagactacacatgtag

SEQ ID NO: 233844 - DNA, 137 bp, Homo sapiens
  chr8:99956453-99956590
  hyper
tcacctacggctgcgtctctataacagggaaacctcgagcaaacctgtgcctttaagactcagttgctatccaaacagaagtaaacagagtggaccattagcagacgccgggcgcggaggcggagccagggcgctga

SEQ ID NO: 233845 - DNA, 696 bp, Homo sapiens
  chr8:99957070-99957766
  hyper
aggggctgtagctgccctttggaaggaagggtttgggggtgtaagaggcgttcagattctcggtctggtgtgccccaaattcagatgtgaaaatagatcatggggatgcaatcccagggcactgtatttctcacttccttgggtccctggcacgcgactcccagctaacacccaaccacacacatttctacatactgtttcttaattttgttttgggatatttaatctaagcggtcagcaagacttcttataaaagctggtctacgtacactgagatcaaaccccacaatcccatggtgtttctgctcctgccctagcaagcctgggtcgacttgtcccggggcagccgcggcagcgcagcgtggacgggcccggacacccggtgcctgcccagccagcgacgctgaaggcacatttcaagagggaaatagttcagtcctcggtaatttgtcaacctcgtgctggctttaaaattctcctcccaccttctagtcctgactgagggggcccaaaagcaaactccccgggggcttaaacgctcggattcctgagaaacggcaagtgagaaaggagttgcagttgtacgaagaaggagcgaggaaaaggtgtttgtggagggagccccggatctgtcttcctacctgttagccgagaacaaaagggggctggcgtttcccgaagcgaaagggcgcagac

SEQ ID NO: 233846 - DNA, 1229 bp, Homo sapiens
  chr8:99960222-99961451
  hyper
tctggcctcagggacgttctccgcccccaccccaccccctgggagcctgaaccatctggaagggatcttagtcgggggttgggaggagagcccgtggataggaggagggggcgattctaggccgaatccagcccctgaggtgtcacttttctttcctgcggcccgtcaccgctgatagatggggctgagggcagaggaaggaaaaagaaaacctccgaggtcagtgcggggcgaggtgagcccctcccagggccctctggcccaggaggatgaagcgcgccggcttcgctcttgcacgccggcttgccatccgggtaagcgcgggaaaggcggccacagggcgcggcggcagcgcagcgcgtgggatctcacgacccatccgttaacccaccgttcccaggagctccgaggcgcagcggcgacagaggttcgccccggcctgctagcattggcattgcggttgactgagcttcgcctaacaggcttggggagggtgggctgggctgggctgggctgggctgggtgctgcccggctgtccgcctttcgttttcctgggaccgaggagtcttccgctccgtatctgcctagagtctgaatccgactttctttcctttgggcacgcgctcgccagtggagcacttcttgttctggccccgggctgatctgcacgcggacttgagcaggtgccaaggtgccacgcagtcccctcacggctttcggggggtcttggagtcgggtggggagggagacttaggtgtggtaacctgcgcaggtgccaaagggcagaaggagcagccttggattatagtcacggtctctccctctcttccctgccatttttagggctttctctacgtgctgttgtctcactgggtttttgtcggagccccacgccctccggcctctgattcctggaagaaagggttggtcccctcagcacccccagcatcccggaaaatggggagcaaggctctgccagcgcccatcccgctccacccgtcgctgcagctcaccaattactccttcctgcaggccgtgaacaccttcccggccacggtggaccacctgcagggcctgtacggtctcagcgcggtacagaccatgcacatgaaccactggacgctggggtatcccaatgtgcacgagatcacccgctccaccatcacggagatggcggcggcgcagggcctcgtggacgcgcgcttccccttcccggccctgcctttta

SEQ ID NO: 233847 - DNA, 202 bp, Homo sapiens
  chr8:99963488-99963690
  hyper
ctggaaatcacaaagcccaccgaggtggctgcgggtctgcctccgaagttatcagtgtaatcgggcctctgtgtatgcctgcacgtgtattttcatgattggaagattaggagcacggatttgttcctgcaagtctcctcttttgttgtcatgagagtgttatgttaacgcttgtgataacgataagacagaaactattgaa

SEQ ID NO: 233848 - DNA, 100 bp, Homo sapiens; identical to SEQ ID NO: 201533
  chr8:99963900-99964000
  hyper

SEQ ID NO: 233849 - DNA, 1154 bp, Homo sapiens
  chr8:99985867-99987021
  hyper
atgaagcctctccacgtggccgacttcccttagagaagtcccacaagccctcagccctcacagcctcgcccgcgacgccgtgcccacccctcccctggcagccccgagactctgggcgtgtgcttcccgctccccgagggccttaggcccagcggacgcccggccggagcctgatgccggcggcctccccctccctcagcgaggcacgcgcgtccccaggaccgccggtgccggggcctttaaccctggccgccgacgccgcggggaaaggaagcttctgcggctacagatggcgcaggccccaggtcgcagagaagccctatccaactctgcggactggccctgggagaaagggcccgggagttgcttctccagtcggtgaacgctccgttgagccacgtctatgcgcttgctcatggataagcgcactgggggactatactgcagtgtgaccgccagtgtccccagggaggctgcggaaaagtagaggcaatgagacccgagcagaaatagggacttctcgcggcagtccgcacggaagcagctggggagcatccagctcgaccctccccacaggcccagggtcgggacaccgagggaaggcgcggcgcgcgcggcaaggccaggggcgcggggctgggctcggccggcacaagtgctcggaccgcggagcgtcctcggtgaggcgttcggtatggattgggtaggagcggccctgggcgatgggcctgacgtcggtgggcgcagttgaggccactgcaaggccgctggatcccggatccgcacccgagacggagcgggggccacacgggataaccgagggggcgaacgggagtttcgggcctccgctccctctccgggtgggggacaggtcgccgagtccgaggtcgggcgcgaaggccactcgcattttcccgccttccgcgagcaacccaggggccctgcgggaggaggagagggtcccgggagtccgcccttccctgcgccttcgggaccggcaggaggcgctgcgcgggcgaattaaaagaaaaggaaaagctcgtagtggaggtgttaccgcatcctgcctttggacgctactcttagttgagtgacccgattcggaccttaggggcgttagggtctcctccaccgcctccctcccctgttaaaag

SEQ ID NO: 233850 - DNA, 492 bp, Homo sapiens
  chr8:101118152-101118644
  hyper
gtccccgctgcccgcgcctggagcccgcgcgggccgtcagggccctagcgcgcgggtccagcgcgggtcagggcctgagcgacgcggcgacggcgcgcgggctccggagctacgctggctagcgtggccggcgccgcgccggggttgctatggagcttagacaatacggccgcccagggaggccgaggccggccactcaggtgcctttcggggttcccaagctgcgacgggaacacccccgccgccccctaccctcccttcctcctcctctgggcagggaccagcgcggcgaacgaaggctgggggcggacgcgcgtgtggacccccagcgcggtcacccggaaggggcgccctggagacgcctgtgtccctcgagactccactggcagcgaattcgttactgtggtgaccgctgctcaggtccgttattcctccactacagcccgccagcaacggccagggaaacgcggtgctccacgggagggagaggcc

SEQ ID NO: 233851 - DNA, 433 bp, Homo sapiens
  chr8:101170171-101170604
  hyper
tctgcagatctgccggactgcgggtcggggcgtggcaggggcctagtccccgccccggccgtcagcctgtcgcctctggctcgggccgggcgacgagaccctccctcagcacctgcagtgcagccagagccggtgcggcggccgcgacttccccgacgcggggcgctgagaagcagtgagtgcctgtgtgtacctgccggccgggaatataggacttgtcgcatctcagcccttccctcccggagcgggggcgagaggtcgaggcggggaggcgaaggggcggtgggccgcgagggagaaggagcgatggggtggacgtccttcaaggccggggaacacgcggggctttccaggccgcgggggacggtggcgggtgtcggggcgcggtggcaacgctggagttcccgggtccaccggcgcggtcagccctggt

SEQ ID NO: 233852 - DNA, 107 bp, Homo sapiens
  chr8:101322699-101322806
  hyper
ttgccagactcggcgactctggctcttggcagtttgcccggcattattcattcctttgtgttctcagggttcacctgctagattggcaggccgagggagagaagtgc

SEQ ID NO: 233853 - DNA, 82 bp, Homo sapiens
  chr8:101572036-101572118
  hyper
gccagagcggtctcgcgctgcagcccccggcgcgccccctgcaggtgggcggtcctcacggtggctcgggctgctctgagtc

SEQ ID NO: 233854 - DNA, 498 bp, Homo sapiens
  chr8:101661576-101662074
  hyper
ctgcaaacacacagacaccccgtccctggtgagccgagggataagtgagcattgccaccggccccctccctgcccaccctgaccccagccctgggcgcaccacgtagcggccccccagcgcgtcggaccgctgctgggacaccgggatacagaaatgcatcttcatggctgagcggtgtcttgggagtagcgctgggaacccgacctgcggcggcgggcggtgcgcggctctgaactcggcagcggtggacgcagcgcggcctgccacgcgactcagagcgaaccccggcgcccgctctcgccggccggggacatctacaggtggggccggggccgggccgcgccgcctcccagtccccgccccatccagccccgccgctctggtcccgggataggtggcgcctggggctggggcgcatccacggccacccccaccccggacatcggccactgttggcattttctccaagaaggcccgtgaggggcttgaaaacagtt

SEQ ID NO: 233855 - DNA, 136 bp, Homo sapiens
  chr8:101821968-101822104
  hyper
caggctgattggtgcagagacgctgtaaacgcacctttgcggaacacagacgacacaggaaagacgtttggcagtaatactacgacagcgaggggcccgggaagcccgcggaaacgcaggaggcggccaggagagg

SEQ ID NO: 233856 - DNA, 360 bp, Homo sapiens
  chr8:101920199-101920559
  hyper
ggggagaggagacccggagtgagaagctcttatccgcaggcaggtcatcctgacatctctctgcgagtctagctgagtctgggacttctacgggttttgaagggaggaagtgtgtgctgattggtccatgggtggccatcggcggggctggaaaaaacaccaaaagttctcactcccgcggtggactccactgggaaccgacaggccccaggcctcaggtcgtccctgtcttcaaagtggggcttcaccgggaccgcccctttccacccgggaacctatctgcctcctgctgccattgacaggtttgtccaccgcaatgccctggctatccgtgccatgggggacctgcaggcccctttc

SEQ ID NO: 233857 - DNA, 43 bp, Homo sapiens; identical to SEQ ID NO: 201539
  chr8:101920619-101920662
  hyper

SEQ ID NO: 233858 - DNA, 85 bp, Homo sapiens; identical to SEQ ID NO: 201540
  chr8:101962307-101962392
  hyper

SEQ ID NO: 233859 - DNA, 285 bp, Homo sapiens
  chr8:101965389-101965674
  hyper
acaggcagtcaggcgtgaccgcacggacccgtttctcgtaggctaggttttcctacccaaataaagctttcacgtgaagacctcatactgcacatgacgatcattacctttttatctcctagaagcaaggtttgagggacgtcgtagtccccagggttccagctggcggtgggagtgggccacaggccgggtgatgagccgggacgggagcccggaagaaggggaaggagaaaggcggaaattgcaggtgcctgaaccggtagggcctccgcccagttgacttca

SEQ ID NO: 233860 - DNA, 90 bp, Homo sapiens
  chr8:102038370-102038460
  hyper
atggcctgtgaagagggcggagaggaagtgggaaggtcgcgccctcccccagcctctgagtccctggctcccactcggatggccgtcttt

SEQ ID NO: 233861 - DNA, 340 bp, Homo sapiens
  chr8:102092939-102093279
  hyper
gaggcttccctgcccgcctcggcctcgcttacaccgcaggtgctgtgagtcacccacctgcgtggtgagtcaggggaggaggccgagaaggcaggtgggcggcgcggcagggcgccgggcttcgcggggaggggagcgctgtctccccacgcgcccctcccccacgagcggcttccagaaacccgtttgcccatccccggcaggaggcctccgcccggcttctcgctccctcttccctctccccgaccccctcccgggctgtcagccgactgccaccgtcaccatggctacgcggctcccgctcagttccacagtcagcaggagtcgagcaggggaggcg

SEQ ID NO: 233862 - DNA, 106 bp, Homo sapiens
  chr8:102218020-102218126
  hyper
gccaatggcagcgcgcccctattacataagcgcgagggggcgggccctggctgacacaaacttcaggggacgtcgccttctgtccccaggcgcccctcctctccgg

SEQ ID NO: 233863 - DNA, 617 bp, Homo sapiens
  chr8:102504307-102504924
  hyper
ttagctcttccgctcgacccacaatccctagtgtttgcaggtgttgcattcccccaacccctttcttctcttcaaccagtagcctccaccttcccatccctgctttggagaaggaggaaaacgcagcttgagatctactcgaagaactgaccctcagctctcacaggctgccgccgagctgcaagcatgccgccgctccactcgggtaaacttcggagtgagttacctgcactcggagaagggccttacctgagcgcgcctctgccaatggcagctcacctgagggagctccccagccaatcatcgcgcagctcgtccctcgggcttgtaccctttagtgaaagaattcagctccttgcgagaaagttacctgtggccgcccaagtccgccactttctgctctgtgtctgcccattgccacgatccaggaggactccgcgccgcccggccgcctccgagctcgggccccatgtgaggggcccccccttatcccacctttccggctaggtgagggcgcgagcgggcgagcgagcgagagtggtgaggggggacggaaaagcagaattacctgtagctcttgttctgccatctcgggcgctctcacacaccttcacctg

SEQ ID NO: 233864 - DNA, 270 bp, Homo sapiens
  chr8:103136687-103136957
  hyper
ccaagatgaggcgcgggatttgcaggtgcagtggacgccccccccctcccccgcttgccctggtgcagcctccgggcgtgtccccacggtgccccatagtcctagctcaccgcccaggcctctagccagcctgcactgctactttccaaggggtgccatctgcttgcctcctcgggtcctgggaggtcagattcagcctagagcacctccttccaagcttcgatttgagggggggtctggggtccctgctctaccgcagtgaagttcaag

SEQ ID NO: 233865 - DNA, 231 bp, Homo sapiens
  chr8:103424261-103424492
  hyper
cagtaaggacccccgcaccccaccccagctggccggccggcgcgtaaacacccgcacccgcccggcacggcccgtgggggaggggagggagggaagggcgcccctccccccgcgcccgccgacccgccagccctattacctgtcattgagctggtcctcggtgcccggcagcgggtgaaccacgaaatggatggacgtcatggtgctttccttctcgtcctccactcgagg

SEQ ID NO: 233866 - DNA, 276 bp, Homo sapiens
  chr8:103667886-103668162
  hyper
ggccacagacgggcgcacggagacactcgacgccgctcccgccgccgccgcgctcagcgccgtctgccccctccccattcaggtagccgctcagcctgccccgcgccgcgggcgggggtgggggcggagcctgaggccggccaatcaacggcaaaggtgtgtgaggcgccggccaatgggctcgcggggccacgcgtgatcggcgactgcccggcagcgtgaagctggtgtcagtggagcgtgtacacaatccccggcagcgtgttccctctgccc

SEQ ID NO: 233867 - DNA, 223 bp, Homo sapiens
  chr8:103822601-103822824
  hyper
tggcaacctactgcgcaccagaggggaacccgcccgccgtcccaggccgggctctccctgctgcggagcggcccgggcgcggcgggacagggaacggaaggaacgggcttggcgcgcactcgccgaggcccaggcaggattcgagcgccagggaggcgcccatttcccttcccccgcgcctgggaacgcggtgctgggggcggggcccgaccgctgccccctc

SEQ ID NO: 233868 - DNA, 31 bp, Homo sapiens; identical to SEQ ID NO: 201547
  chr8:103876453-103876484
  hyper

SEQ ID NO: 233869 - DNA, 189 bp, Homo sapiens
  chr8:104033104-104033293
  hyper
acactggaagaagcggaaaaccccacccactctggaacaacagcgatcagccccgaatatagggtccccttgccgccccgtagcctcctagtcccgcccctctcccaaggcccggcagtggcagcggctgcggctgcgcagtggcgcgggcgtaggcggagcagcgcgcgccgcggtcagctgactgct

SEQ ID NO: 233870 - DNA, 825 bp, Homo sapiens
  chr8:104152744-104153569
  hyper
gggtccgagcgcctcgggagccccagccctcctccggctgcggggccgctgctcctgctcccgggccgtcacggagccctgagggagggggcgggcgagcgggggccttggggcggccagggcgctgggagggaggactgggcggtggggaccggaggggagggagggccttggaggcggagaggagggacgggctgggagagggcccggactaggggcggcgggcaccgcaggagctccgcgcggctgcagcgcgggcgggagcggggacgcgatgtcgccgccgccgcctccttgcgggccggggctgcgcctccggggctgagccgccgccagagccgacagccgagcagccgctgggcgctcccgcggcgcaggaggatgggctgcggcgggagccgggcggatgccatcgagccccgctactacgagagctggacccgggagacagaatccacctggctcacctacaccgactcggacgcgccgcccagcgccgccgccccggacagcggccccgaagcgggcggcctgcactcgggtaagtggccgggcccctgcagaccctcgcccgcccgctaccccgggcgccttggcccgggcactgagagaggagccggttccctgaggaattgatggcgcggcgggggtggctgggaggaagcagaggcaggacctgcccactgatcagtggacagatgcaagcccagggagtggggtcgaccagagccccttaccgaaggctgcgccgatgccccagcttccagcagcccaatgctctttggccttgtccaaagcttgctcgctggtcgggagaccggtggg

SEQ ID NO: 233871 - DNA, 401 bp, Homo sapiens
  chr8:104310699-104311100
  hyper
agcaaattggctccgtttaaggattcttgactcctgaaatccgcaaggaagtgggttcttttagagccagcgccaagagcttcaaaaaatccttctaaggtgaacccctccggacccggatagcgagatggggctcagccttgcgcctcgggggtcgtaacagacggcaaggtggaggtggcttcccggccccgcagccggacctcggcaccccgagcccgttcaccggggccgggtcctggcgggccgcggagtgaggccgggcggcgcagcgcaggcggtgcccgggcgcagggccagtcccgccgccgccgccgccgccgccgccgccgccgccgcgagcccggacctgcccgcccgacctggcggcgcagtctcgcgggatcgctcagctctcgctc

SEQ ID NO: 233872 - DNA, 200 bp, Homo sapiens
  chr8:104311338-104311538
  hyper
gctggggaggcaacggcgggacggcccgcacctgagtttcctcggaagcgggaaccggctctgaaaggcgatgccggggccccgcggcgccgcgcaggccaggaacgctgctgtctggctctaggcctggggcaggttcccgggtgtggggcgctggcggaccgggcatcagtgtgtgttggggcgcgggtaattcgtaa

SEQ ID NO: 233873 - DNA, 79 bp, Homo sapiens
  chr8:104427306-104427385
  hyper
gcgtgagcgaagccggagactctagtactgagggggcaagaacggggcacagacactacgtcacgccggcggaaagcgc

SEQ ID NO: 233874 - DNA, 48 bp, Homo sapiens
  chr8:104511878-104511926
  hyper
cccccgcccccgacacctcgggcgccccctcacacgctcctattctcc

SEQ ID NO: 233875 - DNA, 828 bp, Homo sapiens
  chr8:105235364-105236192
  hyper
ccactccctggccttaaccacgcggagggaagaggaaacagcaggagctactcggagcagctgcccgggacctgaggcgcgcgccccggagccaccagcccaccgaggtgcagccgcgccgccacctccccctccggccgctgattggcggggaccgcagcatcagcggcatctccctgcgcggggagggcagcgagactccagcagctccagcctccaggattctcagctccctcccgggcgagacctcggacgttcactgcgagcagccgctccgcccgccaccgcctccatctcctcctctggacccctctccaataaattggaggtcccggcggccaggaaagccacgtctcctccgggctgggtcagggaggcaggggccagagcctcagggtcccgtggcaccaacctggcttctggcccactggtcccggaaccgctgcggacgctgcgccccagccgccaagacgccgcgtatcttgtaccgcgggaaaagcgggtcctcgtccaagatgggccggcagggcttggggggtgccagcgctgcggggcgctccatgcagcgctcccagagccggagtagcctgtctgcctccttcgaggcactggccggctactttccctgcatgaactccctggaggaggaagaaggaggtgagacaccccttcccccgtagttggtgtctctatctgtttagaaagtcggtggctggagggttggccggggcagagagaactccacgtagcagtgtcccagcccctctgctctccgggactgtgccgggggcgacagccctagagcacgtcagctgagcagagaagttg

SEQ ID NO: 233876 - DNA, 531 bp, Homo sapiens
  chr8:105478766-105479297
  hyper
acccagctcctcggcgccgcgccgcgcgaggcggccctgctgaggaccccgggacgactggggaggctgcccgagcctccgtgggtaccgcggggcgggggcgcggcggggcgggtaccttggtgccctggtggaagtcgtcgatggaccgcgagcccatgaaggggaactgcatgtgcgtgtgtgtgtcgatgcctccgggcaggacgagcttgccggcggcgtcgaggacccgcagccccgcaggagcgcccccgggaggcagcaggtcgtgcccgagtgcccgcaccacgccgtcctccaccagcacgtcggccacctccgagaagtcatcgttgaccacgcgacccccgcggatcaggagccgcgagggcgccgccatagcgaggggcgcgcggggtcctactcggcccgggctgcgcgcaggggctgggttgggcgggccgggcgggcttggggtgccctcctgcaaggtccccaccgacagcccccgagctctgcctcaggctgcaaatccggagcccggcggcc

SEQ ID NO: 233877 - DNA, 1748 bp, Homo sapiens
  chr8:105600479-105602227
  hyper
ggaccctgcacgcccggattcggcagagcccttgcccccgaggtggagtggggagaagtcagcgggaagccttttcagggaatcgagtaggacaagggctggcgcggtgggaatctcgccggtgagagaacttcctaaccccgggttgagggggcggggggaaggaccgtcccggcagcggcgggggcgagctcctctgctttctcacagtcaagcatctttgtgtgtggattgtgccaggctacgggtcctggagcaactggccgcgggggccctcgaacccaggtcgggaagtccgcccgccaccccctcgctccgccggggccctcccggccgggccccccagcccctctccaccacccgagggtctggaggtggacgagtggagaaaagcatctccgtgtggggacacccgttccgccacatccaccccctcaccggtctttgtcccgccggtagccagggtctccgcgggagtctccaggggaacccccgtcctggaggcctcggggcccgggtcgcctcagctttgttcggtcagcggggcgcggggacgcggacacttaccgtacaccccagcgaggaaaagcaagagcaacgcagacctccaccgcggagactcttttgtgctccagcgacaggccataaccacagcagatggagagagagaggaggagacggaggaggagggaggagaagctggaggtagacgacgccgacgccgccgccgccgccgccgccgccgccgagccaccggctgctccctgcgctctccgcggctgcgggagggggaagggaggggccgccgccgcccgcgcgcgctccctcctccctcctccctccggctcgcctgctcccaccccgggcggtgcgagagccccacgcggggcggccctcctgggggcaagggcaaggagctcgcgcgccagcgcgagacgagagggtggcggacgccggactccggcctcgcgccgctcgggctagccggcgccgccactcgccagactgagcgcgcgcccatccgtgcgatcggcaatcccctggcccgcctgcctcggttccctccccgcgctccgctggactttccaagtttcgggccgatttccacgcgacgggagcccaaggagcaaggcagcgccaatcgatgacagagcgtgcgaacgccggctgctggatgcccaggggctggagcgcggggtgtgtggaggagcacggtcgctgtccgagggctgggctctggcccagcgggtggggggagggggggtgggataccagctgggaggctgaaggtggttccgtgttgggggaggcgtggatggtctgaagctgacaacttgggagttccttcctctatccggtacccccaagtctccacttgctgtcggcgcggagcttcgagtgggggtgggctcaagttagtgcggccaacctggcagctggtcggtcaaggggcagtgtggactcccacgctcaaggtgcccggaatgagtcgggcaaggcttgtgcagagcccctccagtctggcgtggaagcgccaagaggtcatttgacatctcacgctgggtcgggtgcagctgggccaggatgttcggcagggctggagccgactttcagggtagatatattgaaaggaggattcgcccatcacgctgcagtttccctaaagctcttttctcactcccagcaaatgggagtcctcctttacttagatccccagaacacttttctaagtacgtctgtagtgacgc

SEQ ID NO: 233878 - DNA, 65 bp, Homo sapiens
  chr8:106330845-106330910
  hyper
tttctcttctctttccccttttctctctccctgaccgttcgcttgtacattcccattctcccccc

SEQ ID NO: 233879 - DNA, 948 bp, Homo sapiens
  chr8:106331270-106332218
  hyper
acgggaaagcggtgggtgggtggcggggctaggggagatccgctcccggtcccctagatgtctcaaactttgcctgagcagtcgaagggacaactagacagtcatagacagacagacggccagcccgagcctcgggcaggagagaggctgcgaggagcagcccatgcttgccccgctcagccctcgcgctcccgggctgcttttttaattccgacccgcgcacgctgcgagtccccggcgctgtcgtccagccggaggggcagtcccgctcctttagacgcttattattgttgttgtcattgctttgtgcgattgacgtgggactactcttgggaaccacttttagtaaccagggtagaaacttctcagaaaagctgggcggtcgagacctcggggcgagggaggtaacttccccacgcggtggaaaatcagagcgtcagggtcccgatcctgggcggtgccagagccacaccaaacccgaagcgaaacaaaaagtaggtgtaaaagttcgcgcctctgcggcgggcggccgtgcgtctctgccctgcgggcgcgggctggtggctggcaggtcgtgtcctgggacttcgggcgggtccggctcacgccgccaggacgctcagccgagcggggattcgggtggtgtctggccctggtggcgcgcggagtcctccctgggaggggccgccagtcacttcccagcgcggaagctgtgagttcaaggcggtgggcgcgcaggggagtgcatggccctgagcccccgggtgcccgggggtcccgatggtgcttagaggacacggcgggtcaagagacaccttccgaaacaggcacgctcgcagagatcaagtcggtcaacttttcttggcttggggagaattcctccaatagcgttttataggcctgcgacatatcttcaacgctttggccgaaaagaagaaaaaaccttat

SEQ ID NO: 233880 - DNA, 2369 bp, Homo sapiens
  chr8:107281806-107284175
  hyper
aacccccttcagcccgctccaagctgccttgggtccctttctaggctgtcagacttcgccttcctttcctccttgtttttcccagcaaccaaagcatctgaagaacatttttttcctccgtaaatctgaacaaatttccttgcagctttccttgcagaagcttttttatcgctttaacaaaactttcctctgcttctctagggagagcctagtattagagctgcccgacaggcgggaccccgaaatcggggcagctctggcttagtccaggctattcgagtgggcgcctgaactggaggcgccgtctccaccgggatggggatcctagtgcaggcagacgcctggcaggactcggcgagctggggtccccaccgcggtagccagagcagaaacccgaaccccagccagaggggccgcgcgcggggaggggtgcgcgctaagccagcgtggcttccgcaggagctatttttagcggtgcgtgcctccccccgcccccggcgtggtagcctccggctcgcggcgccccacggctcctctcagtctcccccgccgctgccggctcttggtagcttccacgcgggcaggtccggaaactgagcatgtctgcaagcgctcagcggcgccggcagcagcggggctagagctgggctgcgtcaggctgagcccattcacctcgcggccacaggagctcagcgccggcgccgcgccgcccagccccgccgagaggggcgcactcgccgccgcggggcccgccgccgctcaccgcagccccctcctggcgacccgcaagtaagtttgtgaggctgctgggcgttagggcgagggcttggcgcccgggggagtccaggagggatagcgagaggcgcggctggcgcccgggagagccggctggcctctgccccctgtgcctggcgcctctccgagccacttagccaatttgaaagcgggtggccattgggatgctcgagcggggacgacgggcagagcaggagggcagaactagctccagcgggggcccagagggcggacttgggaagaaggaaagaccgcgcggcgagggaggagaccgggcggcgagggaggagaccgggcggggaggctgggtttggggcgcgggagcccggccagggacagccgcagaaggaaagtgggggtgtcgccgggggatagagtgggagcagcgtgagagcagtgttgggggcgcagagtggagggcaagcgtgtcttgaacagaacggcaggaggatgggtggaaagtggggcgcgtggaaagcggatttggacgagagcaaaggacgccggtggaagggacagtgggctccggaggggcgagtggattcggataatttggggaatcagtaaaaggctagggggcacatcatgatggagtcagcctggaatctgtctcccgctagagtacccgaggccacatgttgggaactggctggggaaaggatggatgtagaaagtggcctggagggccgactggaaaatcgctgagggatttgggtgaagagggggggagctgtgcagtatcgggcggaggaactgggctgctggtagggcctgaaaggttcaggagagggttggaggcttccccgtgccgccccttgaatagtgatttagtactgttatctgaggttcactttcacccctggctcctcctccgtctactacccggcttggacgcacctcggctcgctgtaggcgagctttaggagatttaaatagacattaggcagtggggaaggtagtcgtttacggggggagctgctcgggcttccgttcagtggttcccggcacgctcagggtgcagtgtagggtctgaatgtgtgtattgcgggggtagggggagtggtgtcagttctaggccacaggaattcgtggtctggccccagaggtgcggtgtttttggccgggaagtcaggcagaagtctgcagcgtgcaactcgcagcggggcgtgtgtgtgcgtgtgtgcgcgcgcgtgtgcatgtttccggcccggggtcgcgtgtgtggctgcagcctgtctccgtgacaagaagatccagggatctacgggcggcacggggaagggattaaggggaacatacttccctacgtcttttctgcctccttttcccagggtagcattctttgcttatccaatgatgcctctttctaacctctccctctccacttacatcccaaacctgatgcgggtcttctctgattcggcactctaaggaggactcagccgccggctgcgaccaccgtggactccctctatggaagggaatcctgggagtcccggccgtcagaggggttcccaaatccaaagggtccatctccaaggcgtcactccaggggtccgcggttcactttgctg

SEQ ID NO: 233881 - DNA, 277 bp, Homo sapiens
  chr8:107669366-107669643
  hyper
cctgaaaggtagatccgcaaactaaatccctcaataacgttgcctaaacaggactgggatcatagaatgtccaacactaacatgagttcataatggcacaacgaacttaaaatgttactattcatgttttaattatgattgcagtcttacgttgaaggtatctccgccgtccttaaacataaaaaaaaaaaaaggaaatacaagctgcaaaagttttatgtaatgcactccaccctcttttttccccaagccaacacacacccttcaaactttttga

SEQ ID NO: 233882 - DNA, 1274 bp, Homo sapiens
  chr8:107669823-107671097
  hyper
agctccattggcgccaggcgggtgggggaatgcgctgagaggacccgtccagcttgcttaaaagccatcagttttctgaccccgcatcggttccaggaagaatacacctatgtgacaagctaagttctgcctcattttgcatttagaagccacaagaaaaacttttcgaaaacttttgtccgtcttttgctcccccgacgcgtggtttcctgatggtccgtccccgggcagagagagggacgccccctcctcctccccgcctcttgtgaggcgcgcggagccgcctcccctgggtcaggtctgatgggccggtgggcgcgctagtggtggccgccaccgccgaaaccgtcgacctcctgggccccagttccgcgtccagccccgcggcagcatggactacctgacgacgttcaccgagaagagtgggcgccttctgcggggcacggccaaccgcctgttggggttcgggggcggcggcgaagcccggcaggtgcgcttcgaagattacctgagggagccagcccagggggacctcgggtgcgggtccccgccccaccggcccccggcgccgtccagcccggagggacctggtgagcccacctttctttcgcctcccgcgcggccgacctgggctgagggctgtggggaggcggcggtcgtggcgccgggcgggggtcgctgcccggctctggcaggtgtgcctgggccggggcgggcaacgtggccggggtggcggccgccgggggcgaggaaggaaggactcgttcggctctggggagggaagactttcagctgcgtgccagctcttcctgctctgctcttcctgctttcctcacctagacttgattttctttccccgccaagtatttcaaggggacgatccattctctctttccctcccactgggaggtgaagactgaaccagttatgacgtccgtgttttcagtcttggattcttgaagagcgctgtgcctgctttggttttggtttgggtcagtctttccttaatatttctcagttgttaggattcacttcctaaccgaaaaataaaaagccagatacttctttgtaaaataaaacacttcattaacattggaagctagttgacattttgcgtcgtgtactttttgaacggctgcacgttgtcttgtggtggcagaacctagaaactttctcagttcctgtttattttgtgttgtgttggccgatttttttcaccacagtggctttgtaccattctttaaaacagtcatttgtagcgacatgatattgat

SEQ ID NO: 233883 - DNA, 239 bp, Homo sapiens
  chr8:108509538-108509777
  hyper
agtttctgggaagagaaatccggttccacgtgtggagcatctctctgcagagcgtttgtgttgtactggtctgtcgtactctcacgacagttgccatcgtgttctggaagaatgaaagtgtaggcacattgcccatgttgaatccggttatatcttctcccactgttttctggacttcggcgctgattgctgcaccctatgtgagtcagaatggcagcgaggaaagcaaaggaaaggaa

SEQ ID NO: 233884 - DNA, 2344 bp, Homo sapiens
  chr8:109093646-109095990
  hyper
attcatgaacccggcgacaaattctaattgcgcaaaagtccaaagtgccgaatgaaatagacagctctcaccaggtccctgggaaggggctgctgcgcgcccttcctgcgcgggtaattcgatgtgcgtgtggtgagtggtttatgtttaaatccacccagaaaattgaatcgtgtctagccgcccttcttctaaaatgcagttggattagttgcatctccagcggactccgagacagaaatacgcactaaatctgcaggaaagcgagttccccgaaacctttctggaggcttccacccgccttctccgctacgcacaagtgatggagagggagggagcagttaaaaagccgcaagtgaatttcattgagaacagaagcctccaccggtgtggctgcttttgcaaagcaaatggagagagcgaagtggggcctgttttaaaaacaaacctctggaggcgaggactccccagaaaaccagcgcgggaattgctgcttaattcagaaagttcccatctcgtcgcagtttccagaaaaaagagatctatgttggcctttttctggaaagggaggtcctccccctcgacttggtacccctcccaagctccggaatacagacacacgcttgggtacacccacacaccacacacacactatgctaggtcaagtccgaagagatctgaggccgggtttggggcgcacgtggatggggaagataaaacaaatgagctacagggaagatggttaggaggacagagagaagaacaacgacgacaaaaaaaaaatgcatgtcagataagaaatacgtcctaaagagacaagtttagatgaggaggtggggcggcgaacatgagtgcggaccgcacgacttagccctgagcgcccgattggcgcccggctcgccgagctcccagcgcgtctcgctccggctccccgcgcctccagggtacagaaaacagagtgttttgtagagctccagggtcctaaaggtggggactggggacccgcaaaagctggggtggagagcacagccctgaccatctgagcccccggagccagggcgtgagtgagcgcctccacacgccacccctgaagcccaccacgcacctttggcagagagggacccacctcgcttactgcgtctccatcggttgccttggcagtggctgtaatccatgcagttcagaatgatgagggcaaaggagaaaaggcgaaactgcatctgggcggtcgggcgggggagagacgcctctcaaagtctaggaactggagggttcgcccaaagagccggcgccggccgcgctgctggggaggactcagagggagactcgccactcacccccgggccgcaccggtcagttcagcgcgatcagcatctctccgccacgaacctgagagacaagaagcgaaaacagggtgtgtgggggatggagagagccccggggaggcagctgcgccttcgcacgtcccaatttaaagaagagagggaaggaggaagcgaacccactgcctagcacgagccgcggagcggcttaatccagagcgggcagctgcggacgagttggagaggaaggtgattataatcagtgaattagcaacctctgccgagccctaagctccgacccagcggcataatgcgttgtgccggcgctccggggaaaggaaagaactctaaaggcactgagagcgcagggctaaaagaacgctcttaggccatttggagtccacggcggtgtacccaagcgccgcagctgcggctgccttggtgtgggttgcctaccgtgcgcacgtctcgggcggcgcggcctccctaggcgcggtgctccatcccgggctcgggaagcgagccgcttggttagcacgtgggctggggaaaagtttgccgagaccggctgggagcgcctggcagctctggaattccagcggccgccgcggggttggcgacgccaggcaggagcgcggagcggcgggtgcagccactgggatgctccgtccccgcccgcgagcgcggtccccaggcaaggggtgcgcccgctcacactctctgcctccctaaccaattgtgtcgcttcctgcgctttctccacggtcacttcacagctaagatttctttctttccgagctgtagaaggcagaacgctctcgggaggacgaagtgatccgaagggatgtggcaagcgcactttccgatggagatgcagaccggctgaggcttgggatgcttctataagtaggtggtgctgtggtccaaggcatctaagtctaggctgcctcggagttcctgggtcctaaagccagaaacgtcccggtttccctgaggtcctaaagaacgttgacagccaacag

SEQ ID NO: 233885 - DNA, 166 bp, Homo sapiens
  chr8:109260968-109261134
  hyper
ttattggtagcgccgacaaacgaacagacagatcctgtactgcgcatgtgctgtggtaaaactggcctaaagaaaggggcggggtttaccctggagagcagaggacaacgacgcatgcgcgcgggttgtcccaccctttgcgttagggcgcgagtgacggaaacag

SEQ ID NO: 233886 - DNA, 72 bp, Homo sapiens
  chr8:109799175-109799247
  hyper
gctagcagcacagtcgatttcctttgcagctccctaatccggggtttccattctcagtggagaatggataat

SEQ ID NO: 233887 - DNA, 87 bp, Homo sapiens; identical to SEQ ID NO: 201562
  chr8:110346426-110346513
  hyper

SEQ ID NO: 233888 - DNA, 312 bp, Homo sapiens
  chr8:110552599-110552911
  hyper
cagcaacttagagcgtttcacgtcacgccgggcgccaggcgtcggcttgtataacctgaaaacgctcctgtttttctcatctgtgcagtgggtatgatttttttttcatcaacaaatttcacgtgggtaatctgaaatgaaaccacttaagttatgaaactctttccttttgagttattctggagaccttactccgccttcggaaccgccccagtggtgtcacatacttgagggcctgactctcggttgccagacatggcacagaatgttcgattttactaccagctctcacactccgcttctgtttcccct

SEQ ID NO: 233889 - DNA, 377 bp, Homo sapiens
  chr8:110703597-110703974
  hyper
ggaggaggcacctacgtgcgcccgggagaccgggccccggctgggccgggtgccggtgcggacgggaccccgcgtcgctgctggtttgcgctcaggcccggggagccgggcccggcccgctccgcccgccttagcccggcttggacacgtggtgccgcggaatcccttgcgctccggtgccctcggcccctcggcctctgcagccagccgggcggctgctggggctgaggacaaaatggagagaagggcgggggaccaaagggcaggcaccgctgggtggggcgcagcggcgtgagcacgctgagggccgcgcgccgggggcgccaggattctgctccctgggctcgctgcctgaaggaccggttcctgttgccagg

SEQ ID NO: 233890 - DNA, 1302 bp, Homo sapiens
  chr8:110986093-110987395
  hyper
gccttcctctctttctctgccgcgcccgcctccccgcccagccgccgcgtgcctccggggtacctgtccctgcagcaggaatcgatgctgagctcatcgatgccccagtactggatctcctgcaggaaggagagcgcgcacagctgctccatgacatgcaggcggccggtgcggtagtagtgcaggacatatcggaacgcctgcgagctgcggtcgaagaagtactcgttgtccacggggttggcatcgtcgcaaagctccagagggctgggcacggcggccagggccccggggcggcggtaggaagccaccaccacggccagcttgccaaggcgcgtgtgcgggaagcaggacagcgcctgctgcgagagcacgaagcggctgccgcccacgttgaccgtgaagcagtccccgagcgccaagggctccccttcaccctcgctgcagaagacactagagtccagggaggtcagggagccgctgtccagcggcgagtccagcagcgctctgccgctggaaggcatctctaacccagtcgccgcggcctgagggcgccacaaagttggggacacgccggaagctttggtcccgcgagggcggtggcacggcccctggtggcggccgggattccccgggctcccgaaggggttacctctccttggcgcaccctctccacccgctgtgcgccttcctcctcctgccgctagggagccgggagtgcgcggaagcagcgcacaagtggcagaaagaggagacagggagcagaggaagggtcgcgctaagagagaggatcaggtgaggtccaagcccgacacagtccctgtgcacactgccggtcgccctggcccttcccaaacgttgtcaccccgcctcccaacttcgcaattgcgattcccagcccaggaggtgtacagattgaatgactcgctacttggtgggtggaggggttggggaagggaggaaggagggagatgtggggcggaggaggaggaagaggagagaagatgactcttagctgaacgcaagcaagcaagcaagcaagggggatggcgagactcactcctgcccgcaggagaccaaaacaaaaagttcagaaagcaaaggaagtggtaaccgggtcccttccaacttgagaatttatattcctcccttttcttttactgctgcttcataggcctcccccggggtgttcgctgggggtgtgagcaggtgggggagggttctctgggtgagggggccgcaccattttctcccaattcactctcattctagtctgatgatcactgacgctccattttcttc

SEQ ID NO: 233891 - DNA, 668 bp, Homo sapiens
  chr8:110987603-110988271
  hyper
gttctgagcacagcggagctctcattttagaaggaaaggcaaaaagacaaggaatagaacaagcgtgggctggggcaggaatttaaatagtaacgacggcctccctcggtaaagggagaagccgaggccagcgcccaggtgagactagaagtgtacccacggggcccctggaagctgcgctccagccaacctgttggactcggggtgaggaggtgggggtgggagggaagagcaagtgactcacctgcagctcccggcacatctggtctgcgcacaaccggcgccgcaggtaacgtactcttcttttgatcctcttagtctacacgtgaggtctgactcgaccggtccaggagggaaactgtgttccagctgagctctacccagcgcctgctgccttgccttgccccgcctccacctccctccgggctcctggcccctgcgcttacgctaagcgtgtccgccccgcccgctctagctctgagagccactcgcccagtgcttccagcaccagcagaggggagtggcaggatctaagggagggaggtgagacggcgggggtggaggcggggggtagtgaggtgcccggtgacactcaatattacattcatcctgaatacacttgcagaattactgcatttgattcccgtttccccggatctgtgcttttg

SEQ ID NO: 233892 - DNA, 849 bp, Homo sapiens
  chr8:114444389-114445238
  hyper
gattccggaaagtacggtgctgcaaaaggacatttcagagcgctttcaacaagctaactgtccagtgaagttcagctccgaattctggtaaccgttcaagccctgtcagtccggtaaattgggttaacttagcaactcggtggtgcaaagcctccccaaagacaagaccgcattcagggagaagagaaccagcctcatgcctgagccgatctttcttcctttggttgtcctccttcattattattctgcaatgcgcagcaatccctgtgcgtgcccctgtgtcagccccttagctggtcactccagcggggctgggagaagaccactttggctactcagatggcactatgctgtttaatttcttctgctctctccctcagagtctaactaagcccttgcagcacttgagccgggggctgccctcctgctggcctttccgtcgtcgttgaacggatctgggggacggggacgttgcagaggagccacaatccccactcgttgtttccccaatgtgctttccgaactccccgagtgcgtcttagataagttatttgagtgaggacagcgctgcggtccgcctggagaaagggagcttcctccgcacttctacttcatcgtgacagcagtggtcgcagcgccactggccatctggagtcctgggaacattaaagcgctgttacccgccaggcgtttccgcctaggacacactcacacccaccctcggagactcctaaaggtttctccgtgtcaattcatgtgtcctcctcccagcagcacacacgcacacacgcacatcaacagccaagtcagccacccagtttcaacttcgggttgtccatgaaaattcag

SEQ ID NO: 233893 - DNA, 413 bp, Homo sapiens
  chr8:114445556-114445969
  hyper
tgggtgtcagtccccgggacacacgcggggctgaaagctccggacatggccacctgggcgggcgtctgtaaaaggtgctaatgagtgcctctggcagctcttccccctcataagacacccgcgcccctctccagtagcaactaactgcgggagaggatgcgatttccacttttccaaaagacctctgtggcaggagtagtatctccttggagtctcagagcacgcagaaacgtggatccttcgcgaagtcgctctggcgagaatccctggaaagacgctctggcgtggggtgcgcgacgccgcacccggtctcccacctgctgcctacccagagatctgtgccttcgcggtaccttcgctgcacggtgtgtgttcccctgggatccactgacaagcagcgtgggaaaacatcc

SEQ ID NO: 233894 - DNA, 180 bp, Homo sapiens
  chr8:114446354-114446534
  hyper
cattgctgttgaacgcaaaggtgagatggtggagggatgaaaactgtaggcagatggtgtaattctcgtggctagagctgttcacgtggaaaactgcctgcctcggacttcctggaccctcacgctagtctagattagaacctgcaaaatccttacaacggctccccagtctgaggtttt

SEQ ID NO: 233895 - DNA, 944 bp, Homo sapiens
  chr8:114446926-114447870
  hyper
caatatctccaaagctaaaccgattatatcagtccaaagtaaattaacgcgcctttcctttctatcggcgcatctcattcggaaaatacggtaggtgcgggcagccggggctctaattgcaggcggcgcggatcagcgttagtcaggctgtaatgctcgccccgcttcggagacttccctccccctcatctgcccccgaatgtgttttggctcaacaggtatcacatgaaaactcgcacttaaaccctggtcatcttctcacaggagccacccttacatttttctgccagggctgctgctggctattcgcgcctcccccacgcgaagcgcgcgtctagcaggcagccccagggccatccattaaccaccaactcccagtggcaggcgaactaagcataaatgtgtggctcctcacccgtcgagccagcgacaaagaaaccttgtaagcaacctgagccgtgctttgtacatttggcagtgtagttgtgccacttaggacaagcttttcggctcagagctgctctgaggccccagagagaaaagaaaaatcaagcttcaaggagcaggttgggattacaaggcagttgctgccacagagaccggggcgactgacttcctggcattttgggatgtaaattaaaattctagacatgccacccatcattggttatagtagagggaaaggtaacctctccagctccctcctcccaaaacatgaattatcatttccactgaatgcaaatgagctgccttccgtggggggacagccagctgcaagctggacaataaactgtttcatagagacgcggcccgattgcagttcagagaggcactcctttacaaaggaagaagcgtccagtttgtgttgacagccctggcgcgcctgggccaaaacagcaccccctttcccgcgatcccccgcccccccgcgacacacagacacc

SEQ ID NO: 233896 - DNA, 1777 bp, Homo sapiens
  chr8:114448651-114450428
  hyper
caactcacgtattcgtttgagcatactgcaagaatatttattgagcacaagctcaatcaccgcattgaacgccaaatctggcaagcaaaatgcatttcctatctgagggggggagaacgagctgtgaatcaactcctttagtattatcagattattttatcggtgcaaattgcaaagtaagctgccagcctctctccatctacaagtcagcccacctccatccaaagcggaggggacccccaaagcagacctacctttcacacaagacaccgtcaataaaaagacgaggttccaaaacgtaaatccacttttaatccccattttcttcatcaggatgaagtctaggcggccacatttagcgcatcttcgcttgccaggctcccagggtttggattcctttgctcggctttcccctttgcggatccctttcatattattcgcgagctcctaattcctgctcctcagcccggcgcagtggagttgttgctgttgttggtgcgcggtcacagctcggagtgaatggtgtttctgggataccacagcaaccttgacgaggactcaaccatctctccaacgggggcacaaagtctccgctactctggattctgtcttttcttgtgcgttttttcccctccaccaaaatctaccccaattctggctcgttatagcaaccaccagaaaccactagtgagcctcttaaagcccacctctgctctctgataaactccacacaatatttgaaattaaggggcttgctttttttccccgaatagatcaattctgcctgtaaaagcagcccaagaaataatgttagtgagctctccgttgcaggctgcgaatacagaagcatgtcaaaggaatattttaatcggaggatctgtgttgcttttggggaaaccgtgacgataatgaatcgggctccatcgatgcccacgtcgttataatgggacatgtgttactactgtagttgcagtatatttcaggcaggcttctcccatttattatcctgtgatttaattgaaaaaggaaatcacagagaattttctcaataaattctgccttcacacggaaaagaatgtatttgaacacatgtatttacatactcaaataactacgtgtaaacccttcaccgggtttttatgattcgggaaacggatttcatccgtggcctgggcgggggtggggtggggagggaagtcaatgtcgtttcctcaaatagttctccctttcatcctcccaacccccttttcagtttgtgtgtgccgcagttaaactactttatctgtggtagttatctagaacaaacccatttgtcttaattctgaatcggtaccaaatatgtaaataggaggtttctttcaaaacgaaaaatgtatgtatctatacatctggatctgcttcccccatgcaccacgcaagggttaagattgcacaagggaagagttcttgcgccatctactggccgtctccgagccgcccgttcttccttcgcatgtataagggaccctgtttttgccatcccttggtgtcaggggagctgtgtccccgggaccagtatgtcgtgctccttgatttttttcgaccacggtcctggcccaaatctttcaatgaacaagttccttagattaggcaactgattggtgatctgaccttttcgggaatctggtcccctctcagcagtggggagtgccacagcgctagttctgaaacaggatattgctgttgcgtgtggctccatttaactgcctcaggctatcatgggcgtgagcgtctatca

SEQ ID NO: 233897 - DNA, 533 bp, Homo sapiens
  chr8:116660297-116660830
  hyper
gaggaaatcagagcgtcaaatcaaggaggggtggcagcaaagaggaagcaaaagagaagacaagaggaaagagagtttatggagagaggaagccaatttgggaagtggggagaagggcaggctggccaggggatgcgacgcgacagggcagagggagtgggaagaagcgggcaggaggcggcctccacgcagctggcagggcaggcagcgctggagagggaggaggagagggaggctgcaggcaccgcgcagcagccgaggatgagagaggtaaccggagggaacgggcgcacacaactgcttccgcaggacttcctgcgataacacgcccacagcccgggcgccgagcacgcgtggtggcggccgcaggcccggggctcctgcgagagcgaacgccagcgacacacacgcagctcctgttgtgtcgccgctgccgcctaggcagggccgcagacagcagcctccttcccagactgagccaactcactctcaccgtagctgctccagaatccgtgaaaagaaaatggaatgct

SEQ ID NO: 233898 - DNA, 218 bp, Homo sapiens
  chr8:116680622-116680840
  hyper
ccccgctcgcgatcgcccacattttgcgcgcacacgagcgggcgctgcactcgcgtcgcggcgccccgggcccggccgaggggcgcccgcgccccccgcgccccccgcagcccccggccccgcggcccgctcgggcctcccctccttacctgttgattaatcgtcaagaacaccctcggcagcccgaaagatggtggcgcggcggccaaagccatgaa

SEQ ID NO: 233899 - DNA, 151 bp, Homo sapiens; identical to SEQ ID NO: 201570
  chr8:116681608-116681759
  hyper

SEQ ID NO: 233900 - DNA, 391 bp, Homo sapiens
  chr8:117767860-117768251
  hyper
actgcgctccccacgtgggccagaggaaaaagaacagcactcacaaggccatctatctgcacttgcttcacggctgaatctcccgagccgcctttgcctttgcctttccctgctgcgccggcggtggagctggaagaggtggcagtagagccggtaccttccttgcgggacgccatctttccaagcagacaggaagaaagagaaacgtgagttaccggaagcggaagtacaagtctcgcgtgacgtcactcgcaggccggcgttcgaggggcggagacggaaggagaagccaaaattgggccccgcctccctcctgttttccagttttaccttctttccaggcggtatcctttgtgcatgcctactgtacattttcgacctctttccgatg

SEQ ID NO: 233901 - DNA, 327 bp, Homo sapiens
  chr8:117778474-117778801
  hyper
gaagctcttgctacgcgcctctaaaacgtaggtaacacgctaaatgtattctcgtaattttcttttaccgtggccccagactgcgcatgtgcgcccccgtgcggaatcgcgcaccccagcggttttccagcgtacgcacaagttccgccctaagggaccgcccctttaagcgcgggcactgcggtggaagcgcgcgctggtctggacatgacgtaaaccaatgggcaggcccggaagacagaggcgtttgcttccgtggccaaaggcgcttcatttccgggtgaaactggcattgagggtactggggcgtgcgtgaggcgtttactg

SEQ ID NO: 233902 - DNA, 116 bp, Homo sapiens
  chr8:117887187-117887303
  hyper
ctctgtttgtggagtccacaactgagcaagcgcaaaggtgattctcttgcgagggtctttgagagttgcggtgttagccaatagcgtaagatagcgcacgcgcagtgctttccagt

SEQ ID NO: 233903 - DNA, 540 bp, Homo sapiens
  chr8:117950439-117950979
  hyper
tctttcagcagcagcggtagagcagtgaccaggcgtctccgcgatgggccccggggacttccgccgctgcagagagagaatttcccaggggctccagggactcccaggtagagcggagctttggttcccacctcgtcccgcgtgcgacttcttcggggacggcaggagcacggacatccaggaggaggccctcgccgccagcccgctgctggaggacctcagacgacggctgacgcgcgccttccagtgggcggtgcagcgcgcgatctcgaggcgcgtgcaggaggcggcggcggcggcggcggcgcgggaggagcagagctggacgggcgttgaggccaccctggccaggctgcgggcggagctggtgagagagcgggctaggcggacggctcccagggctccctctcccgggtcctctcctccagctgcagagccgctggccgcgtagcccacccgacgccttggggggcccctcaggtctggacacggcgttgacgcccccgcctccccagcatcgttgggaaggaaaagggccct

SEQ ID NO: 233904 - DNA, 882 bp, Homo sapiens
  chr8:120220353-120221235
  hyper
agaaggtaaaaatagcgatcaggggtatgggggtgcgcatggagacgcccgcggagcgctggcgctggccagcggagcaggaggtgaggtcggcggagctgggaggaccgcgcctggcggctgcaatagccgcacctgtgcacgtgatcgcgagcggctcgggcgccagggcggagcggcgctcacctgggcccacgtgacggggcggggctcgaggagccccacggccacgcctcctcccgcgcggcgcgcccggagcccgcggagctgagcggcggcggcggcggcggcaggagcccgggaggcggaggcgggaggcggcggcggcgcgcggagacgcagcagcggcagcggcagcatgtcggccggcggagcgtcagtcccgccgcccccgaaccccgccgtgtccttcccgccgccccggggtcaccctgcccgccggccccgacatcctgcggacctactcgggcgccttcgtctgcctggagattgtaagtggggccgccggagcgagggtcgcgcggggagcgaggacaggcggcggcatccttgtcccccgggctgtcttcctctgcgtccgcccccggcctccttcccttcgacgtggctttgtcctgcgctccctcccggggtcctctcggtgccccgcgccgccgcccgggccctccctcctagcacctgttacgcgggcacctgctcccccgcgggcgacggaaattgcctggggagggcgagtaggcggcccggcagggccgaacattggggacgtggaggaaagaaaggtgttggggctcagaggcgcctttagaaacccagggcatggccaggggccgcgcttggccggagcgagctcctggctctcggcctcgcctgttgctaacc

SEQ ID NO: 233905 - DNA, 796 bp, Homo sapiens
  chr8:120428388-120429184
  hyper
caggaggaaacgggcgtttccttcccacgcgctcgagcgagccctgggtcctggcctcggaactccacccagcccctccccaccctctgggaaaagccagtcgccacacacaggcacacgcaggccccggcgccgcgccctaaggagagcagcacccacagccaattgccatggcaaccccggggttcgttccacttccccacccagccgatctcccccctcctccctgcactgcagccaaccggcttgtgcgcgtcccaggagcgcgctataaaacctgtgctgggcgtgatcggcaagcaccggaccagggggaaggcgagcagtgccaatctacagcgaagaaagtctcgtttggtaaaagcgagaggggaaagcctgagcatgcagagtgtgcagagcacgagcttttgtctccgaaagcagtgcctttgcctgaccttcctgcttctccatctcctgggacaggtaagtggcacacccttaagatgcccccaagttactttgcccgccttggtggcccccatttggtcaccgggctcactgcgtcttctgtcccagctgagtggtttctccttgtctcgcctgccttcaggtcgctgcgactcagcgctgccctccccagtgcccgggccggtgccctgcgacgccgccgacctgcgcccccggggtgcgcgcggtgctggacggctgctcatgctgtctggtgtgtgcccgccagcgtggcgagagctgctcagatctggagccatgcgacgagagcagtggcctctactgtgatcgcagcgcggacccc

SEQ ID NO: 233906 - DNA, 111 bp, Homo sapiens
  chr8:120651302-120651413
  hyper
gtttgttacattgccgtggcccataacagtgcatgttcattttcctttcctcacaaaaacatggtttgtcaaaaagaaaccaaatgcatttcatccgataaaaatgaaaac

SEQ ID NO: 233907 - DNA, 175 bp, Homo sapiens
  chr8:120844818-120844993
  hyper
gagcttggcttcccggcttcctagggggatacggggcattactagtctttggcacctcacactctccactcccctgcggtccccaagtcacgtctcgcagctggccggtgcccaggtgagcgacctgacgggtcgctgcccgcctcaacctcgctccttcgactagctcctagaa

SEQ ID NO: 233908 - DNA, 365 bp, Homo sapiens
  chr8:120885801-120886166
  hyper
agctcagtagcagcgccccgcccagatgtttatattttcctccatcggccccgccccccgaccatgaggggctctagccacgcccccaagctcaagtttctggggccggactagcccagcgcgtctgcctacccatagggattccctctccagccaatccagtcagagcagcggagctgccccgaacaaagatggcgcgggaagcgtctgtgagggcagactgatccgagcacccaaaccctcggcggacagcggagccagtggtagccgcacggccctaaaaccatggaggagggcggcagcactggcagtgctggcagtgacagcagcaccagcgggagtggcggggcgcagcaaagggagct

SEQ ID NO: 233909 - DNA, 1304 bp, Homo sapiens
  chr8:121136688-121137992
  hyper
aaccagaatctctgcgggtggggaatcagcaggttatgaggtacaaccacacgaaattgcctacattcgtctttttgtaacctacagaaatgtccatttcgatacctccagctgattcccctgcaccttaaagtttgagcatcgctgctttggcgttttagagcccttggacttgttcacaagaggaagagggagaagaggaggctcgaagggggcctttatagtggatacctgtttcactcggagctcagggtctttgacgcgggaaggcaaagtctgtcttttggaaatggggaagtgggcacacagcacctgagaacaggagggctcgagacctcccaaagagagcagggggcctggtttgggagcttgcagtagcttctgccccagtggaagggaaagagcctggctcgctctcggcgcgccacatccggctgccgcgcgcacctggggggaccgccaggttcggggtaggcgagcgcgtgagcggcacggggctggcttctccacatctccggtagggcggggatgggggagaggaggaggagagaaagtgggggcgttatgggcttaggcctgcctcccacctccccacctcccgcctccgcggccaccctccgctctataattggctgccggcgggccttcctttcctcttatctgatcctgggctcccagctggagaggcggaggcagctccagggggctggaagtggaagcgcagcggcagaaggagagggagagagaaagagagagaggctaattaaaaaaggatactccgagggaagagagcaagggcggtgcgccgccaaggaccaactagcggcggagcttcgatcttgcctaggcgcggagagctcccaacctgggctggaaccttgcccagcacaggtcagttcgtctttctctgctcttctttggctcggcttcgaagtccattcatgagcaaggaaaagtggaggcagcgagccacctgcagacgcaatgcagttccatggactttcttttcacgcgcgcgcccagaatggactggggacctttgggacgggatgggacgggtacacctggatgccttttcgcggggttcacggtgtagggagattagaggcattgggtgatgagagcgcagggatagtggaaataccatgtgctgctccgggaagcttttcccagtgtttgagtgacgtgagcgtgtggcgggaagaagctgcgtttggctgcgggacagtggcggctccagcatttccatatagaaggggcttaacaaaggcggtaatttgggtgggatccgtcttgaagggctg

SEQ ID NO: 233910 - DNA, 117 bp, Homo sapiens
  chr8:121457554-121457671
  hyper
cccaaaaatatctcgcttggtggaaaaactgcggaaaaccgacggaggacataatttccagccgacctaaacgaagggaaccggaaatgcgtcatagcgcgcgtctgtttggatgtg

SEQ ID NO: 233911 - DNA, 40 bp, Homo sapiens
  chr8:121823346-121823386
  hyper
tgctgccaccccctgcgccacccttcccccccccccaaca

SEQ ID NO: 233912 - DNA, 123 bp, Homo sapiens
  chr8:121823626-121823749
  hyper
cttgggtctggtccgccgccagccccttgaagatcttgctgatgaggatgggcatcttgttctccttgccccccttgatgctgatccccagcccgcccagctcctgcttcagcaccttcacgc

SEQ ID NO: 233913 - DNA, 128 bp, Homo sapiens
  chr8:121824316-121824444
  hyper
aagaaggagagaccgagacaggggaggggaaaaaagccagcagccagttgcaaaaccccaaagcaaggggagccgcggagcagctcagcgctggagagagtccgtgggaggaggcacgctggcggtga

SEQ ID NO: 233914 - DNA, 938 bp, Homo sapiens
  chr8:122651465-122652403
  hyper
ggaagcccttggtggccaatcggggcttccctatctattgcgtcacacctcccccgtgtgtgacgtcaaaggcaatcccagcccagacacgtgggttggagcagcgtcgcgtttctgggcaattgctcctgagacccaacaggcagcaacggtcccaagggtgagggagtgggcagggagaggctgatggggcttctacacgttccctcccgtagctgggctgctgcagctcgttcgccccagaggcgcgcggtgtccttgagtccaagtattcagcgcggacgtttgggggacggagggagaggcgctaggggaactggcacctaagactgtgtaataggacacaggtcttgcaagtcctcctccccaggcaccgcccctgtgctcccagcgcctctttgcagctttaattatcctttcagcgccgttcccccgcggctgcgtttccgtggtcagaggaaaaaggctctttcgcctcccggttctcaccctcatacagaccctcctttcagacccgccctcctgttcacagggacccatttcggagccctggctcacgctgggcgggaactgccgtgacgaattccccccaaggtgttgattatccatcccaacccagcctctggcttccctcccacctccaccccagctcccacaggcccctcgccccgttcatcggctgggcgctcgagacggcgcccccagatctcccaccgggcagtgtccccagctgcagctgaggagagaagcgccggcgtgcgcggtgccacgtcggaattggctctggggacgccgcagctgccgaagcgcagcgcgcggtccccacgcacgccctgcctccgggcggccggcgggctggcccggcgaggagaggagggatgcgcgccctcctcccgctcctatctgcgggtgccaccgcctgcgtcagggacccctgg

SEQ ID NO: 233915 - DNA, 49 bp, Homo sapiens
  chr8:122653605-122653654
  hyper
aattctttccagacgtcttgacttctccttccccgccgttgttgccctt

SEQ ID NO: 233916 - DNA, 188 bp, Homo sapiens
  chr8:123792666-123792854
  hyper
cctcgtccccgcccgggagctgcccaagagtccacaggccagcccagggggaaacaaggtacatctgggcaggaatgcgcggcgcagacaggttgccgcctgagatcccgaagtgtacccagatcccgaattccttagagctctttagccgagcactgtggcaggagcgcggcgcccggaatacaagt

SEQ ID NO: 233917 - DNA, 44 bp, Homo sapiens
  chr8:123793463-123793507
  hyper
cccttcggtcccacggtccgccactccacgtggtcaagatcaac

SEQ ID NO: 233918 - DNA, 178 bp, Homo sapiens
  chr8:124054654-124054832
  hyper
gagccaggtagagcgactacacgactggtgggaaaacagtggttgcctggatcaacggcaaacgctccggccagtggcgaggccaaatgccattcacctagttctcagagttttaatgcggctgggtccacctggagggtatttaaaggggacgaaggcaaacgaagtgtctagttcc

SEQ ID NO: 233919 - DNA, 108 bp, Homo sapiens
  chr8:124170646-124170754
  hyper
tgggcaaggccaggcgtggggacccctggggagagtgtgtggacgcccgcgggtctgggtgcctcccagggaaaggacgagtgatggacagaccgacggaaggacagg

SEQ ID NO: 233920 - DNA, 619 bp, Homo sapiens
  chr8:124172789-124173408
  hyper
gcccactctcccggcgacctcccggctcccagacctggctgagcccggcggccgccaggggacgctgtgcccaggggttgccgccgctgccccgcaggtttcggctttttccaaattagcctagggacacaccgcgccactagccggtacagggtaccaggcccgatccccacgccaaggtggccccatcacccagacctgcccagggaagggaggtagaacaggagttgggggtgggggcggtgcagatatttcgctccgtaaagtgtctccagcttttaaagatgtatgtccccaattttccaagaccttctgagccttcgagtggaatgaaactcgaacggcttcccagctgcggcgatgaggtcccgctcctgcagaatcccggcaggagcggagactcgggaggggaccgctggctgcaggcgccctgctggagtccggaacgagggtggtcagggtcgcctccccacggggtcgcagatgagggagtggggccgcgcagggaggctcctgcaggccgtgacccccaggcctggcccgtagagagtgactgatggcgaggacccgctggggacccgagggcctcagcctgcgcctgcgccggggctccccgacc

SEQ ID NO: 233921 - DNA, 86 bp, Homo sapiens
  chr8:124253464-124253550
  hyper
ctcacctgcggctcgcagagcttggcgcagtaggacgcgggcggtcctgaccgccgctccggcctctcctcgaacaccgagtcctc

SEQ ID NO: 233922 - DNA, 199 bp, Homo sapiens; identical to SEQ ID NO: 201594
  chr8:124408729-124408928
  hyper

SEQ ID NO: 233923 - DNA, 107 bp, Homo sapiens
  chr8:124778491-124778598
  hyper
gcctcagtcagggacgtaaaggaaggacattattgctaaacgaaaaggtgaggtgctgtaatgagtgtcacatgtggagtcagtctagtgagcgactgtttccagct

SEQ ID NO: 233924 - DNA, 158 bp, Homo sapiens
  chr8:125385116-125385274
  hyper
caccctgtgctggcgttaaacctacagatcggaatagggaaaacgagctctggacccctcgcccgccagggtagtacagctgccacccggcccccaacctggggccacatctggagcttgttctgaaaggtgccccggcgtgcggccccgctctggac

SEQ ID NO: 233925 - DNA, 227 bp, Homo sapiens
  chr8:125551279-125551506
  hyper
cgactcatgactgcgcatggaggacctccccagcggaagcggaagtggccgccggcaactccgcccttccggctggccccgctcagtcacccgcagcaggcgtgcagtttcccggctctccgcgcggccggggaaggtcagcgccgtaatggcgttcttggcgtcgggaccctacctgacccatcagcaaaaggtgttgcggctttataagcgggcgctacgccacc

SEQ ID NO: 233926 - DNA, 75 bp, Homo sapiens; identical to SEQ ID NO: 201595
  chr8:126010222-126010297
  hyper

SEQ ID NO: 233927 - DNA, 655 bp, Homo sapiens
  chr8:126010860-126011515
  hyper
cgggagccgccgccgccatctgagggaggtaccctggaaaccaccttttatcggtggggaagtgcagtcgcggtgggcggctctgggggccagcgaaacgggaggcctctaaatctttaggttggggctgcattgccctggagccgcactcttgagtccgaggccatcttttgttggagaaggcgtcggcgttggcgttttcccgaggttgggctgtacagtgtctccgtccgcggaaaaagaagcctctgaacccgcgccggcccgcagcccccgtgccttccggccgctgctcgccgtcgccagaggctaggccacgtttcccccagtgccgaggtgtttctgtgaccctccctccactcccattcccttctgaaagggcacctgctcttggtgagaaaagaaattatagcacgaagagccagtatcagaagagtatccatcacccgcagcaaccgctcagggaacaccatcaaaaaagaaaaaaagggaatatctggatttcctgggcgaggaggagcgagtctgctcgggagctgttccagcaggcgatttttaaatactgctttctacgccctatacaacttggcttcacatacttttacactaactttatatgatttttaaaaactggtctgatcggacttctcgtcct

SEQ ID NO: 233928 - DNA, 139 bp, Homo sapiens
  chr8:126400837-126400976
  hyper
cagtctttcccaaacgaatagtggacagaacaaggctttgggggctggagtcccagactggagctccgcccgctcccctccccccaccccttccccgagccctgagaccgtgagactatgagaacgtaggattccatct

SEQ ID NO: 233929 - DNA, 67 bp, Homo sapiens
  chr8:126442420-126442487
  hyper
gctcgctgggcggcggggccggagtcgtcgcagccacctcattgcacaacccggcttcccaactgtt

SEQ ID NO: 233930 - DNA, 525 bp, Homo sapiens
  chr8:127569427-127569952
  hyper
gggcggcggcggcccgtccccaccgtcgggcaagccgccgccatctggcccctgaggcggcggctgcggctccacgtcctcatcgtcattggagaaaatgtaggagaccccaatgcggggcccgtcgtcccggtccacgccagtcgggtcggccgtgggaacttccttgtaacttaggtgggtcaatttctccacctggttgcccatcacgctgcggacacacgttcacaccgccgcaaggggagaaagcgaaaccaactccagggtcatttgcacaggtccccggacaggggctgaggctacctgttgggagaggaaggcaagaaagccatgcaggagcccctccgtgaaaagggcgttttgttccgaaaaagaatcggtgggggctcagcacctggagccattttagggggaagtctcgggtgtagcgagctttccctcgtttctccacctgtaaggtcacggtcacaggagactgggcaactcctgttctccctgtccccagcccttcgcctggccctggca

SEQ ID NO: 233931 - DNA, 521 bp, Homo sapiens
  chr8:127570132-127570653
  hyper
tccccagaggaacaagcgaggatctcagagcgcgacctggacaggtgagtcaccctacctggctcacctgcagcgctacctcctcccggctcgcccgcccttcccccgcgcccgccctcaggctcgggttacctgcacaaactcacccgcggagaggtgaaggccgtggggcctggggaagggctccctgccgcgccccgagacttctagggcgagtttgaaggtgtaggctcggcagtccctcctctcccggcgcgggcggcagcgaggctgggcagagggcagcgcagcgggcagactaggggcatgtctttcccccgcggctgcgtagcgccccgatacttgaaggcggggggcaatccctgttcacaccgcgcttcctcccgccagctggggctgctgcccctcctcagccagctctcgggggaggtggggcgcgaggaggagaggacggcagcctcgcagcctggcggcaacagctcccgcttgggccgggcgagcaacaagcaccggagctggag

SEQ ID NO: 233932 - DNA, 582 bp, Homo sapiens
  chr8:128747187-128747769
  hyper
gactcccccggctcggtccacaagctctccacttgccccttttaggaagtccggtcccgcggttcgggtaccccctgcccctcccatattctcccgtctagcacctttgatttctcccaaacccggcagcccgagactgttgcaaaccggcgccacagggcgcaaaggggatttgtctcttctgaaacctggctgagaaattgggaactccgtgtgggaggcgtgggggtgggacggtggggtacagactggcagagagcaggcaacctccctctcgccctagcccagctctggaacaggcagacacatctcagggctaaacagacgcctcccgcacggggccccacggaagcctgagcaggcggggcaggaggggcggtatctgctgctttggcagcaaattgggggactcagtctgggtggaaggtatccaatccagatagctgtgcatacataatgcataatacatgactccccccaacaaatgcaatgggagtttattcataacgcgctctccaagtatacgtggcaatgcgttgctgggttattttaatcattctaggcatcgttttcctccttatg

SEQ ID NO: 233933 - DNA, 168 bp, Homo sapiens
  chr8:128747994-128748162
  hyper
caggacaaggatgcggtttgtcaaacagtactgctacggaggagcagcagagaaagggagagggtttgagagggagcaaaagaaaatggtaggcgcgcgtagttaattcatgcggctctcttactctgtttacatcctagagctagagtgctcggctgcccggctgag

SEQ ID NO: 233934 - DNA, 126 bp, Homo sapiens
  chr8:128749400-128749526
  hyper
cctgtccccgcggcgattccaacccgccctgatccttttaagaagttggcatttggctttttaaaaagcaataatacaatttaaaacctgggtctctagaggtgttaggacgtggtgttgggtagg

SEQ ID NO: 233935 - DNA, 306 bp, Homo sapiens
  chr8:128806647-128806953
  hyper
acctggggaaggccgggagcgccgggaccgaggacgcacgcggcgggccgggccgcgcgcgcctcccccctcccccgaggcccgagcgcgagccgccgtgacgtcacgggcaacccgccagccccgcgctcctccgggcagagcgcgtgtggcggccgagcacatgggcccgcgggccgggcgggctcggggcggccgggacgaggaggggcgacgacgagctgcgagcaaagatgtgccccgggacccccggcaccttccagtggatttccttgcggaaaggatgttggcggtccctgtgacctg

SEQ ID NO: 233936 - DNA, 52 bp, Homo sapiens
  chr8:131455599-131455651
  hyper
ccgtcccggcgcccttcttcgcgcgagagactgggcagggggcgcccgcgac

SEQ ID NO: 233937 - DNA, 468 bp, Homo sapiens
  chr8:131455831-131456299
  hyper
cccagcgcacagtgctcgcccgcggcagcggccaggccaggcgaggcgcgggagccgagcgcggcgcaggaaggggcgggcgaccatgtgccgagggggaggaggccgcggcgacgcgagcggctcgcacgatcccgctcggcggcggagggcgcgggtttcaggaaatccaaacacttcgacaggaaatcggaatcctgactaagcattcccggccccgagccgctccgcgccgggggctcccgcctcgcttaacccttggcccgccggcagccacgaggggggcgtgggaggggccccagacctcggccggggtcgggcgtccttcgccttccgccccatgccccggccggccggcctcctccccgcctgaggtggaaggggtgggatttatccacagaaaaccctggacgcggaaggtgcctttctaaggccgggacagcggcaaaggacgtgcctgtcttccat

SEQ ID NO: 233938 - DNA, 1976 bp, Homo sapiens
  chr8:132052829-132054805
  hyper
cttgggtacgcagcggcagtggctatttgtcctcaggagccgcagcgctgtgagccacgcagccccttcctgggctcaggctccttggttgattctaggctcagcgttttggcgcagcctttgctctccaagagacgcctaagcgcctgggcgccgtgcttctgctgcgcgtcgggcgggtcctggctgctgcactgggctttggacgcccactgctccgcggctgcagggggcctggccggcggtgaccggcggcagcgatgggtgcgaagttagcagatgtggctggaatcatcgcccttcggagaactccattgcgccgggatggggagcaggggcggagctgggggcgggggcaaagaaggaggaggagggggtcacggtgaggtggcggggcgccccgcgacagggttggagaggtggtagcctcggcgctaacaattcaccaaatagttaatttggaggaaggggtatgctgaggctccctcctaggctctttcctagttcgggagcaaggactgacagcgcagcgctggctctggccagaagcatccctcccggagggggtgtggggactctcgctccagggtcccagcctgagctataagacgaggtcaacgctttcagctgtgctttcgaagggtcgcagcacacagttctcatcccctttatttcgttctttggagtccatttggctcggagctaggaggatcaggagaggcgggggaaggaaaaagtggtgagggctccaaagccaagagctccgagaacgaagagaagccgccggtgcggatatctgaggctgagaaccgaagcttggcggatgaggcgaaggtttggaggagaagggaggcccgaggccgcgtggaagtcgacagagacgcctctggatctagggaagcgccgccgcgtgccaccctggagctctgaaacgcaccgcgggcgccaggcgactgggagaaatttggagacctgtcagagtggtcagacacccgcggtgacttaaacccgcccccgcgccaagccacgcccccggaaccgggccgggggtggcggagggacctgccatccagatctggccaggacgccccaggtcttgtaggcagaggcacgcgcgggccggcgtgggagaggaccactgagggctagggccggcgggcgcccccggccttccctgggcgcactgcgatccagcgttccagctggccgcgccagccggttcctccgctgttcttttttaggcattggctcttgtcctctgcaggtgcggagccaggactcgtaggccgctttgcgcacggactcggagagcccagcgcgacggaatacagggtttccttttcgcccttcctacccgtgcgtcttttggcaaagccaactttcgggctaaacgcaaaatcccccaagaggccgcaatcatagaggcagtcagtttcctacaggagcctctttactacctcgatccgaagggggtggagggtacgggacatcaaaatggggacgtcccctgcctgcctcgcacactaagtttctccgcttacaatagggtcgaggaggcggacgtggagaaaggcatgtccaggggccccgcctcgccctagcccaggtttcccgcccgcccagactcagccgagcgctagcggacaaagcctgcggcggagcttgcggcggaccaagtcgctgagcggtgggagcttagtgccggtgctaatgacagatgagccgcgtcccggggtgcagggtctgcagggcaaacgcggccgccgcagtcccgcagccggatgcaggtggaggagcggtggtggtcaccacctcctccaccaagactgcggctgcagccagtggagcccgggcccagagcacagtcagctgatggccaatgacgtcaggccctgggcgcgttcgcggctccccgtggcgtcccatgaaagcccaaatgaccgccttgccttgccgccccctcagtccctcctgag

SEQ ID NO: 233939 - DNA, 121 bp, Homo sapiens; identical to SEQ ID NO: 201600
  chr8:132917187-132917308
  hyper

SEQ ID NO: 233940 - DNA, 139 bp, Homo sapiens
  chr8:133491909-133492048
  hyper
cactatgggtggtgcgcacccctcccatccccaactaaactcagtggcgatcccaacagaagggatccacccgaaacagaaacacagagctcacgggaggacccgctttatcctcttcaaccctcacattaattggaaa

SEQ ID NO: 233941 - DNA, 81 bp, Homo sapiens
  chr8:133492948-133493029
  hyper
cctggggggcaggggaggccaggcagggggtcagggggtcacatcccgcgcgggtcagccgcaggaccccgagggtcgcgg

SEQ ID NO: 233942 - DNA, 581 bp, Homo sapiens
  chr8:133493209-133493790
  hyper
cccgccagccacacgcgccgccgccgccgcctcctccctcctccgcgctcccacccgcgcccctccccgcccgttccagcctcagcctgtcagcagcagcagcagcgagcgcgccgcgggccgagagcacgccgcgtccctccctccctccttccccggggtggggccccattgtcccgccccgtcgcggcgggaggcccgggcggcggcgccccgcctcttcccgccgacccccaccgctgattgtctggggacccaggatcgcctgggctaccgccgcccccgttgcaaccaggcagtgcgccaggcggctgcagagcccggctcctggagctcccgtgggcgttggggcttcccctggatggggcgtgacggcgggcagttgggggaagaagaggaagggaggagggactggggggttgtcgcccaccaaacattggctctgtggttgcagctttgtgaatttccctcaccccctacccctgctcctcggcttcagaggtaaaagccaagttgtcgggttggtcaaggccgggcgcaccgcgaacgcacctgctctgtggtagcgaagctcgtgactc

SEQ ID NO: 233943 - DNA, 606 bp, Homo sapiens
  chr8:133687388-133687994
  hyper
ccacttggccggaacgtggtgtgtctggcgccaaaacccctgcacgttccccgacccctttcctggagtccagtgcctttctgcctcttcctccccttcccacggccccgcccattttacagattaggaacctgagctggaaaaggccaggctgtccggccagtctgcagaggacctggtgcagccggggctgcggtgcggagggccgggtggggttagggtccgcccaggcgcgggggaaccgacagcgcagggcgggagcgggcggcgaggatcccacgagacccgggactacttccacaaggggaacgatcgaggacggaaggtggaggggggcttactccagcccatggcgcctctccagttcgctgaccccgcaagccggacccggacctcgaatgacgcttttcacccttcacccctgctcctcagcgcgtccccgtcggaattcaggagccatggcaacggggactctacggcggccgcgcgggaccaaaacaagccgcgtttcctgagctccgcggagcaagcagaggagaccgcagtgaaggggctcagcagacaggggttccccaacccaaacccagtcttcgtcctcgtcgcact

SEQ ID NO: 233944 - DNA, 224 bp, Homo sapiens
  chr8:134308718-134308942
  hyper
ctccccccacacacacgcttacactcacacatgcacaccgccctgtgtgtgctacgggactgaagcgccaccagcctctcggatccacacccgttcccgacccagtctgcaagccagacacacccacgcccccctctccagcctccttgccagcgccactcacctctaccaacccctcatctacacactcgcgcgcaatctctccgttcccagacacagacaca

SEQ ID NO: 233945 - DNA, 144 bp, Homo sapiens; identical to SEQ ID NO: 201607
  chr8:134465706-134465850
  hyper

SEQ ID NO: 233946 - DNA, 1437 bp, Homo sapiens
  chr8:134581732-134583169
  hyper
tatagaaactgagacgccgagaggttaagtctggcgaccaaagagagacagagacagagagacgggagactagaagaggccccacgctgtacccagatattggcagaggctgaggggcacggagtggtgaactctagtcagtcatttcagccaaccatgggatttcagaaaacagccggcaggggtcctaatgtttggggcaggaaggggaggtgcgggaaggcactgagggacccccgcactgggcgccccttccccaccgcagagacaagcggcagtttccacagcagccggcagggggcagtgcaccttgccttttcgaagcctctgggcgcttgggcagcgcggggtaaagaaaatcaggaggctccgcccgcagcttctacgaacaggccaggagtagagcccccgcacgtagtaggtgctccaggcacgtctagaagcctaaagggcttggtcgatacatttgaactccattttagagactggaagggaagaagggggcgtccgggcccctgccagcaccttccaccttggggccttgtcaatgaacactgcgttagcacctacgacgtgccaggcgccctggcgactattggaaaacccggctcccctctcaccccgttttcctcgttggcgagtcggcctcgcctcctcctcccgtctcttcctctcaccacacacacccagccgcagagcgggggtgggcgctcgctgtctccctggagaaccagctcgtcgcaaacttgcggggcttggggacccgcgagggggagaagtcgggagaggccaggggtgcccggaaacaatcacgagaaagccgggcgaatgcctgatgcagggacgcggcgagccagtcactgccctcagggtcacggctgactccctctgcgggactcgcccagcccgcgagacgcagtgacctgcccaacccccacccccttgcgcgcttctgggtgcgcacgtgtcccctcgcccaacacaccaccgagccccgcgcatggtacggccgccgaggaccctagcgtaggagggaggagcgagtcagggctccagctgacgagcagagccagacgatccccacacgcttcctgggagacccggctgcaaggccaggctaatgcgcgctccgacgtctctgtgccaagccggggcgcaagctcaacccccatctcaagttcagccgcgcttcctcccgcaaggtcacgcttaaacactcgcgcagagaaaggaggagcggaaagttgcgccaccgtcccgattccaaactaactgtaccctcaccagagcgcctcgccccagggtcaccgctgtccgtccccgtgcgctcccagaaggggtggccctgcccccacgcaggtcacacacacgagagacacaggcaagttgctaacttttgtcagattatttcttgggagctgcgacgcctcacggggt

SEQ ID NO: 233947 - DNA, 568 bp, Homo sapiens
  chr8:134583649-134584217
  hyper
ctaagcccgaacctccaccccgaccttcttcctctcccaaagccctgggtggtcgccgctgccaaggaaggggtctcccttcgaatgtcttccactagaatcccggggtcttcagtcccagctccactgtcacaccctcctagtcccctccccaccccttcagttcccgggtccagacaatcaaccttccactccgagaatccacaggaaactgcccgagccccaactcaggcggacgcagcccccgcgcaccccgagcagggttcgcctccgcgcgcgcactcaccacggctggagacacgctggagtttccgggatttgggcatgaaggggttcggaggagaatacaggggtgtgggtgtcccggacacttgcccccttcccagctcacatcgcctcttccttctctctccgctcttcttcctcctcctcctccctccggtctagggctctttgtctttgcaaagtgtcgaaactgtctggcatagtgggctccgccggcggaggctggagccgaggaagcgaggaggcgggatgagggtgggagagggctcgggaacaccttccc

SEQ ID NO: 233948 - DNA, 641 bp, Homo sapiens
  chr8:134584529-134585170
  hyper
ggggacctgatcggcgccccgagaggagctccccgctctctggacgcggccctcaagctggcggggctaaggaagagcgcccgggaggcccgggagccactggggtccgtttcagcaggaagacgggcacgcaccgagaggatggcagtgcccagaagaactcgagtcgggggcacggtggggagaaggggccgatcccctgctggcgaccgggcagagccacccacttcctctaagggcgcgggactcgaggtgggatttagggagggggaagggaggagcgtgggctggacgactcttgcggccagaaccgcgttcagagccacagagccgggcactgcggccggccctggtcccggccccggccctggcccagcccttgccctggctcgcctgccgccgctttttccttccagatgcggaggctgcggctggagcttggggtttgcggattaggcttgcagttattcagccctccctcttttacagggaagcgggggcggtggagacttcttttgctgaaaggcagagtgcagcgctttgatgctaaatgcagtacacaagtcatgtaaatctggttttacggttcttaaccccttactgagactacctctttcgcaacttttcggaggaatgttaga

SEQ ID NO: 233949 - DNA, 64 bp, Homo sapiens
  chr8:135732840-135732904
  hyper
gccacagaagcaaacggtgccaaggaggacgatccagggcgggcctggccgcaagagggcacct

SEQ ID NO: 233950 - DNA, 37 bp, Homo sapiens
  chr8:135844538-135844575
  hyper
gtctgagggagagcggctgtgcgcgcgcgtgtacatg

SEQ ID NO: 233951 - DNA, 417 bp, Homo sapiens
  chr8:136468961-136469378
  hyper
cctctccccaggagcggatgagctcagacgcggctcactcagctgtgtccaggcacagccggtttatgacctaagagaatgacaacccaggagcaagtcgggatgacaaagacgcccagaagggcacgcgcttttatgtaaccgacctctgagctggcggatctcaggaggttggcgctctgagctcaggcgcggagaaaggacggcgcccctgccttactctcttataagtacgaggggacagcaacgcgacataacttagagaagtccaggaagctttagagagcagggcggtcccgctgctattcctcagagcgcgactggggcgaactggggcgcccttcccagctccagctcggcccttgtcccctcttcccaggatcactcgctgggtgaccttgggcgagccacttgact

SEQ ID NO: 233952 - DNA, 135 bp, Homo sapiens
  chr8:136470398-136470533
  hyper
cttggaaggagaaggctggggcgcatgggtgagacttgaaggaaatctttggggactcgggcacacccaggggaaacttctgggtgggggacagcgaccatctgggggcttcgttgggaacgaggttgaattatg

SEQ ID NO: 233953 - DNA, 241 bp, Homo sapiens
  chr8:139508784-139509025
  hyper
accacattttgcggcggaatcgctgttccgtgacagaaagccatccaactggcaaccacgcttgcagaagcgtcactaccaccgacgagagagttttgcagctgccgaccccgaagcgctctcacctacctgtctccactgcagggctcccctctctctcccccgggggccgcgctcctgggtccctctctctcctctttcgccgtctctggccgccaacagttgcggcggcggcggcggc

SEQ ID NO: 233954 - DNA, 218 bp, Homo sapiens
  chr8:140643195-140643413
  hyper
atggtccgctaggacggagagcctgtgcctcaggggctccgctccctgcaagaggggctctgcgcagcgccggccaccggagaggcaacggcgccctctggcgggcactcgggcgactgcagggacacggccccgggtgcggggtcggccgcccacgttttccggtgactgcgtccagaacgcaggaatcatctgggaaaagtcgctaatctttcttt

SEQ ID NO: 233955 - DNA, 116 bp, Homo sapiens
  chr8:140716664-140716780
  hyper
gataaacgcggcttcttgggtccttctagccccgctccccaagagcgcaagcagccctggcgggtggagagtttgagggactcggggttggaggaggaaaacgggattcagccaga

SEQ ID NO: 233956 - DNA, 96 bp, Homo sapiens
  chr8:140717080-140717176
  hyper
tttggagtcaggacagcggggaaagacatcgcaatcccccgacccagtaacctctctgttgctttactgaaggaaaaaaaaaaaatacacacacac

SEQ ID NO: 233957 - DNA, 151 bp, Homo sapiens
  chr8:140717236-140717387
  hyper
aatcactctttgatatatataatcactctttggttccccacagctgggcgcaaggtgcgccgtggatgcagccctgagccacgcgatagccccctcgagaccacctggggtaggaacacgaggctcgggctggggcgcacctattccctgc

SEQ ID NO: 233958 - DNA, 145 bp, Homo sapiens
  chr8:141647528-141647673
  hyper
tcagctcctttgagcgctgtgttggggaactttgttgcaaggatttcgttccagaaggcaagataatgtctctgagggcttcattgtgtcacttctctttggatggcggacaccgtggccctctgctggcggaggggtgccattg

SEQ ID NO: 233959 - DNA, 61 bp, Homo sapiens
  chr8:142010863-142010924
  hyper
aacccccgacctcctcgagctcccggcctccccacgtccctcagcctcccagtcttcccca

SEQ ID NO: 233960 - DNA, 63 bp, Homo sapiens
  chr8:142012004-142012067
  hyper
agatgaaaaatcatgaaagggacttagaagtccactggaggtagacaggttacctaaatgaac

SEQ ID NO: 233961 - DNA, 54 bp, Homo sapiens
  chr8:142012247-142012301
  hyper
aaaggcgaggttggagggattgaaaaatgcagacggctgcgtggggcttgctta

SEQ ID NO: 233962 - DNA, 124 bp, Homo sapiens
  chr8:142138534-142138658
  hyper
gccgggcacgccactccaggccccgcccagaacctccccgcccagtcaagccccgcccccaaactctgtctccccgcggtatcctctggggctctccaggccccgcctcggctcgggccccgcc

SEQ ID NO: 233963 - DNA, 123 bp, Homo sapiens
  chr8:142139078-142139201
  hyper
tcaggcaggtgccctggagcagcgccctgctcccctcccctcttctctcctctccccgcccggggcccttggtgtgagacatgtcttttgagagctgcgaacttggtccgccggccgggaatc

SEQ ID NO: 233964 - DNA, 299 bp, Homo sapiens
  chr8:142139561-142139860
  hyper
agtgacaacttcatctcccttctgctgggaaagcggcagttttggaaattctcgttttcctttttcttccccagcttttcttaattctgtaacgctggctttccctggaatccatctgtgtctctggtttcctcctggtccgcctgtctgtgacaccgtgactgggtcatgttacctagagatcccggcgtcactggccagccgtctgcacaggtccgttcatctctttgcagacaacagcatagaaaggcagagaggcttctgagtatttaaatgacgctgggctatccagggaaaat

SEQ ID NO: 233965 - DNA, 57 bp, Homo sapiens
  chr8:142140082-142140139
  hyper
ctgtctcctcgcaacgtcatcgattgatttgtctccctacctcgaatttgccagatg

SEQ ID NO: 233966 - DNA, 75 bp, Homo sapiens
  chr8:142317707-142317782
  hyper
gcgagtggtgtatcgctggttgaattctcataagttagagatagcaggcaggggttagaaggacaagacagggtc

SEQ ID NO: 233967 - DNA, 49 bp, Homo sapiens
  chr8:142318142-142318191
  hyper
gcgaggtgcagggggcggcggggcaggcggctgcgggcggcaggccact

SEQ ID NO: 233968 - DNA, 96 bp, Homo sapiens
  chr8:142425567-142425663
  hyper
ggaccagggtgcccgccgcagccctgggaccctgcggccccggtccctattcgaggccccagccggagcgttccgggatccttcgggggagtgccc

SEQ ID NO: 233969 - DNA, 87 bp, Homo sapiens
  chr8:142528907-142528994
  hyper
gacggtgggacggtggaccaggaacccaactgggacaccgggccaggccgggcagcggtgggcctgggaagccgcatgggtccgaag

SEQ ID NO: 233970 - DNA, 97 bp, Homo sapiens
  chr8:143483645-143483742
  hyper
cagtgttccctacccgcgctgccccacacagccgccaccagacacgtgtggctactgagtgtcggacatgtgaccactggcacggaggacctgaatc

SEQ ID NO: 233971 - DNA, 409 bp, Homo sapiens
  chr8:143530666-143531075
  hyper
tcctaggtgtgcgcgcgtgtgtgcattttatccgcccccccttatctcgctcccctccccccacacccccgccccccgctagcgctccccctctaatgtgtgatctggaagctctataaagcctgatgtaatccgtaatgcagtctctggctcccgattcgggatccagtttcagagagcgagagattggggagcgccggcagccgggtggggggaagcagctctcgcctctctcctcctccttctcctcgtcctcggcctcctcctcctccccgcgccgccccgcccccggctcggcttggctcgcccccccccccccctcgccaggaaggggaaaaaaggcgagaagagccgggcaggcgagaggagcggagcggcggcggcggccggagagggagcggcgggcgca

SEQ ID NO: 233972 - DNA, 87 bp, Homo sapiens
  chr8:143531855-143531942
  hyper
agacgctggcgggggtctaagggagccccccatggcccccaacagccacacatagacgcagcaggctccggagagcccccgagcgtg

SEQ ID NO: 233973 - DNA, 48 bp, Homo sapiens
  chr8:143534162-143534210
  hyper
gtggggcgcggagcccgtcctccggggacgccgcggggctccaggccc

SEQ ID NO: 233974 - DNA, 53 bp, Homo sapiens
  chr8:143534390-143534443
  hyper
ccgcccgcccgcccgctcgctcgctcgctcgccgtccgctcccgccgccgggt

SEQ ID NO: 233975 - DNA, 74 bp, Homo sapiens
  chr8:143534683-143534757
  hyper
aaaccccgttttaccgtcggctctggctctgggctgcccccgggtctgctctgtgtgcacgggatggacccctg

SEQ ID NO: 233976 - DNA, 70 bp, Homo sapiens
  chr8:143591805-143591875
  hyper
agcggaccctcgccgcgctccgaacccgccccgcgcccccaggccacacccggctcgcaccctccccgct

SEQ ID NO: 233977 - DNA, 651 bp, Homo sapiens
  chr8:143592085-143592736
  hyper
cggcgggcgcagagcgcggcatgggcgcccgggccgcggggcctggcggcggcgggcggacgggcgcgcggctgcgggcgcaggtgcggggcggcgggccggggccggggccggggcgcggagccgccgctcgggggccggggcgcccgcgtccccgccgccgctgacgctccgcctgtctccctcccgtgtcccgcccgcccccagaccctcctcctccgcccccccgcagctcgggccctggtcgtggcgcggctgccgcacggtgcccctcgacgccctccggacgcgctgcctctgtgaccggctctccaccttcgccatcttagcccagctcagcgccgacgcggtgagaccccggccgggccggcgggaggggcgccgggcaggggcgcgggcgggggctgccggcgggcctgcgggtggggagggcccgcacccgtcctgtcccggaggggtcgctgtggcccgcagccgccgtggcctggcccggccggcggggtccatgcgcctctggagagggtgggtgggcgccgagcgggtggcagtgtggagttggagacgggcctgggaggagtcgggacccccggaaagtggctgatgggtgggtcccatctcccctggccttggaggcccgggatctccgaggga

SEQ ID NO: 233978 - DNA, 429 bp, Homo sapiens
  chr8:143695487-143695916
  hyper
ggtgccggtgcgtccgccgcacgtgctccagcatctcggcccggcacttcccgatctgcaggatcacgttgggcttggccacctgcccgccccgcggcccggggtaggcgtggagcccgccgctggtccggtggtccagctccatctgtgcgcaggtgctccggcaggcggcaaactcctcggggcggacagagggtggtccggcgctggggtccggcggcctgggtcccgtgcggagctgcggggagcgcctgtctgtcgctgcgggccggcggcggggccggcggagcacgcccggggaggcaggtccggctcggctgctgcggagggaggacgccgcgcccgagctctgcgctgagtcctggccgccggctctttatgcagccagcgaggcccgtgggcggccggctcgccgagcccggtttctca

SEQ ID NO: 233979 - DNA, 363 bp, Homo sapiens
  chr8:143859062-143859425
  hyper
ccggaccgccggctcgccgggcaagcgctgggaccccgaggccagtccaggcatctggatctccgacacagaggcagccacgcagtgattccctggcgaccctcagactcacgtgttcagcccggacactccgcaggctatcttcaccgcgtcccgcggcagcccagccttccccgcagccgcctccgcccactcgcccgcgccgcgtcgtttgtcggccggcaccagccttgcggccccagctccgccctcctgcagcccaggcccagcagctccggaactggcgccctttggcgcacccgcctcgctgcccatggcctccgcctgcctcccctgcgctcagctcccgcttctggtccctgt

SEQ ID NO: 233980 - DNA, 1145 bp, Homo sapiens
  chr8:144099613-144100758
  hyper
caggtgtcagtgacggtcaccccgacctggtcccctgtccggcctcgccaggtcagcacccgccgcgcgcacagcagggccgggtggaaggaggccgggcctggccgtggctcaggcgccacctcactggggaaactgggaggtggtctcagcccccttctgggcctcagcttccccatctatcccaaggagccggggtaggcctgggcggcgcggggacccccaccgcgggctcgccgactccgcccgccggaggcccctcccgcgtcccgcccctgcccccgccccggggccgcgcggctgcctgggaggctccgggccagccgcggtccagagcgcgcgaggttcggggagctcggccaggctgctggtacctgcgtccgcccggcggtgagtccgcgggcccccggccgggacgcccccgccacctgcgcgcacgcgctcagacccggcggcctcggctgcggtgcacgcggccccggctcagccacgcgcggcggaaggcgccctgcgggggccggggcgggagagggtgggagagagcaagaggggcgcacggggaggcgcaggagaggggctggggctgccggtgggttggtccccagagagctgagcttctcctcccatcccccgcaggcctccccgaatgtttccaaagatctggggcgggagcgggcggagactgccgccaggagcctcccggccgccccagggctgcgcagccactggagcccatcacccaactccagacgctcctggctcctctacgtgggccgggagggacagccttgaggactaggggagggggcacgggaccttgcagagctcctggccggaaagggaggattgaccgcccccggcatatcaccccggagcactggaacccgcccccgcttcttgttttggcactggtggtgcttgcggtgaggtccaaggagcccagcctccctgagtggaccgccgggcccctccccgttccgggacacaggagaggctcccgccccttgctggctgggcagcccctagatacctggctcccaggggccagcttccctgagcctggggatgagccatgagcctgcagcctgggccccaggggcgccccccacggcctgccggctggctccctccgggctccatggccc

SEQ ID NO: 233981 - DNA, 240 bp, Homo sapiens
  chr8:144162347-144162587
  hyper
tgggatggggggtgcgccctgagtaaagccccgtccgggagcaggaagctggggagggggctctctgggtgaagcctcccgcaacacccacctcaccccactcaggctgagccttctggcgtcatggagaggctcgtcctaaccctgtgcaccctcccgctggctgtggcgtctgctggctgcgccacgacgccaggtaaggcgcggcccgggctgggctgggggcgtcggggctggagc

SEQ ID NO: 233982 - DNA, 251 bp, Homo sapiens
  chr8:144240968-144241219
  hyper
cctgacccagcccgcgggccccctactcaccgggcgccgagcacagcaggacggccagcagcgccaggccgaggcccttcatggctgcaggcagcatgctccgggtgggcctgggggcggcgcgggggcttggggcgcgggtcctctggggcgcaagcctggaggggagaagcatcggtcaggagaccccaaagaccctctcctttcccagcctcaggatgcaaccttctccccggaatccaaggccgggg

SEQ ID NO: 233983 - DNA, 86 bp, Homo sapiens
  chr8:144242197-144242283
  hyper
gtttccccgtttccagtggctccaggccgttctcctcccctgagcatccatgaagacccccaccagaagccgcagccccaggggct

SEQ ID NO: 233984 - DNA, 448 bp, Homo sapiens
  chr8:144328117-144328565
  hyper
acgcggggctctggcgggcctggcggctcagtgcgatctgggcaggcaggaagtggagtgagcacagccagcggctgggagcacatcccggaggggctgcctgcggcgggaggagcggcaggggccacgtggtgggggacggctcgccagggcgcgcacgcggtggcggcggcggtggaggcgttgcccgcctagctaggggcccgcggcctggagaggcgtcggttctccttccgcgctgaaggcggagacagcgacttcccgtggaggcaagccgtgggcgccgcggaggcgggggctgggggtcggcggaggcgggagctgggggtcggcgggggctgggggttggcggggagcgtcctcagggacaagtctcccagcacgcggccgcgacctccccgttgggggtctggagccaggagcccacgcgcgtcggatccggagagtc

SEQ ID NO: 233985 - DNA, 273 bp, Homo sapiens
  chr8:144373098-144373371
  hyper
cgtcctgcagggaggcggggggcagcgcctggggcgctccaagctctcggccccaaggaagcccacgctcgggacccgcgtgctgccacagccccgggggcctggagggtcccgtgagccgagcgggacccgggacaagcgcgggacgccgcggggaacggacgggaacgcgcgtggccgccccacagcgggccttcgacacctcctgacacgtcctgcgggtgcccggtcctcagttggctcgagccggatcccggcgcgccaacggctcga

SEQ ID NO: 233986 - DNA, 132 bp, Homo sapiens; identical to SEQ ID NO: 201626
  chr8:144417146-144417278
  hyper

SEQ ID NO: 233987 - DNA, 611 bp, Homo sapiens
  chr8:144503211-144503822
  hyper
ctgcccccatttcacggctgctcccctgcagccgctccagccccgactttatacacacaggcccagccacctacgggcaggcgaggcctcctggaggcccggcgggctcttccccctccctccccgcccttttcctctcccgatttcctggccaccctctggcttagtctgcaattcatcttcccgtctctcttcccatacctgagcctcgtgccgcccgggattgcggcgcccgcgccaccacgctggggtaatggtcccagcaccgctgccctgcgtcctgccgcgccccagcccgcgcgtctcacacaccgcgactgcgtgtctacaggtgccgcctcttgacgcctctgctgcaccgccagtgccccgctcggcaaagcacagcccctccccagcactgcagcaaatgggcaggagacccccgcccggccgggggagcaggggcaacggcagggccccagtagagagggtggagctggagccgaggccgggccaggcgcctgcggggcctaacgcttctgagacaggcgagccgtgctccgtgctccgtgctccgggacgaagggggctgtggggtcggcagagggcttcccgtgaggaggagcaca

SEQ ID NO: 233988 - DNA, 1051 bp, Homo sapiens
  chr8:144508722-144509773
  hyper
agcagggggacagacgaaagagagaaagagaaaggggagagaaaacagaaaacaggaaagtgaactgactccagcagcagcagctgctaaggtcccacagctcgggcccggccatgctgcggagaaagctggatccggtggcagccccggcacgtgccgcagtggggttcctctgagtcccaaacccagcaagcctccagcagcgcccgcaggccccgtgcaccaggaagcccagttctggcccctgagtgcagggctcccagacgcctggggtgggggtagggagcagggagggtgacacagctccctgcccgccgctcccaccccaaaaaggccgcctctgatccaggctgccagaagtcgctgggtcctgtactttctcggccagggaaaggctctgtgcaaagggctcctgggggcggcgatggtgaaaactaaggtgtcccatgtcctctgctctttacaacttcggactatgaaaaacgagccagcagattcccgtccaagaatgtgcccaaggctccccgcccctccttggggagagatggcctgtgtaagcgaaggcccgggccgggcggctgagccacccgtggctgcctggaacccgcctgtccctgccggcgtagtcttttcaactccatcttccgccccacatttctgtaattcccaccagcattctcctccacagagatgccttcacggccagctcccctgctgggattctgcttgaactcccgcagagacccaaaagcaaagggggaggcggcagggactgacggaggactcgccttcctctcttcctccaggtctctccgcttgaaacgataaaacaaactcaggagactcactcacagaggattccgtcccgtccccagaaagaacctccgcttacccccgatggaaaagcagcacagccccctcccaagaaaggcgagtttggaagcccttgcaggccagaagccctctctccaaatttgcaaaccacggaccctcgcctgcctctcttccggcagtgaagggagggaaccatcaacgacgtgtcctgcagccg

SEQ ID NO: 233989 - DNA, 621 bp, Homo sapiens
  chr8:144509988-144510609
  hyper
gactctccccaaaagcccctcggccttctttgccgagggcagacgcagagggcacaggtctgcggggtgcaggccggctaacgctgcctcgctgctcagtttctccctggtcctgccgtcacccagggcccgtccgtcacccagggccagcacaaagcccaatgcagggccctcctcttccttcaattcagggagaaacacggcaaaactgaaagccaccgaccaaccagccaggctgcggtgacttggatctgaacagatttattttgtgtatttttttctttttctcagtttcgtagcaaatgaaaaaagaactcaacgaaaaccaactacacaacaaaactttcaacgagtcggcgcgccttccactccgagtgctcaggggaggggtgtggagcggctggaatcccactgatggcccctgagggcctccgaaaacgggcagatcccccaggcgcctggcccagcctacagggcctggagcacccgcctcctcgccctctctcccggctagtccaaagagcgacgaagcattaaagaaagattccacaaacaaaacgaaacacaatttaaattaaaataaaaacactttctccacccgccccatgccagaaggctctg

SEQ ID NO: 233990 - DNA, 65 bp, Homo sapiens; identical to SEQ ID NO: 201628
  chr8:144594949-144595014
  hyper

SEQ ID NO: 233991 - DNA, 170 bp, Homo sapiens; identical to SEQ ID NO: 201629
  chr8:144614411-144614581
  hyper

SEQ ID NO: 233992 - DNA, 281 bp, Homo sapiens
  chr8:144635847-144636128
  hyper
agcacttcccgttcggggtgatgattgaagaactgagtgtggacagagcacctgtcctcgccagcgcccagctggaagctgaggtaacttcgtcactgcccgttgacctgcgggcacggtgggccacaccttgctcagccgtccgggccctcacctgcccctcctgcccgcagacggcgcctgcttggcctcagaccaagtcccacaggggctgccgtgcctgccgcctccaccccattcccccaacaaggcagcgaggccttcccggaaaataagcctgg

SEQ ID NO: 233993 - DNA, 312 bp, Homo sapiens
  chr8:144640321-144640633
  hyper
cagagttttaagaaaaaccacaaagtgctatgaagtttgaggctaccaggatggggcgccaagccaaggttcctccggacgcgcgaggctggtgctccaggcgggctggcgggaagagggggcaggaagggggccggggcgggctctccgggacggttccgggagggcgtcctgggcgggccctgcgtcaggttgcagtttcacttttagctctgggcacctccagctcctgctcgccggacggctcccagggagagcagacgcgccagacgcgccaccctcggggcgccgacggtcacggtgagctgcgcc

SEQ ID NO: 233994 - DNA, 120 bp, Homo sapiens; identical to SEQ ID NO: 201632
  chr8:144641059-144641179
  hyper

SEQ ID NO: 233995 - DNA, 42 bp, Homo sapiens
  chr8:144653948-144653990
  hyper
ggctgggcacctgcgccagcagcccacgcaccagagcatgca

SEQ ID NO: 233996 - DNA, 44 bp, Homo sapiens
  chr8:144692239-144692283
  hyper
cggaggggacagtcggggagggggtactcgtcacttttaatgac

SEQ ID NO: 233997 - DNA, 200 bp, Homo sapiens
  chr8:145149554-145149754
  hyper
gtcacgcgctgcctgcggccgagacccctgcccgcgccctctgccgggctgccctccaagccgccctttctctggaggtcctcagcctgcaggggcaccctccacccggccatcgcgcagcctgggaaggtggagaaaaggagcgtcggggtctcggaggcggcgtgggaaacgccgggcggagcgtggcgctgtcacgg

SEQ ID NO: 233998 - DNA, 61 bp, Homo sapiens; identical to SEQ ID NO: 201634
  chr8:145687374-145687435
  hyper

SEQ ID NO: 233999 - DNA, 116 bp, Homo sapiens; identical to SEQ ID NO: 201635
  chr8:145692490-145692606
  hyper

SEQ ID NO: 234000 - DNA, 613 bp, Homo sapiens
  chr8:145698139-145698752
  hyper
ccggccttcccccatgtcgggctcgctcgcccctctaggcacgctgcacctggtggacctggcgggatccgaacgcgcacggaaggcaggggcggccggcccgccgcggggagacccagacggcgcccggcgcctgcgggaggcccagaccataaaccgctcgctgctggcgctaggaggcgtgatggccgcactgcgggcccaccggccgcacgtgcccttccgcgactcgcagctcacgcgactgctgcagccggcgctgggcccaggcaccaccgcggtgctgctgctgcaggtgggcgccggggcggggcaggtgtgtgcgtgccggtcgccgcccacccgggcccgcccacccgcgcctcttgcccgcagatctccacgcggccggaggatctcggggagacagtctgctccctcaagttcgccgaccgagtgggtcaagtggagctggggccagcccggcgccgcagggtcccgcgctcctccgggacgccttcttccctcagcaccgacactccgctcaccgggaccccctgcacccctacgccgtcccctggcagtcctccatgccccagtcccgacaacggctcgggctcggctctcgcgcccg

SEQ ID NO: 234001 - DNA, 624 bp, Homo sapiens
  chr8:145700218-145700842
  hyper
aagccctcactgggtggtggcgggggactgggcggccggtatggccggccgtgcagcacgtaggggcccaggtccttggcgaaggctccacgcgcacctccgttctgccagcgccggcacagggcggtgttctgcagccggagcgcctcagctgggatcaggctcacgtcgaccgcccagaagttgcccttggcctggggctttgcagggtccttgggcacctgggtgtgggggtcagacatgggtggggctgcccaaccttggatgctcaggacttccgcgcgcgctccgcccccgggctccgaccctggcctgccccaccttgcggaagcatcggttggaggaaaggttgtggcgaatggagtctttccagccctcgtagtcttccctgaagaaggggaacacggcctggacctgacggatgatctgaaaccgccaggcggccggccggcgccgtgagcccagacggggagggggtagcgccctacccctcccccactaccgggctcaggggcgcgcggtgccggcccctgctgtccccgaagaaggacatttctgcgcggaagcgcggcagagagggcaaggggctcccggagaagggtcgtgccttgaggccctcagctc

SEQ ID NO: 234002 - DNA, 112 bp, Homo sapiens
  chr8:145733965-145734077
  hyper
gtgggcgcaggccgatccttacattcgaggccggcccagctctgtagcttccccctctgggcctctcacccgcgcaggacctcggtgggagcgcgcacgtggcggggcgggg

SEQ ID NO: 234003 - DNA, 328 bp, Homo sapiens
  chr8:145747532-145747860
  hyper
cccgtcggcactgccggccagtccttgctcttcccacctttcggaggcccaagatcctactgtggccggccagggccagcgagggaccccccccatgcagagctggaggttggggtgatgtcttttcggaagagcttcaagggaggtgttggggcctccccggccaccttccattgctaccccaggattcccgagtgcaacgttcccggctcgcgccccacacacggctcagcgcacactgcgcggcttccacctttactgacggagcatgcgcgaggccgcaccggccaatctccggcgcccacgtcatccgcgcgcccgcggccct

SEQ ID NO: 234004 - DNA, 402 bp, Homo sapiens
  chr8:145806238-145806640
  hyper
tcctccttcactgtcccaaacgccgcgggccgcccggccctcgctggcaactcctgcgctttctcagtgtcgggctcgggctccagggaggagctggtgctgccctcacggctgacgctgctgccgcgcccggggctgctctccgccgaggcgcgcggggactccgtgttctgcttcagcgtctgcagcttggccagcgggatgatgtcgcagccctgcggccggtgccacaccgtgcgctgcgtgctggcattgtagtagtagaagcgggacgtgttggggtcgaacagctcccaccactggttctcgctggtgcgcttgatgcggacgccggccggcgggtcccacacgcactcaccggtgaccaggttggcgtacatgcgctcgcgggtgcgcggttcg

SEQ ID NO: 234005 - DNA, 390 bp, Homo sapiens
  chr8:145909602-145909992
  hyper
tggctacagagcctgcgcccagggcggtttatggaatgagtctcctcgatttacagccacacctcctatcaaatcgcctttccctcccccggcgcgagaatcgcaccttgctccttgtggatcgggcgccgccgacggaaccacctgctgtctatagagggcacctaggacgcagcgtccaattcccctcactggcttcaaaagacaaatctccgtattgttgtaccaggaggcacgagaagcctcaccactgtaggtttttcagcagaggtcactggaggtctggttaaacccgtacagcactgagggggagggggcccggctgcgtttccgaagctgcgcagcgcccacagcagctgctggtgggaagcggctcggaacacacccaca

SEQ ID NO: 234006 - DNA, 95 bp, Homo sapiens; identical to SEQ ID NO: 201639
  chr8:145910220-145910315
  hyper

SEQ ID NO: 234007 - DNA, 145 bp, Homo sapiens
  chr8:145910532-145910677
  hyper
ctcacacctccctcgggcaggagcacactcacacccccctggggccggacacacccacactcccctcgggccgggcacactcatacccaccgtggacaggggcacactcacactcactctggacaggggcacacccacacccaca

SEQ ID NO: 234008 - DNA, 94 bp, Homo sapiens
  chr8:145981131-145981225
  hyper
atccgggccgcgccgcgctcgccccgaccctaaaccctcacctgaaccctaaccccgctgggctcccggctcccccgtcggtcaccatacatcg

SEQ ID NO: 234009 - DNA, 79 bp, Homo sapiens
  chr8:146052022-146052101
  hyper
tccctcctggacccccgccccgttcttcccgtggggaggggcgcgtcaggcggacctggcaccctccggctgctgggct

SEQ ID NO: 234010 - DNA, 103 bp, Homo sapiens
  chr8:146125625-146125728
  hyper
cccttacccacttcgtagagaccaccggacagagaaacctatgtccagaagacaagttacgaactgaaaaatctgcgagtacccacccggcggaggacgagtg

SEQ ID NO: 234011 - DNA, 69 bp, Homo sapiens
  chr8:146278304-146278373
  hyper
gaagggtggaatccacgggtgcgaatccacgggcacgtgtgatctggggtccgcggagttaaggcgggg

SEQ ID NO: 234012 - DNA, 208 bp, Homo sapiens
  chr9:117982-118190
  hyper
aactgctggctcgccgcctcctcctcgtcttcatcttcctcctctcccaggacatcgattttaccgtcttccccatcggagtcccggaggctgcgctgcggtgtggagcgaaggcgctcagctcttggcaagttcatggcggagcaggtgcttcagtcgcaggggatgtggcggccggatcacctggccccggcgggctgagctggaa

SEQ ID NO: 234013 - DNA, 739 bp, Homo sapiens
  chr9:214786-215525
  hyper
cgctgctccgagctcggaccctcccccggggtgatttcggcttagaaggtggaaatgcggaagtttccagcgccgaccgacagacgaggtttgcgcttggctgggcatgttccgcggctactctgcggcgcgccaggcccccgctttccgcaccccgcgaccctagaagccaccgaaccgccggcgggccatggccactctgccgagcgcagagcgccgcgcgttcgcgctcaagatcaacaggtaagacgccccccgcggcgcgcaggttgcggccggacagcccagcgctggtgtgaagcggagcttcgctgcaggggccgaggccggacgagtccattcgcgtccgcggcggggcgcgcctgagacctggggcgcccggttcccgaggctgcggcggtggagccgctggacgcgcggcggctcctgcgctgggcccggcgaggtcctccccaagaatctcggtgctcctggatgtcctcagccgccggggatcccttccccgaacaacctcgcccgctccgccctccaggttcttacaggtggccgggtcccagaagggtgataggcgcctgggtaaccgtgttgggcgcgccacggagtgtctcataaacggctccttcctttgaggcaagtctgagcgcggggggaagaagtgaagtggctgaaattagagttgcgtttgaggcaggctgcaagccttctgtcgtcctgagcaaggctccgtcctcgcctgctt

SEQ ID NO: 234014 - DNA, 243 bp, Homo sapiens
  chr9:470095-470338
  hyper
ggcctagagagagcgagcactgccgggggcggcggcgaagggcagcagtggtgggacgggcggggtagggggagttactgagcatgcgcccgggtaggggcgtgggggagttactgagcatgcgcccaggtaggggcgtgggggagttactgagcatgcgcccgggtaggggcgtgggggagttactgagcatgcgcccgagggtgtttcggggcgtccgaagcgggcgtgctccagcctgct

SEQ ID NO: 234015 - DNA, 77 bp, Homo sapiens
  chr9:503916-503993
  hyper
gacctgcaaccttctgaacacgcatcctcccctttccgccgaggactctgtcctgcagccgagccagggcgaatgca

SEQ ID NO: 234016 - DNA, 75 bp, Homo sapiens
  chr9:505313-505388
  hyper
tccgaggtggcttcggccggggctggagggcggggaggcgggggaggggcgtgggcgctgcggcctctggggcgg

SEQ ID NO: 234017 - DNA, 274 bp, Homo sapiens
  chr9:841326-841600
  hyper
aagcatgcaagcacggctctggtcttgacctggggagcccagcttcctcggtgcaccgtgctttggcaaccgggtcttggcgcctccgagagcggggcgaggggtgccacgcgattcccaggccgctctgtatctctcggtgcgcttgcagggaccctgcagcaaagccctggatgcttgcagccggtgcaagtttgcaagcagctggagagcggtggctggagtcggggggcggtgggcgtggccacgctccctcccaggcagtcccgggaat

SEQ ID NO: 234018 - DNA, 828 bp, Homo sapiens
  chr9:842717-843545
  hyper
ttgcgggcttcgctcggctcggggttccccacgatctctcaccctgtgtttcggcggagttgcgggggttccctctgctcccgggtccctgagatccctgatcccgctctcagggcagggaattccggggttcgcccctctgggcttccccgcgatcccagagcccgcgttccaacagaattgggagggtttattgcgctagaggagtcttcaggatcttcgctcccgccctccgaggtgaggctagaggggagggttcgactccaagggaatcccagggatctctagccccgctcttctagcagagaattaaggaattctctccgctttggggtcccaaaaatctccgaccgcgccttgggagcagagggtttcggggttcgatttcctcgagcgtccccagaatctctgactctccctccttgctgagttgcacttaaattagaaaggatcttggagggcggcagcgctggctgctaggttagcgggaaagggaggctcggccggctgctgcttacgcgggtaacctgtcggaaagccttgtttgtttttctggaaaagtcgctgcaatggacacagcgttgcgcggtttccctgcgcgcctggggcgctttttgtcttcgccctccgtggatggaggctgagcgcctcagccattttgagagctctggaaattttattagcattttaaaatttgcattctcgaccgaagattaaagtgcaaattactttgaagatgttttaaagcacgcttaagaattttaaagaatatgcgcaggtggaaaaaagcgcgccagggtttgagatttggtccgtctgtggttttgt

SEQ ID NO: 234019 - DNA, 115 bp, Homo sapiens
  chr9:968066-968181
  hyper
agtgcttgaatgtgagcctgcgtcggagcccagcagcttcacagtcactcccgtcatcgaggaggacgagtgagcagtgcctgctgccgatggcggttcacttggagtaacaggc

SEQ ID NO: 234020 - DNA, 1659 bp, Homo sapiens
  chr9:969533-971192
  hyper
tgcccttcggcgggcggctgtagctgtagctgttgtgacggctacggcggaggctgcggccgcgcggggaatggagccggaccgcggagtcgtcacctccaaggtgtttctagtggcctcctggaagatgatcccgcgcccaccttgccggcgtgttcgcgggcccctgcccactgccccccctctttctttaggtctggcttttgaggatcccggagtcttgcagctcccgccattccgcagataacctccgcacacttaattgtgacccgcggggtggtcggagaagctccgcacgcgtcctcagtgggaaagtgtcccctctcagcactgcccccttcagtccccctgcatttctggaaagtcaggcaaggcccaggtaggctgccagtgcactctcagccttgactgagcacctttcgggcctctggtgagccccgagagccaggtttggctcggcagagcgggcttgggctgcgcaagcaatgcgcatcgtggccgcctgcaccctgggaactaggcctgtccagtgggcagcatcctcatttttgaaaaggcccttctaaacccaccggcctcgcctaacgccgtttggtgctgcatccgagcggcctcacgcggtcccctggaagggccactcccagcgggagggcggggcccgggacctgcgctggccacgcagggtctcaagctgaccggaagacccggcttttggcctgtgtccaatagccccagaagagaggggtctggagccttcctcccacgcgtagtgacgctcaggtgtcctcgggttgttagtcttgacccaggagagtgcaagacaggcccaaggcctggggggattgcgttatgaatgtccaattctaaacacaaggtagagcacagacagtacatcctcacggctggattttaaccgtattttaataaacacattcgagggggtgtcagtttccccaagctctgcccccttccgcgggcgggatccatggtgtgtgcagtgtaagagtgcgcagaacgcgtgtgttcaagtgtgggcgtggcaggcgtcgtgtgctcgccccgcgcactgtgcggatcgcccagacagccttgacaggtttttgcagatgtttgggtgctacggtgtggggaaacccaggcaggagcgccaggcctaattctcctggactcttggtgagcggccgctactccacgaggggctagaagcaaagggggcacgcgcttttccccaggccgcctcttgctgccgcagtggctgagggcgctgatgacccctccccgcttccagcggacttgacccgcgggctgacaacccaccgcgacaagcaggcggctgggttcgcgccgccgccccggggcccttggctcaaatttcacctcgagtcctgcagaccctgcgccactgaattggggcccaggacgcccttggtgacactcgccttcttgctgccacaaccaccgtcatacccgcagccggggctccctccgctaaccacgcttggagaccccaatcggggacagaggtgggagtcagaccccccctggcctgcactgccgtttccctcgattcttgcggaaacaagactcccgcccacacataaaaatgcagctcccggccaccgggcgccggtggctcacgcctgtaatcccaacaccttg

SEQ ID NO: 234021 - DNA, 1839 bp, Homo sapiens
  chr9:971432-973271
  hyper
taaaaatatgcagccccctccgctccacttgaactttaatgctgaaccggtttcccacgtatacgtgtatcgcaccgcattttgacgctttgcatcgagtcgcattaatggcgcttttgagaacgcgtcgtcgcgctttacagagaaaccctacgggcagcctgtggaggggtaggggatattcattggctttccctgctgggccccgtccgccgggcgggttagggtcgtggcagcctgcccgcgcgccgctgactctggaattttgtccgggaaactggcgtagggccctggctctcccttcgccctccgcgcacacgcggacgaggccttagatccacagccttttctaggccctgcgcctttgaagctgggccactgccaaccgctcgcgattctcaccttcaacagtcgcccccttacccctcccccacccgcctgccctcgggagcgggtcgcctccactccaccacctgtttaagttcctccccctcggcgcccctccagtccccaccccggccccggtccaaaaaaccagcaaacggaacttttccacagttgaaagccgcggcccgcgaggccgggctgggaggggaaagcggggcgtgtctggggggcggggccccgagcactccggaagttgccccgcccaggaggctcctgggaaagtgaggagagggcccgggcctactttcgtcctggtgtggcgcccctcagcctcccctcctcccagttcccgcgcctccgcagggcgcctcggcctggcctccaggcaaagttcgcgccccctgttcctggggtgtcggccgcgcgggccgtttcccttcattactcccgggcccctgaatccgaacgctttcccagaagcgcgcaaatccgcttgctttccccgcggctgggctttgttcagggacagcaaaggaggaggcgggaggctggtgaggttttctggaaaaggggcttgtcccgaggaggaagtgccccagatccctgagagccaacgctctggggagaagaaactttccttctcccttgaatgttgctcagattacctaaaattattttttcagcccttgtgttctaaagtcgcagggtaaaggttatcttaagacttaacatcagcgctgctcatttgtacgttggtggagacgtgccttttttcctttgcacttaaggtggacagggtctgcgacgctcccttccaggacggtgtggggaagcggccgacgtccccagccggactcacgccctcctactactgggcgtcggctccgccgcgggcgctcccgacagggagctggagtcggacgagcggctgcccccagggcctccaggaaccgcggcccagcggggagcgccccaggctagcgcttttccagttcccttcgaaagcgcggggctgaggtcgcggcgctgggccctcggatgaagccgtgctgtagctacacctgaaccccgcgaaaggctggcgcggtcgtgtatccaggctgggtctgaggaatccgcaagcgggagagcgctaactcctaggcgtgagccgctgctggcttcgagagttcgagaacatgaaggacctggcttctcccgcccggtcggcttagggccagcgaggtcacaggccgttctgctctccctgtttgtccccaaaggcctcggcacgtggggatctggagcaggcctcaggctgcgacccgtctcttcccctaccaaaattatgtgggaacagcggtccaggaccttcccctgttcagcggtatccccgggccggtgaccccggggttcagtcgtctccccgaccccaagcggcctctgctttccacccctcgccccggagggcgg

SEQ ID NO: 234022 - DNA, 984 bp, Homo sapiens
  chr9:974427-975411
  hyper
agtatttagatctcagcccccgatgtgcaccggagtgaaacgggcccccgggaccaaatgccagactgtttgagtggcaacgagatagggtggctaggtgaccgacgggggaaaaggggtcgccttggtagtgaaagtgcccccacaaacctggtgcagagctcttctgctttccttttaaaaatttattcatactcaagttctttatacttcctcgtttcactgtttgaagaaaatcggaagaaatttggttttgaaaaaagtcgttggtccccacgtttccaagagatccggaggtttcagcgcaatagttttcagttaaggtgtcatttgaggccctctatatcgcagcacgttaaatgactcgcgtccagctccccatttcctagcctcgggcctacagggctgggggcgacctctgcctcccgtccccagagcttacaaaattccttccagttgtattttagggcttgttttcctagagaaggttgagactagaggaaggattaaagtggtgggggaaggggcaagaccgaggggtccctaccccacgcggctttggaggatggcctcccagggttagcactcgaatgctagagcttcttgtccacactctaccaggtcagtgtcccgcgatccccacctcccggacgcgtatgaaacgggaacagctaagggcttcaagggaaacacacaactggggttcggttttcaaccctcctctccgcaaatcagccttctgggcagagggttggctgctagaacgcctggaggtgcttcccttgaattcatggcaaacaccagaggaaagttttcaggttgcttgcttacttccagggcagtacagagaaaagcggcctccccgaggggacaagggcctctgtgcccatgaggggtcggacattgcagcggacttgcctacgctctcatctagcatttgattccccaccaggagatgggcttggtgcacgctctcagaagcgc

SEQ ID NO: 234023 - DNA, 1699 bp, Homo sapiens
  chr9:975826-977525
  hyper
agggaagaggatatcggtaactttgggggcgccaatgtggcttctgtgtctgccccttgaaagtttatacccggcgcttaacaaatcctttacaggagcacgtacgtccctgacctttcaggatactgttttatattaaaacatggacaggagggtagaaaagtaaaattcgcctgcaaaatggcttgtcatccttgggccggcagatctccaaaaccattttcttctaaagcaacaaaagagaaaaaaatacgttctaaaaggaaattacgaaaagagcctaactttcctaaaccaacatcacttcactcccctatcctaaactccacccaggtccggggtgcaaccgcaacactcccgtaggttcgagttctcccggagctgagcttctgcggccaaatgtcgggataaaagcggccttgggctcggaaaaacgcggccagatctggactggagggaggagaagagagagaagcggagcggccacctcactcgcttacaggcacccccaccctcactcccgctggtcctccccttctccgccccgcgagcaccgccgcgttctggagcgccgcagtctccagccgcgggctggggtagcggagagggcttggaggagggggccgcgagcgcccccgcgagagtggcctggctgcaggtggcaaggaaggtgaagtgcaggcacccgaggggcgcaaaggaggaggaaggcgtggggcggggagtgcaaggagacagggaccccaggggcgggggtggcggtgggaaggaggaggggttgggggagggcggcggaggtgttgggtccggccggctcacgagggagctgcagaagagctggctcagaccttaatcagagctgtcgccggctccttgcagccgccgcagcgcctccgcgaaggaggacgtgccgacccggctgcgcgcccaaggcagaggcccgcgtcggcgttggctgggcgtgagctgggaggccgagctgtgagcgcgaagggagctggagagacgactgcggcacctccggccgccccggagcacacacgaccaccggggctgcgggaccaagggccgcgtcgcccggaggccgcccctgagcgggcctcgcagccccgccgtccagcgctccctggccctctcccgcagccaggctgccaactcattcgggagcccggggcatgaacggctacggctccccctacctgtacatgggcggcccggtgtcgcagccgccacgggcgcccctgcagcgcacgcccaagtgcgcgcgctgccgcaaccatggcgtcctgtcctggctcaagggccacaagcgttactgccgcttcaaggactgcacctgcgagaagtgcatcctcatcatcgagcggcagcgggtcatggctgcgcaggtggcgctgcgccggcagcaggccaacgagagcttggagagcctcatccccgactcgctgcgcgctctgccagggcccccgccgccgggggacgccgtcgccgccccgcagccgccgccagcctctcagccgtcgcagccgcagccgccgcgccctgctgccgagttggccgcggccgccgcgctgcgttggactgccgagccgcagcccggggctctgcaggcgcagctcgccaagccaggtaagagcgtctgaggtgcgggagtttggccgggcgcgggggcaacttcggagtgccagctgcagctcca

SEQ ID NO: 234024 - DNA, 182 bp, Homo sapiens
  chr9:981619-981801
  hyper
ctggccggtttgcacgcagtgcagttgctgtgtgtgtgttgcggagggttgcggcagctggcccaggactgggaccctggccacagcgggttcaaagtaggggcaaagatagggggcagcggctccttgcggccgcaatggactgccgtctccttgcaccagggggtcggagctgcagctga

SEQ ID NO: 234025 - DNA, 115 bp, Homo sapiens
  chr9:1042869-1042984
  hyper
gaaagttgggagcaggagtggaggcttggggcgggggttggtggggcgcgggggttggccggagggagggtccgggggtttcttgcacctgcgctcctgccgcgttaagtcagtg

SEQ ID NO: 234026 - DNA, 763 bp, Homo sapiens
  chr9:1049910-1050673
  hyper
aggcatcatttttacgcccagtttggattaatgattgattgagtcgcagaaatgcttgtgatgctgatagaggccaatactggtctttctgatctcttcctcgtcgtttattaccttctcttgtggacaacgcattcctaagaatgtatctctgcttgtttcccagtccgcgagataaatggtgacttctctcttgcaggcaccgtcatacctcgggtttagattctggacaggcgagccggctgcaccgaaggcccggtaggcggactctggcggagcgcttcagagagaagagtgtagaccgcgggaggcggagggctccctgccagcgtgcctcggccaatcagtattcacaccgcctgacaaccggccaatcagaggacgtaaagctccggggcctgagcggacagtactaggaaggggagcgcagtctgcagactgaagccagtggcgctgcgctgaatgcaactgcgcgcgcccgccgggtgagccagcgatctgagccaggcgggggcggcccgacctttcccgcccagcctgggtcagaggaagccgaaagcggcctcagcaaggtgaggcgcccgaggctgcagaagaccgagcagaactttgcagagttcgggatgtgctgggctaggtcgctgaggacttgactggcttcctccctccttccctccacctaccttctccctccccctccaccatccagtgggttcgttccgggcctccagctatcagctcccgatctcgtgtttgagggtag

SEQ ID NO: 234027 - DNA, 767 bp, Homo sapiens
  chr9:1051558-1052325
  hyper
tgtttccccagagtgagggccgccaggctcaggccccagcgaagccccgagcgccatggccgacccgcaggctggctccgcggccggggactgggagatcgatgtcgagagcctggagctggaagaggacgtctgcggggcgccgcggtccacgccccccgggcccagcccgccgccggcggacggggactgcgaggacgacgaagatgacgacggggtggacgaagacgcggaagaagagggcgacggcgaggaggcaggcgcgtcccccgggatgcccggccagccggagcagcgggggggaccgcagccgaggccgccgctcgcgcctcaggcctcacccgccggcaccggtccccgagagcgctgcactcccgcgggcggcggcgcggagccgcgcaagctgagccgcacgcccaagtgcgcgcgctgccgcaaccacggcgtggtgtcctgcctgaagggccacaagcgcttctgtcgctggcgcgactgccagtgcgccaactgcctgctggtggtggagcggcagcgcgtcatggccgcccaggtggcgctccggaggcagcaggccaccgaggtgcgtacccgcccggcccgggcgtctcaggccacagtggaggtgggggagttggaggggagcggggcggccgtccacaccccccgcgcccagggccttgcggtgcctggcactccctaggaaggatggtaagaacgcttttctgcttgcactggcgagcagggtcgggagggaaaaagcaggcatc

SEQ ID NO: 234028 - DNA, 161 bp, Homo sapiens
  chr9:2014343-2014504
  hyper
taacccgccagccccgcccccagggtttgtttttccatatttttgtatatattttagcgaagatggcaggtgagggaaggttatagtgctgtacctagtccacgaagtaaacagagaggttagggtgggtttacttatttataaggcgttcagcctctcag

SEQ ID NO: 234029 - DNA, 182 bp, Homo sapiens
  chr9:2015621-2015803
  hyper
tggaatgctctaacgacagctcccaggcggcggtggaagaaacgagaaagtttcaaccgaaccttgctgttctaataataacagtaataattactacttcaagggggcaaaggaggaaaaaaatcccaacaagccacagccttgatcctgagtgggcagtcagaggcgctgccaactcaagg

SEQ ID NO: 234030 - DNA, 738 bp, Homo sapiens
  chr9:2621195-2621933
  hyper
ggatagaggaggcccgaagaagatgctacctaccagcctctctcaggggcgcaggagagggtggtagagagatgcttgttgcccctggaaactgcaagtaccccccaggtgcacgccccgtcagtggggaggcggtggcaacagcaacgatagttgcatcagcgctaactgctgctgctgctgcgtgttctgccggaggctgccgggagggtacagtaatgactgtagggagcgcacagccgctgcggcggcaggttccctggatcaggaaattaggacaggcacccgggattggaggcgagggcggcgcgcgagccaaccagcggtcgccccgggcccccgtgagccccaggcgaacgcgcggagcagccgggcccctagagcggtccgggtggcggcggcggcagccacgaccacgaccgcggtcactcacgcacgctcacactcgcacgctccccgcgcgggcacccggctgcccggcgcgtgcaagaggagcgcgtcgagggaaaggagggccgaagccgccgcgctcccgcccgcccgccgcgcctcccgttgaccacgccccctccggccccctccccgctgctcaccccgctctccggccgccgccggtgcgggtgctccgctaccggctcctctccgttctgtgctctcttctgctctcggctccccaccccctctcccttccctcctctccccttgcctcccctcctctgcagcgcctgcattattttc

SEQ ID NO: 234031 - DNA, 1276 bp, Homo sapiens
  chr9:2622186-2623462
  hyper
accatgggcacgtccgcgctctgggcgctctggctgctgctcgcgctgtgctgggcgccccgggagagcggcgccaccggaaccggtgagtgaggacgcgcccctccgccggcgggcgggacccagccggggcaccgggagaccccgaggcgtaggtctccgtttgcccacccgcctcctaggaggcgcctctcggttctcctcgccttccctccctcccctccgtggtggcgcctctgagctgtcagcgccgaggctaaagggagccgggcttggggaacagcggggttcggggtgccccgacgcctcgcctgaactagtcttctgcccctcactccgcctcccccagagccgctgcttcgcctcgtttctcgccctcttgacgggcgccgaggtgcgtgggcttctgagcattgaacaatggttctgcctcctctgccaggcgcagtgttgggaaggaggcagagggccaagacgtgtgcggcagcctcgggcgcaccctcgaaccccggggagtgcgggagcggacggggggagaaggtgagcgcctccggggacgcggagcgccaggggccggccgggcttcagagtcttccggcggccgcgagctggcgcacgttcggtgggcggcggccgggaggctccgcggagccgagggcacccggactgcgactcccccggcgcggggccgcctctccggcgtgcggggtaggggagcggcggggctttacgcaggactctgctctgggcgcttctcctctcccttttccccgcctcgggcggcgtttggaaaccgctcgggtctcccgtgtagctgaacgcggagggggagtggaggggagacttaatcaggttagtttgctgaccctccttcccggtgacgtttcctcgagaggaattgagtcctaggctagtgactgtaattagccttcattctacacaatagctcaaaggagcagcgcgagagcgagcgtgtggccctgtcttgttgggaagggcggcggtgactactgtcgggtccccagactctgccgcgggggcctgggggccccgcctggtcgtcagccacgttcccacttggggcctcgtaactttcctggacaggcgacaggaagcctttctgagaggactcagtcggaatcctagcgcgtccccgaagtgatcttcagatgtgacgccgaggggcttgcttgccagctgcagggaattgggactgaaagccgcccaggcccttaacacccgttccagagtccctggctcccgtcgccgggtggct

SEQ ID NO: 234032 - DNA, 920 bp, Homo sapiens
  chr9:3181024-3181944
  hyper
cttctacacgcgcgcgccgggcaacatagcgcaccgcgggtacacgcacgccgaccggacacacgcagtctcgtacacgcccaacgagcgcacacacccgcactccatgcacgcgcgatgggcgcacacactcgcatccctacacgtgcacacacccgcgctccaattaccgcgctagcgcgcaaaagagccgcaacttccgagtgggactcggcatgcgggggcagtgcccggtacttcaccatcagtcaccttcgcgtccgcctcctcccctgctggttgcacctccagccgcagagatttccggctggggcaccagaactgtccaggccgaaagagctgctcctccgtcacaaagcgcagttgcacactgtactgcaggcgcgcggggacccgggccggagccggggtcgcagccatggtccaagcgcctctgctcctgagccctagcagtgcctcccccgcgctgctctgggcaccgagaaactgctggggcaagggggagggatttggaagcgcgcaccaccttccccagctcccgttgcaagttcagtcttcgacctccgagacgcccggtgacttctgctggcacctgctgccctcggcatcacctccctcatccccctggagggcacgctggaaagctgcaactccccaccctccgcacaggagcgccccgtagacgcgcagatgggcccagccacccagcggggcggcagccctgagcacacaagtttggagagcgcgcgaggcacctgaaagtggttggggtttggaagcaaaagggtgacacctgctgttcgctgggaccgctctgcgggtgtgggcgtcggtttggaaacgtcctttgcctgagctctgcttggtgagtgggcactcgctcttggtgtgattctggcgcaactggcacccaagtgtga

SEQ ID NO: 234033 - DNA, 403 bp, Homo sapiens
  chr9:4297351-4297754
  hyper
ggcaaaacctctaacgtctctggggctcggtttcctcatcaggtgaagccagggtccactctagctttaatagtctctcctcgagattcccggccccatactaaagggacctggtccactggggggagctgcagaacttccctcttctcacaaactccagggccctggggccccaactctcgggagatgctgaagtcttggaggaagttggttctgccggctcggggagagggtgcaagagcaaccctctttgtgaaacggggccgcgactccacgagtcctgtctctacggaccctactccctgtgattccggaagcacctccctaccccttccccaggtttacatgctccagagatgagggccaagcggataccggggcaaactagcgtggggctcaagga

SEQ ID NO: 234034 - DNA, 611 bp, Homo sapiens
  chr9:4298792-4299403
  hyper
cgggccggtacccgcgaggagtgtaggtaccctcagcccgaccacctcccgcaatcatggggacaccggcttggatgagacacaggcgtggaaaacagccttcgtgaaactccacaaacacgtggaacttgaaaagacaactacagccccgcgtgtgcgcgagagacctcacgtcaccccatcagttcccacttcgccaaagtttcccttcagtggggactccagagtggtgcgccccatgcccgtgcgtcctgtaacgtgccctgattgtgtacccctctgcccgctctacttgaaatgaaaacacaaaaactgttccgaattagcgcaactttaaagccccgttatctgtcttctacactgggcgctcttaggccactgacagaaacatggtttgaaccctaattgttgctatcagtctcagtcagcgcaggtctctcagtgacctgtgacgccgggagttgaggtgcgcgtatccttaaacccgcgcgaacgccaccggctcagcgtagaaaactatttgtaatccctagtttgcgtctctgagctttaactcccccacactctcaagcgcccggtttctcctcgtctctcgcctgcgagcaaagttc

SEQ ID NO: 234035 - DNA, 320 bp, Homo sapiens
  chr9:4491100-4491420
  hyper
tctttgttaatcccgcaccgtatctccccctatcaccgccaccttcctcaccccacacccccagcctcgctgcgcgggcagagattgagtgtggattacagttctcagtcgaattggaagaggcaccctggcctccgggatgggccggacccttaggggagggaggctgagaacgctgtcgccgctcatcctgggcagtgcgtggaaaggtgccttcccacgcggcgagcgccgactgcctgcacccgggctctgaaaagctgccagattcgtgcctgaattctgggatgtgccactgtggcccgcgggaggtcaccggg

SEQ ID NO: 234036 - DNA, 266 bp, Homo sapiens
  chr9:6412571-6412837
  hyper
taggcctggagctgccgcctccgccaggcgacgggaaaccctcggaagtgggtttccgcgcgaaagtagcattgcggccaggcgggaaacgtgttcgcgaagcaggagggcccccggggcctttcccgggcgacccgacccgccaggccgcgtggcgggagctttcctgttgagcgcggtggagcgcacacatttccttcagttctttctcggaagtttaggccgcacccacccgcgccccctttccaggattatacaagtgcacg

SEQ ID NO: 234037 - DNA, 248 bp, Homo sapiens
  chr9:6414082-6414330
  hyper
tcttccgcgtcttcggctctcaaacaggggaaactcgggcattgagctctcaagaataagaaccctaactctgcttcctgactgtggtaggattcgcgcaaactgaagattcgaagggtttccagaacttctggtccctctccctcgccgcctttcctaggtttggaatgtctcgagggaggttagagacctgggcatgaagaaactgtcggtttaaccgggggccgggtttacgaatgccctatata

SEQ ID NO: 234038 - DNA, 1812 bp, Homo sapiens
  chr9:6644339-6646151
  hyper
aatctgctacaaaacgcaggggaagctcgcgggggccctaggataaagaccaagaaccgcacaacaccgactctctcctaacacaaaactgtctgctccgagaaccaaatatcccaccttcccgcggctccggaggtacccgccactgttttattttaatccacacattcccagtcctgagcaatccttaccccagagctcgattttcagggaaccacaaaagacaaataggccagaataatctaagtccaagggagccctcccggccacttacaaacagggtcttccattttcaagggtcttttcaaacggatgttggcagggaccgtcttctcgatcaattcatcaatgctctaaaattaaaacgcaaggcagaggaaagtgcctctgagttaaaagagtcacctctgtgttttgcgactacaaagccttgtgggaacctcattgaaatcgcctaattagggttctttttaaaagaaaaggaaaactctgagcaagccagaatgatttggaggaaagaaaatcgtgaagtggggtggagattccgccactcggggttggatttcagttgcaaccggagctaaccggtaagcccactcttaatcagggggtcttcctcctcttgcaaagtttaggtccatccacagggccacttgggctgggggtggtttaaaaatgtacacttttgaggcacgaagactgggtgcaggagaaagtaagctgttaagaagtaagaaggcacgaggaccaaaggcacgaatttgcttccacgccacggcccgggacccagggtgcggggaccacgcggagcgcagcagagctcagggtaggagccgggaggccgcgcaggcagagcccgggcagggcggaggggaggccgcggagggccgggtggaggtccttaccgccagccccaaggtctgcagcatctctctctggtctttgtccccagggccgatgtgcctccgagcgaagtcgtcgtgtctgggcagaaggcgctccaggaggcgcgaggccccagccgcggcgctgtccccgccgccactgctgctgtcccggctccgcggcgcccagcacggccccgatcccccagccaggcggcggccgcccccgaccccgcggcccaggcgcagcccccacgccctggcacaggactgcatggccgcggccaccgtcccctgccccggcccgcaagggtcagccgcgctcttggcccctctcctggcctcggtcccccgggtggcggctgcgcccggcctggagcccctttcgctggacagtcggccggacagatggatggacgctcgcgggcaatgaatgggcgctgcgctcaaccaagacactcgcgcaaagttgtggctccacccaaggcacctgctccgcacactttaagcggcgccctggaggcgggaggtgggttggggccaggaagcccttggccaatgaaagtagacagagggggagggggcggaacagttcccgcccccgccccctcttcctaccctcttcccagcccttccgtggagtcccgcttcccctggaccggaggctgccatctccagtcctacccactccgacgctggctggtgccgggggccgggacgctccgtacgccgcccgccagggtgtggagccgcactggggcaagatcaggtgggacagcccaaagactccgggccaagttcctgggggactcggcggagatggaagatgattctcgaagctctccatttccttaattttgaggtatctttctctgtcacatttcatctcagggaaattaatatgggcagatggcggttcttttatctt

SEQ ID NO: 234039 - DNA, 1444 bp, Homo sapiens
  chr9:8856995-8858439
  hyper
actcttcattataaaagatgcgttcccttccctacggaatgaatgtgtgtgttaagtacaccagattcccgcagctgaactacgagctttgattctgccacgggaaggtctcccaaacaatccccctcctctatggcagctgcgtagactttgattcctgctatttctccttctccccactagttcagaggaaagaaagaaaaagaaatcgccccctcaccgtagtcagccctccttaaaacagtaatccctgcctttaaaaaaggcggtggcaggatccctgggtaagggtggattgccccaccgctccaccatttgcccccaatactacgcccaccctaggaggagagagcgggggtcgcacaaatacacatacccggacacccccattctctagagtcgcctctctcccgggtctgaggtttcaggcgagaagtgaacccagcaggagaggacctctgcccgaggaggtccagaggagcaaactgtgcgctccggtgcccgggcgccgggctcgcggaaacgcgagcgtgtcgctctggctcgggaggcgccggcagccggagccgggcgcagggcgattccggagcagcaagaggggaagacaccgcggggcggacggggtcagttccagggactcacctggtcatgttggccccgggcagccgccgccaccgcctcccgcgccgccgccaacactttcctccagcgccttcgcgccccgccacggccgcgccgccgcctccgggcggccaatttaatcccgcggagcagcggccgccgccgccgaagcccccctggtcgccgccgccgcccagccctcgtgcggccagcccagtccagagcgaggaagtggaagagagtcagcgagtgagtccaaaaacccgaaatccagcatccaaggcagcgcgtccccccgccctccctccacccctacccccttttcctcctcctccgcctcctcctcctcttcccgggccgtcctcttggcccttctgagcccgcggcttccgcggcggtttctcctcctcccgctcctcctgctcgccctgcgcccgcttctctcgctgccgccgccgccgctgtttgtctcctccccctcctcctcctcctcctcttcctcctcctcccgctcctcgatgctccgccgctcgcggctggggggtccggggccgcgtctcctctcctccctccgcctctcctctttcctccttcctgctgcctcttcttttaaagcggattctttggccacaaatagcaactcggctgcccccctcggtgcctccctccccttctcttcttccccccaaaagtgaagcgcacgcgaggtaaccagaaactgaggctcgtggggggagaggggtgcgaggcgacgcctgggaaagggcccgagcagagtcgagggccgggaggtggggtggccggtgcagcccagtctttggac

SEQ ID NO: 234040 - DNA, 821 bp, Homo sapiens
  chr9:10612635-10613456
  hyper
cgcgctcggaaagccggcttgggtcctgctaattattctgaaggcaaagtacctgcactctccccgccgaggctggctggcggcgccgcgccggaggggaggaggctcgggaggaggaggagaaagagcagcgggaggactcgggctgggaggggagcgcagggttggggaggccgatgagcggctcccggctcctcggagaagcagccgagacggcaaggaggaggcgaggctctgtcggggcgaggcgctgcccccacgcgctccggccgccggctgcgggcgcggctgggcggggagccgaggcggccgctcccgcactcgctcgctcgctcgctggcgctccctcctcgtctcgctcgcactcacaggcacacaccccacgtctccagcagctgccgctcggcctcacgcactcacctgcatttccttaacgagccacttgatggctgccagcggcgtgggccccgctccggcgggcgggggccggggcggggagaacgcggcgcgggatgctccgagcgcccgctggggagagaagcggcggcggcggcggcgctgcgggcgcgccagatggggcgggaggaggggagacccggcacccaccggcccagagctgcctgacgcggcctgggcggaccccgccgcccgggtgcctaggcacgattccagggatccagggtaaagcggttcgcgcgggaacaggaggatatgtcaggcacaggctattccccatcactatagccacagaggactggtccagatgcggatcccgatctgtgcttcttcaggtgttcgcgtgctttcggttattattatta

SEQ ID NO: 234041 - DNA, 155 bp, Homo sapiens
  chr9:12775118-12775273
  hyper
tccatgcacacgaccgaactcctctttcactgaccagagattatttctgacaacccaggatatcccgaaagcttggaggcatatggctggaaaatgaaacgacccaggacatcgtttctggctgcatcattattttgtgtcgcgtagtaccagat

SEQ ID NO: 234042 - DNA, 527 bp, Homo sapiens
  chr9:12775486-12776013
  hyper
cggaggagtcgcagcggactgggaactgcagctgcgaccccccgcgtcctgtgcggatttcagggctgataccgcataggcggttatggaaaggacggtacaccggagcggcggaggatagagaccctggcccccggagaggtctgctgatttcgcagcagccttcgaagccgtggctgcctttcatctgctgcgttttattactattatcgccgttccggaaaagtcatggaagacagcccgctgccagacctcagagacatcgagctgaagctggggcgcaaagtacccgagagtctagtgcgctctctccgtggggaggagccggttcccagggaaagggacagggacccctgcggggggagcggtggtggtggcggcggcggcggcggctgcagtagcagcagcagctactgcagcttccctccctccttgtcgtcctcctcttcgtcctccccaacctctggctccccacgaggtagccactctagcgccctggagaggctagaaaccaagcttcacctcct

SEQ ID NO: 234043 - DNA, 335 bp, Homo sapiens; identical to SEQ ID NO: 201668
  chr9:13034172-13034507
  hyper

SEQ ID NO: 234044 - DNA, 125 bp, Homo sapiens
  chr9:13278635-13278760
  hyper
gacgcccatcagcgcggggggtgaggagactaagggagagacaagaccaacgtgctcccaccaacgggagcggcggttaaaagggcgccggtgccaggggtgagggacggggcaccggtaccaat

SEQ ID NO: 234045 - DNA, 138 bp, Homo sapiens
  chr9:13278940-13279078
  hyper
ccgggcccccaggctaacaccccacccccagccccccgacaccaagactgtgcccctctgggtcaaggaaaaggaaaaacttttaaacctcttagtcagcgagagcaaaagaaaggggtggcgggggtgctgaaaggt

SEQ ID NO: 234046 - DNA, 319 bp, Homo sapiens
  chr9:13568805-13569124
  hyper
cctgctgtcacttacggtgggctcggggaacaatgttgcaggaacatagagcttttgagggaaatgtaaatcgccggcgacactgagtcccgtctgttttctcatcggaaagcagcatttcagagagctgaactggcgacactgcttggcgaagacacgccgagttcaggaatattccctgttcccaggccctggttgtgtcgaagtgggactttctgaagagggggcactctgggagagacgggagcaaaggggcactttcagaagcagatgctcctggcttcggaaggaaagctgctctaatcggagttcagccgtc

SEQ ID NO: 234047 - DNA, 267 bp, Homo sapiens
  chr9:14312998-14313265
  hyper
gcgcagtccagcggcgcccacacagactcgtgctacagtcccctcgcccaagttcactggctgtttttaaaagcttagtcccccgtaaagtcctccaaagcccgagtccacctcaacgcgcgagctgctgagaggggctacgggcaccccgggcggggatgccgcaccacaacgggcacttgaggggccgcacggggcctcgcacttacaggtcccggccctgcccaccccccggcggccttgcccggcccagcgcccgcgctccgt

SEQ ID NO: 234048 - DNA, 86 bp, Homo sapiens
  chr9:14313445-14313531
  hyper
gagagaaagctcgagaaagcgaccgagacatgtacctgagtgagacagatgggagaatacatcatgacttcgccttaaaacgcact

SEQ ID NO: 234049 - DNA, 78 bp, Homo sapiens
  chr9:14313891-14313969
  hyper
tgtgggttggattggggtggtggttggtggtaaaatgctttttcaaaaaaggcggggaggggggcgcgggagggcgca

SEQ ID NO: 234050 - DNA, 54 bp, Homo sapiens
  chr9:14314749-14314803
  hyper
catttgttaaaggtatcctaccggtgctacagaaccatgacttttttttttttt

SEQ ID NO: 234051 - DNA, 50 bp, Homo sapiens
  chr9:14322293-14322343
  hyper
tggtgtgtgtgtgtgcgcccgcgtgtgcgtgtgtgcatgtatgtgtgtgt

SEQ ID NO: 234052 - DNA, 77 bp, Homo sapiens
  chr9:14347274-14347351
  hyper
tgggggatgagaaacgaactccgtcccctgcacagtcagtgccttcgggggctccaccaccgcgcgctcccaccctc

SEQ ID NO: 234053 - DNA, 1426 bp, Homo sapiens
  chr9:14347634-14349060
  hyper
gatccaagtctcttcggtcaggtccgcccaaggtcccagaggcactggggggtcgggtgactgtgcggagtgtaaaagacatttccttaggaaacagacaaggcagggccaggagttccgcggttttttttccgtgcagaaatcactacccggcgacggctcagggcggtagagggcaagtcttatctgccaaggcgggattagattctctcgccgagggtcccagtatcccgccgcccagcaagggccgagcgcgcgcgcgcgccagggagctttggagcgacgcgcgtagtttcgcgtcgcacgcggtgtctggtctccgcgcaccacgtgcgctcgcggtccttggcggggacgttggtgctagcgatccgacagagcacccaggactaggtttttgtgatgccctaacctgggcatttatgctgggggcggaacgaagtcgcccaacccaagttctccctgcaccctgggaaggaaatgtggtgcgccctctggggcgtgaggccgccgcggcccattctacacacctactggcattccgcttttccttactgtgcgccaggggaaggcataattcaattatatcatacaactgcagcgcacccttttccttttttgctttgaggggaattttccaattcccaaataaatacctatggctctaaagccgagttgggttctgtagtaactaccgggggtgaaaaaaaaaaaagaccccaaattggctgtgagtttacagcctgaagcagcttatttaggctcgctgagcgccgttccaaacggcagggctcacgctatttcgggagaagttggagggtggagagaaaacaaggttatttaaagtgactcccagaacgcagctttcgttcctagactctttaggtgtcagtgcttcggctccagtttagcacggcacaggcggcccagcctttgatatttaagccaggccagcgcccgggtgaaactacctgttgggggattctgccgcctggaacccttcttcttctgcgcaatactggcagcagtgggatggctctgggggtgccacgcgaagagagagggcggaagagccgggagcagcggacagtcagctgcatgtggcagtgcctagcgagctgctcccgcgcctctgctcgctctttgaaaactggaaacagccccctgtgctctgtgctgggcccctggctgcggagatgggcccaaactcggcacgattctctaagttcggaaaccacgaagcttgcgccttcatgcgtgtctaacattaaaaacaaaaaaacctcctggcggcttcctgggctcccgcccccaccttgcgctccaacacccggcacttttccctgtaccgaaattcactttactacttcttgaaattcggaaaactccaccgacgcttggactcgctgcaacccaggggctgcct

SEQ ID NO: 234054 - DNA, 66 bp, Homo sapiens
  chr9:15306323-15306389
  hyper
gctcaggcccgggcgcgccacgactgaaggagtggctaattactcaaacacagttgaaaccaaagg

SEQ ID NO: 234055 - DNA, 238 bp, Homo sapiens
  chr9:16133902-16134140
  hyper
cgcgtgccaagcaccgggatcccagctgacccgagctcagagccctccaagagagcgccatctagtggagaaaacacataacataaataactgtgataagccttgcaggaggaaggaccgcaggcactaagtgagcacggaagagggaggagtaaattccgcacagattacggggcaggttcaccgggctcagtcagcctgaaaaggactttaatactctaaccgctggtgtgctgga

SEQ ID NO: 234056 - DNA, 196 bp, Homo sapiens
  chr9:16154651-16154847
  hyper
gcagcaaagaaaaagctgagcgcagctcctcgccgctcggccatctggcgcgctcccgctccctccacccttctgtcgctcacctggtggagcgcggcccggggacggcagggggcggctgtgcggctccgacgccacgctggtgctgcagcagcaagcgccgcgagccagccacgagacaggagagcccattaat

SEQ ID NO: 234057 - DNA, 161 bp, Homo sapiens
  chr9:16192255-16192416
  hyper
aaggaagcaaagaacgaggggtggagagagtcgtccccggaattgcatggcttggggcttggtccagattgcgtggcgaggagggtaagcaggcccagcagagggcgccaccgcgctggctctcttctcccgcgcagtgcaggcaacggggcggtgttcag

SEQ ID NO: 234058 - DNA, 768 bp, Homo sapiens
  chr9:16870007-16870775
  hyper
attttcctgccctgcgttctgcaccttctccgtaaagcctgcgggagcatttcctcccatctccatttaccacgggaagattccgaatgtgaagacaaggggagaggaagagtcaacgtgccgggcccgggcggctgcgccccagcgcacccggcacccacgcccagccgccggtccctcactcggcggcaagttgtaaaagttcccgtaggtcccagccgccttcctctcttccccgagctcctgccagcgctccattcatcccccactcccctccacctcgtccccccagcccgtccccaacgccctggagcctcccctagccagccgctcaccttcgcgcggaagccgcgagcggggccgaccttgagaagccccctctcacgtgcaccctcccacctagagctcgcctcagaaacttggggccaagtttaggggaggccactgggagcgcagcggggatcaggtcggaccggggttctggtccccggcccgccctcctcagcgccccttgcccctcacgccgcgggccggagggcggacacggcccccgggcggccccggtggcgctcgggcgcgggggtcatttctgaggaagtctagaataaaagaggaaggagggtggaaacttcttaccatctcggcatgctggttgtcaagtgcagcccccgcctcttggtctcctcttagcggccgcgcctggaccagcccctcggccgccgctggctccctccgtctcggcctttctctccctccccctccgagttc

SEQ ID NO: 234059 - DNA, 206 bp, Homo sapiens
  chr9:16871135-16871341
  hyper
caggggcttggggaaggaggatgtatgtttctccctccccccaccgccccgtgacttctttgggggcttgtttgttgtttgggttgttcttgctctctctttctggggatggaaaaaacaactttgtggggatggaaaaacaaccctggcgcccccccccccccccggggagctgcgggcgtggaggtagaggtggccgctagcgc

SEQ ID NO: 234060 - DNA, 50 bp, Homo sapiens
  chr9:16871521-16871571
  hyper
cccagccccgcacgccccctcctcccctgccccttccccagcgtcccagc

SEQ ID NO: 234061 - DNA, 322 bp, Homo sapiens
  chr9:16871751-16872073
  hyper
tttgtgccggcccagacgccggcttgcggcgagggcttccttccctttcccgtggtctgggccgcgggcctcgggctggagaggaaggaggctgtcgcgcccgcgggggaaagaacagtcacatctgtgggtgacactcagccgacccaagtcaccctgccctggagactcagaaacgccgactacagcctaagcgcgcacacgcctgcagctgaacgatatttcttaaatacaggcaaaacacactccccggccgcaagaatggggcgggggtggggggggagcttaatcatcatcatctaactaacgtacactttgtgcc

SEQ ID NO: 234062 - DNA, 35 bp, Homo sapiens
  chr9:17135711-17135746
  hyper
cccccaagcccaagttcttggtggtgacggtagct

SEQ ID NO: 234063 - DNA, 1481 bp, Homo sapiens
  chr9:17905991-17907472
  hyper
gcctacccagctgtcgtgggtccccgtcactcccgggcgcatgttgcaaaacaaatcaactccatgggaaaagctccatgagcgcccaggggacaagtccccacggacaaacatgtcataacgatttcagttttgtcccattacgtgaggttgtaagtttcttcatcattcccccctcccaacaagcacaaaatcgtccccagcccctggagcatcttgcggggctcccaggtcagcaacagcactcggagctccgagctccagggaaagcgctcagggaatggctcctaggactggttcctgggaaagcgccagcgtccagggagagatttccttctccaagggccggcagggtggcattccaagcgcgagcaaggtgggcagtgagcgatcctccctttaaaaaagaataaataaatagaagccagcgcgcagccccgctcgggtttcccgaagcgcacaccgctgtcgctgccggggcggctggatgtctgcgctccccgcctccgctgggctgacacgggaggggaggagcaggagctggaggggtgttgggggtggggggagcgcgaaccatctcgagccaagacaagcagcacattcacaaataacgcccccacccccagcgcacgcgctcccattcaaagcagacccgctccgcggccgcactgaagctccaaagccgcgccgcctgccccagcgcagctctgtctcgtggggcgcacgcccgagcccgcctgccggccgccgccgcggagccaccgcaatcagcgcaggaggcggccacctcttcgagggaggggtctcgcctgagactccccttggtccccgccatggggaccatggcacgactggaggcgccccagtgccccgggttcctggcccgcctcctcggtggcacctggtgcctgctctgtatcgccggacaggtagggtagcctgtgcgtcttgcgtccctcccggggactctgcttctaaagcctgtgctacagcgaaaagcgctacagcgtgggaggtgctctcttccgcgaaggtccatcctggggctgcgctgccgcccaggctggggacaagtggcgcggggttggggctaaggcgtaccctggggtcgatcgggtcgatctctgcgtttaggcttgacccagcttcctgggaccctgtcctggcttttcgcccttacctgggtcctgcttccagccaggcagagccggggcgagaaggcggcgcctgagctggggagctgtcatccccaacagtcctctaccccccaccctttccgacagtccttcgcggagccccctctctcgttccaggctgaggcttgggcggcgccggggacactcgggtgctgggacactcctccacacttccgcccttctgcggacctagtgaacttctgacactgtcaccctagggccgcccgcagccgagtgtcgggggcgcagcgttgtaatgtgtgcggacgccggaccaggtgggct

SEQ ID NO: 234064 - DNA, 301 bp, Homo sapiens
  chr9:18473916-18474217
  hyper
tcgcctttctttttcgtccttttcccccttttttgctcgcaccgttacactttctctgtcctcctggctttgttattcagcatgtctgattagcaggagcctgattggctggctgcctgctccgagagagattccattcagcttaccccccacccatccacccacccacccctcggtcaggaaatgtgagaggggctgatggaagctgataggcaggactggagtgttagcaccagtactggatgtgacagcaggcagaggagcacttagcagcttattcagtgtccgattctgattccgg

SEQ ID NO: 234065 - DNA, 448 bp, Homo sapiens
  chr9:19127115-19127563
  hyper
caagcaggccaagggacattcgatagcaatcgccctaaatctgttggcaggaaagaagcctcaacgcacaaaggcaagggtcgaaagcgcgggttcagcagaccgcccctacccagccaggacctggaagccgcgaggcgagcggggggtctcggaccatcacccccgcgtcccgtccacctttgagccccgcggggagcagagcagcggtcccaaggccccggggagccccccaccccaactgggcgccgctgggggcccgggaccggttcgctggggcacccactgggcgcgcactcaccgacggactgcagcgaaaggcgaagagcaggcgcgtcccgaagacgactccggctgccacgacccggtcaaagcgtggggcccgcgggcgcccgggctataaaccccgcctcgccgcccctccccaagcctccgcagcacgtgaccc

SEQ ID NO: 234066 - DNA, 149 bp, Homo sapiens
  chr9:19229764-19229913
  hyper
aacgactctgcaggcgtctgtgtcgataatgaggctacacttaggaggcgtgagggtactgactatgcaaatgagcgatttctccattaggaattcccatccccaaatctgggccgaaggagagacaccgagcgcggccagggactcac

SEQ ID NO: 234067 - DNA, 1008 bp, Homo sapiens
  chr9:19788232-19789240
  hyper
ttcccaggtggctgcgaacgtcaacgcttagcaggaacgattaagcgattcacagcactcaggggattgtgtaaatgcccggcccgggcgaccagcagggacagattcaactccccgggcgcaaagtcatctccagcccgatcctcgctccccctgaaaacccaccgctcgtctccccgggagctgcctccgtaggagaatgttcgcccccagccgcgccccaactttgccttgcgtggtcccaaactttccctggtggattaataggaaaataaatctaaaggacagacgccccacctgtgagcttggagctgggttgcatttggtgaggcgcttggcccgcatccccctgagtcgtttgtaggtggctggggaatggaagcgcccctctgcgcgtctcccccgacggcaggccctgccccacgccccccatcccaagccaaaagcaagggtaggagaggcgggggctccaaatccacgccccggagcacagagagttggctaactcctagcggggcctggggcgcccacatccacggcagagccacctgtgagcctgcagagcagcaacgggatgcgcgcaaccgggatgcggggacgaccgccacagcggctacagcggcaggcggggcgcagccgcccgcacttaccaggataagatgggaggacgcgcacacggcggggcccccgagcgcggcccgccgctccagtccgccggccctccgcctacccgctctgaggcccgggctctggctcgcactggctgccgctctcgccagccgggctgggttcgggaggagactgagccgctgtgagcccggcgctccgagtctggcgctgcccggcccccgccggcccctccctctgggctgtgcgctgtgcgctgggagcggggccgcagcgcgctcagctcccgagtcctttgctccacgcctcctgggcgcagaggcgacgctggcagccgtctcttaggagatttctccgcagtgtggacgggggtcaggattt

SEQ ID NO: 234068 - DNA, 812 bp, Homo sapiens
  chr9:20620358-20621170
  hyper
ttccccacagaacccgcggctaaccccagaggactggtgagggctggcttgggatgaataaacactcgacacctgacggtcctttctctgcggtgactttcaccaagccgaagtggcgcgcgcgcgggcaggcgggagccgggacctggcccgcgcggcgccgcgcacccggatcccgaggctacgccggcgagcgcggcgcggggggcggggagcgggacagcgggaccgcccgggccaagcgattgtttcaaagacattttttatcaagacccttttgtattcgagccctacctctttttggcctaggaaagctttcgtgcaagtggaagacgactttctccacaaagtgctgtatgttactgtgctccggaccgcgtacgaacaccatccagtcgtgggtgaagccctccacggtgggttttttcctcacctgggcgcggtgccccagctccagcttcacctgcacggcacactgcgggcagggggaggagagacagccgtgaataacaggaaggcgaggtttcggcagtgaacgttgcgcctgacatttttttcctccttcttgaaacgcacataaaaggaaacggcggtgccctctgcatccacgtttcacgcgcgtgggcgcgcacactccacacccccaaatatacccgcccgcccggcccggcttggccccaggcgccccgggccccgcatctacatcggacaggattgtaacggaatgttatccccagtcgggaagggggtcggggaaaagagggagaacacactcagccacgacaagcacgacaacaaatgcatcggaaaca

SEQ ID NO: 234069 - DNA, 149 bp, Homo sapiens
  chr9:20621410-20621559
  hyper
gtgcacaacaaaaatgagacgtcgtcatacacactgaaacacacacacacgcccgcaggaaaacacgccgaggcatccataacttagagcaccccgcaccccccagcgaaaagccccacgcgatcggcgaggccagtcgaaccgagccc

SEQ ID NO: 234070 - DNA, 33 bp, Homo sapiens
  chr9:20622339-20622372
  hyper
tgctatgaatgagagcgcgcccaggagcggagg

SEQ ID NO: 234071 - DNA, 476 bp, Homo sapiens
  chr9:21395908-21396384
  hyper
tggacagcactttgtaagctcgcttcctgattgttcatgattttcccctttctccgaattcgggtctttctccgcagaaatggccctgaatctctaacactgactacggcacgatctgattttgagccgtcagtcccctcaatacactggcacattggtaaaacggtctcgctaaaatgttccatgagaaaaatgtctcgggggaggcggcggtagagctctccctctgtagtcagagccgtgaaaggcggcgtttactcgctgctcacgaggcctgcggaccctaatccccaagcgcccgggcctccactctgcggaccccaagcgcgggtctccttgaggaaggggcgaccgcgggttagggtcgctggtgggtccgttaccgctggtccggcgccctctgtcggctgtttgtaacagcaaaggcagctttgtgcgctgttagcagtggtcgcgtgctcagtgtcactgctgtg

SEQ ID NO: 234072 - DNA, 535 bp, Homo sapiens
  chr9:21402536-21403071
  hyper
tccccagccccgggcgctcccaggacccgtccgctcgccccagggtccagcgtgtccccttccccaagacgtccccgccctgcgcccccacacaaacggaatccccaagattaaacccgtgcgatctcgagccctcaagtcccggaatcaacgggtccctctgtaaaaacaagtctcgctgaagtctctatgggaaataaaagccccaaacccaggggaaaatcccgaaaataaaaggtgccctgctggctacctgaggaagatgtctcaagggagaccacggcggagctgcctcctgagcagcaaaagagatttttttactcaggtcgaagctgcacaaagttggcgcgataagccgcgacgacgtttccctggggctgcgggacgccccgaaactcaaacccgcggttcccaaatcctgggcatcaggaaaacccattctggcgccttgctgcggccgtggtgcgcagcgctgggagctttgcgctctttgcgcagcgggcccgcgccccttcgaggccggctagtgaatctc

SEQ ID NO: 234073 - DNA, 977 bp, Homo sapiens
  chr9:21559113-21560090
  hyper
aatgagctcaactcaaacatcgctgtatgaaagcgctctccgccaacacgctcatggacacacacaactccttcctcgaggtttagggacagagagcgaacctgtgacttcgggccaggatgacgacctgagatttggacaagaggaggcggcggttccgcgaagagccaagggcggccggcgctccgggatgcgccggaccccgcggcgcatcctcgtttgggcgccaacgggcgccggcggtcctcggacccgggtgtcgactgccgtgtgcccactgccgtgtgcccaggccccgaagcctcctcaactccttgaggggcgcctccctagccagctcagcgcgcagcgggaccaaggctctcccagcttacctgcgggtccgagtaggaggacagaagcgccgcccggcctcgcccaagcgcacacgaaggggccgcttcccgccccccgcaccccagaccaggcggctcacggaacaccgcctcccagctctggcccgggaccaggcggtcccccagccggcttcggcgccgcggccggggacgcgcgtcttccttctccaggcgccggacgtggaacctgcgagcccctggcggcgccccaagttatgcacaggtcgcagctgctcaccaagctcctcctgggaggccgccctggtccccgagaggggcgcgcgggagtggacgttcccgcaccttcgccccatccacacctgccgccgccgccggggccgccagcgccgtggctccgccccggctccgcccctcgccgcccccggctcccgctccagccgccgccgcgaccgccgcggaaaggagggggagggaagaggcgcctggacggggctgcgggagcggccgtgctgagcctcctcccttgggcccggacgggacccaggtttctccactgcaacgcagctcccgagtgacggaattttgtgggggaagcggcggccactacgctcgcttttggca

SEQ ID NO: 234074 - DNA, 931 bp, Homo sapiens
  chr9:21964891-21965822
  hyper
aaaaaaaaaaaaaaagttgttttctgctatttcctgaactttattacgtaaatgagacacgtgagatctggaaggaggtggaggtgaagaccctcccacctggcctgcatccagagtacttggggtgtggcactggcgtgggccccaggaaggatcccagccagttttggtgctggaggcccggccaaaggaagggctgctctcccgtcccgcgggctccgaggtcgccgcacccgggcgcgcctgggcctcgtcacccgcgctcgtgacgcgtgcttacaaaggaaacttttacaggtttcggtgggcagggccttttattgcccttctgctccacagcccccgtgcttaatcggttggttgggaggtttctttcgtccgtggttttggaaagtccccgcctccaaaccgcagtcccgcagtcagttctgcagcctcagggcctcgaacagccatgcttagaatccgtccttctttcctgctccatctacccttcccctctggcttcttttttttcactggagaaagcccacccgagtctctcagcctgcttcggaggttactgcggcctcctccacgggtagttctgggacccgggtctagtccgcggttccggagcaggtccctccctggagtcgtcaggcccagtatgcgtgtgctcagtgtgctcgggaaacacgcgtgggctttaacagcagatctccataaaagggtcccggagatagcctctgcctggcccgaggcccagtgcctcaaagcggacgcctttgcgctcccggaggtgctcacaccacagcggagcctgctggcgagtggagcgtaggactgcgaaccagcaatctcccgagaagcggcgagggggaggggaatgtctgtgaatcggttatccctcccacccccagcagaagtcggggaaatgggggtggaaggg

SEQ ID NO: 234075 - DNA, 196 bp, Homo sapiens
  chr9:21967349-21967545
  hyper
gggtctcagaacgccgaggcggggactgggagccgagtcggattccgagactatgggccagggttggctggattcagttacctggctgaggcctggtgagcaaaatatcccaaacctcgcgtgatctggaaggggaagccggataaatacggatctccagatgtgccagtctcgagtctatcgatatgaggtcccc

SEQ ID NO: 234076 - DNA, 557 bp, Homo sapiens
  chr9:21968160-21968717
  hyper
ccctgtaggaccttcggtgactgatgatctaagtttcccgaggtttctcagagcctctctggttctttcaatcggggatgtctgcagagggcagaaagaaaacaggcgttagaaacctgaggtcaaagatgtgtggcacatcccgccctcctctcttgccgtccctaccggcattgaaatacttatggataaagttctcgcaatggcttcacgtgcatgtacccgccgccaccgctctcccacacctccctggtccagcagctagtccactgcccgcctggctgctccaggcgcgccgaccgctcaagcgctccaggtccacccggcggagggcagagaaagcgcgaccgcgcggcccgcagggttgcaagaagaaaacgagtgttatataatgagtctcagtggttgctcacaatgccaggcgcgaaggcgtgaagatgtggcctttcccttcccgcatccccaggcatcttttgcacctggtgcggagtgagccagccagcttgcgataaccaaagggcgcctcaggctctggcgctcctcggcggaatcccgta

SEQ ID NO: 234077 - DNA, 94 bp, Homo sapiens
  chr9:21974150-21974244
  hyper
aagtgaagggattacaaggcgtgaggcaccgcgcccggccgcttctgaataatttcgatcaaaatttatattcgatatttattccaacatacac

SEQ ID NO: 234078 - DNA, 1137 bp, Homo sapiens
  chr9:21974499-21975636
  hyper
agcccccagggcgtcgccaggaggaggtctgtgattacaaaccccttctgaaaactccccaggaagcctcccctttttccggagaatcgaagcgctacctgattccaattcccctgcaaacttcgtcctccagagtcgcccgccatcccctgctcccgctgcagaccctctacccacctggatcggcctccgaccgtaactattcggtgcgttgggcagcgcccccgcctccagcagcgcccgcacctcctctacccgaccccgggccgcggccgtggccagccagtcagccgaaggctccatgctgctccccgccgccggctccatgctgctccccgccgcccgctgcctgctctccccctctccgcagccgccgagcgcacgcggtccgccccaccctctggtgaccagccagcccctcctctttcttcctccggtgctggcggaagagccccctccgaccctgtccctcaaatcctctggagggaccgcggtatctttccaggcaaggggacgccgtgagcgagtgctcggaggaggtgctattaactccgagcacttagcgaatgtggcacccctgaagtcgccccaggttgggtctcccccgggggcaccagccggaagcagccctcgccagagccagcgttggcaaggaaggaggactgggctcctccccacctgccccccacaccgccctccggcctccctgctcccagccgcgctcccccgcctgccagcaaaggcgtgtttgagtgcgttcactctgttaaaaagaaatccgcccccgccccgtttccttcctccgcgatacaaccttcctaactgccaaattgaatcggggtgtttggtgtcatagggaaagtatggcttcttcttttaatcataagaaaaagcaaaactattctttcctagttgtgagagccccaccgagaatcgaaatcacctgtacgactagaaagtgtccccctaccccctcaacccttgattttcaggagcgcggggttcactaagtcagaaaccctagttcaaaggattccttttggagagtcggactgctctctccttcccctccccttcccctcctgcgtgtaaaacggctgtctggggcaagggtttctcagacgtgtacattgcctg

SEQ ID NO: 234079 - DNA, 241 bp, Homo sapiens
  chr9:21994209-21994450
  hyper
cgggcgcccctggcgctgcccactcccccgtgagccgcgggatgtgaaccacgaaaaccctcactcgcggcgggccgcacgcgcgccgaatccggagggtcaccaagaacctgcgcaccatgttctcgccgcctccagggccgagctcggcagccgctgcgccgccctttggcaccagaggtgagcagcgccactcctgcccccttaactgcagactgggacccacgcaccgccccctgcc

SEQ ID NO: 234080 - DNA, 134 bp, Homo sapiens
  chr9:22005969-22006103
  hyper
gctggggaacctggcgtcagtcccccgtggctgtgcgcaggtaccctgcaacgtcgcggtggccccgctcctcggccaagtccacgggcagacgaccccaggcatcgcgcacgtccagccgcgccccggcccgg

SEQ ID NO: 234081 - DNA, 298 bp, Homo sapiens
  chr9:22446679-22446977
  hyper
gacggattccccgccgccctcctcccagaaggtccccactccccgccccgggccctcccccggcttccgcgctgggccgggagcctgggtgggcggggtagcctctctagccttgccttcttggctggaggcacaaaggcattaacttagcgcccggggtctctgccaggctcacgggacagctgcacctctcagcgtctccagctccaggacgcggtcgtcccaactccttccgagtggaaagagtgtaaaacttttgtccgtgcgcgggtggagctcagtaggaccacggcgcgtc

SEQ ID NO: 234082 - DNA, 492 bp, Homo sapiens
  chr9:22447217-22447709
  hyper
agcctctttctgcgagcagcggccgcggccgccgccgccgctgccgccacctcgggaagcggaggctgcccgccggctcccgggctggagagcggggtaggcgcggtgggctgcggctacccgcggacgcccaagtgcgcccgctgtcgtaaccatggtgtggtgtcagcgctcaagggccacaagcgcttctgccgctggcgggactgcgcgtgtgccaagtgcaccctgatcgccgagcgccagcgcgtcatggccgcccaggtggcgctgcgcaggcagcaggcgcaggaggagagcgaagcccgggggctacagaggctcctgtgctcggggctctcctggccccccggtggtcgggcatccgggggcggcggcagagccgagaatccacagtccacgggcggccctgcggcgggggctgcgctgggactgggtgccttgagacaggccagtggttccgcgacccccgctttcgaagttttccagcaa

SEQ ID NO: 234083 - DNA, 559 bp, Homo sapiens
  chr9:23820895-23821454
  hyper
gcgagctgcgacctcgcgcggctgcgacgggcctcacctaacgcgcacgaggggatcatcattgctcctgccctgggcgcccgcggccctacaccacctccgcacacaacgcggccggtgttaagtctccaaacgccccgagagctccaaggaccgcgcgcgcgaaggcgccgtagcaagtgggcacacaccagacaccaccccggcgtgttccgcgggagaagccagtgcacacatcctcccgcaaggcggggttgccagtgcaacacaggaatcctgccctttttctagaaaagccccctcccccactttccctccaatacactcacctgcgtctcaacagtttccttcttgcgctacacgcggccgcacccgggcacgtccacgcccgtgcacgctgccaggcgcgactgtccccgctcggctcccgccgcccccaacctgcttgtgcccacgggaggggcggtgccacctcccgaggcgcccaattctctctactcccgccgcaacgggctgagctctaggaacttcgcgggcacaacctccgccgcccccacca

SEQ ID NO: 234084 - DNA, 336 bp, Homo sapiens
  chr9:23824157-23824493
  hyper
aaaatacccagtctcgccatcagttttgctaaccggtacttgaaaatgggaaacggggaacttatccaacctccaatttgtcacagttgtatagctttcgtattaattctgtacagacgtgaaataggtgggtacgtagcaacgtgctgggcataaattaagcaacaatggccacgcgaggtctcgtccgccgcggagctccagtggtgggcactgccaccttgccatccctagcccccaccgcccttcgcagagtccagtccgggaggctgacggtgcgctggctttcccagccggtagagtgggtggggtgaggagcaacgagacgttaacccc

SEQ ID NO: 234085 - DNA, 778 bp, Homo sapiens
  chr9:23825744-23826522
  hyper
tctgggtttgccagcgcatcgctgcaactaatgattaaagaaaccaaaccgaaacttacctttctcccttaaggtttttgtgtatgtgtgtttttaaagtaacggtgcagttctcccaataaggatgagcaagaagctgctggatagttctcttaagacagcacgaaacctaaactgtgctcggcttaaaagaagcaaataaaaagaaacgctttcgaccccaaagtccaatgctaaaagaaatggcgaaaaaaaatatgaaaggggaggggaaacttaaaaaagagtttaaaaagacggagagactaccctcctattgccgttcaactaaacaaaaaggggcaagaaaaacaaaccaaggaacaaagaaaagagacgaaagaacgttttttcaaaaagacgatgtctttctccttgttgctttttagtaggtcgctacaggagtaagctgctgcatctctaactaagaacagaaataggggggaggacgtcttaaaagggaggtggactggaccacagatttatagcaccgtatcaccaaccccttctctgcctccgcactgccgtgtgtgcagctgctctgccaggctcctatcccgggcagcacgcgcggaagtatacgccgaatcgcgccacaacgtaacttgctcatcgccccaggatcctgattggtccacacgcttccattgaggccgcccaggcggggccgcgtgagacgattggctatgggcttgtgtcactctcgagagctcaatggagtcccgtttcaaggtaagtt

SEQ ID NO: 234086 - DNA, 37 bp, Homo sapiens
  chr9:23830865-23830902
  hyper
agggaaaatctaggcgactaggcgagggtgaaggaaa

SEQ ID NO: 234087 - DNA, 515 bp, Homo sapiens
  chr9:23831118-23831633
  hyper
gacctgggaagaaacggtttttatgcttccgatgctcggaggctctttcttatattgaagatttatgtttccacttgtgtgcgatgcacgtctaatttgaaataataaaaccgggctgagcaaccagtcaatcagagccatccagggcgctccgcacgccgccctgccccccacctccctccggtctctaactctttccctcctcctccccctctcactctcctggccctccccgtcttccttcctccctcctcggctctcacacgcgctcacacttttacccccacgtgtgttcagatcaaacccttgtcccacagagcaagtgccggcaccgggccacggtgacaaaggcggagtttgtatcagaagaagactgaggcccggggagacacagcggctagagaaacagctgtcttatcagcccgctgcagagatggagatggcttgagaggtcctcaacagataatcacttgaataggtttgcaatgcgccaaacttcacgcttgataaggcca

SEQ ID NO: 234088 - DNA, 127 bp, Homo sapiens
  chr9:23849752-23849879
  hyper
actactggtttgtacgggtttctttttgttgttgtttaacgaccccctcctcccagcccccaaccctttgtgtgtgaggattccccttcaaaccacccacagaccgagcagacgagaagaaatggta

SEQ ID NO: 234089 - DNA, 253 bp, Homo sapiens
  chr9:23850241-23850494
  hyper
gcccccagcacccccgcgattacccgagtgactgcacttgcctccagccagctcaactgcaggagaggaaagccccatctaagttcactagccctgccacagtcttccactgcctgatgggttccttcaggaaaacacttccagaggcattcatccacttgaggtctggggttggctgctgctgcgaggctgctgcagccgaggctcccgcgagcagctgctaggatccttgccgtctcgttcctgcctcttt

SEQ ID NO: 234090 - DNA, 564 bp, Homo sapiens
  chr9:23850911-23851475
  hyper
gttcaaaaaaagtacgaaaaccatcgggtaatttccaactgaaccgattacggacggcgaatttatccaaacacttaagcaaggagaggatcctaaaatcgaaaaacgaaggcggaaggggcgagaagaacggggtggagttgggtggcggagcgagtgggacgttaactggccaatagtttgcaactgccggtcaacacgcgcagcctactcagcgctgctccggaggcgcgggacgccgcctccacgtgagccgcgctcctcccagtgcccgggacggtgtcgggggcgggctgcacggcgagaagggcaaaataaaaccagcccgagaggccctggctggggttgagactgcaggagtaacttctgcaccgaggcagcgcgcagccagtcggggaagaactctgcaacctgaccgaaagaaagtccgaccctctcgggagggctgccaggatgctggagcgagtgtcagggtccgagactcccaagtcgggcgagggctcctgcccctggccattgggtacccccctccgaccaacacccccgtcccgcttcagagcgtcg

SEQ ID NO: 234091 - DNA, 70 bp, Homo sapiens
  chr9:25677833-25677903
  hyper
ctcaagtcgggccctcagggccctggggctgcccggctcgtcctctcggccgctgtctctagccctccgg

SEQ ID NO: 234092 - DNA, 130 bp, Homo sapiens
  chr9:25678383-25678513
  hyper
ctggcagggcggccggggtgacgacggaggaggagaggaggtcgcgggcggcggctgctggcttagagccaaaggaggccgggaatttgcccagactgaggcgtgtcctgtctcctgtggtggagctgcc

SEQ ID NO: 234093 - DNA, 688 bp, Homo sapiens
  chr9:26892268-26892956
  hyper
aggaacatgaacctcaaggacggacgaccttgagattgccgcgctagcagtgagctccagcctgcgccccatccctctggaagcccgacttcttccgaaaaagcagcagctccaggaagcggccagaggggcgcgcacgcacctgctgcaaggagcccgagacgctggaagagtcggtactcctccgcttccggcgctcgctgcgctccacgctgctcccgccccaacagctgccgccgctcccaccgccggtgacacttccactaaaattggcgttcccacagcagctgacgctcccgcagcccccggcgctcccgcagccgctagtgcttccactgctgccgctggccaacgcgggtacgatgtccggggccgcgagcgctgcggccgcctcctgactgctacgtttgcgccgtttctcccgggaggactttttccccgtcatgatccctctgctgcaaccatcggaggaaagtccgctgtctctggtgcgaccgaagcccgactcctgcggccgtgggcggcaggcactggcgtcgcaggttatgcgtcacttccggccgtggcacagaacgtggtgaagcgttatgggccggggtggcaggggggttgccataaccagttgcgcttccccctccggtcgcggaggtcgatttgagtgtgtagcgggtagcctgtctagtcagag

SEQ ID NO: 234094 - DNA, 63 bp, Homo sapiens
  chr9:26956461-26956524
  hyper
gaagttaaggcacccgcgagccgggcaactgccctccttccgcgccggcggaggtgagaatcc

SEQ ID NO: 234095 - DNA, 469 bp, Homo sapiens
  chr9:27528537-27529006
  hyper
ggcctcgctggggtcgggctcctccactttcccagctgggatcccctgccggagctggcgtgggggccggggagggggaccagaggggcttccttctctccccaagccccgccagatgttggaaaggcaaacaataggggaaacgcggagaaacaaaaggccattcgccacgatctcagtcggctgcgtagagagatctctgtggggagggttaggggagagggtcaggaaagagcgcgaggggggggatcccgagagatttagagtctctggtacttgccaggcaccaggggtcggcgctttaccctcccagcaggggtctgaaggtgggaaggggcaatcaaagaaaacttgaagggttttcaccttcttccccagttcagggaaagggaggggctgggattccagatgtttgacagttgttggccccaaagttaagcgcgatttgtacggcctttacacgctcccc

SEQ ID NO: 234096 - DNA, 1276 bp, Homo sapiens
  chr9:29211831-29213107
  hyper
gaccaaccacccagcgttctccgcaaaaaacttcccttaaagcagccaaatattcaagggaggcgggggaaattgggcattagttcgaatacacatacaacagagcaccacggagcaacactgaaaggcaccttttttagatacagaccctatagactctctctcacccttcactccctcccaccctgagtatctgactgagaatttacagagaaccaagaggcgaaaggagagtggaggagaaagagggcattacctcccggggctgccctcagggtgcgggtcaggatctcatccccgaagtggctccagttcaaggcacagctttccagagctcagccgggttcggacctgcgtccccgcggcgcggtgcggagctcggaagcgcgccgggactgccgctcacgtcccccgcccctgccgcgcgggctccgccaccccgcgagcacgctggctctccgcgctcaccccgccgcctcctggcgcccccacacccacccgctccgcggcgcccgctgggagcctctagcggaggcgaagggaacagcaggcgacctgcggcgcccaggttccgacgccggttgcagggagccggccaagcggcagcgtgggcttcgcgcgcccccgagtccgcaggccgggtgccgccgccgcccccacctgcccacctgcgccaggctcacctgccaccgcgtcctagttgcgttcaccggtgcccacagctctctatggcaattgggggtgggtctgcggtgctaataaaaatttaaaaaaaaaacctctctggtaaaaaaacgaaaacccaaaacccaaatccacgctgtatatcaacctccacagagaacccagtccgaaatcgttttccaataggtttcagaaagtgtgaggacaggacactcctctggcttcctgcctcgcagctgggcagcgccgcaccggctactccctgacttgccaggcgggtcgtgcgatcgcgtagcgacgcccggagagatcctcctaacttgacttaacccccaccccatccccaacatctattttaagttattgtctctggcaattcaagcagcagctttgctgcctcttaccttgaggcgctgttaattctccttcgtgtccttaaaatcccaagccaaggatgcgacgcacacaagtccaggggcttttcctggacttccccctcctcagctctgaaggctcctcctttccaagggatcaggaggggatggcggttcaaaagccctcaccatagaggcgcctccaagccttcgtacca

SEQ ID NO: 234097 - DNA, 46 bp, Homo sapiens
  chr9:29213767-29213813
  hyper
gcaggcagttcctcgccgcacgccgttaagtccgttgggccacctc

SEQ ID NO: 234098 - DNA, 874 bp, Homo sapiens
  chr9:29214173-29215047
  hyper
ctagcttttggaactgggttaatttaggtgctacgcttatattgtaaactggacggtagcaggtgaacggctcagctggagaaaggggagggattaggagtctggagacccaacccctttagcagccatttccaaggttttgcaccaggagtagctgtccgggtctctggctagctcctgtcccaacttctttttcttccctcgacggtcgggagggatcactgggtgctacaccgctggggcgtcccaggcaggagagacttcgctctcagaagcgcccccgtgtcatccacaactcccacgaaaggagcttcccaagaggagtttgttttacccggaatgggctgcaggaattaattgcttacagagagtaaacttttgcccgttgtttttttgttttttgtgctttttttaaccaaagcttgcatttgtgctccgcgtagtttctattgcaacagagcgctactctgccttttcaactgtgagacagaggattgctgaggatttctgccctctggggcttcgcgaatatctatggcttcggacctgctagcggaaaacgcaaagttgcccagcttggagatggcaccaggttcctttgctctggcgctggatgctccgctccgccacccaccgccgccgtctccatcgagaatctcctcaaaatcaagggagttcttgactgtccctctccaaattggaaggcggttgactttgccgggaaccgagttcctgagcggcaaacgtggagtcgcagagcgcagaagtgaagatttaatacaaaagatgaaacttgtaggatgacctctagcagcgctactcacagctctgaaatcgatccagagcattccacagtgagcgttgcggctcccag

SEQ ID NO: 234099 - DNA, 997 bp, Homo sapiens
  chr9:32782695-32783692
  hyper
cgcccagagctgagcggcgtcgtagggtggtggtcctgaccggtcaaggccccttctcctcgtgaactgggggccagggagcccttctccctgtccccccggcaccacagcgctgtagaagtgaaatcccggctccaaggtcaccctctcccgagcctggagctggaaagccacggggactccggggactcccccaaggcccggactagcctggcacccacccctcaccactaacccactccgcctgggcgctggttctgtgcgctcccgcggcgcagtcgctccgctgcaagagcgctttcgcgcgccgccaccgcccagagccgggaccaaagcagtcctcgggcaccggctccccgagggacacacacccccccgcgccccgagtcgaggggttgagagaagggcggtcggggagcccctgggcctgccgtcagtcacccggatttgtaactggagaagggtgcgggtcccggagggacatctccagctggcacctaactcctcggatcccggactgggagcccgagctcggatattgcaacggctgccccgtgggcaaaccgaccctggtttccgactccggccactggcagcctcgcgccccagacccttcccgggcacggaagcgggtcaggtcgccctgctcagcctccggaacggcggcggcacaaaccccggccgctcccagcagccccgacgagaccccgggcagcgcctgccgccgggtggcctccctctggggctgaccccctcgcgcccccgcgcgtctgtctgcgtttctgagcctgctctgacagtgatgtaacaaggccaggctcgcgccgcgtcccctctttcccagactcagtgctccctcctcctcccgcgccccgcgctctgcgcgctgagctggcgccgggctccgcttgcacagcaccgggaccgacgggcactgctgggagagccgctctcccaggttccacctccccgatgcagagtccgtgggggaaaccag

SEQ ID NO: 234100 - DNA, 225 bp, Homo sapiens
  chr9:33166527-33166752
  hyper
ccctgtgcggtcccggccccacgcctccaacaggactccccagggacccacctcgcaaaccttctctcccatccagtcccaagcctctgtctgggatttaaaactctgatccagaagagggaggctggctgtcgtagaagagccagcctgagggaatgtctgggggaccctgtcggggaaatccgggggggtcccaatcctccgactggcgccgacccgagtcct

SEQ ID NO: 234101 - DNA, 85 bp, Homo sapiens
  chr9:33290497-33290582
  hyper
gaagtccggggcacgtgacctggtgacagtgctgacttggctgtacagctcgatctaggttctgcggcacgggatggcggaggcg

SEQ ID NO: 234102 - DNA, 773 bp, Homo sapiens
  chr9:33524019-33524792
  hyper
ccctggagcggccccgatctctcttcggagaagaggggcgggagtcacggccaggcgggaagggatgcgcgcctgagattccggaacgtcccgcgccagcccaggagaacccgcaagccagcggcgcctgagcccgagctgcagtcaccctctgcgggccacgcgagctcgagggcgccttccggagtccgggctggcgctgagctgtaggcgcgcgcctaaccgctttactgggctcactctatcgagaggtcggaggctgcgagtgtcgctgctgaaggctgtagtggaccgggctggatcgcggattctgagctacatcgcgggtttgggggtgcatcttggatttaggggtggatcgctgggtggggagggggatctcgaatttggagctgggtgggggtggaaaggccacgaggagccgcggcgtctcaggagcgggtggtgggcatctgagaagtcgccaccatgaggaagctcctcagttttgggagacgcctgggccaggcgctcctgagctccatggaccaagagtatgcgggtcgggggtaccacattcgggactgggaactgcggaagatccacagggcggccatcaagggcgacgccgcagaggtggagcactgcctgacgcgcaggttccgggacttggacgtccgcgacagaaaagacaggtagcgggggctcagccctcggtgggagggggcccccaggcccggtttccccgcaccgcctgaggcggggtcgtcggagttcgccgggaccctgggagc

SEQ ID NO: 234103 - DNA, 685 bp, Homo sapiens
  chr9:33676778-33677463
  hyper
ctctggaccgcagccgggtaatggctgcggcagcagctgctggatggtggcagctactgggcctgcttctcctcagcagccagaggcctggcagcggcggcagcggaatggggagaagacgaataatcctccgaacggctgcctcctccagcggcctccggagcccgggccacggggggtgcggcggcggcggacgagaggtttaaaaccggcccgggtccctccatgtgccgccgccgccgccgccgccgccgccgtgttggaggcagtagaaggggagagaccaactctccggcgttcccagccctggaaatggtgacaggcgactcagaccccctccctggagctgcagccgccggggccaccgggggcgccgccgccgccgcttctccccccgctccaggagggggaggtgccgccgccgccgcgcctcagccggctcccgcccaagcccacggcttccaccttccctttcaggagaagccgaggaagaggctgcacagttagaaaagacgaagaagaagcgagaaacgccgccgctgccggcgccgcccccgcggatgctcacgggttgctgagaggggcttcaggccgggccgggccgggccgccgccgccgccgccgtctctgtctctcatctccctcgcctgagcccggcctcgcctcacagcggctcaacattcaa

SEQ ID NO: 234104 - DNA, 121 bp, Homo sapiens
  chr9:33816693-33816814
  hyper
taagtggagggaccgcagactgggtgtcacggggaggggcctgcagcgaccaggcccgtcccaggatggctgcggaggcccctggatccacagtggggagggccccgagagccgggagacc

SEQ ID NO: 234105 - DNA, 191 bp, Homo sapiens
  chr9:34178911-34179102
  hyper
cggagtagctcctcgctagaagagagattagttatgtcaccgtcggctcctcccattggtccgggcgtgtggagcgcggcgccatgacgtcagacgcccaaatgagtggggcggtgaggggaaggaggagggaagtaggacttcaacatggcggctgcggcactggcggtggctacggtgacggcctggcc

SEQ ID NO: 234106 - DNA, 51 bp, Homo sapiens; identical to SEQ ID NO: 201695
  chr9:34377388-34377439
  hyper

SEQ ID NO: 234107 - DNA, 205 bp, Homo sapiens; identical to SEQ ID NO: 201696
  chr9:34379700-34379905
  hyper

SEQ ID NO: 234108 - DNA, 490 bp, Homo sapiens
  chr9:34380723-34381213
  hyper
caggccttggagcccgagggcgggacacggcagggcctcgagagcgtgcagcgcggggctagagcaggctgggggcctgcacggaagctggccgggctggaagggggcggggttctggggcggggcttgtgtggggtggagcccggctgaggcgggcggagccctgcgaaccttacagtcggttgctcccggcaccaaggccgcaggcggcggtcggtgcagggcgccccgctggcgtagtagtccatcccgcgcagacagtagtggcggcccgagcaagcactttcgtaaccatggaagggcaggcggccgggcagcgggtccacgcacccgcatcggggcgtgatccgcggcagctgctggttccgcgacagtgagttcagcatgttcaccatcacttcgcgctctgctcccgcgggtccccagcgcaggagacccaaagacagatgcacagggatgggaagaggccgagtcacggacagagtgaggc

SEQ ID NO: 234109 - DNA, 155 bp, Homo sapiens
  chr9:34458519-34458674
  hyper
cctactccgctgccgcctcctgtcagcagctcagccactgcggtgactcggcaactccacttccgggtccgggacaccgcccggatcttgcattattcatgaggaggcggtgcctggggaccccagccccacccacatgcgggagttccgaatgc

SEQ ID NO: 234110 - DNA, 1164 bp, Homo sapiens
  chr9:34589067-34590231
  hyper
cgcgcgcgggcgcgcggattcacacggacacacatgcactggcagacgcgcaaccgtcggttcgcatccccgggcgctttgaagtccagatttctgcccgagaaagaagccacctttgggcgcgcaaaggccactacgaacctccccaaacccaggaatttttccagaccccgcgcgtgcagctgaggggtggggagaacagggacactaggacaaaccgccggagccacctccctctagtccacagtcggccccaccaccaccaccacgcccaacccccggagcgcccggacgtggggggccgctcctccagcgcccccgcccccgagtttgcaggcaaagtttctcgtgaactttcctgtcgcccccgtccgtgggcccacgggtgtcccctcactcttcccgcacgcatgagggccgccggtctgctggtcagcccgggctctgagggtccggccgcgcgcactccgccgcagggtactcaccgcgccctcgggccacccgggcttcgcgccgcgccttccgaccgcccccggcagcgagcgaggcagggagcgcggagctagcaccgcccgccggatcccaccgccgagcctcgcgccgcgccggctggagccgccgcctccgctgccgccgccgccgccgcccgctctgcaccggctcttcagcgctcggcggctttaacccccccatcctcctccctccctcgcgcgctccctccctccttctctcgcccatgtgaccgcgggcgcccgctcggccgcgcgcgccctcgctcccctccccctcttgccttgtctccccgcgcctccgcggccgcgcgccacgacccctccccgccacgggccccgcgcgcccccgccttggcacgctctcgctcctggcacacgcggtccgctcgccctgcgcgggcctgtgagcccccactcccactcgcccagcactggcacgcgctctgcccccccgctggcacactcgtccgcactggcacgcgtggccccctcgcgttcaccctttctcgggcgcgccctcaagacggctgtggtccccgtgcttcacgcgcagccccggccgcgggtctcgcaaacgcgcgcgcgcacacacacacacacacacacccactcggcccgctcccctagggcggctgggcgcgcactcaccccc

SEQ ID NO: 234111 - DNA, 82 bp, Homo sapiens; identical to SEQ ID NO: 201698
  chr9:34647225-34647307
  hyper

SEQ ID NO: 234112 - DNA, 346 bp, Homo sapiens
  chr9:34664959-34665305
  hyper
tggggaggggcgctcggctcgaatggcgacagcggcggcagagtcaggaggtcagtacggtgggcttcggtttaaatctttaatgcactggctggctgggcagcggcggtggggctgcggcgggggaagccacgacccgagcgctggggagtaggacccaggccgctggacagacagctcatcaggcctcgcagaggctccagcttctgctccccggggtgcgccgagctgtggggcgacccgacactggcatgaggcggggcgggagctaccggattccccccgatgggtcctcagagactgagtcccgtccatgcccggggcgggtccgcggtatcgcagcctc

SEQ ID NO: 234113 - DNA, 962 bp, Homo sapiens
  chr9:34701363-34702325
  hyper
gggctctgggcgaccggggcatgtgtgcggatgtgtgtccgcgcccgtgagcgtgcccatgcatctcccttcctgggcctgcagggggcgccccgagcctgggaagggaggctctggagtggggcgcggctgcggcagaggggtgggcgcatgcggctgtgaccctgcgagctcctcagagaggctgcggtgagcgggcgtccgaagtccctgggcctggaacagcctctggcgccctcccggctccctggccccgccgtccctggggtccccgcgcgcgggccgggcgtatggaggggaggctcgggctgtgggtggtgcccgcgcatccgatgacctgggccgacagttaccccgggccaggacaccgccgtccggccaaacccctgccacccaggcccccgagcctcgggggtcctctgcggggccggcccagcccggtggccgggggaaggcccgtgtttgtcggcgaatatgaagcatttatctttccctcccacgccccaaatagtcccgatttacccagagcccaaggtgcccaatgttgaagtcttgaaataattactgtttggcttaaaggctgaaggagggttcacatcacctctggcacttcgctcgcacccgatagatatcttacaccactcattacggggccaacgctaagaaaggtttccttattccaaggaaatatattaggcgcgaggctggggctggaggatgaagggctatagcctgacatgggcggaaaaggaacttgtcttgcccataagtggacacagggaaacgcgcaacctttggcctagaatgagacacatgtgagaacaaatcgtgaaaataattgaaaacaaattggtcctagaaagatgaaggaaatgagaatggaaaattcaacccccactcctgttttcctgtagcagacagaggactgctgcctcctggtggccgagcggggcagtgagcgc

SEQ ID NO: 234114 - DNA, 366 bp, Homo sapiens
  chr9:34809638-34810004
  hyper
agagagcacgagggcgaaagtcgctggaagagtcattctcacccttacgggcaggagcggaacaaagtgttagcggcctcagccctgcgccccctccgggcggacactgttcttgctgcagttggccggctgtttcagtccccgcgccgcagtccagggcgctcgtagagggcgccaactggcacctgggcccactactcatccgagcccatggaaccccacttccgcgtccccccaccgtaagcacgccggtgcccctagctgattcgggaggccagtacctcggggcgcgggggcgcggggcggaacgcagcgcgcgcccacctgccggccaagaaagcctcgcgtgggcgcacgcgccgccgc

SEQ ID NO: 234115 - DNA, 769 bp, Homo sapiens
  chr9:34957704-34958473
  hyper
cagtgccaggggtcgtgagcccggagccctgcgggggacggctggtaggccctgctggatgagtcattctccccaccccgggcacgtgctggtggcggcatccacccggaccccgccttccccccacccaacccccggcgcggaacgcgagcggtgagcggccccagcgcccccaaggcgccccctccgggccgcctcctccgggcgggcactgtccttgccgcagtcggccgctggcgcagtccccgcgccgcagtgccgggcgctcgtggggggcgcccacgggcacctgggccgtctgctcatcggagccgtccgccgtcctcccgcattcccacggcgccccacgcccgcgcgcccgtcgccggtcacccgccgcccgcggagccgcgagggcgtctcctggaggcgcaagaggactgggcggggcggggcgcgcccaccggccggcccagggcacctcgcgcgggtgcacacgccgcagccccccggggcgggtgggtgtgctccggccgcgcgcgccgccgccgccgccgccgccgccgccgcctcctcagcctgccgctccgcccgcgccgcctgctgccggcgctcggcccagcacgccggctctcgggctgccgtgggctgcgcggggcccgcggtgtgtagagtccgccgccccggagccgcgtcccgcacccggacggtcccggtaagcgggggcgggggcggcggggaccgggccgtcacctgaggggcgggtctgcggccgcggacagtcctccgg

SEQ ID NO: 234116 - DNA, 36 bp, Homo sapiens
  chr9:34989007-34989043
  hyper
ggggctctgaaacccggcatccgtggggtctgttag

SEQ ID NO: 234117 - DNA, 228 bp, Homo sapiens
  chr9:35096044-35096272
  hyper
tagagcataggaacgttcacatgtacaggcaggaaatgctaatgctgcctgtacatgtgaacagtcaggagggaaacttattccaattggtagtcaggctctcttacacgccgtttctgcgcctctcccctcgccaatctcaatacccagtggaaagggatcgaagccgcaggggaatccgggcccagccgacggcgccgcctggcgggcaccgaggggacgaagggg

SEQ ID NO: 234118 - DNA, 179 bp, Homo sapiens; identical to SEQ ID NO: 201700
  chr9:35116361-35116540
  hyper

SEQ ID NO: 234119 - DNA, 668 bp, Homo sapiens
  chr9:35162011-35162679
  hyper
ggcagctcctacctcccagcgatggcgtcgctgtgccgcgcccagtccccagcctgccggccggtactcaccgctacccggagttcgctcagacggtgagatttggggcgggtccgaggcagcggcgggacgctacctgcgaccgggaccatgaggagctgccagacccgtggggccggtaacgagagcagtcgcggcacctgctgagaggaaagagggagcggtccggcgcggctggggcgcggcagaggcttgcccgatcctcggccatgtcactgctctgcgtgcgcggtgagtgcgcggactgaggcggggaggcggggtgtcggcgtagaggtccccgcacccttccagtggacgtccggtgaccgtctcacccaaactttacatcccgtccgtgctttgggggtctattattttggcaatcacttaacaatcacttgagttctttccactttcttgttttcccccaagctcctgcaagggacgattagctctccattctggtagccatgtgacaatgttgttggactgcaggctcagatcctattaaacagtgactggggttctctagtgagagtggacgagttagaagaccgcggatggttggtgcctgtgaatggtgggcagcctctcattcttttcctcctcctcgcaccgtaacgcta

SEQ ID NO: 234120 - DNA, 131 bp, Homo sapiens; identical to SEQ ID NO: 201703
  chr9:35489689-35489820
  hyper

SEQ ID NO: 234121 - DNA, 46 bp, Homo sapiens
  chr9:35490107-35490153
  hyper
gagacacgccgccgccgccgccgccgccggcgcggaaggacgaggc

SEQ ID NO: 234122 - DNA, 464 bp, Homo sapiens
  chr9:35616960-35617424
  hyper
gtaggtgaattgggaccatccgcaggggggcggtgcacgtcggattcaggcgcaccggatgaaggtgaatgtggcacggcagcccgggcgtcggaaggactgcgcccgggtttatcccggaaggagctgcaccccgcggggcccagcgccatccgcagccgggacaggcgcgagcacttggccccgcggctgccccgcacaggcacactcacaggggagaatccgcccgacagctggtgacgtcacggctctccaggacgcagttggctgctccgacttgaccgctgtcgaggggagcatccagtgtgagaccggaagccccgagtgttgccccttctcctcctgcgcacccgcttcgccctcgccactgggaaactccagtctgccctacgttgcctgctagagctgctctgggacacagtgtcactctcctgagttcctcctctgcccgggactctctcggc

SEQ ID NO: 234123 - DNA, 132 bp, Homo sapiens
  chr9:35675615-35675747
  hyper
atctcccctacagccgtccctgaacactggtcccgggcgtcccacccgccgcccaccgtcccaccccctcaccttttctacccgggttccctaagttcctgacctaggcgtcagacttcctcactatactct

SEQ ID NO: 234124 - DNA, 301 bp, Homo sapiens
  chr9:35675927-35676228
  hyper
ggtgagggggtctccccgccgagacttggggatggggcggggcgcagggaagggaaccgtcgcggcagtgcctgcccgggggttgggctggccctaccgggcggggccggctcacttgcctctccctacgcagtgcaactgaccctgcctcctgggctagagatggctctgggtcccgggcgggagtaccgggctctgcagctgcatctgcactggggggctgcaggtcgtccgggctcggagcacactgtggaaggccaccgtttccctgccgaggtgagcgcggagctggccgagaagg

SEQ ID NO: 234125 - DNA, 73 bp, Homo sapiens
  chr9:35676258-35676331
  hyper
gacgtggccctctcctaccctcgtgtccttttcagatccacgtggttcacctcagcaccgcctttgccagagt

SEQ ID NO: 234126 - DNA, 922 bp, Homo sapiens; identical to SEQ ID NO: 201704
  chr9:35756561-35757483
  hyper

SEQ ID NO: 234127 - DNA, 231 bp, Homo sapiens
  chr9:35815225-35815456
  hyper
tagtccgtgtgaacgttcttttcccattggatccccttactagtttctctgtgagagaaacttccactccattggaaggattaatggagcctggaggtgggattttctcctagttgaatctgatacacaactctggcttctaggttgcggctcccgagtgggtggttcttttcgttcttggttcgtcctcttcaggtctggttcctattggtgcgcggggagaagggggcg

SEQ ID NO: 234128 - DNA, 892 bp, Homo sapiens
  chr9:36036748-36037640
  hyper
ctcctggcagaagccgacacacagttgggccataacaaagagccctggtacggggcacgttcccgcccccgggaggttttggaaacactgtgaggcagggggcggggcttgagcgggccgcagccagtcaccaaagggccgggcgctgggggcggggcctcgcgcgagcggcggcggtagcggcggcagcggctgcggccaagctgggtccgagcatcccgcggctctggagccgcccggcccggacatggcgaccgtccgggcctctctgcgaggtgcgctgctccttctgctggccgtggcgggggtcgcggaggtggcagggggcctggctccgggcagtgcgggtgagtaacctccagagcaacggttcgaagctgtcgggagcggccgccacagcgctccaagatggcgcggggcagggggcgggggtgcgcgcgacccccagaccctgcccacgtccggcgaccccgggaccccaggtctcagcgctccagaggctggtgccgaggcggggcgagtgaggaactctctccgccccaagatcttctgggcggtgactcgggtttgaggccttggtctgtcacccaccgacacgggccccctcttcggcactgaccccttcgcttgcctctgctgcttgtcagaaaagggtgcgatgcccccgcccaggatcgtcgcgaggtttagatgggatttcggatacgcagccgccctaccgcggccctagttagttattgttacttgttacttgacccgcacttggttcataacgaccttggtggcggtgagcactgacggtccccacagcccgcgtggtgggtcctggactcgggcaggagacattaaaaatcagtaaaccctgtcccccgggggctggcaggcttgagga

SEQ ID NO: 234129 - DNA, 998 bp, Homo sapiens
  chr9:36136266-36137264
  hyper
ctccccggaccagccgccctccggagcccagagtcaccggagatgggggcacaccccggggctgcgtgtgtcgtgtcaggccgcggcagggagaggccgtcccctggtggcgccggccggaacgcccctcgtgccgcgaccgcgcgcccctctgtcctcgccgcgcgtcggcgcagagcagccacccggggcccagcaggcgcgggcttccccacgcgccccgggaagggacagctcggtgtggggtccgggaggcttgagccccgcggccgcatccggggagccctcggcagtcgcggagctgcttcccaggggtgagctctccgggaggcccacggggtggccccgggcgcctccgccctcagctgtcgctccttataaggcgggggccgggcggcgccggaggaggggccgcggcatcagcccggtcctgggctctggggcggcgctgggccgggcgagcgcagtgcagcgcagccgcggggagcgaggagcgcgcggagccggccatgggcaagtcaggtgagcccgcgggctcgcccgctgcggaatggttcggaaccccgcgctcccggacctcgccgtctccctcgtccgccgcaagccaggtcctggggagtgcgggagcccggggtgcgggtggagggcgcgcgggcggagcgccccggcgcggtttccggggaacccggggggaaggcgagcccgagggaggcccccgccggagagccggggatcgcgccaagttgggcttcccgaccctgaggggctgcgcgccgcggcccgccaaggcgtggcttctgctttgtttcaggaggccagacttagagttggaaaagtcaccaaagtgtgacaacagctctcgctgcgaagcagtttgccccgctcggctgtcccgaggacagccctgagcatccccctcatccatttgttgttccttctctcctgagcgcccgcgccgtgccgggctccccctgtgctaggctcggtctggctccctt

SEQ ID NO: 234130 - DNA, 505 bp, Homo sapiens
  chr9:36258447-36258952
  hyper
ctcgtcgctcgaccttgtccccactcctcgctcgcccagccacgcccacccggagtgccgaatccgcgatcgcgccctgacgccacccgagagagctcgcgtgattggctgctcccgtccccgtcccccaccttcccggcggtattttgaggcgcaggcagggtgctgaccagcggaccatcttccatggcctctgccgcgctggagctgctgcggggctgtcctgccagcttgtgctcccgccccgaagcgtcctcctccactggcgacacacgcactgaagcccgagtcttcccgctgggtagttgttttggtcttgcacccaaggagggatttcttgcgcctcttgttccctcagttatttcataaaccaggaccgcaactatactgtcgtgtagcgcggccaccccacagcggtccctgacgttaacccttgccgtgactgctagaagacactggtggagtgtgaattgatgaccaaggcatggcagagcctctctcatct

SEQ ID NO: 234131 - DNA, 33 bp, Homo sapiens
  chr9:36258985-36259018
  hyper
ggaactcccagccagtcccgaggcctagggaca

SEQ ID NO: 234132 - DNA, 220 bp, Homo sapiens
  chr9:36572867-36573087
  hyper
ttcccttggcgggcggaagcggccacaacccggcgatcgaaaagattcttaggaacgccgtaccagccgcgtctctcaggacagcaggcccctgtccttctgtcgggcgccgctcagccgtgccctccgcccctcaggtcagttctcccgcctgcccgccgcagtcgcagttgatggctggggtctgggctgtgcggggcgcagcggcccaaacccagtt

SEQ ID NO: 234133 - DNA, 416 bp, Homo sapiens
  chr9:36739584-36740000
  hyper
agggttggggggtccgggcccctcggagcgggacggctgtcagcccccgcggtggccgcacaaaggctggggtcccggcgggcgcacctgggtgatgggcacctcccgagactccccgggacggaggcctgacagcgcgcggcggccgccttaatagactgcgggatgttctccgggagaaggctgcgccggtccccgaggacagatcatcaggcagagtggtccccggagcaggatttattagcagacaggatggggaagttgattagcctccgcggctgaacggacatcctgtcagacaggcctcttaatccaatcacttacctgtggaggggagccggctgcctcctcctggcccccttcctcctcccatggcacctgcggggccacgcggggtgctccggagccagggtaca

SEQ ID NO: 234134 - DNA, 89 bp, Homo sapiens
  chr9:36748473-36748562
  hyper
gacggcagcagctccggcccatacaaagcagcaccatggacagtggcagaccagcctgagaatgcctgccaccacgccagacacaaccg

SEQ ID NO: 234135 - DNA, 564 bp, Homo sapiens
  chr9:37002513-37003077
  hyper
cgggccgggggactcgctcctctgcaggtaaggggggtgttcgcgggcacctctgctgccacccgcgaccgagcgccggaaacagaccccgtggagcgcatccccgacggggctgcgcgggcctctcttaccttcgtctctcttgcgcttgttggtgtcggcgctgggggacgtgatgcccaggatgccgctgatggagtacgacgagccggccgaatccgtgctcaccgaggacacctgcgtcacggagccagtggacactgcgcggagaaagacgggcggtcagggccgcagagggctgagggcggcggaccggctgtcaccgcacgtgaggctgggggcggctgggagggagcgagcgcagggtgggcagggggcgctgaggaccctcgctctgcggaggcggccacacctgagccacgagcgcaggcctcgggcgggccgtgtgccccagttctctgcgatggggggagaaagggaagggtgggcactgagaaggactgacccctgcagaaaggaacacggggacacggggacaggaagggctttcgcttaaattccagc

SEQ ID NO: 234136 - DNA, 983 bp, Homo sapiens
  chr9:37025280-37026263
  hyper
tgccaggccactcagcactgcgtggcagacacggacatgctcgccccgggaagctcaccttcactccagccgggtctctgctgcctttgttaaataggggacctgcggctaggaaagctggatcccaggctgttgggatgggggggagcggggtgggaggaccaggcatggggacggctcctagcccgggagcaactccctgacctgaagcccgcagagaccccgagcggcacccgagccgaggctgccgaagcctgtcaccttcctccagcctggctctgcagcaaacagaaaggaaacgcgattcgttccacttggaatttccttgaaatctccgaatctaatccggcgttaactcaccgtgagaggagcgctcatctcacaggaggctgtggtaatgggtgaattggcaggatccctgcgggccaggcagccaggccggccttgccctcgccctaaatgacccttcccgtctcctacacacgctgcgtctttcagaggcgggggtgcctgcgtggtaactaattggcttcctctttctttctttctttttcgtttcttatcctctttttttaaaggggagaagccatgagaaaaggcgtcctgcagagaaggacccaatggggtctttaagggtctctgtatgaactggccggctcctaagcagaagctgaactcagaaaccgctacttccttgatttttcaaagccccctcctcaactccaggacgcctttggagccctagccccggtgtcctcgcttagctctcaacctcttcctccacacatacagacacgggtcagggccccactatccctccaagcgccagtctggatcagccccatggctgaaaaaggcgccatcggagtaggggtgtggggcgctgtctgagactctgactggcctctccctacaacttactgccctccaactggcctggcccggagccctctacgggtccaagccagggttctccgaaagag

SEQ ID NO: 234137 - DNA, 71 bp, Homo sapiens
  chr9:37026443-37026514
  hyper
ccggccttagtacctgacccacggtccggcacccccaacccggtcccggcgggagagtgagagaagcgagc

SEQ ID NO: 234138 - DNA, 82 bp, Homo sapiens
  chr9:37028014-37028096
  hyper
ggctggacctccccacagcgatgctgggatcctgggacgctctcaaggcttgagagcagtcgattgaagggtgagaatgggg

SEQ ID NO: 234139 - DNA, 237 bp, Homo sapiens
  chr9:37028480-37028717
  hyper
tggggcgcaccagggcgcacctgggtggaggggctaaggctttgggccaggttgcccaagcagagtggctggccctctttcctgcctcagatcaggaactgccagaggctttgggagctggtgttgcgcttctgtccaccggagaaattccgcacccggctcaaggcttcttgagaaccgaatgagccaagtcgcgtccagggctaataagggtccctgaagcgggcgggtggacag

SEQ ID NO: 234140 - DNA, 227 bp, Homo sapiens
  chr9:37029408-37029635
  hyper
aaaacggccccaggcgggactctggggacccaggaggctgcagtgcgcgccggggtggagtggcggcgttatctcttctttgtctggaaccccgcctgtccggatcttcccctttcacccccggccttggagcaggaagatcgcaacagcagagagggactgggatggaatagacttcctgcactggcttcacccgatggcgcccagtgggtcggaaataaccagaa

SEQ ID NO: 234141 - DNA, 922 bp, Homo sapiens
  chr9:37029918-37030840
  hyper
acctttctcaaaagcgcctctccagagccgctctcgggatggtgggggaggggcgatgctgccaaatcgaagaactcggctggaatatgcccgcacacgcaggttttccttcggatacccgtgaggcttgcatagaatccccggggcacggcccgagcaggagtagcgccgattctccctttcacacagtaggtgttcggcttcgggacagtgttctgctgcgtggcacacacaggacccgtcttacctgtgcacccagagcagccccttcccgcaactctcggcgttcttgggggaaggagtttccctctggataggggtgattcatcaccgcccgagcgggcggcctctgggaagttccaaccccaaaaggcgcgaccggacctcataccgtgaccacctagcccagccttacaggtcaccaaacgacagcccagagaggttacgtgactagctcgaggctgcacagcaagtccatggtggagccgggctactgcgcctcagtcctgtctctgaacgcccacgagccgcagcctgggtccaggagagcgagactagcagctctcaccgcggctctcaacgcagtcgggcctcactctgatctacagtgatgcgctttctttctcccagtaacagggctttgggccgggccctgtgctaggcgctgggggcaggagaccgcgaaaggaaactatccaggaagaaactcaatttatgtgaaccgaattgcctttgaaagttttagtactgaaagacagcccattgagaataatgtgtgagaagccagagacctcgtttcactggggacacaccccctcccggcttccctttccacgcctcccagcgcactgcattaccgtggcttcaggatgtgggggctgctacagtgttctagtagcctgacatcgactctctcaaccca

SEQ ID NO: 234142 - DNA, 749 bp, Homo sapiens
  chr9:37034115-37034864
  hyper
ttttttttggtgccaggggccgctcacaggtcggaataattcaagccttccgctcccccgccgagctggggtagctgatcactgagctgaaactaaacgttttaggtggaaaaaaagcgtccgaaggcaccgtgaaatgattaaggaactaaagagcttctcgccatgtgagatcatgtcctgttctcgccaacatcacaagatgtccccagacacgccgcgcccccagcgcgccgccccacactgccggcccggagcgaggaaagggtaggcgctgcgcggccgggcctgctcagcgcgccagacgtggcggacccggcccggccggagtagagcgggaagccgggagagcagcagtgctgctgccgcgccgccccagacttttataggggttggggggagggaaggaaggcttcagcctgcgccgggcgctagccagcgcacctacgggaaggggcagaccgaagcggagcccgggagcccgggtcttccagccgcaccttctattaagacatgcgcttgggggtcgcggccctctgcgctgtgcgcggggcctgtgacatctccatgtgcaaaccccgctgcttagacgagcgcaggccgggtttttgtttttgaagaaattaactgctcggccaagcaggtgcttttgaaaggggttgcaaaggctggcagtgttgccaggcaccgaggcgacgttccggtttactccgattcacccctagggcggcgcccgaccccagggttcc

SEQ ID NO: 234143 - DNA, 323 bp, Homo sapiens
  chr9:37035397-37035720
  hyper
ccagggcgggggagcgctccgtaggaggactcctggcccgccggacaatggcagttttggagagtgaatcgtcctcagcaagagtgttgtttgttttttggagggggtggtcacgaggctgggtcgcaacctagggggaagagcctagagctcgaggaaaggggggcccccggcggcaactggacatcacatatccactgagcagatttcgccacaatcggaaatgtggctgtggattcccgggcggcccccccaccaagtggtctgcgcagttccccagcgccgcctcctccctgcagcctgcgggcccgtgtccctacccc

SEQ ID NO: 234144 - DNA, 466 bp, Homo sapiens
  chr9:37035900-37036366
  hyper
gcggggggtgttggtgttttgttgttgttgttgtttccatttagagggcttgttttgtttttgtttgttttctgtgagttttcatttttccatgggatattcttttgtttcgggtgttttgcgtgttgttttttcgtgggattgattttagcgggttttgctctgtaagtcctggtctttggggtgagttttgattttgtgtaattttgtactttgtccttgtaggctgtctttttgtgtgtcgtttgtaaggcttttccttctccgcggtgtttagatgtgttttgatttggtgtgagtgggtgtcgtctgtgtgtgtgttgccttagggaatttcgtgttgtgtgtgttttgtttccttcgatttgaattttatttttttgaactgtacgttttggtgggggatcgggttatattttcatgtgttgtctttagtttttgtgtttgtgagatgcgctggtgagag

SEQ ID NO: 234145 - DNA, 138 bp, Homo sapiens
  chr9:37036846-37036984
  hyper
ggggagtctaggctcagatcggagtcgggatcccgggaaaatcccccatctcccttgcccgcagccctagaatcccagaaacccaactccgcgcagctttcggtttggagagcccgccctggtttgcaagcacagata

SEQ ID NO: 234146 - DNA, 936 bp, Homo sapiens
  chr9:37037362-37038298
  hyper
tccaggcccctgggcgctctggcattctgtgagaaggagaaagcagaagccgagaacagagagtgacaggaaaagaaaagagacgcagaaggggttggcctaggcacgctgcgagctgccctccagctaagacgctgcgggcaagggagggggaggccgacatcgccaggcgaggggccaaggtcgggctctttaactcagccaggaaacatcgttgggggctccagggctcgtggagcccgaactggggctcatttccggcccgatgcccctcttccccagacccctagcccggaatccagcaaaggctgggccatcgccgtccgccactgggcctccctctgtgcgagccctgggagaagcctcagggaacgactctggcactggggctcggccccggagctagcgcagagcgtgggtgggagtcgacatccaggcaggaggcaaagaagaggccccgccctaaagccgagggcccagttcttcgaaagcctgtggccggagctggactcacaggattcggggtccgtacagcgcgcacgtggtaccgcatcttcggcaggcggcgcccctaatgcccagccccgccctgcttcgtttgccgggcctgaactgtgtcagcattgagggtggacgccgagtcgcggcgagttggtcccttgcggtataaacttggggcttccctaggggcggtgccgggatggatgggggcgcctctccacctgcaactcccccagcgcagagcgcaaaaagtgcacatcgcgggccagccgtcgcctcggggtttcaggcggcgcccggggcaaaaaggagctgaggattggtttgggtcaaaacacccatttcagttggcagtggggtcctctgcgcctacagggcttcgagctccgggtgcgggctcactggggcaccatgtgccagcgactcgccacccgg

SEQ ID NO: 234147 - DNA, 111 bp, Homo sapiens
  chr9:37465508-37465619
  hyper
gcaatgggaagggcggggccggggtaggagtgcagccagccggcgcgcggaacctggaggaatttacttagcccccggaaaaactgaccaatccacggtccctgaagtctg

SEQ ID NO: 234148 - DNA, 148 bp, Homo sapiens
  chr9:37466215-37466363
  hyper
ttggccccgcactcggctgcaggtcaaataagcctgtagtctgcatgcccagatttataatcacctgcactccccccacaaaaaaataggaagcgctaagctctcccactcctgtcccaaacgtggaagggtcgcggacttgtatggg

SEQ ID NO: 234149 - DNA, 104 bp, Homo sapiens
  chr9:37485788-37485892
  hyper
aacccagagtgcacgcgagcgctgagccaatcaggtgctgcgcctcggccagtcaagcgggtgtgtggcaccttgtgggcggagaccacgcctctctacgcggg

SEQ ID NO: 234150 - DNA, 568 bp, Homo sapiens
  chr9:37576015-37576583
  hyper
cgcggagccgcgggcggcctgagggtacgcctcatggtcctgccagacccctgatgcccgaagcccgaccagacgctcagcctcggccaggactgagcggcgcctcctgggtcggtcgcctggggaagcgccccgggtcccctcccccggccgcccaagttcgcccgcagcctctgcgcaccggccgcttacctcacagggcgctcgcccaccgcggagtccgggccgcggccgccggtgccctggaagccacccgccgcccccgctggagccgcagcagccggtaggattgcggcgtgcggccagccccgcccgggggcggacagctgcctggggatcgtgcggagccgccgccgtcatgtgacgcgcaaggcggcgaaggatgccgggagcagctggctggccggggctgggcttcccgaccaccgcgcataaaagctgtatctgcaggaggggcaccgggaggcgggaggaaggcagacgaggagggggcgcgtggggcttcgggtactgcaaaggcgagcttgcggaaggacgattcaggctcgtgttgcgtggccccagaagg

SEQ ID NO: 234151 - DNA, 205 bp, Homo sapiens
  chr9:38067583-38067788
  hyper
agtcaaagctcttcgaagtcctagacagctctgactctgactttactccttggcagccagaaggactgactgggtccgtcttcctggggcaaggctgggccgggcgctctcgctcagaggggacgttctggaagcagcggcgaaagaggtggggtcaggaggccgccggtcccaggaaaagggcgcgggaggaggcagaagcggg

SEQ ID NO: 234152 - DNA, 188 bp, Homo sapiens; identical to SEQ ID NO: 201715
  chr9:38069786-38069974
  hyper

SEQ ID NO: 234153 - DNA, 43 bp, Homo sapiens
  chr9:38392961-38393004
  hyper
cgcctctgggtgacgctacaggagccccgaggacacagacgcc

SEQ ID NO: 234154 - DNA, 655 bp, Homo sapiens
  chr9:38424026-38424681
  hyper
gcgcgcaggcgcagcgcgcagacgctggggtacgagcgaccgtcggagccgcagacggtgccgcgctgcgcgcacacgcagagcccggtgccctcgggcgctgccccagcggcctggctcgcgcataccaggccggggccacagcgcccgccggcgcggcccccgcagctcgcgccctcggctcccaggcagcgggcgcagcagccgcactcgtcgagcgccgagatcccgggcgccgggcagggcgcaggcgccgggcagccctctggccggcacggaccacacttggggcgccggccgcccacgtcgcggatcccaaggctcggggacagcggcggcagcagcggcagcagcagcagaagcagcagcggcaagagcagagacaagcgcggcatggcttgctccgggacagcggcggcgcctctgcttcgcgctccgctccgcgcccgccgagcagtcaccgctcccgccccgcggccgctgattggccgggcctgcaccgcggggcgcccgcagaccgctgctccagcccgggacccgcgcggtgcccgcggcccgggtctccgagctggagggtcgccccgagagcagctctccgacctccgattggactcttgagggaaccgagacccagtcggggcgacaacttgcccga

SEQ ID NO: 234155 - DNA, 1355 bp, Homo sapiens
  chr9:38619920-38621275
  hyper
ggaattgccagcgacggaaagcagctgaggctccatttggctccgctgctccgagggtgcccggcgccctccaaggtccccgccccaggggctgccgggctgcagggaagccgggcctgcggccccctcccaccgcgggctgagtccccgagctacctgtcttttctgtcgcgggcgtccaagtcccggaacctgcgcgtcaggcagcgctccacctccgcggcgtcgcccttgatggcagccctgtggatcttccgcagttcccagtcccgaatgtcgtaacccggacccgcatactcttggtccatggagctcaggagcgcctggcccaggcgtctcccgaagctgaagagcttcctcatggtggcgacttctcagacgcccaccacccgctcctgagccgcggcggctcctcgtggcctttccacccccactccgccccaaatccgcgatctcccccgcaacccgcgatcccccccgcaacccgcgatccacccccaaatccaagatccacccccaaacccgcaatgtagctcagaatccgcgatccagcccggtccaccacagccttcagcagcgacactcgcagactccgacctctcagaccgagtgagcccagctaagccgttaggcgcgcgcctgaacctcagcgctccgaactctcagaccgagtgagtccccgcgatgccagttaggcgcgcgcctacaactcagcgccagccgggactccggaagccgctcccaagccctcgtggccggcagggggcacctgcagcacgggcgcacgcgtcgctggcttgcgggttctcctgggctcccgcgggacgtcccggaatcccaggagtgcatcccttcccgcctgagggcctgcctggccctgactcccgacccgctcctcctccgaagagagatcggggccgctgacaggggccctccgcagccaccggggatgggactggggggtcggttcctgtcccggtgcagccgccgccgggtagaccgcctggcttggccgcagccagggcgacatgtagccccggttctgccaggctgggagcgccagccatcttgggagttgccaggcagctgtcgccagcaggtagagggcgcctgcagcttgggcgcccaggtggtggagcacggcctaggcggcctctggatcgcgagtgcacctggcctgagagcccgccaggccctgcccctgctcggctcctcgtctgctgaagctcgggacctctagccagtggccctctgcagccacggggaatggggctgagagccggttcccgctgcagggcagaccacctagctcagccgcagccacagggacatctggccccggttctgagatgtgg

SEQ ID NO: 234156 - DNA, 934 bp, Homo sapiens
  chr9:38621395-38622329
  hyper
gcgcccagcctgagggcccccaggccgtgcctcccgcccattcctccaccggagggggatcggggtcgctggcatgggcacttggcagtcactccggatggggttgagcaggggttctcagttttcgcccctgtgcagccgccgccgggcagaatgcctggcttggccgcagccactgctacacctagcgggtcgggcgggccggggggtgaaagcgctgggaggcgggtgccttctcgccctgtggcgcctctgggccccacggcttgtcggcctccggcgcgcagggctccccagcatcctgggcgccggcccgctgcctgcacaaagtcaactcagacaggatgaacttcggttgccttgtctggctgggctgccaggcggggcagctgacctgctgatggggtgactttcttcatcttcttgcccacaggacagcgggctgggaagccaggggccgccgggacctggggctggaaaccacatctgcccacagccgcagcctcctgcacctgtcatcctggcggcgccctgacgtcggagaagcagcaggcgcggagctcctgcagcgggcaccgctgcagcaacccgacccggcgcaggcggcagtggaaggcggcctgctagcacggctcccgcggccccaggaccaggggtgcggccagcaccgccctcactccccgcgtctcgtggatattgccctccctggaggcggctggacctaagcgaggctcgcagcgatcggccccgcgaagactcgcatgcagggctcaggatcccgcattctggcgccgcggcaccgcacctttcagcagccctgctcctcttcttgttggtaaacttttgtcactctgccatgaaaagcatccaggcgtccttgatttcgacattgcgtgcacgctcagccgagctcatcagacgggcggttgtcccc

SEQ ID NO: 234157 - DNA, 120 bp, Homo sapiens
  chr9:66455089-66455209
  hyper
cgtgaaaacgaacgagatgaacacaactgcgtgtgtgagactatcacggcaactgtgacacccaggcgttggcaatagagttggcagcctgatcctgggacaaaggtactgatggacatc

SEQ ID NO: 234158 - DNA, 204 bp, Homo sapiens
  chr9:66455725-66455929
  hyper
gaaagttgtagagtgcgcccctcactgtggcaggagcagtggcgctgagcgtgcccacgggccgcggcttgggtctctctcattttccaggtggtatggccgtggacaatggcagtggcgcctggctggcccaagagcccagtccagctacgcctgcctgattccaggcgtcaccaccaacccgggggccgcgaggctgggatc

SEQ ID NO: 234159 - DNA, 470 bp, Homo sapiens
  chr9:66458086-66458556
  hyper
cgcagttgggaagcacggagacaaaagggggaaagaaggagggagcgggaagccaaaagcctacggtaccgctattaccaggcggaatcccatccaagtactaaccagtcccgaccctgcttagcttcaacagatcagaggcgagccgggcgcgttcagggtggtgtggcctagacgccagcagcggcgcctggctgccccaagagcccggcccagccaagcccgcatgactccaggcgtcatcgccaccccggggccgcgggtctcggatccaggacccccagaggcgctcgcccgtgcccccgggcagctgtctccctctacacccgaggaccgccggcctcccagagagtcccgccgtctccggcggccaggcctggctcaggaccaatgtggcaccgccctgctgttgttggggggcgccgccggaggcctctgtcccctgcgcaggcttccggctctaggggcgg

SEQ ID NO: 234160 - DNA, 139 bp, Homo sapiens
  chr9:69197624-69197763
  hyper
gcaggggggaaacagttggccgatactgttactattatcagcgttattagcggccaggacagtgtggggggcgggcgggggtaaggggcctccccgcgcctcccagcccttcgcgctcggctccagctctttggcttcc

SEQ ID NO: 234161 - DNA, 477 bp, Homo sapiens
  chr9:71319341-71319818
  hyper
tgcttcaattcagccgcgaaggatccgctaccttttggttcctattaagtgaatttagctttagctttcatgatagcattttcccaaaggagtcctttagatctgacccctaccctcttcgcagctagactgacatcaggtgacgttgcaagtgcccccagcccactaagcgctatcagtaggaattggccctcagccccgtcacagcgctttcccatgacatcccccagcttctctctcctaggacctcctcgccagcctacccctacctgttgggtaggtcttacttgctgggaacacctgctgtccttagaatgggagcaaccaacgccttggaatcctggcctgtcccttcctcgtgaagggggcgcctgcgctcaagtgccggcttcgccgcctcaggcagagtctagcaggcgggcgaccaggcgtagctgagttctgtggcctggggaaaggggacgccctatccccaca

SEQ ID NO: 234162 - DNA, 35 bp, Homo sapiens; identical to SEQ ID NO: 201719
  chr9:71320186-71320221
  hyper

SEQ ID NO: 234163 - DNA, 370 bp, Homo sapiens
  chr9:71320587-71320957
  hyper
cgctgtggggaagcgacaacgtcccgataacttgcagactgtggcgcaactggtcttggtagcggaggcacccgaatgctgcccgggtgaggtaagtttcctgtgcgtccccggccccttcccactagacccttctgaggggcttgcgcttaggggctctgcatctctgctgaaacccgtcggtctctctacccttccactttgcctgtctgcgttgtgctgggggtgacgtggagagggcgcccgtggccaccgaagcggaccttcgttccgcgggggccacagctgcgcgctcccaacggacacccacccgctcgtcacccggatccccggggccgcagtgacactcggagatcactctgggttcact

SEQ ID NO: 234164 - DNA, 568 bp, Homo sapiens
  chr9:71735686-71736254
  hyper
ctgggtagtgctcccgccctcacctattgtccgggtggaggaaccggtatttccggatgggggcctcagacccagtgatcccggctaagggtgaggctggcgggggaggggaacggaagcgggtcgtaaaagttaactttacactaaaatcattaacttttctcacaccccccaataaaagcagtcacctcccccccccaagagccccccacgcacccacagtggcccacaaccatgcttcccgggggctttgaagggtagaggagctgacatcctccttgcccagaccctggaaaggattaggaagcggacctgggcacgaatagagaaagaagcccagcaaattcctcttgcaccagctctgggaggaagctcagctgcagttctacgtagaagaaaagaggcggcaaagtaggcgcgcgggctccagtgacaaaggtctcccaggcagccgcggcccctgccccaccgctgagtggcgtgcgtgcaggcccaccctctccgcctttcccgacaccccaaagtagcgctgcgagcagctgcgtctccctcccggggctcgcgcgcc

SEQ ID NO: 234165 - DNA, 308 bp, Homo sapiens
  chr9:71736985-71737293
  hyper
gtgtgcctgaacacgcacctgcggcagccacaggtgtctgggagccaccttttttcttctccctggcctggcaccctttcactcaagggatggaaactgtttcactttctgctgagcttctcttttacccgattaaaagggcctttgaatttctgttggcgcagccaactgcatcgggtgggggcaggagccggtgccttggagtgacgcgggcggagcgcggcgctggttattggaagctggtggggctgcttgagtgcccgctgagcctccgccgcggggcttgaaaactccgcactccagaaagc

SEQ ID NO: 234166 - DNA, 51 bp, Homo sapiens
  chr9:71788550-71788601
  hyper
agaaatgtggggtacaaggccgtgtatgtgttggttagccgggcaggcctc

SEQ ID NO: 234167 - DNA, 975 bp, Homo sapiens
  chr9:71788841-71789816
  hyper
cacgccgcggagcgaaccatcgggctggcgggggtggaggggtgcaggcgtgggggctgcgggccgctcgggccttgggcttctcctgccgccgccgccgcctcccgcccccggccaggagtcgcgcgtgacgcggttcgccgcaggagcctcgaaggcgcggcgccggcgagcccttccccggcaggcgcgtgggtggtagcggccaatttgacagtttcccgggccgggcggccagcgcggaggcgccacgctcgggtcgggggcgggctgacgccgccgccgccgcgggaggagggacaaaggggtgggtccccgcgggtcggcaccccggcggttgggctgcgggtcagagcactgtccggtggtgcccaggaggagtaggagcaggagcagaagcagaagcggggtccggagctgcgcgcctacgcgggacctgtgtccgaaatgccggtgcgaggagaccgcgggtttccaccccggcgggagctgtcaggttggctccgcgtaagtgcctccttgtgccgcgcggttgggaggagggtcgtgagcgtgagcgtgggagcgctgggggctctgctcgcgtgctgctctgaagttgttccccgatgcgccgtaggaagctgggattctcccatccggacgtgggacgcaggggaggggtaggtttcaccgtccgggctgatgactcgtggcctccggggctcctggaacctttactctgaagtcacttgggctggagattaaggcgcgagtaggggacactgtcttgaacccggtgtcctggatttctgctggcttggaggcatctcgtgtctgttgtgtcgcttgcatgtctttgtgttttccttctctatttcaaaccacactcggtattgatgcaaagttacaggcttgtgtacgtgagagaaactgaaaactcatcacagagcagaatcccttttccctttcaatcagctgcgtctgtaatagaag

SEQ ID NO: 234168 - DNA, 1140 bp, Homo sapiens
  chr9:71939504-71940644
  hyper
tcctaccgagatgccgggaaagcactcccgcgccgatgcgaggtaggcacgtcctgcgccctgtgagcggtaactgcgctcggcgtcgtccttcccgaagtccttggcttacacctcttcccatcgagtcgccccaaagcccctcctccaggcatccccctccttgggcaaaagtttaagggcgggcccccttctcactaaagcgcgccagggcctctctcgtggctggacagagaaggctcctcgctcttctctagccccagctcggcgggtggggacagacgctgagactctcggtggccggcgctgacgtgtcctggccgtgaggtgcctcccacctcgagggacttacttaaatatttggggcagggcaccctcccaggaccccaggaagccggcgcaggttcggcggggaccctgaggctgtggcgcacttgccccggcacagcgcgagcacggagtgcgcgtgggtgagagtgagggtgcgcccagggccagcgggaggcggacccgccaggcggcaggtgggtgcggccggctggagccagggcagcggcagcggcggcagcaagtggttgggccgtgcgcatttccttccctccccctcggcctcggagcccgtctgcagtgcccagtgtgctgcgccttcggctcggctccgctccgcgtcctctgcccgccgcagccggccgcacccggccgcacccttccccgtccgtccatgtccctgcccgtggtgctcccgggctcctgctgccccgtggctgggctttcgggtgggccgcaggccgggggcccgggcgccgctgccgccgccgctcaggagccgccgctgcccccgctgcggccgcgctggccccggggcgcgctgcagcccccgtcgcggcctcgctgcgcggccaccgctgctgccggggtgctggccgcgccgccggcgctctcctcccgccgggcagtcgccgccgctgccgccgcggccccgggctccgcgctgctgcccgcccgcccgctgctgtcacttgggctgcttcagctgatcttgggctgctgcatggtggcgctcagcttcggggcgctgtcgctgagcagctccccgcaggtgaagaactcgtgcccgttctgggccggctcctcggtgag

SEQ ID NO: 234169 - DNA, 52 bp, Homo sapiens
  chr9:72288142-72288194
  hyper
agcacaggccatccgccctagatatggctcctaactcgagaggccacccttt

SEQ ID NO: 234170 - DNA, 189 bp, Homo sapiens
  chr9:72435610-72435799
  hyper
tttcttatcagtaacgacaacgtctaggaaacgtttggccgtcaggttggagggatccgcccctccactggccccgccccaggttgcttaggagataagagacgccgaatcttggtacttacgttcctgccgggcaggacaggtgcatagggaactcctcagaggtctgtacctcgagggctcccatgg

SEQ ID NO: 234171 - DNA, 73 bp, Homo sapiens
  chr9:72874193-72874266
  hyper
ggccgcgccgcgggtgtggaggtgtgctggccagcaggccccggggctccggcagcgcgcgggcgtgggcgtg

SEQ ID NO: 234172 - DNA, 511 bp, Homo sapiens
  chr9:73027343-73027854
  hyper
gccgcgtcccccctcggtttcaaccacttctctgcaacccgacaagagaattaaataaaagatacgccatctgacttccccgctgccagcgtctcccaggtggggtggccccaccgtcgcggggtgcgggagagtcccgggggcggggcgggacaggggaggggcggacaccactccccgcgaagccacgcaccgcactcgctctgcccgccagtttaaggctctccgtggctcccggaggccggggacaattaaggagagagtgagctttccgccaatgcacatttaaattatttaaagagttaaaccgcatcttatccaacatgtttgcaccctttcggccgagtgcagtgtcccgaacgcccaggaacgctgcctggccaaaggttaactaaccccagagctccgggggagagggcgacgccgctaacctgtatgcactctgtaatgggctttgagatgggaggattttccatagactttcccacagccactgtaggggcacttgtgc

SEQ ID NO: 234173 - DNA, 805 bp, Homo sapiens
  chr9:73028094-73028899
  hyper
gtgaccagtgtgcagtaatccttccaggtgtcccccgggtcaccgtgctccttggtcacctcgcgctcaggtagtcgcagccgctcggcgtccggagcgaccccatgctccggcaccgcagcgcggttcgaaatggaaaccagacactgggcagccacgaagtccatgtaggcggccgcggacatggtgcgggcgacggcagcccaggcggcgcggacaaacttggcggtggctgcggaggttcggctcgccctgccctggcctcggacgacgagcgcggcgcggcgcggcacggcgcggcggccaagggggcgggggcgcggggcgcttccgactcgcaggagcgccgaggcgacctcagcccctcatctttacgtaaccggcagcgcctccgcacgcagcatccacggccccgggctccgccgcgccgccgcctctagccgccgcccctgccccgcgccggccgcgatcccccgacgggcgcgccggcccctctgagccggctcccttggaaagatgccacacgtggcggtcgcaagtttattcgactgaaaacgcccccgaggcgctgggagaggaaactgcaagagaggtgcacgccctcggccgcctcgccgtcgagccaaagccccaggacattcacccgatcaccccgacgcgggtggcgagggtcccgccgagcgccaggtctaagagacactttttcccgagtccactgacggcttctgaacccctgctccggccggtccgcaccgttccggcattctcttgctcagtaacaatttcgcagaatcccatcacgtca

SEQ ID NO: 234174 - DNA, 254 bp, Homo sapiens
  chr9:73033410-73033664
  hyper
tgggaggggtggaccgtgccgggcagaactgccagcctccaggcgggaaggaaggaggagaacagatggcccactgggggtagaggatcacgtgttggacctcattctgggctgcatccagacctctccctttcagggcccagcccctccagctccagcgaccccacctaggcacacggaacatatgtggaggaaaccagtgttcattttgttgaaagcaggggaattagagaaggaggcgagcttgaggaggg

SEQ ID NO: 234175 - DNA, 35 bp, Homo sapiens
  chr9:74382903-74382938
  hyper
aagtttaaggctgttcgcaccgactttgaaaggtc

SEQ ID NO: 234176 - DNA, 694 bp, Homo sapiens; identical to SEQ ID NO: 46219
  chr9:74764248-74764942
  hyper

SEQ ID NO: 234177 - DNA, 49 bp, Homo sapiens; identical to SEQ ID NO: 201730
  chr9:74979547-74979596
  hyper

SEQ ID NO: 234178 - DNA, 32 bp, Homo sapiens
  chr9:74980723-74980755
  hyper
gctgccaatgccccggcggcgctgttctgaac

SEQ ID NO: 234179 - DNA, 740 bp, Homo sapiens
  chr9:77111652-77112392
  hyper
gagcatctgacggacgtttttaaaggaaggggacagctacttccatgggactgcattttagttgtgctaaaagtgatgaaagtgggtttgcattattctaccaccaacacccaaaccacctgcccacggaaacccccgccggagaccgaagtttacccaaatagcgctcggcaaagcgctgccataaattcaaaactaactctgccgggcccgcgggggttgcgagacagggaccgaacgtgaaacccggggagccccgcgtctcttgcctccgaaggttttccgtgatcagtgtccccttctctgctggagtcggaagtgcctgtcacctgcggatctgcccgactctcccggtcggcccttcttctctgcccagttcggacagtctcgaattccccgtcgcagccccggccacctcggactccctggtccccagcccccgccccaccccccgcctccaccacgtcccctccccgcggtcccagcctctccaggcgctgctgggctctgattggcggctgcgctgacagcaggcggggcctggaagtcgcggccaagcccgccctcgcgtataagcccctctcagcgctctctctccatctctcccctctctttctctctcgctgctcccttcctccctgtaactgaacagtgaaaattcacattgtggatccgctaacaggcacagatgtcatgtgaaaacgcacatgctctgccatccacaccgcctttctttcttt

SEQ ID NO: 234180 - DNA, 220 bp, Homo sapiens
  chr9:77112692-77112912
  hyper
catcaaaactgttaacatagcggcggcggcggcaaacgtcaccctgcagccacggcgtccgcctaaagggatggttttctcggcagagcagctcttcgccgaccaccttcttcactcgtgctgagcgggatttttgggctctccggggttcgggctgggagcagcttcatgactacgcggagcgggagagcggccacaccatgcgaggtaagcgagtctg

SEQ ID NO: 234181 - DNA, 84 bp, Homo sapiens
  chr9:77113632-77113716
  hyper
cacagtcggagagtcatgggctccggctcttttgtcagataaagggccggtagtggaaggaggtgctggtgcaccctcgggcca

SEQ ID NO: 234182 - DNA, 578 bp, Homo sapiens
  chr9:77113896-77114474
  hyper
gagacctcaggtttccttcgcgctgtgctcggcctttcttcactcttttactgaagagccaggcgggtgtccgcttgacatggggatctgtgcaagctctgggcacccacccccactcccagtccctcttcctggccacacagcggttaatcgggggctcttctctatccttcgcacgtacccctgggtcttgacaacagaaagttagtaacggccagctccagaccttcttgcatcccagacccggagagaggtggtctaggcagggagcacttgggagagttgggatgcaatcactggtctcctccttccactgaaagtgatcctctcccacccagtccccctacgcccctagaggagcaccccaggaggcagcgggtctcactcccactccctcccgcacccggtgagccccgagcctggactcaagggtttgctggctggacgctgggatgtgtcaggaaagggaaggagaagaaggaacggagagagactgtccatgggggagggggttgactgtagataagaaacaaggacgtcctgatgggatggtcttgattggccggctcgctgggagt

SEQ ID NO: 234183 - DNA, 165 bp, Homo sapiens
  chr9:77114905-77115070
  hyper
tgcagatgactgtcctggttcgccacggcggtcgctttgaggactccagaagctggaaggattgaaagccaggcgctggtcctcatgctcaccttgagaaaaccagtttaagcccacagacctatcaaagagggcgccagcctcgccaggcgccctaggacccct

SEQ ID NO: 234184 - DNA, 332 bp, Homo sapiens
  chr9:77115355-77115687
  hyper
aaagaatcagctttcgctcgtgcagggctactaagcaccctatgttgggagaggggccatttttgacctgggctttacggtgggcccactgcatttccctcatccacacgcgcgcgctttccattcccaggtggtcctagttagcgcctgggctccacagtttgcagctgacaactgtcctgaatcagggcgctttgagcgacggaaaggtgatctgggattcagtggtctccctcggggccaatccggcaaacctattcccaccccctactcctcccccgcctagggcatttaagagactatccccagggaagctacggggaaagaaaggg

SEQ ID NO: 234185 - DNA, 787 bp, Homo sapiens
  chr9:77501917-77502704
  hyper
tccagacaaaataggcgagaccaagaaattaccaggatctccactactctcccaagcgtctccagtgctctcccaacagccaggagcaccctccctctccaagcccccagaacttcctgttgcgccatatgccagcggtggagaggagccagcggggactcctgaggttgcaagtccgggcggcgccgcgttggggaaggaagcggactgcggcggggcgggtgtttaccgtaaccggcgctgtcatcgctccgggactcctgcacggggaacactgggcgcacggggacgcgcaggggcgcggagggacggccgtctgggcacttctccagccgcctcggaaagccgcgacccccggctagtcagcgtccgggtctgagatctgtgcccgtggcagctcaaaacgcgccttctctcctccggattctcagctcaagccacctccgaactcctctccctccggcccggagcggaatcagagctgcctcctctcccggggtgtttcccaccgccccgagctgaacccccgacccccgctaggtttccgctctgacaccacctccgctatggccgcatcccagctcttgaaacgggggctgcgggacctgccctgtagtagcgtacactaccttagataggataatcatctttgggtggagaccagagaacttgaaagccggtatttcataaatcctagctattctagatcctcgttagatgtagtgtccctggccccacccacttctatctaaggccgggggcgcagatctagcgaatcgcctaaggt

SEQ ID NO: 234186 - DNA, 77 bp, Homo sapiens
  chr9:77567960-77568037
  hyper
gcccgcagaggggcgtgaccttgtttcctcaggagtgtggcggtggtcttactactatgttcgttatagcgcggtac

SEQ ID NO: 234187 - DNA, 1471 bp, Homo sapiens
  chr9:78504963-78506434
  hyper
ctcacttccaaggccggaattgtactctcccgtggcgttgcctagtatcgcagatttcgaaagtgagcaggcaacagacttggctttcgagccaattctaggagtcgatgcgacttactgtcctgtgtggtagcttctcccgggagcagaaagtgtaaaataaacagctgctgaaaagcatgaagaattaacgaagtgaaaatctcgagttatttgttcggcaattgacacgtaagtgacctccttaaatgcctagttatttaaggacgtttagaacgaggatgaatgaatcttcagggcggttaattcgcaccggcgtgtaaatttctttagtctttcgggaagtggcggtaaattcatacaaatccagcagggagggaagagaagggagtaaaaccacgatctcggagcgctcttctcagtcctttggaaagacttgcctttactgcccggaaccctggaggttacagctgggcgaacccggaggcgctaggacctcgtcagcgcctggctgcggccgctttcaagagggcggaggagggagaggaggagggcgatgtgggaaaggaggggtgttaaggggggcgggggaagtcatttatgcagagcaggagctgctgccattgccactcagaatcctcgcgcgctgctcggagccggagggagcgctgggagcgagcaagcgagcgtttggagcccgggccagcagagggggcgcccggtcgctgcctgtaccgctcccgctggtcatctccgccgcgctcgggggccccgggaggagcgagaccgagtcggagagtccgggagccaagccgggcgaaacccaactgcggaggacgcccgccccactcagcctcctcctgcgtccgagccggggagcatcgccgagcgccccacgggccggagagctgggagcacaggtcccggcagccccagggatggtctaggagccggcgtaaggctcgctgctctgctccctgccggggctagccgcctcctgccgatcgcccggggctgcgagctgcggcggcccggggctgctcgccgggcggcgcaggccggagaagttagttgtgcgcgcccttagtgcgcggaaccagccagcgagcgagggagcagcgaggcgccgggaccatgggctgggggagccgctgctgctgcccgggacgtttggacctgctgtgcgtgctggcgctgctcgggggctgcctgctccccgtgtgtcggacgcgcgtctacaccaaccactgggcagtcaaaatcgccgggggcttcccggaggccaaccgtatcgccagcaagtacggattcatcaacataggacaggtaacgaactacaggctagcccagccctcggccctgaagccactgggggcttcttgtcccctctgcgtggaaccccctccccctcttccagatgtgctctagcagctgttgccctaactcttgggcgatgctctgtctcctgcgc

SEQ ID NO: 234188 - DNA, 1171 bp, Homo sapiens
  chr9:78506494-78507665
  hyper
gtccgtgttttgtttacttgtcttttccaagccacgcgggactggtagggtctcgggaaaaatccagagtgcccccgtggtggcttcagagacggctggaccttttgacctgaaaagtcgagtagcactagtaatctgaggcagtctcagagagggtgatcgtggggagagggggaaattaggtcttttgggggatagggggtgagcgcgcctctgatgcctgcggggaagggaaagcctttcctgctcggacctgaatttagcccagaaagaagtttcctcttgggcgagagaacctctggcgctggagactccggaggcgcggggactggagctggaagggaggagaaaggagggggagggaagagggggccggccccggtgtgagtgcagatttaggggagacctctaggctttctcgccttaagcgaggtccgcgtgggggctcccggaagggagttgtagtggggaggtgggaaacttccgaaaccggctggctgggttccgctccgggaaaacgaggagtcttaccccgggacggaaggtgccgggccgggaggttgcgccgtggggcgagagttgggcaggcagcaggggcgcggggtttttgtggggtgccgctctcgggcttttggcagagctctcctgctagggagaaatgcccataaactaaggtgatgctatgaggatgattggaagcgtaacagatttggaagtactccgggttcagtggtcttggctttctggttctcttcccccgacacccctgcgagaaatgggggtagagagggctatgaaagtgggtcccagaaagtacccccctccacatacacaccgcaagcatctttggggttggccggaggggcgggccctggctgggctcaggcgagaatccgctggaatgggaggtgaggatgatggatggcgcctttccagcaggcgcgctttggggactgcccggggtgcacgcaccctgcgtgctctgccagggggaagggagagggaggtgctggctggtgccggcggagtgggagagtacggacagtttctgaggccattgcgttccacgcccaggaacccggggacaccccccgcccctcctccccgccgcctgggggatgcggcacctggagaggaggcagagctgctgtcgccgcgtttagaaggagct

SEQ ID NO: 234189 - DNA, 142 bp, Homo sapiens
  chr9:79306756-79306898
  hyper
cggggacagcataacgaccacaagcttttctaggatgagtggatacggaataaaatgcagctggcagctgtcagttgcaaggggctgggcagaattcggcatcctctcatccccctcccgtctcccccgccaacttcccagc

SEQ ID NO: 234190 - DNA, 275 bp, Homo sapiens
  chr9:79319765-79320040
  hyper
gagcctgctcctaccggcaaataaacggactcagggtcttcacgaatatgcagcacagccagctgggatccaggcagtctgtttttggtctcagcctggtttccctcacttcttcgatcaggaagtgcagaaagcactatctctgctgctctgcatcccagagattcatcctctggagacccagcttcctctattgtttcagcactctgggcaggttctgtgagataagacaaatcaaagggaggtgtgtacggtgccagcgactgcttcagaga

SEQ ID NO: 234191 - DNA, 214 bp, Homo sapiens
  chr9:79520874-79521088
  hyper
tccatgtcgtggctaggggtttggaacccgggtactcggaggggcgcagtggaaaatctcggcccaaggaagacgagcggggtcccgggaaagtggcccgccggggcgcagcgaccgactgctccctcctgccgctctgaggcggctgcggcggaggctgtgcttgcgccctcgaccgtctcgcccagggctccccgccccacccctcgcccgg

SEQ ID NO: 234192 - DNA, 553 bp, Homo sapiens
  chr9:79626871-79627424
  hyper
cctggcatttctagaagtgccgctaccccaggaaactcacatctctccacctccatcgctgtgcggagaaaacccgcaccgaaggcggcttcctctctaaggcggcgaccaggggagacagcgccccctgctgactaaaatcacgcaggcctcgttgccaaagtgcagcgggcgcagcgggcgcagcggtctcccggcttccctcccggcgcccgcagcctgcctaaagcctttctggaaactcgtgttttcagcctcagcctggcagactgcggagggcgggccaggaagagtcaaggagccgggggtctcagactttgctcaccccttggaaatcaccttctcgacccgctagcctaggccgagacacagtctgtattctgaaagccgccagtcccaccaggggaggagaaacccaaaacagaaggagcagggccccacggctgggctcgtgacgaagcatttaatgacctttttaaggaaacgagggaggaggtgaggaggccaacagccgcttaggagagcccgaaacgagcaggctggaggagttagg

SEQ ID NO: 234193 - DNA, 679 bp, Homo sapiens
  chr9:79628712-79629391
  hyper
tctttgttattagtcgtcggagggagcgcaagaaagttatttaatttttaatcgttggttatttatttggtggttatggttgtcagtggccgctacctaaacagacacggcccgtaggaaagcttctggatgttggccaagaggtgtgaggcgcgggtggactgtaaaggggaaattgctctgctagggtgacacaaacgcttcccatctccacgctgattgcgcgccccgggccacaggcagtgtacacagccgcggtgttcgagacgaatctcgcctcgaagagtggagatttaaaagtcaggtttctgactctgggcagcacgtagggtctttgcggagtgagtttcggtcagacgagagcctggggtcaatgtcgaggtggagcgacgctggcacggcaaccctgagcctgcgcggcccggcgctatcccctggctctccgctgctggctggacccccttgtatcctccttccctcaaactcgcacacctacggctcagacaacccagccagtctcgcccgcgagcggaggtgctagaaactttgggggacgaaagctgggctgtctttcttggccggtggcactgcgagagaaagccgtgtgcaccccgcggctgaccactccaacgccagatacatccacccgctcatgtaccgccgtcgggcttcattttgt

SEQ ID NO: 234194 - DNA, 1326 bp, Homo sapiens
  chr9:79629671-79630997
  hyper
cagccagtaggtggcgaagctggagctcgagtatcgtctcctaaattcaaggccagtgctttttttctccaagaaataaatgcccctgacctcaggcttttcccttctgccctccaccctcgggcattccgaaaagtcaaatcgagcttatgcactcaaatccaagtagggcggagccaaacctgtgtcctgggcgcctgccgggcaaggcgcggggactggacgggtcggaaacggggcagggatgcacttcgcagagatgtcaggtcgggttggtgacgctggaggcgacggattcctaaaacgttataaggggttgacgggtggcgctgctgccctgcagcgtccccagctgcgcagctcctgagctccccgctccgagcgcccagacccccagcgccactccaccgtcgagatcacagcttcaaacctcaactccttggagccttcgaaggcgcagttctgactactgagtatttcctggaaagaaaaagaagcccaaagcggtgaaatgatgcctccagggtcatccaggcctggactcgagctggaagccacgtttccgagtcctggggctggctttctcctaccctcttcaaatccactttaggagtttcgtctgggaaaagtatgcgccgagaagtcagccgaaggtcaggcaagtgccaggctagcgtgaccaggaaggctcctgggaggaccccaaacgtaactaacccaggcaaccttccgcacgtcagctaagtcagtgcgtaaagggagaacccatggaaattgagatgtgcgcctaaacctttgccttttttctagcgctgtacgtcgtcctagccctatcggtaacttgtgttcctcctcgccctgggcacagctgtccgcagaagccgtgggaaggcctggcctagatccagcccaaggagcgcgtgagaccctccaggggctgggggcatggaggagaaagaatgaataaataaccgctcctaaagttccacatctttttttactcccctccatagagccaattaaacgcaataaaagcttgcatggaacccctcttcctagcatagcgtcgccaacaattgcctaaggggtaaaccaaatacgcctgagataattacactaagcccggggcaatgatttgcctgccagcgtcctgagcgccagccaatatttggatagtgcagtagttgtttaaaaacaacaaaaaaaaattactcgcggaaacttgaaaccgactggttggtgccagggtggttacacgatctgtttttcttgagagggggtctgcaggcagctggagcgcgcgcgttccggcccccgccggtgcca

SEQ ID NO: 234195 - DNA, 240 bp, Homo sapiens
  chr9:79631597-79631837
  hyper
aaaggagactctgctgttccagcaacccgcggaagggatgctatccgaggtatcaacaaaagatccctttgctcgagctgcgtgtggggtcgaagtccggagagcccttaagtgtgcggcacgcagagctcctcagcagcggcctgacagcggtgcaggagaccccagcttcctgggctgggacagggctgttgtctcacggtcttgttccaaggaaaaggagccacctggctccagcag

SEQ ID NO: 234196 - DNA, 395 bp, Homo sapiens
  chr9:79632017-79632412
  hyper
gaccaagaagctgctcttttccccgggccttcttgcaagcttcagtcgtaacatctattctcagacgtcttctggcctaggacaaactggccacatagagctagccagaaatctagctcctgactaaagatggaaattacgggcctgacccgctcacggcactcctgcgacctggctaagccaccccacggacagacgtgctcccaccgtccagctcaccaaaagccagaagctgaaaacacccgatctggtgtcaccaaggttgctagttagggggcagccccccaagcagctgggccgatggctttcttccaggttaggcgtgggaaaaccgagggagccatagtgtccaaatgctcctttctcctcaaatcgcctaacgggaaaggacccgt

SEQ ID NO: 234197 - DNA, 558 bp, Homo sapiens
  chr9:79632892-79633450
  hyper
gtggagcctccattcgccaagccctttagtgcctattctattaatttcttggttactgttcgtctcaccctctataccgcgatggtggagctcggatactgtctcctgtctccctgcacctggtgcctcacatgcagttggcgcgcaataaaactgagatgaatttggcatttggtgaaaacaccccatgctttcttccccatgagtttttccctccagccctctaatcatcggggtttcttgcagagaagaggccttgaggacacgatactctgaacttgacccagagtgtctagcccaggaaaaagggtttgtaaggagagagaagctcacagcgagtagatgaaaacagggaagggtaaaaggaagggggcggaagagggagatgccagagagaagagaagcaagaaggcagtgtcctgttccccctccaccgtgcttggtggcccgggtggggcgcagctgcgggaaatgcacccggagctgtgccccctcccggcgaacagcctgcgccacccgccgcaccgggaggtggctgggggctgccgagcgagtggt

SEQ ID NO: 234198 - DNA, 2300 bp, Homo sapiens
  chr9:79633750-79636050
  hyper
ccagcattcgcagacgccctctccagcccgccgctcgctcccagagtcctgcgccccacactcctcagcagaacctgcgggcgctgccgcttcagaaaccaccaaagttttttctcctcagcgacagcctagggctgcgcgtctcttctaaccccggcgacgctgcgagcctcggagaaaagagaggcgccctagaagccaatcttctctctccttaccctgatttttcactccaggaaaaggagaactccagcgcggtctggctaagtgcctggccaggggcctgcgtccagggcactggaagtcctgctgtcactggcctccaggacagcaggcgcaaactcagatttaaagggccagagtctctactgcccagaccttcctcccagccatcttggtctgggtttccctcggacctagaaaaagcaaagaggccgggaggaaacacggccccttgccactctcctctgcagccagctccagcactcagtctttggccacccgggggaagacgcagagaaggcggcggtaaacctggtgcactccgcccgcgactgtgcgcgccagtcggcaaccgtcggggccagaagttgccagcttccgagagctgagtaggcccgaaaggccaaggtcggagacaccaggcaattcggagaaggcaggagagagaagcagagagggcctggagggcgagagggcaaagtggcgggactggaggggccgagtgggaattagtgggggcagccaggccccaggaacggagtgcggagagattctgtggtccagtgcgggccggagggcggtggaggagccgggggcgatgccgcggccggggaagagctcgtacagcgaccaaaaaccgccctactcttacatctcgctgaccgccatggcaatccagcactcggccgagaagatgctgccgctgagcgacatctacaagttcatcatggagcgcttcccctactaccgcgagcacacacagcgctggcagaacagcctgcgccacaacctctccttcaacgactgcttcatcaagattccgcggaggcccgaccagcctggcaagggtagcttctgggcgctgcaccccgactgcggggacatgttcgagaacggcagcttcctgcggcgtcgcaagcgcttcaaggtgctgcgcgccgaccatactcacttgcacgcgggaagcaccaagagcgcgccgggcgccggtccgggagggcaccttcacccccatcaccaccaccacccccaccaccaccatcatcaccacgctgccgcacaccaccaccatcaccaccacccaccccagccgccgccgccgccgcccccgccgccgccgcacatggtacactatttccatcagcaaccgcctactgctccgcagccgcctccgcacctcccgtcacagcccccgcagcaaccgccccagcagtcgcagcctcagcagccgtctcaccccggcaagatgcaggaggcggcggccgtggcggcggcggcggcggcggccgcggcagccgcggtgggcagcgtgggacgcctgtctcagttcccaccctacgggctgggctcggccgccgccgctgccgccgcggccgcggcgtccacgtcaggcttcaagcacccctttgccattgagaacattattggccgggactacaagggcgtgctgcaggctggagggctgcccttggcgtccgtcatgcaccacctgggctaccccgtgcccggccagcttggcaacgtcgtcagctccgtgtggccgcacgttggcgtcatggattcggtggccgccgccgcggccgccgcagccgcagccggagtccctgtaggcccggagtatggggccttcggggtcccggtcaagtccctgtgccactcggcaagccagagcctgcctgccatgccggtgcccatcaagcccacgcctgcgctgccgcccgtgtccgcgctgcagccggggctcactgtccccgcggcttcgcagcagcctccggcgccatccaccgtgtgctccgcggccgcggcctcgcccgttgcctctctgctggagcccacagcccctacctcggccgaaagcaagggcggctccttgcactcggtgctagtgcactcctaggggacccggcgggcgtggggagaccagcggggtgagagacgccgggcccggaaccgcccaaaccacccgacggggagagggcgccctggtcaggccgggcagagctggcgagtctcagcctttgctggaacggaaggtatttaaatagacgaacaaccccgaaaagtggattctccagtgg

SEQ ID NO: 234199 - DNA, 199 bp, Homo sapiens
  chr9:79636291-79636490
  hyper
gagtgacgctgaaacggatctcagccaccacgtttctctctgctggtcgcatcctcggcggtcgcctctcgtgaacattcaagacaaaactgccgtccactaaggaaatttcgttttatttaagaaggaaaagaggaagcgtttgataccgttattttcctagtcagctaaatgggcaaggaaacggtgtcatgaataa

SEQ ID NO: 234200 - DNA, 401 bp, Homo sapiens
  chr9:79636831-79637232
  hyper
gtttccctaacttacgaatgcaggaaaaactcggcacatcactcgacaatattgctcttaacgcttgcagaaacgttccatggctgttcccttccagtctcctcggacggaagcaaggggaccacccagtcacctttgcacgctgcggctgtttttgtattccgtgtgctgtttgagcgcttatgtctttcaggcgaattaattcttcagtttcaattcgtgaatgggaaagaaacttgccttgtcgctcttgcccttcccccctcttgagccccagggaatagcactttactcgcgacacaattttgggaatggaggggggcagagtggggagaaatccgctttgccctttggctctaagtcacctccgcctcttgtccgcgccgcgttcgggttgtgac

SEQ ID NO: 234201 - DNA, 520 bp, Homo sapiens
  chr9:79637669-79638189
  hyper
gtccgtttcctaattgaacttaagtccaccaccatggtagagactgaattagcaaaaacccgcaacagtgcgtttttcctgtcaccactatccgtcacctctctcccattttgaggtcctcgactaccatctaaggccaggaactcggtgtcagcggggtgggtgcccgacggcgcccccttaagtctgcggtcctggacggaggcagccgggttggcgccgggacactgccgctgccgcatcaactaggcaagcgcgcccagccaccgccgcctagaagacctgttgcgcgccgacaccgcgcctcgcgggaggccacagcctggggcctgggaccgcagagttcttggtgggtgaaagccggcggccaagctgctcgagctgcgggaagggaacccttgggcagcggctgctgcagagctgctctgggagtgggccaggaggccccggcagggtgcggcgcctccgctggggcctgggaagccgcgtcccggcctccgccctccaccctttagcacag

SEQ ID NO: 234202 - DNA, 731 bp, Homo sapiens
  chr9:80263018-80263749
  hyper
cgggaagatgcgcgcgccccttggcacaggagccggacagcagtcgggggcgcagacgagttggaacgtcggtgctcgggggagagtaggatctcctgggcctaggggtgtccccaggcgggaggtaggcgcggagtgggttggaggcaaaggacctggctggcctttgcctggaaagttctgaaaacctcagcagtgaccgcagactaagactgagtggaaaggttcccgctagcgtttgtggctctaagtggcaggaggaggcggagcatcttgaacctgcagccctggcgtctgctggacttgcccttctgggcaccccaagccgaaggcgcctggaagtgaaaggggacgagcagggggcgcggagctgggggtgggagctggcacctctaggagcagctcccacacttgcctccctggctggggcgtcccggccaaggtttgctgtaatctgcgcgtctggccgccaggcaccgggttccgacaggtgagtgagtttcgccaactcactcgctcggagaaggcggcagcaggctggaagaggagcggcgccaagcgtctgttgcgggacacaaagccccggacctgaagtggaagcttgcccaccagcttcaccaccacgcacacccggatttcctagactggctccttccgcttcccggacgccccggcccagctcgggcttggccaaagcccttggtcagctcggcaatttgcctgtaaagtgt

SEQ ID NO: 234203 - DNA, 547 bp, Homo sapiens
  chr9:80645542-80646089
  hyper
ccccaacgtgccccggctccgctcgccacccgctgggccacacacacggctccccacgccaccaccccatggggtgccgcggccacgacactggaagttcaacccctctgcccacctttccacccccgcgcctctggtcggagtgatctgccatttagcagatgcacagcagataaggtacagccctcagggacacgaaaaggaacaagccaaggcaccgggcagggcagccccgacccctgtgctgcgtgtgtgtgtcgctgtgtgtgtgtgtgtgtgtgtgtgtgtgtgtgtctgtgtgtaacgcgcccgcgcgcccgcgcgggtgaaggcagtggccgggggcgcgcccgggagggtaggggcgaaccgcgggcgccggggggcgggggcgccgaaggcagctgccccgcagggccaaggatggtgggctgggggcgcagaggcccggcggggccccggacggtactcaccgagcagcagcagcttgagctcccggcgggcgtcccgcttgtccctgcggagctgccgctcgatctcgtcgttg

SEQ ID NO: 234204 - DNA, 415 bp, Homo sapiens
  chr9:80647229-80647644
  hyper
tgccgtccggccgggcgtggtgagacaggaatatggcggcctctgcctgcctcagcccaccggcccgggagcgcggccgcggcccctgctgaagtcgcgggaggcggccccgcggagccccgcacgcgctccctgcggcgccggcgctggcgtccgccgctcccgggctgtgcctgtctgctccacggggtcgctcctcagccgtttctgtgtttcccgttcctatttctaaaacgccattcggttagaaactctcacgtcacctctgacaccggtgcagtcttagaaaataagctcctctatactgtgtggggctactggggaagggaagggaaggaattggcaccggtgcccagaggtgtagggggagattcacaggcgaagctgttcgcaaagtaacgtgagatagaaatct

SEQ ID NO: 234205 - DNA, 1060 bp, Homo sapiens
  chr9:80911704-80912764
  hyper
tggggttggaggactggaaccggccagattgcgggctcaaggggcgaaggcaggttggcaggggcagcctcttcccgccgcccacaatcctcgggcgggcgcgcagccgagccggctcggctggctggcgcaatctcgcgcgctccttgcattgatcaaaaatgggggttgaaacagtaaacgcgaggaggagcaactgcttcgactcggctcagaagcgcgaccaatggggatgtgagctccttcgcgcgaaccaattagcgcagggcctgcgacagcacgggccaatggggcgccgactcggcgcaggaacaaggcgggggttcggggccggctgcagactctcaccgcagcggccaggaacgccagccgttcacgcgttcggtcctccttggctgactcaccgccctggccgccgcaccatggacgcccccaggcaggtggtcaactttgggcctggtcccgccaagctgccgcactcagtaagtccccgcgagcgggcgccgggagtgaggttcaggcgggagcacgcacgcgggtgggtttgcatccctgcgtgtggcagtcggattcccgctccctgccttgagtcccctaggcgctttgcatcagcgtgcacagcgggatcagcagctccggcaagcgggcttcgggaagaatgcagttggtgaggaagctcggcgaggcgtgcccgtgcagctgcccctggccctgactgctggtgcgaggcagtgcacgactcagctggccggggcctgctgtcccgccggtgccacgcacctgcagacgcccgggctgtgccatctcctgggccggtccgggggctggggcggggcgaaaaagaaaaagctctgatctctgccttcgcctcgcgcagctgtgcggcgagcccgggcagtgtggagcggatgcatgaatggacatagtgtgaatgagtgatgaacgggaatgaaccgatgacaggttttgcatatgcagtggatcacgttagctgaaagggattgcaaacttaaaggtccgcgtgtgcgtgcccccctacgccttacaccagtgtttgctt

SEQ ID NO: 234206 - DNA, 439 bp, Homo sapiens
  chr9:82185179-82185618
  hyper
cgcatagaaataaacgtctaaaacccagcctgttacattagccaacactcttcttgactttttccgaattttttccctgtccccaagattagccgctcgctagaaaagactgcgagcctcagcagcctccccttgaactggggcgctgcctccagctggacacggactaaggatggaaaggcgcactgacggaggccgcccccatttcccaggcccctccctaggggtgcccctcctcagccatggctgcccctttctctcctcctccagcatctgcccctggggccacccccacctttccgccatctctcgggcccgcgtggcaccctgctctgtttttaacggggataaacttgacttgcttctccaaagagcgggaaaaagaggcgcagtcttggtactgatctgggggagggaacgtcccagggcgcgcaggggc

SEQ ID NO: 234207 - DNA, 64 bp, Homo sapiens
  chr9:82187860-82187924
  hyper
aaatcggcgccccgcgccgggagcagcccgcccgccatcacccccaccccccggcgcggtggcc

SEQ ID NO: 234208 - DNA, 895 bp, Homo sapiens
  chr9:84302131-84303026
  hyper
actccacacgccaccgcctggacgcaagaactaagtacaggcgccgccgccacccggctgggtgcaaggggcaccgggacgcccgcgaccactcgcatggcgcggccggacacgcacctgtgatactgcgcctgcaggaactggaattcctctttaatccggtccagggactccgggatagtgaacttgaagggctggcctgcagcctggtgcggcgtctgggggcgaccagcgagggggaccgagggacgggaatgcgggcggatgaataaagcagtaagtcagagaaggcaagaacgggtgggacataaacataaagttagaagtggctgaaaacgaggccccaaactcgagtttgcccttcactatggggagggggaaagcggaccctccccgggccccggcttctaaagaggctcggaagctcttcccagtctccagggcggattgcgctaagtgcgcccgggtcaccaggccaaagggaagggggctccccggcggccagggaagaccaggccagattgtcggtgtcgccgccccttcccccacggcggcgataatgaccccggggaccagaggagaaaaacaactcctttacgctccccattcccagagtcgccggggccacctccagacgcaccggaaccggggccgcattgacatgtaaataggcgagaggagaaacaaaggggggggcgccctgcccccactcggggaaggtagaggggatatggctgcaggagagaaaccccagccttccccagcgcccctgtccgctcggtatagacgtcaagtaggaaggagcccaaagggagggagaaaattaagagtttcggcccactccccaccccaggaagagagggccccagacctccccagccttacaccgctgagg

SEQ ID NO: 234209 - DNA, 47 bp, Homo sapiens
  chr9:84303266-84303313
  hyper
gcgcgctggccacgcacgcgcgctccgccgggcgcaccggccactcg

SEQ ID NO: 234210 - DNA, 463 bp, Homo sapiens
  chr9:84303553-84304016
  hyper
ggcaaacaaatccagacggactgcttttctttgctcttctcctggtccgcctcctcttcgggctttccccgaggcggcggcgggcgaggtgcaggtggcgcggcggcccccgctaaccccacacaaacccgacgctttcggggcgactcccgcaagattcggctgcgccttcggccgggtgctcgcaggctcccgggacgcaaaggggagcgaggttgaagacgcagcggaggctcctggccggggagcgacggatgacgaggcggggaaagtgcggagggcgcgccgggaggcggctcggcacgccccgtgcgaccagcactcggtgttctccgcggttgcacaaaccctccgggcccgacggggctactccaccgagagcagtcccgcaagtgcccaatgctcctcgagcccggggagcatcagggcgccgcgcctcgggcgcactcgccctgcacggccg

SEQ ID NO: 234211 - DNA, 196 bp, Homo sapiens
  chr9:84304433-84304629
  hyper
ccgcccgcgcctctcgcgccgcttacattaacacgcggtttcacactccggagctaaccagcgccggccccgcccagccccgttcgggcggggggcgcgagcgcggagccggcgggggacgtgagcccgggaggttggggggtggggggggggcagaaggcccgcatcagccaatcgcgtgcgctgcaaccaacgt

SEQ ID NO: 234212 - DNA, 1165 bp, Homo sapiens
  chr9:85677094-85678259
  hyper
tcctgtaatgaacacgccgccctttgcaggctcaggattcagcacgtaaaactttctccccaaacgctgactctctgactcctttttcttaactctagcggatcttggaaaagtcaaagcgagtaggtgaaggaagacaagcaactcacagagaagactaggggggggggccattgggtctgcacacctgcaagtaagtgggaagaagcaagcaggaagcgccagaataacctcccgcccccagctcacactcgcacctgggaatgaacttggcttcgtccccaagtcgcgcctggaaatcctgccaagcccggccgggactcgccgggccgcacgaggtggccagcgccgccgccgcgtcctcgtcgccttcgtcctcctcgctgtcgtgtgtctccggccccgcctcagacacggcgggcgcgggatccagaggaccccagtcccggcgccgccccccgcggagggacccgaggaagccacgcgcgaactcctggaaggtgatggcgccgtcacggtcggcgtccagccgctggaatactgcctcggcgtcggccggccgcacccgcagctccgtgcacagtgcccggaactcctcgcgctccaggcgccccgagcggttcgcgtcgcaggcggcgaagactgagcgcagccgggccagctcctctccgtccccatccgcctccatcccgcctggcgggggcggccgagagggctccggagcgccgcggggcgcagggccctccctggaaggacggggccacctgctgccgccgggaggcccggcgagtttggctcgtccggctggttcggccacttgagggaacgtcgggcggggcgaggaacgtcgggggtggccgagcggctcccttcgacgacggttcgggccagcccccaacaggtcccgggagcggtggggtgcgcccgggctccaggcaccgccaaggagcgcctcctgcgactgagcgcccaagcgccgaggtggctctcgccactttcccggcgggtgcagctccgcccagccagggaggaggagcgcgcgccaccgcttctccagttcccacgccccggagtccaccgctgcttgccgcgcaggtgggggagacctggctggccggaactgggattcggggggagcattgcccttcggcgtaagcgctgctca

SEQ ID NO: 234213 - DNA, 449 bp, Homo sapiens
  chr9:86152631-86153080
  hyper
caggtgcccctctcagccctcggagctcccatctcctggcggagtagggcccagaggggccagagtccctccggaggcagctgccccgcgcccctagcccgggcgcagtgagacgcgcgcgcagggtgcacgcgaggggaaggagactgggcgcggataacgcgtgcctggcgcttgcagggcaccatgcccctccatgccaggataaggccccccaccctcagaggcctgaggaatcgaaatctggctttctagcagtcccccaatcccctccgggagtgggttccttgttctcgcatgcccaccgcaaaggccccccgccctgctcccggcgtgtgccccgcgccctcgcccggttccacgcgcacctggatgtggcaggagatctccgagtcgtccagcagccggatggtgcatctcatctcctggctgagcgatttgacgctgga

SEQ ID NO: 234214 - DNA, 511 bp, Homo sapiens
  chr9:86153260-86153771
  hyper
gacatcggcagcgtcgggcgcctgcggacacacatgcccagcggccggggcgcggcgggcgggtccctccctctgttcgctcgcctccgcctcgccccctcctttccccgcctccttctgtcgcgcgcgctcgtgcgcctccctctgcccgggctcgctcgccgaggacgcccagagcctgagacccccggcgggctcgcgacgcactcactcccacgcgcgccgagcagctgaaggaggaggcggagggatggctggcgcggctggcccgggtgccctggtggtggcctgctcagtcgcagccgccgctgcgtcaagctgggcccgactgccttcctcagcctcaccgcctcctccctcccctggccgctgtcgctcgggctcccggttgtgctcgtcccggccccggctccccaacgcgctcgacagcgccctgctctgctcagctccagggacctggcgcgggtaggggacggagagcgatcctgacccacaccgccagggggattcc

SEQ ID NO: 234215 - DNA, 163 bp, Homo sapiens
  chr9:86238482-86238645
  hyper
tgtcggggccaggcgggagggcgcacggcctctagcgagaggacgcaaaccacggcccaggctctcacagacctttggccatctggacacacagcggcctcctcctatgaggccctggacttctccgattcaattttggaaagtgaatcgttttccccttcct

SEQ ID NO: 234216 - DNA, 593 bp, Homo sapiens
  chr9:86755527-86756120
  hyper
acctggctccccaggcaaagcggccccgccaggacgggcacggcttcgcgtcctcgctcaagtccccgatgatggccgcgtcccggcaggcacggtgcgaattgactggggtttgggggaaacgaaagccccgaaggggccttctctgccaaatgtcttcttccgtcggctcgatggcagcccccaagcctttcattttcaatgtatgaaaacactggggtggatttagcttttcctttgggaaacaaacaaacaaaaaagaacacaaagagcgtgtgtgcgggtcttctttcaaaatagtggggcatttgaaacccgcgctgcagctgcgggcgctgcttcaatcgcaagcgttttgttttctgaaagcgctttaaaagatgctgaagaggaagagagcgagcgccctgcgcattttcggaaacggaagattttgaaaacctgtatttatccgcccttcgcaaaaaatcagcttctctagggcgagcctttccaaccttttccgtcagggcacacagaaaatgacctgatttcaagagcatttggggtaaaactggaggggatttcagagcgtctctgtgaggtttatttaa

SEQ ID NO: 234217 - DNA, 195 bp, Homo sapiens
  chr9:86886565-86886760
  hyper
tgttccgcacgtctcgctggttcgaggacgcctcgtctgttgctatggaaacagagtagtcaaatcagactgcgacggaggactctactgagtccccgagaacaaattgtttccttctgtttggttccatttggtttaagtagcgggggagaccctcgctttctggataaactattttcccgggccggacactga

SEQ ID NO: 234218 - DNA, 1380 bp, Homo sapiens
  chr9:87282690-87284070
  hyper
gtgttcctcaggggcttctccgcttaaggttcactgacaagacaggcggagttttacgtgcgtctgagaccaggtcatttttgcccttggcgtctcttccttggcgcgtcctcacctagtagagaatagaggcgcagctcaggagtaaacttcagcctggccgttcaccactcgatgtgtgttacagccgagtgacagtggtgagatagacctgctggccttgctttcgggacctgcagcaagatttttgggtgctgtccaagaattcccgcggttacactcagcgcccaggatctgtacaaaaaagccccaatagatgttttacgttcccttcgtaatatttaacgcttggcctagatccgagcattcactctaacgttcggtttcttgatccttcccatccccaaactctgcgggtagatcagtgactattactatattttgaacgagactccaacccattgctctctcgagagagaaggattgcccgcctttttcccccgggcaggagctcggcgaggccaggagagccgcgcaccggccgggcagggacgcgcaggcgtcgggcgccgctggttgcgcatctggcgccagagcgcgcccccagcgctgtgcccgccgcgacccgggccatgggctggtgctccggagcgtgccgggcgctctctccccgcgcgggggcaccagagccctcggaagtgtcaggcactgcggtgtattttccccgttctcttttaaatgactgcggaaaaacagattccgagccgcaaaagggaagacggattctcagacaaggcttgcaaatgccccgcagccatcatttaactgcacccgcagaatagttacggtttgtcacccgaccctcccggatcgcctaatttgtccctagtgagaccccgaggctctgcccgcgcctggcttcttcgtagctggatgcatatcgtgctccgggcagcgcgggcgcagggcacgcgttcgcgcacaccctagcacacatgaacacgcgcaaggtacggcaggggagcaagggcttgggatgccctacgtgggggtgggcatcgcggggagtgaatccacgatctgggaatggctacatcccgtcaggttaaaggatgagagaaaatgacgcggcgccacacatcggacaggccagggtggccaccgagcatttagaatacgcatcaggcgcgctcccttcccctcacatgtctctatttcccgggcgtgtgatggcagaaaacggcaggaaaaagacccacttagagagctagaattgtgtttggagactcccttccctctgcaaaagcaccaacaggaagcccctccaaaaccaccgatccccaaataggtggcccggaatgggggcggtgatccttggtt

SEQ ID NO: 234219 - DNA, 1430 bp, Homo sapiens
  chr9:87284294-87285724
  hyper
tagggaccgggaggcgtcgaacggaggaacggttcatcttagaggtacctggatgtaaatgcacacacacacacagacacacacacgcacgcgcgtgcatgtctacacggccaggatgtgtgcgtgtgtgcgcgcgtgtgtgaactcccacatgctgctgctgtctgcttctggccagtggcaccgatgcctccctcctccctgctcgcccccagattcccctcccctccctggtgcttttgtctggagggtgttatgggtttgtgtgtgtatgagcgtgtgtgtgtttttggatttcagactaattttctggagtttctgcccctgctctgcgtcagccctcacgtcacttcgccagcagtagcagaggcggcggcggcggctcccggaattgggttggagcaggagcctcgctggctgcttcgctcgcgctctacgcgctcagtccccggcggtagcaggagcctggacccaggcgccgccggcgggcgtgaggcgccggagcccgggtgagcagcgcagatagtgccctcggtcgcctcggccctcactgtctccccctggggcggcctcggctactccccaggtgggacgtgccgcgccacctgcccgcgccaccggcacccagcggccgtggcggattctgcagcatcattcgggggccccgtcgcggagccaaagccgccggcagtctccgcattcccctttaaagggtccttcgcccggcctgtaccatggaatcctgtcttggggaccctttccctacctcccctcccttggcctcaggctcgaagagagagtgggcacactggtggctccagcggcgtcagtgccatcgcggggcaagttgattcctgggccggagctgggcactcatccatccacagtctccgggctggggtcggggtggggatgacgcgagcagagagggagagtgccccaattagtggtgttgggggtcctacgctcagtcttacgcgtgtctgtttgtcctcagcctcgaggtgcataccggacccccattcgcatctaacaaggaatctgcgccccagagagtcccgggagcgccgccggtcggtgcccggcgcgccgggccatgcagcgacggccgccgcggagctccgagcagcggtagcgcccccctgtaaagcggttcgctatgccggggccactgtgaaccctgccgcctgccggaacactcttcgctccggaccagctcagcctctgataagctggactcggcacgcccgcaacaagcaccgaggagttaagagagccgcaagcgcagggaaggcctccccgcacgggtgggggaaagcggccggtgcagcgcggggacaggcactcgggctggcactggctgctagggatgtcgtcctggataaggtggcatggacccgccatggcgcggctctggggcttctgctggc

SEQ ID NO: 234220 - DNA, 468 bp, Homo sapiens
  chr9:88137525-88137993
  hyper
gtgggagtgcctgccggcgttctcgtctgtccctacttcatccttcctctctcactgtcttacagcaaaggactacagcaaaggcgcgttcagcgcctgcgcggccaggcccggggtgctgggttgcggcttcccgcgggtaaaccctgtcggtacccgatccccgtccgcggaaggccaggagaacgcggttccccttctcgcgtcctctcccttcccgcatctgtggataactcttcccgcatcggcctctctctgctgacattagaaagacgtccctacgccgcggcgagcttcctttgcccctaaaagcactccctttctgtgtgcaggaaaccgcccccgactccgcgcgatcgccctgtgcgcgcaggagtgacaggcgccccagctcgcgctctccagcccgccagggcccggctttggcagacccgaggctcctcacccgccctgagggacgggttgtac

SEQ ID NO: 234221 - DNA, 224 bp, Homo sapiens
  chr9:88713662-88713886
  hyper
tgtgtggatcctccacgttggcaaaggtggaaacacaggtatgcgagaaaaccccgagcatccacgagaacgggatgcagccgcgctctggacgcgcggcgggaggacccggagcccaagctccggggtcaccagccacgaggcccagcggcaacgtggaccccagggcggccggagcgcgcctggggctggaggggaggaagaggcggcgggagccgagagac

SEQ ID NO: 234222 - DNA, 267 bp, Homo sapiens
  chr9:88714740-88715007
  hyper
gcggagcggggaagcggctgtggggaaagggtacctggggggagcccccatcccacgttccgccccgagggaatgttcccgaacagccaaccgcacccagcgccacactcacgttaccttctttataaaagtcgtcgggtcaaaactgcccagagaaggaagcgaacgaaaaacaggtttttagggggcttatactcacaaaattgtcttttttctcccacgaggcattccctgttgaccatcatctcgcctcggttgtcaccgctc

SEQ ID NO: 234223 - DNA, 529 bp, Homo sapiens
  chr9:89517557-89518086
  hyper
caggaacgtgaatgcggcccttccccaccacacacaggctctctcccaccccctgccagctatccctgctctgacctccccgggcctccctaaggggacgatgccccttcctccgcaagtggcagtcctgcagcccgggccctctttcctcttcccccggcctctgcgggggcgcgcgggctgggaaagggacgaaatggaaaaaccgtcccctccagcaccctcacctccaccgccaccctcacctccaccgccgccgagcccggggtcaaagctgccccatctcacagggccttcccagcgcgcggcaccaagacccccatttctatgcaccctggaaagggtgattaatttaaagtgagtggagtctgtttctttaagacaagctcataaatcgtgaaagatcaccacttcttttcaaaagcctctccacggtctgagtctcccttctgggtcagtaaagtcattgaagctttaacggcatgccatggcagattacacgatacagctgtcccggcaccgtgaaaat

SEQ ID NO: 234224 - DNA, 91 bp, Homo sapiens
  chr9:89763356-89763447
  hyper
tgtttcccggccccgcggccattgcagagtcatgaagtcatcgcagctgcgcctgcagccaggcgggaacgggaacgggaactggctggcc

SEQ ID NO: 234225 - DNA, 1508 bp, Homo sapiens
  chr9:90112522-90114030
  hyper
ttccgggcggacgcactggctccccggccggcgtgggtgtggggcgagtgggtgtgtgcggggtgtgcgcggtagagcgcgccagcgagcccggagcgcggagctgggaggagcagcgagcgccgcgcagaacccgcagcgccggcctggcagggcagctcggaggtgggtgggccgcgccgccagcccgcttgcagggtccccattggccgcctgccggccgccctccgcccaaaaggcggcaaggagccgagaggctgcttcggagtgtgaggaggacagccggaccgagccaacgccggggactttgttccctccgcggaggggactcggcaactcgcagcggcagggtctggggccggcgcctgggagggatctgcgccccccactcactccctagctgtgttcccgccgccgccccggctagtctccggcgctggcgcctatggtcggcctccgacagcgctccggagggaccgggggagctcccaggcgcccgggtgagtagccaggcgcggctccccggtccccccgacccccggcgccagcttttgctttcccagccagggcgcggtggggtttgtccgggcagtgcctcgagcaactgggaaggccaaggcggagggaaacttggcttcggggagaagtgcgatcgcagccgggaggcttccccagccccgcgggccgggtgagaacaggtggcgccggcccgaccaggcgctttgtgtcggggcgcgaggatctggagcgaactgctgcgcctcggtgggccgctcccttccctcccttgctcccccgggcggccgcacgccgggtcggccgggtaacggagagggagtcgccaggaatgtggctctggggactgcctcgctcggggaaggggagagggtggccacggtgttaggagaggcgcgggagccgagaggtggcgcgggggtgccaccgttgccgcaggctggagagagattgctcccagtgaggcgcgtaccgtctgggcgagggcttcattcttccgcggcgtccctggaggtgggaaagctgggtgggcatgtgtgcagagaaaggggaggcggggaggccagtcacttccggagccggttctgatcccaacagaccgcccagcgtttggggacgccgacctcggggtgccgtggtgcccggccccacgcgcgcgcggggctgaggggtcgggggcgtccctggccgcccagctttaacaaagggtgctcctctccaccccgcgaggaggggcagctccggagacccggtcttcagcgagcggggtcttagcgccggggaggtctacttccttttggggttgccattttactattattattgccttttttttttcttcaaaaggactggagactgatgcatgagggggctacggaggcgcaggagcggtggtgatggtctgggaagcggagctgaagtgccctgggctttggtgaggcgtgacagtttatcatgaccgtgttcaggcaggaaaacgtggatgattacta

SEQ ID NO: 234226 - DNA, 933 bp, Homo sapiens
  chr9:90340629-90341562
  hyper
gtacacttgactctcggctctgcggaccaaaaattccaggactaaggaatagcaaggttaggctgaaacagtccacacagggcttgcggtaaacgtcttttcaggagccactcgcccagtgcagtaagtcgtgtacttagttgactcgagcgctccagggagacgcccgaccctactctgcgccgccccggggcaccagctctgcttcctccaggtccactgaggcaggcacgcccagctctgggacagtcagtaaacaagccacgaaccgcgccagggatcagagcacccagagtccccgcccagctgccggcacagccaatcgcagcgcagccaggcggcggggcggtgccggccgaacccagacccgaggttttagaagcagagtcaggcgaagctgggccagaaccgcgacctccgcaaccttgagcggcatccgtggagtgcgcctgcgcagctacgaccgcagcaggaaagcgccgccggccaggcccagctgtggccggacagggactggaagagaggacgcggtcgagtaggtgtgcaccagccctggcaacgagagcgtctaccccgaactctgctggccttgaggtggggaagccggggagggcagttgaggaccccgcggaggcgcgtgactggttgagcgggcaggccagcctccgagccgggtggacacaggtaccgcagccaggccgcgccgcgccgactcagggcctggcccggccagacagggaagctcagtccccgcacgccagacagcggtactcctgctggcgtcaccgcaaacatcctctgaccgctacagccagtgtgtggcgcaggcgtcatgtccccggccctgccacgcctggagccctggaagctggctgcagggcgctggcttcccgcgtgcggccatatgaccccgtccctgatttaggggagcag

SEQ ID NO: 234227 - DNA, 593 bp, Homo sapiens
  chr9:90589227-90589820
  hyper
tagccggagggtggcgggggcacacccccgccaggctgccggccgcggtccagcctcacctccacgtgcttggccttgaagacgatgccgtgggcgccctccccgatgcggcccaggatgcagtactggtccatcccgctgcagtcgtgggcctgtgcccctgtgcccctgaacttccaaactccacttctcctccaccccacgctgatctgagctcgcacgctgttgcctagcaacagcgcggcagctgaccactggggcggttcctgtaggcgacgtcaccaggagaacggaagctgcgtcgagtcaggggtgacagctccgggccccactgcgccttttcctagccctccgctgtcacgcagcagcaagcttaatcccgcataaaaaacgcatgcgccgagagcgtgcccgcagcagggcccacggaacgatgacagcaggcacctcctatctgcccccgcccccggcgtcacgtgactagctgcgctggtgcacgcagccgggaggggcgggctccttcccctggcaagccggaagctccgcacctgtaagtagaggttcaggcttcgaccacgcgcaggtgctgtttt

SEQ ID NO: 234228 - DNA, 860 bp, Homo sapiens
  chr9:90691112-90691972
  hyper
agcagacgtctgctcggtgtggccgtatttttgtgagcggagctgcttttgtgagcgctgcgtccctgcagcatctctgcactgacgcgtggagtcgccgagaagctgcctggcggctccagcagcctccacgcctagagggctgcgcgtccgggatcgcagcgccttagcgtctccttcccgcctccctccgccctcccgccagcgagcgcgtggcgccccggaggtgcagggttgaccagggtgcacccctctactcctaagccaacctaggcagggcccttccagtttctgccgcagcatttccagcccctcgagcccctgcagctcctgagggtagctcagcagccagcccagcgcaccctcttccggggctagcgcgcactccctcggctctgcttgcggtccctcggtgtccttctgcccctggcagaagctctcacaccaccctcccttcatttcccctgccgggcggggctcgctattcagctccctgtgctcagtctgacccctcagcctgctgtacccgcaggctctgcggaatgagcccgggccccagcccttgccctcccgcccgccaccacgtccctcctcccgcctggagcttccagggccctgccgcgggcccctgcatctcccgccaggccgtctctctctgcctccgtctcctgcagcccagctccgcctcattctccattcctcgcccagaaacctgtacattctgtccgcggtcgccgcctgcggttcctccacgtcacgcaggcagacgccaggctccgccagctcacagaactgctcttgccgaaccccgaaggcctccacctggttgaccttggcagccagcccggccttccttggca

SEQ ID NO: 234229 - DNA, 308 bp, Homo sapiens
  chr9:91002684-91002992
  hyper
ttgtaggtgaggctccggggctccagctaacctgagctacctgggctgggctttgtgcggggaggcagcaagcggggtgagccggcgacgacgccggcctctacgcagtgcggtggtgaagacgtctcttccagggagtcacaggaagcaaatccatccttttaaagggctcgcgtcccgcggccctgaaccggcgcgctggagcagtaatgcgacgttctccgaggttcaaggctcacggcccagccctgtgatccagtttcctcagtcttcgcggtgtgcaccactcaggacgacttgcggcttac

SEQ ID NO: 234230 - DNA, 406 bp, Homo sapiens
  chr9:91149014-91149420
  hyper
atgccctggggagacggctgcgggacacctgcggcggggcccggcagggagcgcgagactggaagagaggccaggagggaaggagagcgacgcggggttttgggggaggggctgcgtggggcgctgaaggggagcgcgaggagtgggaggaagtgaaggaggaggaagagcacggtgtgggggaagcgcaggaggcaataggtggggcgggacggagggcagggcgctgcgtcgggagaaagtgtagaagcgctggggagagtgcccacgacgggagagcccaggggcgcgagggcgcgggagtgtgggcggggcgcagtggggatgggggcgggggcgcgggatgtggtagggggcgtagtggggagagagtgcaggagtgtgggcagggcgcagtgtggggagg

SEQ ID NO: 234231 - DNA, 1001 bp, Homo sapiens
  chr9:91149638-91150639
  hyper
gaatgtgggcgaggcgcagttggagaagagtgcggggatgtgggcggggcgcagtgaggggaaactgtggaatgtgggcgaggcgcagttggaggagagtgcggggatgtgggcggggtgcggtgggggagggtgcggagatgtgggcggggcgcagtgggtggagagtgtagggatgtgggcccagcgcagtgggggacagtgtggggatgcgggcgaggcgcagtgggggcgggggcggggatgtgggcggggcgcagtgggtggagagtgcgggatgtgggcggggcgcagtgggtggagagtgcggaatgtgggcggggcgcagttggggagcttgcggggaatgtgggcggggcgcagtggtgggagggcgcaggagtgtgggcggggcgcagttgggggagggtgcagagacctgagggcttgaggttgcctggctggccccgctcccagaggcgggtgccgcgctgtcgcccaggtatctggggtctctggtgtctgagtgtctcattgtcggcgcgaacacaattgctccagccacaggcgaggcctggccaaggtgtgggcgcatctggggcaggtcttgagaggtccagcgcccggtggtgcggacagaggcggggcaccgcggcgctcgccgccgcctccccgcaggtgatcatcctcctgcaggtgtcctcgggtctcaggtggctgcgtgtctgcgccatggttgacattctgggcgagcggcacctggtgacctgtaagggcgcgacggtggaggccgaggcggcgctgcagaacaaggtggtggcactgtacttcgcggcggcccggtgcgcgccgagccgcgacttcacgccgctgctctgcgacttctatacggcgctggtggccgaggcgcggcggcccgcgcccttcgaagtggtcttcgtgtcagccgacggcagctcccaggagatgctggacttcatgcgcgagctgcatggcgcctggctggcgctgcccttccacga

SEQ ID NO: 234232 - DNA, 1323 bp, Homo sapiens
  chr9:91792413-91793736
  hyper
ggagctgggaattcttgctgcggggggcaacaagatacccaccctcccgccggggaagacacagcaggagtagggccgccactccgtgcatctctcctcccgggggctgcccagctctccccagcgcgtttcctagatactaggcaggccggacccccgctgcccagggttgggcgcccatgacactggtcagacatctggtaagccaggtggcaaaggcgtgccaaaaaagtggagcctagggaaaaccgggacggagcgggccacccgagtggtaaaccttttcccaatggatgcgggaaaagcgcatttgtagttccctcctcaccgctgtcaagcgagctgattgctaaggagtgcgcatttgcttgcctctaacgtgacagtcgcgggagcgccccgcaccccgggcttcagggaatgaaggagtctgccccgaactggccccagaacccccagcccccagggcggcccgcgcccgcacccaccttgaccacgtaggtgactccgggccccagcacctggtcgctggcgtgcggcgccccccgagggggcctgggcagcggctcgtcgccgggccggcccttcctggcggcgctcatggccggggcgcggggcgccgagggcgcactgccgtccggggcggccaggctgggcgcgctgcagctgcccgagagccgcgcgcccgcccgctcccgggcggccgacgacaggccgcggaggcccgagctggagagtttcaggtgggacaccttgtggagcaggtggcccaggctgccgggcccatcgtcgggcgccttgcgcagcgcctcgccggacaccaagtagggagccgccgccggggtcgcgcgcgccgccgaaaccttgcctccgccgccgctcaccgacaggctgtggagaaggtcatcgaccgatgtcaccgagtcattcctgaagcggttatacttggtgcgtggaagcatgcccctccgtgggctcgctgcatccgcccgggcgctgctggtgccggccccggcgcgggctgccgcgcatagcaggcgagccactgtccccggagcgggacggagagtgggggccccgggacagccttctggagaacgagagcagagcaagaggatggtgccctcccaccgttaaaagccagcacagcggcggccgcgcagccccggcccgggagaccgctgcttggggttgcacgtttgctttgcaaaagtcatagttgcctctgatggagcgcccagctgcttggggctgctcacagcaaaagcatgactcactctgagaggagacccttctcaacaaaggctcggtgagcactgcaaa

SEQ ID NO: 234233 - DNA, 221 bp, Homo sapiens
  chr9:91849548-91849769
  hyper
atggaaacggagcccgatctgcatagggttaatctgccgagtagtgactacttctgtcaaattctccccaagggtaaaccctgcgggctgaggaggcagcggcggaggctgggcgcacgtgggtgctgcagtagccggcggacgcccagggcgcacgggggcgcaccgagagacctcaccgaacccaaagagcgtgcggttcgtctcgcccaaaaccacag

SEQ ID NO: 234234 - DNA, 183 bp, Homo sapiens
  chr9:92220603-92220786
  hyper
tgtgtgctggctgcgggtgaggaggacgagggcgacatcgcgctgcagatccattttacgctgatccaggctttctgctgcgagaacgacatcgacatagtgcgcgtgggcgatgtgcagcggctggcggctatcgtgggcgccggcgaggaggcgggtgcgccgggcgacctgcactgcatc

SEQ ID NO: 234235 - DNA, 186 bp, Homo sapiens
  chr9:93404963-93405149
  hyper
atcatgccaaagccgcccgtgccccaatgcggacgcagcgaagccacggcagaagggggaaatcggttacctggggaagaacacaactccgctcagagcttcttcagagctccactcgcgcaggacagggcagcgcagggtgtgtggatgcggctcctcccggaggcaggcgcagcgcactccctc

SEQ ID NO: 234236 - DNA, 31 bp, Homo sapiens
  chr9:93563762-93563793
  hyper
tcacagaagccaccgcgctggcggggaggag

SEQ ID NO: 234237 - DNA, 336 bp, Homo sapiens
  chr9:93564135-93564471
  hyper
tggccccgcgctgcgcccgccctcgcctcacctggcgcaggtaggtgtggccgcgtcccctacccggccgggactttctggtaaggagaggaggttacggggaacgacgcgctgctttcatgccctttcttgttctaccttcatcggccgaggtaaaagtgctgaaaccatgtgaataaaatacaggtgggttccgccagcttcgctcctgaacctacccgcgctcgggatccagaagctgcgccgggagagaggggctcaggcctgggcggaggggacggaggtcagaccgtgcggaaagtgacccgggcaccccagggcgcccaggcccccagg

SEQ ID NO: 234238 - DNA, 230 bp, Homo sapiens
  chr9:93955383-93955613
  hyper
tgcgtgaaacacaacgtgagaatgggaatctgacatatgagtaacccggccgagaggcacctcttggaaatgacactgggccttggctagaattacgcacaggccctgggagggctgcggctcgtaggcccgtagggggcagggtgagggcggaggtcctggcgcccccaggcctgacccgcccgcaccgctgggctatttttagcgtccactaaacttagccgactcca

SEQ ID NO: 234239 - DNA, 170 bp, Homo sapiens
  chr9:93955793-93955963
  hyper
tcggggacacacggtggtcgtcgctgtgtctcagcaggaccctgtgcgctggagagcttggggccgcgagtcgcgcagcaaggaggcttctggcttctctatttttagcctctgaacgttttccaaaataattaccaaaaggaaatacacacgcacacatggacctaaca

SEQ ID NO: 234240 - DNA, 35 bp, Homo sapiens
  chr9:93956143-93956178
  hyper
agccgccgcacgtaggcagcgtcccccagcccggg

SEQ ID NO: 234241 - DNA, 485 bp, Homo sapiens
  chr9:94186868-94187353
  hyper
agggaaagctccacgcacaaacaccgccccctgcacaattagggcgaagatgacggctgcaaagttgttgcgtaacacgactgggaaacgaggctcgctgaggtccatctacccacccccgccacgcgggtgcggcgttcctcggaggatgtgaaggtccgcgctcgggtgcccccgctgggacgcccactgtcgtttggtgctggggcttgagacgaccgcgcgggatctcttcctgtgattttgagctgatagctgcttagtgttatttctgcgtctaactggatacggtagtcttctctcccaaattcccgggctacggaagagacgtaaaaaaatggaaaaaagagcacctagccgcgacttcttaagtcgtcgcgctagactgtcaaggcacgtggcacactccctgcgtttaccgatacacggatagtggtcagtgctggccttggcgaagggagccatgttcccgacagtgactcaca

SEQ ID NO: 234242 - DNA, 569 bp, Homo sapiens
  chr9:94711200-94711769
  hyper
ccagagctaacgccgcctcctccaggcaacctaggcaggtcccaagctgcacttccgaacctccccgccgttcctctgcgccccggatccaagcagccgaaaccgcgcagggactcgggggaagtggggccccgggaggaaacccacctaggagccgggccccgcccctcccgccgccagcctcctacaggtcccgggggtccccccggcgcggccagaaggcggccgcgccccagccgctcagggacccgcgatcccagtcacaaaccatttcaatccagatcacacaccacttcggccaccccagagcggtgggggagaggaggtttcagggaccaacaaaagggatgccaaagagcccgtttccatcaagcggcccgcgggctgggaaagtcaggacccgggagccgccggcgcccccacccccgccgcaagagccgcttctccggggccacgtccaccccaggattctgccaggcatcaggccgccctgggggtggggggacgctccgagacagacgggggacactcggggccgtgtgcccttgaaggaggaagacctcggggag

SEQ ID NO: 234243 - DNA, 39 bp, Homo sapiens
  chr9:94712609-94712648
  hyper
gggcgggacccaaggagctggggctgcagctggggcccc

SEQ ID NO: 234244 - DNA, 130 bp, Homo sapiens
  chr9:95056116-95056246
  hyper
ggctcggatggtgcgacagtggtgcttgctggttttgcgcctccacgtggaaaacgaaccagcgctgagggcggcgctgtgcgtgctgcttgtatccgttgcagtagtgtagaccgaggtctcactcggg

SEQ ID NO: 234245 - DNA, 136 bp, Homo sapiens
  chr9:95088346-95088482
  hyper
gaggacccaccggcgccctgggaagagaagtcccgagtccagtacgtgaccaccccaagtcccccagggcccgctggccagggttcccgggccaggcgggtgaatctccacagacatcctcggtctcctactccca

SEQ ID NO: 234246 - DNA, 1001 bp, Homo sapiens
  chr9:95569780-95570781
  hyper
tggggagaaccgcccgtccgatgagctcggctgagcgtgcacgcagtgccgaaatcaaggacgcctggatgcttttcgttgcagagtgacaaaggttcaacaacaggaagaggatcaggggccaagacaagaagctgaagttcggcctgccaggaaccccgggccccagcatcccacccaaggcgctgctgcaggagttccagctgctgctgaaaggtgcggtgccgcagggccagagtgcgggatcctgagccctgcatgccagtccttgcgggggccgatcgctgtgagccttactcaggtccagccgcctccagggaggacaatgtagacgaggtgcggggcgtgagggcggtgctggccgcacccctggtcctgaggccacgggagccgcgcgaggaggccgccttccactgacgcctgcaccgggaccggttgctgcagcggtgccagctgcaggagctccgcgtctgctgcttctccgacgccagggcgccgccaggatgacaggtgcaggagactgtggctgtgggcagatgtggtttccagccccaggtccccgcggcccctggcttcccagcgcgctgtcctgtgagcaagaagatgaaaaaagccacccgatcaacaggtcagctgccccgcctggcagcccagccagacaaggcaaccgaagttcatcctctctgagttgacttcgtgcgggcagcgggccggcgcccaggatgctggggagccctgcgcgccggaggccgacaagccgtggggctcagaggcgcctcagggcgagaaggcacccgtctcccagcgctttcaccccctggcctgcccggcccgcgtggtgtcccagtggctgcggccacgccaggcattctgccccgcggcggctgcacagggacgagaactgagaacccctgctcaaccccatccggggtgactgccaaatgcctatgccagcggccccgatctccctccggtggaggagtggggggagacacggcctg

SEQ ID NO: 234247 - DNA, 306 bp, Homo sapiens
  chr9:95571014-95571320
  hyper
cagacccaaccccggtggctgcagagggccactggctagaggtccccagctccagcagaggaggagctgggcgggggcagggcctggcgggctctcaggccaggtgcactcgcgatctagaggcagcccaggccattctccaccacctgggcgcccaagctgcaggcgccctctacctgctggcaacagctgcctggccactcccaagctggctggcgctcccaagcctcgcagaaccggggctagatgtcgccgtggctgcggccaagcccggcggtctgcccggcggcggctgcaccgtggctg

SEQ ID NO: 234248 - DNA, 581 bp, Homo sapiens
  chr9:95571741-95572322
  hyper
atcgcggattctgagctacatcgcgggtttggtggtggatcttggatttgggggtggatcgcgggtttgggggtggatcttggatttgggggtggatcgcgggttgtgggggggatggcggatttggggctgggtgggggtggaaaggccacgaggagccgcggcggctcaggagcgggtggtgggcgtctgaaaagtcgccaccatgaggaagctcttcagcttcgggagacgcctgggccaggcgctcctggactccatggaccaagagtacgctggtcgggggtaccacatccgggactgggaactgcggaagatccacagggctgccatcaagggcgacgccgcggaggtggagcactgcctgacgcgcaggttccgggacttggacgcccgcgacagaaaagacaggtatcgggggctcagcctgcggtgggagggggccccaggcccggcttccctgcagcccctggggcgggggccttggagggccccgggcaccctcggagccgcggagccaaatggagcctcagactgctttccatcgctggcaattccccgtctgtagcacttggtggata

SEQ ID NO: 234249 - DNA, 142 bp, Homo sapiens
  chr9:95709628-95709770
  hyper
tgcacccgagccggcgcccctagccctcccactggctctccgcaggcggctttgtcagggctcagcgtccctgcagctgccgggagaggaggagacagggcggctgcctgtgggtgccgcggaccttcggggcgggccaggg

SEQ ID NO: 234250 - DNA, 601 bp, Homo sapiens
  chr9:95820724-95821325
  hyper
gtgttgggcagaggtagccacgcgtgcaacgccccggagtagcaacactttccgctcagccggctgccttggcccgctgggtatttggtctccccaagggcccccgcccacagcccccggccggacctcggccccagtccaacgtgtgggcgtggtctgtaagttgcatggaaccgcccctgggcgggcgtggagggcggggcctccccgcccctcacccaggcccaggcccaggccccgcccccacaagccgggctcactcccctggcagaccccgccaagcgcctcggagcgcgcaggatgcgctgggcggccgccaccctccgtggcaaggcgaggccccgggggcgggccggggtcaccacgcctgccccagggaaccgcacaggtgagggctggggccgagtggccgcgtgcggggctctgcgcccatttcacagacgggaaagccgaggggagggggtcgcggggccgcacagccgtgggtgggggccacagcaacgatctgccccgaggacgaacctcctcgaccctccgccggcccagcaggcgccctagcggagccgaagcctggcagcgagcagttcgaaaccaggcggct

SEQ ID NO: 234251 - DNA, 1554 bp, Homo sapiens
  chr9:95946019-95947573
  hyper
gggcaggaaaggacacgctgagccccaccaggcttagccccaggctgggctcccgagggcggcggtacccctggtccttttcttcctagcctgcccattctgtcctggcacagggccttgaggtctagcgcgccgggctgcggcgtgctgaggcgttgagcctgctgcctcctctcaggaagaaacggggtcctccgcagctgacagccctgcggggcgttccaaagaacttcagaggacaggagcgctacctcgagcaaagaaccgcgggtgggagcccaggtagccggcccgcaggtggccgcgcgcgcctgccagtcagccagcccgtccgcagccaggtgggcgtgccaggcccagccccctgcgccggtccggggcggggcgaacggagccccgccctccccgcgcgccgggtcggagccggtgcgggagcggagccgcgcgaagccggcaggagcacgcgggagcgcggccccgcagtggcccggcccgagagagcagcgcgcaggagctggagcggcgccacggcccccaccccagcgcggacctcgcccggaactcggaccccgtcctcgaagcgtgatctctcccgcctcgcacgccctggccgccgggccgcgggcatggacggcgtccgctcgccctgtgagtgccgagcctcccctcaacgccgctcgccgcctttgtgtgcgcgccgcggcgctgcagccccctccccgcgcgcccctcccgcgccccgggcccgcgtcctttgtggagccgccgccgggccactgccttcctcccacccccgggcttccctatcccctttacagctgcctccgggacagcctagcagaaccctcctgggccagggctgggcagggcgcgagatccctctgccggcctccggggccctcagggacaccctagcaggtcctctctcccagggttccagggacaccacaggcccgtccctctccgcagcctggggctgagcagggcacggacccctcctccccaacccaagcctctggtcccgtctgcagcccccctttcccagggcccccagagacggcccccgcaggctctctccgcggccggggctgggcaggttgcgggcttagggcggcgttgtctcatccggcggcctgggcaggtgcggcagggccggcgctcacgcgggcctgtgtgtccttggcccacagagatggacggcgatggcggccgccgagacgtccccggcacgctgatggagcccgggcgcggcgcggggcccgcgggcatggcggagcctcgggcgaaggcggcgcggccggggccccagcgctttctgcggcgcagcgtggtagagtcggaccaggaggagccgccgggcttggaggcagccgaggcgccgggcccgcagcccccgcagcccctgcagcgccgggtgcttctgctctgcaagacgcgccgcctcatcgcggagcgcgcccgcggacgccccgccgcccccgcgcccgcagcgctggtagcgcagccgggagcccccggagcccccgcggacgccggccccgagcccgtgggcac

SEQ ID NO: 234252 - DNA, 244 bp, Homo sapiens
  chr9:96215823-96216067
  hyper
tgcccccactgcccgcgaggagatggtggtagttaagcctaaaatgatagcggaagtcccacccacgatccggttgcaattggtgagatggtgtttaagtcgtgggtggaggcggccggcagagtcccgattggcccctgcgcctggcagacacacagctgccattcctcagggaagttcgggtgagaggaagtgcctgccttttaatttctgaatcggagcctggggcgctcagggaagtaag

SEQ ID NO: 234253 - DNA, 163 bp, Homo sapiens
  chr9:96588739-96588902
  hyper
gcggcgctgcggtgcgcgaggcctcgcacctgcacgggaagcagcggagaggacgcaggtaaggtaaagccaggcagacccgaacctggacgcgcacctgcgggggagggggtatgcgcggggcgggttgccgcccctcccgggagtacgggcggaggcaggg

SEQ ID NO: 234254 - DNA, 157 bp, Homo sapiens
  chr9:96710136-96710293
  hyper
cccgcccagcggagcgaggagtcccagctcccttacctccctacagtggggttggggaggtggcatttgagaagttttccttcagctcggagatctggccccgggctgagctgggagggagggtgggggctgtaggtgggaccgctggggaacccag

SEQ ID NO: 234255 - DNA, 1208 bp, Homo sapiens
  chr9:96710797-96712005
  hyper
ggggagggatggggcgcccccgctcgcgactacgcctgcgactgtcctcgcgctgcgggggctgtgcgtggagcccgcggtaagctggaatatccaagccagctgcaagtggccttccgttccccacacgcctcctgcgtgctgggcccagctgggcgccgcccaaatcttctctctcccgagactctccagctccccttctactgaccaggagaacgtcttgctccggccaggatcacaccagtggagaagcgaccccctcccccatcccgggccggggcccttctgacaagcctccccaaggactccctcattccccaggccaccttgaacaaagcacactgagcgcaaacttcgcgcctctgggggaacgctgcggccaggctaatcccagccctctctcctcccccagcccttcgcgtccccagggtccaggcggtcgcaggcgctccccactcccgcagggccacagctctcgcgagactcctgagccctctccctcccctggctgcggcccccgggctccgggaagctcagccacctgggcccacgccatatctgggtttttttcccaggactttggggatgagaagagacttgtgcatagagcggaagaggaatgggatccaagggacctttccttcaagtcccgggcctgaaatgaaggatgcgactgctgcctgcaggcagagagacaacctcagcgctcggtggctggggcgcagtggcacgcagggcgggcgccaggtagctccggtcgggcacgcgcagtccgacagactgtgtcaccttggaagacaggatgcggccctttacctagagtggcagctttgtgggctaggtcagcacggggtctccgggccggcgggcaatcgtctgcctctgcgccttagctccctggagcgggcctggagcttccgttgggtctcaagggttccaccaagcaaggaagccctgagctgcccaaacacaatggcgtgcagccctctcctcttccccagtctcggggactcggtctgcctctgcgttccctgtcccggcaaggagcacagaggtgaaggcagtgacaacaactccacccctcccgcactgcagggcctggaatctggtctccctcatttgaggcccaacttccccactgacccacaggtgacccccggaccggagttcccgcatcaagttcccctctgtgccgggaggtggctgtt

SEQ ID NO: 234256 - DNA, 88 bp, Homo sapiens
  chr9:96712699-96712787
  hyper
ctctcctctccccacgccgccctccccccgccacccccccgcccacccctcattccttccgccttgaggtaccggcaggggaagtgca

SEQ ID NO: 234257 - DNA, 2402 bp, Homo sapiens
  chr9:96713306-96715708
  hyper
gtggaactcagcagcccaggcgccgccgccctgagtatcctgcggaaaatgtgagaactctggggagccattgctgctgcaaggacccgcgggcgggctaccgcgctggtgggggggctctgtccaaaccttgcgtcctcgacttcccatccgcctcataaagggttggtgaagaccatctcaaggaccgcacgaactggtccttcaagtcccaggaaaccgaaacaacaaccgaggcggctctctgtccgggccacttccggagcgagctctgcggcggacctctggctcccgctcctttgggcacccgcggtgcggccagaccgctcctgccagcgactctctggctggcaagggagaggaggtggagttcagactggcccctcacgcccagagtggaagcgattcctaggatcctgcagccaccgagccgcccgccgtgcctagcccgggcttgatggtgaagagcacagctgccttcgacagagccggaggaaaggaagtttaagaagcaactgcccgcgttccgcttatcttgccgagcccacccccacccccaccctcaccccctgcggattcagaagctgctccaccgagcccgattgtgtcataaaatattttattggaaaaaaagtcaccgtcttcgcaagagggggtaggggccccagcgacatcggggacccggcctccaggccgagccgacgggttgccccggggcaatctcaggccgttgtggcctgagcccaaccgctgggtccccgacgtccagaagcgggtgtgtgcctggaggctccccggccgggagggcaggccccagacggggtgggggtgcaggcgaggagcggggcgtgaatacgcgtggagcgctctgcgccacggagctcagggtagagactgtagcttccgccgggctggatgcgagtctcccaggttagagcccagaagcgcgctgggacctgggtctggcttttgggtctgtgtccttcctcgtttggccccaattgtccgcattcaagatcataataaaaaggcttaggaagtaaacttcttggacgcggaagggccggctcgcgggtttccgccgagtgagggggctgcgggtggcgcgggcatcccaggccccgcaccgtataccgccctcagtcctcgcggctcctgtcgctgggctcgcccggcacctccgccggtttctctgcatccttggcgcgctcctgctcagtaagctgctcgctcgttggaattgagttcttcttgggccgccccttgggcttggtgggagactccaggccgccgccctgcagcacctgcacgggggaccgccagcacctgggtgagccagcacgtggactggggacccccgaggagacttgaacccaggtaggactaaggagtgcagggtccatatgaggaaatggtggggaaatgtcccgggaaatggcggccatttgtccaaatgccgcctggggagcggcccggcctggggagcataagactgccaggaggcctgaaggtgccgcgggaaaggacgaaatgttggcttacccaaggggcagaaaaaactgagaggattccggtgcgtaccaggcaccgagggaatcggggggttgggcagagtctcagtggggagaaagaggagagcagctctgcatgcaccggggcatggcccaggaagctgaggggtgggaagccaccaggcacactcactattttcttccacttcatcctccgattctggtaccacgtcttcacctgcaactggctcaggcccagggactcagcaagatctattctggaaagagcagggcgcaccctcagcaaggcaagtgaccacactcccacagcccgctggccccagccttgtaccgccctacctgtccggcgtggaaaggtacttctgcttctcgaagcgtttctccaggcccatcagctgcagctcggtgaacacagtgcggctccgacgccccttcttggctttggtgcctggctccccagggcctgccgcctccagcttcccgcggagctgcaactcgagcggcaggtgtggcgcacccgcggcgccgggcagcccgggccctgccgccagcaacgcagagctcagccctgaacagcccagcggcgccagtgggaacttgaacaccgccgcctgctcggccttcagcacggctgcgaagaaagagaatgaggacccgggtgagctacggccgcgctcctctgccccagggactgccgcaccacgtgccgcgggggtgctcgcgcttggccagtgcctcccagcgcaaaacctccacgccctgccggtcggcgccggtggcgcagatggagaccctcctcaacgttgccgttccccagatttgggagggagtatctcctcgaccctgtccgtgttctgtcctggagttccc

SEQ ID NO: 234258 - DNA, 196 bp, Homo sapiens
  chr9:96716245-96716441
  hyper
aagggctggggtcccggctacagcgtaggagcctcccttccccgacaggcctgtcactgaggtgcgagtcctagcctggctggagtcggaaagggcagggcaaggcgcaggtaaatgtggggcagaggacccgtagggaaaaggtgggagatgggaggcaggccgaccccaatgagagaagcgagggaggccgacc

SEQ ID NO: 234259 - DNA, 309 bp, Homo sapiens
  chr9:96716717-96717026
  hyper
cggggactccgggccggcttgggcccgcgtcagcacccagccctcgggagcgcaggcctcctccccagaggtccgacttccctgggttgggcagccgcggccactcccggccatccctctgcggcgaagcccaggcgcccgtggcctgaggtcgcttccacccacgagagtccgtagcctggcagtgcgcctgcactggggatgctcactcggggtccccgggctggaggccgaagggaagcagtgaaggaaagagcgaacaccctccccgggcggcccgcgggcacgaggcctggtttctgtgaggcc

SEQ ID NO: 234260 - DNA, 120 bp, Homo sapiens
  chr9:96717626-96717746
  hyper
cccgggactgcgccccctccccacgccgccgcgcctcttgcccggccagccccgcgtcaccgccccgccccgccccgccccgcgccgccgcccccaacccctaggctgagccggagggag

SEQ ID NO: 234261 - DNA, 355 bp, Homo sapiens
  chr9:96717926-96718281
  hyper
gagaaggggcagaggcagacggcgtgggccaaacaagattccagacagtgatgtgagggcaccagagacgccaccgagatgtgcgcagagagaccaaaagaggcgtgagagccagcgggctgtgacgtgacggagggcacagaggcaggcggggcagaggaagggggcggtaaagaaatgggaacagctagaaaaccggcggcttgatcggcttttaggtagccccggaaaggtcgggaggaggaggggcaaaggccgcgctcctcagctgggaaggaggtggtctcaagcagcctccagtcccgggctcaacaccgccaacccggcaagggtgaggcagcgttcagggatgcaa

SEQ ID NO: 234262 - DNA, 1260 bp, Homo sapiens
  chr9:96720637-96721897
  hyper
ttacacaaaaacggcggcggcggcggggcctcctctgctcaggcactgccgcgttggcggccgaaaaaagagggtcccagagaaggggaaccccctccctgtcgaggacaccgaggcccagagaggggaagcctcctccccagtggggtgcagtctgggattgcagtccccaccccaggggcgcagctgccagcccaacgcctgggacacaccccctcccgaggcctctagccgccgccgcgaaaatcccggaaaccgtcctgctcgcggcgggcgcagtggaaaaggtgacctcagcgccccgggccagccgccctccctagcagccgggcggcgaggggctccgggcggcaggggttcctcggcgccgcccggtcgctggatgaggggccctcggagcgcagaaccggccccctccccacccatgttctgcccctcagaccctacagcccctttggaggctgcgggacagggaggggaccacctcattcccacaaccgaatcccctaagcattcaggtgtaggttccagaaccacctcccctccacccacacccttctcctactccagcgcctcccagacgggattgtgaaatggctccgcgtgcgaacgggtccaggagccgttcgttgtacagaggaggaagctaagtctggaaggagcactcgagcaggctcagcggccagcagccagcggcagggggatcgtgcatcgcttggagggcgctgggctctcctccatccgcctcagccgtgggcagtttgtttccgctcccacttgcagcgggtctgcatcttaattggcaaaacgaagttggggccgcggtggagcggaggcttcttccagaacggtcagctcacctccggatgcggtcgtccgagcagccgcctgcggggggtcccacgccctctatctaacaggttgacgtccagcccctaggggcccaggcggccccgggccgccccacctcgcggccttctgctccccgcgcagccttgcgcgcccagccacccagcacacggtccgtccctggggacgcgtcgcgagcgccgggaatggagctcgtttcctcttttcttttttcttcttcttcttttttttttttaaacctttggttctgattgtccttggcccagcaggctgttggtggcgttggtggtgctgctgggactggggcaccggccttggccgcaggtgtgctgtgcccgacagaggccgcctggaccgcgcccggaacgccctgtccgggtgggctgcggc

SEQ ID NO: 234263 - DNA, 315 bp, Homo sapiens
  chr9:96722894-96723209
  hyper
ggcccaggactgatccccacgagcatacagcttcggccttccgaggagagtcagggtcggtgcggaccgactccgcaggccctcccttgccccatctgggctggtgccaggccgcagctcgagacctggtttccaccccgggctcccacagagcccatgaagcgctggtcacagcccctggaagctgcagacccggcttttcgaggagcctccccgacgtgcagagcctgagaccccagagagcggccggctcgtgcgggccagaacgcggcgaggcgcccgcggaaacgactcggcttttctttcttttcccct

SEQ ID NO: 234264 - DNA, 255 bp, Homo sapiens
  chr9:96929092-96929347
  hyper
tggttgtaggcgccgccaggtgcctctgacgtcacttccgctatcaagtttgtgggccggggagaccttggccttgggggttgggatgaaggagggaaggtaggaagtgcgaggggcggggggacagggcgggaaggcgcgggcggggagggcgggagagtcgtggctggctgcatgcccctgctccccgcggccaagtgcagcctcccttcctgaagcagctgctgcggctggaggtccgctgcggcagccgtc

SEQ ID NO: 234265 - DNA, 285 bp, Homo sapiens
  chr9:97401984-97402269
  hyper
ccctagtcttcctgggctgtcgccccccacacacacccctccgtgccctccacccgcactgtggagcgggactcgggccatcggactctgccagagagaaagctatgactgtttcctccaaaatcataaaacggaagttcagaaaggttaagtaacttgctcaatgccaccagctaggcagcgaaacccgcagccagtccacatggcctggctttagctctgcagctcctgccccgtgtggctgcctgcccccgccccctgcccaagccccgtccactctgcctg

SEQ ID NO: 234266 - DNA, 66 bp, Homo sapiens
  chr9:97811337-97811403
  hyper
gtgagttttcaaacatttctctgtcagagttagctcttacttgttaaattccgagatgagaatcta

SEQ ID NO: 234267 - DNA, 852 bp, Homo sapiens
  chr9:98111402-98112254
  hyper
cacacgctcgcagacgcacgcacggacaccccgctttccaccagcgcacgaagacgggacgcgcgctcacagccccagggctcggccctgcaccacgagctaacgcgcggtccccagggaggtggcgcagaaggcatggcgcctctgcccacggcgtcccggtcctggtagtccctatagagaccttcgttgatggcccaggtctaaaaggctttttcctccgagcctgcgttcctccagccttcccgctgggccagggctcaccatccttcctcgccggcgagcgtgggcctccctggaggcgggggtggccctgcagaggcagccccaggtgcgcgctggagaggccggcccgccgcgcgggagacactctttccaaagtggaagcgctgcgtgggcagcagcgcgggccgggccctcggatcccagtctctgttgctcccgagacccccgccccgcgccgcatcctccgagctcagcgccctcgggctgcgctgggcgcagtggctcccggtcagggcgcagtcggcctgggcgctagagcccctctcagctcccggcctagggcggggaagcgccagctcccgcagcccctgtgaaaggtcccctgtgcctcctgcctaggtgcgcgctgtggcatctctggccagaagcacctttggcggcctgttgggcccctcgcagcctctggctgagactctgccgccggcgctaacgggctgcgcccgcgctcccgctctgtccccgcccgggtcccgggctccgcgtgcacaccactccttggccttttccaccaaaacttcctgatctccagttcgatgctgtcgtcgcggttcccggaactgctgtctt

SEQ ID NO: 234268 - DNA, 31 bp, Homo sapiens
  chr9:98278458-98278489
  hyper
ggggcccgccgcggccagccccctccccgcc

SEQ ID NO: 234269 - DNA, 155 bp, Homo sapiens
  chr9:98315399-98315554
  hyper
ataggcccggccagcgcggagccaggagggtggcgtccaggggcagtggacgcgcacgacaggaggaagcctgggctctcctctctgacctcacgcctgccctccccgcagatgggaatgtccttgtcccgcatgagcggcggagccggagggga

SEQ ID NO: 234270 - DNA, 151 bp, Homo sapiens
  chr9:98637318-98637469
  hyper
cgcgcgtgggcggcgctgccctgaagatgctcccgggctcagtgcagacggctcagcgttctctcgcgttcaacgaaccgccagaaacgtcagatggtacggaggaaaacactttacactttaacagtatttttacgtttatttgcagcaa

SEQ ID NO: 234271 - DNA, 1723 bp, Homo sapiens
  chr9:98783204-98784927
  hyper
caccctccaagacgcgcgggccggggagcggggagagggcggagggaacggcgcaccgggccccgtcggactgttggaccaaaagtcctcagtgtcgggggctcgcagcgccgccgcggcgaacccagctagggggcaccgcctgcgccgggcacagggaggccgttcggctttccccctcgcgcccattactctcaggcgtcccggggaaccccgcgggccaagtgtcgggctgcgtccgggcagaggcggcttcgcctggtgtcagcgcgtttccgaagggcacccgcggcggggcccacaactcgagctgggagccgccccaagcaacccgttcctccgaatcaggctgcttttctctgtaaagaaaagagaaagcaagcgattaactgatggcttggccggctggaaacgggaaagcgagttctccaggagccgcacacctcggggaagcccagtccctcccgggcagggagcgaggggcggtcctgggggctgcttcccgcggggagagaagggagggcggcgcagccctctgcggggtccgcccctcggttctccggacccccgcggcctgggggacacggggcaaattctcggatagcgacgggcaggaaggggacccgggctggcgatgggccgagtgcctcctttgctctcacccccgcgcgaagacgaggccagtgggcgggtggcgtggggcgaggcctccgcaggccgccgggggcccaggcacctggagccgggagggtccgctcccttccccgccctggatggcggcctatgggaaagcagtctccactggatcccgcgcgcgtcgcgccgaggtcgtgggaaaccgagggcgggagggcgggagggcggaggcgccggcagggtcggcgggactggggctcggacggaggacaggggcgaggaggaggcaggaaggacgccgggtactgcggggcgcctagggggttccgagcgcagcggctgcggggccgacccgcccaggatggaatcagggccccggcgcccccacgccgctcctccaggccgaacccctgcggccccaatcccccggcctcacgcccaccccgcaggtcggccctgcagctgccttcccttcctccacctccctcccgcctccgaagccggcgcccccggccaagtggccgctctcaacctgttaccaagtcctagagagaatttctccaaaatatttcctggatccccctgccaagggccctgtcccgcccttccagctcccaactggatgcctgcagacctctccccgggttccgaggctctggcctcctccctccctaatccattttccacaccgcttccccgggagcccgttaaaatacaccgggaccgcggcgggtgcaagcctcctgtatctccacatagcaggctaaggggaattgggtagggaataaaggctgcaggggacatcggctggcaggtatgaagcccgtattgtgtgtcgtttgttaaacacttccagtggattttctcgtttaatctgcccaacaacgcttctgggccggtattcgtattgttttatagagggagaaactgaggcacagaggggcactcggcttgtaagcaacggagtaattcagagcccgtcagccccacgccgagtttattcaccctggcaggggcttccgcgggagccatgacccttcctaactggggtggaaggacccgcagcgccagccgggtccgggccaga

SEQ ID NO: 234272 - DNA, 427 bp, Homo sapiens
  chr9:98789601-98790028
  hyper
gctgcctggggaaccgggaaggctgaagtggacacaggaggagctggcagggagagcccaggccccgcgggctgcgggaaaggagagggcagcgactgggcgagggaggaaagaccctggccggggcagcccggcgcgggagaggctgcgtgtgcccggctcagtcacccgccctgggagaaggcggcccggttggaaagttgaggcggaaccgaaggcccccgcgtggaggctgcagcccctgcgccggccgggcgggtccggaaggagcccaggccgcacctccaggccggcgccgccgccgcccagcgcccacccgtccccccggcgccactccacatgcaccttctcccggggcgccgacggcctcggctgcccccgcagcgtttccctagcttccctccaaggcccccggccgctctttctc

SEQ ID NO: 234273 - DNA, 77 bp, Homo sapiens
  chr9:99145972-99146049
  hyper
cccggccgggccggggaagagggcgcggcaggaacaggaagagcccggcgcaatcccaggtcccgacccgccccctg

SEQ ID NO: 234274 - DNA, 239 bp, Homo sapiens
  chr9:99181498-99181737
  hyper
ccgctctaccgagcggctgctccgggagtcggggcagcgccctactttgctcggcccccacctgccccggccgcgtcctagtactcgcgccgggacgcgcggagccccaacgtcctctgcccgccccgccccagccccgcctggctggcgccgaccgcggcccgggtggggctcgcaggctgcagaggaaggaccgggcggaggggttgcccggcttcctacccgctagatgtggcctg

SEQ ID NO: 234275 - DNA, 1471 bp, Homo sapiens
  chr9:99380838-99382309
  hyper
tcgaatgccaccaacgtgacaccttccttctcgaggccccggcggggagcggaccccgggaggcggaggcgttcggggggcgcgctagggggcagggcgcgggaggcccaggagaggggctcgggcttacgcgccggacgggcaacgcggcgcccagggtcccaaggctacggagcagcgggggtttggccaacgccaaaaaggggcagctcccgtgccaggcgcgttcagcgcgctcggggaatcctcaggggctgattcagaggttgtgactcgcgcgagggccaaccgggctcgcaatccctgaaggcggaatccacaggaactcagaagcagcccgcggggaggagctgcaggttcgaggcgccgggctgacgcccgcaacttagaaaggtgaccctcggtccatcttgctggtggaggagggtgcacaagctaaagttaaagctcgcagcccacgcagctagaaactcggggcggggggcgctcctcaggagccaggctcctaaagggggtgtggcggccggggcgtttaagggggtgggggcgaaggcatttcggcccggccccggaggccccgggcagcccggtgggaggtgggccagggccccgcgccgggtgcggccgtccggggccctccgcgcgcccactggccggctcaccggtgatgtccaggtacacgtcgtcctgggggtcccggcggcgcgggtcttgctgcgtggagctgcggatcttcttcacacccggcgaggtcgacgagcagcgccgcgagcaggggggcgcggcggcccagctcgaccgccgctcgcttttccgcttcatggaggcggccgcggcccgtcagggggccacgaccatggccccgcgcgcccgcgcgcccgccgaggctcccgccagccccgcgcgggcgctcggggcggcgggcgcagagcggcgctgcggggacggcgggcgccggcagagcccggcgggaggcggtcgcgcaggagccggaggaggagcccggcccacagcgcctgccccgctgcctcccgcggccgccgcaggaccggcgccgcagccctcgctacagcgcctcctgccgcggccggcgcccccagcccgcccccaggtgcccgcagccggctggcgcggccgaggcgacggggctgcagctggcggccggagctgcccggggtaaccgtgcgtgcccaccgcggccgcggccgctgctgcgtaggcgccggggcacagcaggacgcggctcgtggggaccccaggagggctgttccgtggcgcttcattcacaaaaaagggcccacaaccctcctcggggcccgcagactgaggcctttcattggccaatgcggcgtgacgtcacggagacggggcctttctacaggcaggtactcggtgacgccataaagaaaactctgagggcttccgccaatcagagataaagtgtgctagcgaccttcgccagccccccaac

SEQ ID NO: 234276 - DNA, 205 bp, Homo sapiens
  chr9:99417601-99417806
  hyper
cgcggaccggggcggggcgcgcagaggttgggcgcggggggcggggcggggcgtgcagaggtggggcctggcaagtcacggtttccgcggcgcggcgcgggcctgggagctgtcggagtgaaccccacgggcggttctgactcagctctcagggtaggggacagagagagaaagtaaggtccgtccacggcgagcaagcattatt

SEQ ID NO: 234277 - DNA, 345 bp, Homo sapiens
  chr9:99449021-99449366
  hyper
ctcctggcccaggccgagctgcagggggcgccaagctgcggctatgaggggaatgcaatggaaccaaatgctctgaggagccccagcaccgtgcctcgacctcaccggattctggtcctcactgccgcccgggcctttccgcttcttcaccaaggcggacaggctgacgcactaccacgccgcgcgacagcgaccgcgcgcaaagcgccaggaaccccccctactgcccgccccgcgctggcgaagcgcgacccgtcccgccccgccccgccctcggcacagcgtcagaggcggggacgcgcgctggtctatttttgggcatccggatggcgactgcgggaaatc

SEQ ID NO: 234278 - DNA, 808 bp, Homo sapiens
  chr9:99539844-99540652
  hyper
tttacaggggatggcttacctctgaacgacacaaagcagtttttactaatatcctcattttcaaacgctcaagtgacagagccaaaattcacgaggtccttctagctcctaggctcggcctctcaccgcagacccacgggctgtacgcgctttgtggcaggttcatggtcaatacaataaacgcgcattcccctcctgaagccagcaccgcgttttccgacgcctggctgcattctggcgcccatacctcggcccgcaccgagcatcttccaactaggactcagccccacctaacgcccccggagcccgcccccaccggcccttctcaggctgaggtcccgggccggccgaggcacagggagcgacggcctgctttgggggagttcccgggacgtcgcgttcccgccccctggacactagcacatccctccctgcaggtccgcaatccgcgtggaggcccggcgctctcacctgagctgcgaaccctctgcaccagcaaacactaacagggagaagccggaaagtggggttgactgcacatgcgcagacgaaaacgcgcatatccgttcccagcatgctgcgcggtaacccataacatgcaagactacgtttcacatgcagtacggcgccagctgtcagtgtttttttgtttgtttttcccccaagatttatggcgtaataacatggaccgtcctgataactggagcccgggttctgtcagagccccagaggttgtgggttagacttgatgacataacagcaaatgcagcgtgtggttacagaaagcaagagccgcggaagacgtttg

SEQ ID NO: 234279 - DNA, 178 bp, Homo sapiens
  chr9:99637708-99637886
  hyper
agaaacctcttacccggttcccgccctcgccccccgcttacaggtaataaagctggaatttatgcagctctttcggtctccacagctcggggtcttgccacagacacagcgcccacgagttctggcactttggtcaacgtttataaacgggctctcctctgccgccgcgggcatgcgc

SEQ ID NO: 234280 - DNA, 338 bp, Homo sapiens
  chr9:99638089-99638427
  hyper
accttccccgcccgcgacacccaagggccccgggaccacctctcagccttagctaggcgtgaagcagcgagctaagcttgcacatgcgcagacgtcatccagaagaccctttcctagagtgtggcgcgcgagccattcggatttaagactacgtttcccagaaacctccacgccacgacttacttcgcagcgttttctctattggatgattggaagatgttcctgactgcctcgcctggccaggttctgccagagcccctagaggttatgggttaaatttgaactttgctgccgaatacggtgcgtggtcctccatcaaatcccgattggaaaaaaca

SEQ ID NO: 234281 - DNA, 356 bp, Homo sapiens
  chr9:99639677-99640033
  hyper
ggcacccaggagcccggcttcggggtgcttagcggggcgaagccgcccccggacccgcgtggctccagcctcctgggggtacctggcagagggggctgcagcgagcgccctgccgcgccgcttcctccgcgcgtctcccgcctggctccgccaagactgggggcttccccataggcccgcgtccgagcgcgtcctcaggcttcgctccgcgagatctgggggccccgtgggctggggttcgggcggggtccgttccttgcggtccgcggtcttgaagcaatttcccggcaaagtcccgggacagcgggaaagaaactggtctccctgcctggggtcgttcccggtggatgtgcctc

SEQ ID NO: 234282 - DNA, 450 bp, Homo sapiens; identical to SEQ ID NO: 201807
  chr9:99801107-99801557
  hyper

SEQ ID NO: 234283 - DNA, 238 bp, Homo sapiens
  chr9:99983230-99983468
  hyper
acctccaaggcccccgcctcaggcgctgcgggcaaacagggcctgggggccccctcccaccgcgggctgagcccccgctacctgtcctttctgtcgcgggcatccaagtcccggaacctgcgagtcaggcagcgctccacctccgcggcgtcgcccttgatggccaccctgtggatcttccgcagttcccagtccccgatgtggtacccccgacccgcgtactcttggtccatggagc

SEQ ID NO: 234284 - DNA, 144 bp, Homo sapiens
  chr9:99984008-99984152
  hyper
tcgcaggcgcgcatcccttcccgcctgagggcccgcctggccgtgactcccgctcctctcctcctccgaagagagatggggccgctggcaggggctctccgcagccaccggggatggggctgagggtcggttcctgccccggtg

SEQ ID NO: 234285 - DNA, 666 bp, Homo sapiens
  chr9:100000457-100001123
  hyper
ttggtccgagtgaccgcagcagtgggcgcggtggaagagaaggagaacgtgttggcccgggcctccataaccatggctgctaggggcggggactgggagcgcgggtcccgggactgggagcgcgggtcccaggccagggtgcgggctgggaagactcggtcctccactgccccagcaggccacgcgcccgcgcgtagcctcccgccccgctagcagcacgctgcgtggctgctcgttggctacttacgacggaagctcggttggggtttctgcagaagtttcccccttgggcggtggcggagctgataagcgcgctagtagcagctctggcagaagcaacggtggcttcgagggatggcggcggctgcaacaggacctgcagcatcccagaggtgcgtgtttttccttccctttgctatttattttatcccctttccttggctagtgggtcctgctgaagtcgttgttttcctgagaggttttttccagagcttctcagatgctctaatccactgcggcgttagaggtgagagagccttttctgcttcctccacccctggctgacgcgcctcctcccagcagcacctgattgggacccagggtcctgtggttactgcgtgtccgccccagtattgagattctcagtctcctcgcgttacctcagac

SEQ ID NO: 234286 - DNA, 113 bp, Homo sapiens; identical to SEQ ID NO: 201809
  chr9:100263429-100263542
  hyper

SEQ ID NO: 234287 - DNA, 401 bp, Homo sapiens
  chr9:100264592-100264993
  hyper
ggatcccaggttcgcgctgagagtgtttggggcaggtgaagtttcccaaactgggagagacaaggtttaaagcaccacgacacgcgctacgcggccaagtggagctggaaagagcttggaggcgggagccccaggttgtcgccggctctcggcatggccttggcaatccccctcttgtttctggatctcagtctcccatttgtaggggcgaggtttggtagccgcgatggagctgggagcccaagccctgagagctgcagggcgcgctcttggccgcctgcgctccccacacctgttcaccctctccgggcctgggacgctggggtcccagccgcgcacatgcggagacgctgcagaaatcggagactgactgccccagactcgatcgtatcctgggactc

SEQ ID NO: 234288 - DNA, 229 bp, Homo sapiens
  chr9:100459620-100459849
  hyper
ctgcacgccgaggcgagccagccgccctgcaccgcctctgcgctccccgcacccagcggcctttctgagtgagagcgcctgcgcagttaaggggctcggggtggcctgcccgggcgctgggcggagtctgggtatgcgcggacacggagtacccgcctaactacctgctctcttgtcatccgggagaagggtccgtgctgagatcatatctcacgacctggtcaccttt

SEQ ID NO: 234289 - DNA, 669 bp, Homo sapiens
  chr9:100503320-100503989
  hyper
agggggatgataagtaagggcgtttccggttctgatgcgctggatcttgaagctcttctccaccactagcgccctgcttgtaaccttagcacacgcaactctgaacaggaatagtcctgggagaagggcggaaggttccaggagggcgcctgcctgcctagagtccccttgccggtctcaccctggaaaggtaggcggaactagaacaggcgggccccactgcctgcagcctgcgaggagacgccagggctgcaagcccccccgccctcctccgcccctgccgggacagtcagccgctaggggattaggaacgggcccagcgcccattcaagccattcagcgagacaggaagccaagcgcgctcctgcccgcccgcctctgccgggcaggtctgcgggatgacgcgcattgtgctggggactcgcccaaagggaggcccagccgtggggaaaaccgcgtcccgcgggaatccgacgcccggtgacgggggcacctgcaaggcttcagggcgaatccctgactcccagcccggggctgagtcctcgtggggccgcctccgcgctgcccagtgctgccggttatctgctcacagcgggtggctccgggccttcaggagcgcgacgggcgccatcccttccagtgcctcccgggacaaggccagggtcatcg

SEQ ID NO: 234290 - DNA, 79 bp, Homo sapiens
  chr9:100610034-100610113
  hyper
cctccaggacaaaggaggctcgtatgggcaactggaacccggctggagtgtgcagctggccccctcacttccagcccgc

SEQ ID NO: 234291 - DNA, 1370 bp, Homo sapiens
  chr9:100610293-100611663
  hyper
ctggctgctctctcgtgttgaggttcaagtgtcttccagctccccgcgccccctcctcaccgtgccaccgcccacctcatgctttgggcgccaagcagccaagcaaccgggttgcgttgtagggggaggcaatcagccctgttacccctcctcaggcggccggactgagctgcgggatgggatccctacagagactggcctgggtaaggggaaaaaatcactgcctcttcctgtgcctctagtggttgaactagaatcctggctagctcatctcgcttttgaagggggaaggggagtaatcatcggctcttttgagattgtcttgcaaaccatggactctctccccagaaatgaacacccacaatctagtgtgtaaatttcaggtttccaagtgttccaaagccgcgcacaaatttcggaaccagaccaagaatcctggactctagacgttgcctgggggccgatcctgcgcccagggtcccagaatctaactgaaatgcgcctgcgggccgccaccttcgccccgggccacggctttgccaggaatgcccgccgccacagctgaactcccgcccgcccgcctgggtcggatcagacgcgggtagtggcttgcgcttcgtggtcctcgggtccggaacgcagggaaagcgcgtggagccaacctagagcgggagcagggtctggcttgactctgtccccgattcgttgtgcgcagtgggacaagtccgcgccgtccggagccgacttccccttctcgttgtggccgtaaagctgctggacctccaagccggctcctgcgctccccgctgctctgagaacactgagtgtcccgggcccgcgcagactgggttgggagagggctctgtgggagggcttgcggggagcggggtaagaaaggctaggtgcttcttacctacgtaagaaacgttggtggcgggatctaagcaaacggggaggtgggaagcagaaggttccccttcctgggccccagttcctccatcctgtcccctgggtgacagtgattcgctgttcatagtgtttaagtggaccaacttaaagggagagagcgcttgccgagctctgggaaaccgaaagggtccacgcccgcgggagcctcggagactcaaaatcccccgctagaccgcagaaaatgttacactttaatcaaccgctacttcttccgtggagaggggcggtgggtgggggtgtgcgcatctcatcgcggcctgtgagtggaacaggctagaattatccccagcgtcttttttccatgtccaagtttcgccttaaaacaatttaaaagaggaagaagaggaccgcgcgtctgtaaggcgctccactttatcaccttgactcggtggaagagaaag

SEQ ID NO: 234292 - DNA, 1289 bp, Homo sapiens
  chr9:100613895-100615184
  hyper
aaaccaggagttttgtttagcgagtgtaaagcccctctcccttcgttcgaccaaccctctgccgcagaaggttgtcaagcaaacgctttgagcgtttccacacaccgggtcgacggagcaaggatctgggctttgcctcgctcttccgaaggcagctgcccaacgcttggccgggcttagcctgccctcagctcaccgccacgaagaacgcgactaaaaccctggaaggcatgccacccgttactggccagaactctcgtcttgggatctcccacactcacctggcaccaccatccgcgcggctctgcacccacagccccggcccgccccccccccccaccccggaaagctgcgtccgggctggagccactggaacccgcgccaaggcccggaatcctatacgtagcaggggcctcggagatcagcacacgccctccagctgctatttaacagagtagaacactgaggccctgcgaggggacaaggacaggccctggatctcccagtgaatggccagggaacgaacccgggccagaggggccgcgccgcgaggatctcaggttaggaccaagttccggctcagggacagcaggaaaggaactcagaaattggacacccatgaagcaaacgtgtcccgactgcccgccccttcccccggagacgcgcccacccggccaccgctctcttcccactcccccattacccgcagccctcactccccgctgcgggaaggggctgcttggctgcctctgggggtcttcagagctaccctggtcccgggggattggaggaggaggttacctatcctgcgtcgtctttaatccgtgcaccactatccatcaaatagagacagatcctgggcctctcaaagacggatgattgggggtggtgattggcctatccctaaatatctaccacgcaaggactcttgagagatccagaccccggtacagtcgagggacctggggcccaaaaagggaaagcggctacctctaccacacagttgggaagcgcagtcctaaaggagacgcaggttggagactccgctaagcggagaagccgcagtggggccatggcaagtcaccttccctttcgggcctaggaatactcattcgaaagatggggggactggagtgccgagtggctgtggcagccacgattggggtttggaaaccatcctgaaaggcccggggagccagtctcctggaacttctccctccccattcccacaaaaaccaagcgccctctcggccaattctcaccctctcaggacaaaaaagtgagatgag

SEQ ID NO: 234293 - DNA, 588 bp, Homo sapiens
  chr9:100617124-100617712
  hyper
cagcgggcggcagcagtggcggcgtggagaccacggtggacttctacgggcgcacgtcgcccggccagttcggagcgctgggagcctgctacaaccctggcgggcagctcggaggggccagtgcaggcgcctaccatgctcgccatgctgccgcttatcccggtgggatagatcggttcgtgtccgccatgtgagccagcgtagggacgaaaactcatagacacatcggctgttcacacgttccccgcaatctgagaacgaacaggaatggagagaggactcaactgggacccacgtggaaaagaccgagcaggccacagaggctcggtctccccgcgcacagcgtaggcacccggtgtactctgtaaacgggaggaggtggggcgaggcagccagagcccttggactggcacagggaccctcgatggagcgaagccctcaaacgggatgctttctggtattctatcggggagggtccttggcggtaaccagagggcagcgtagtgtcaacaccagagaccaggatccaaattgtggggaatcagtttcagccttccatgtgctgccggaactcgggcctttttacgc

SEQ ID NO: 234294 - DNA, 905 bp, Homo sapiens
  chr9:100619833-100620738
  hyper
agggtgggaaagagcggacattttcgtcccccattctacttgtcaacttgcgggacaggtaagattgtgccaaaggcgagggtcagcatcaggagagagaggacgctgcggggagggacctggttgtgtgcttcaggtgccccaagggacacggagacgcgcgagggttgggatcaaggcgttgaagacagagcgacagcccttctcggcctcccaccggccgacgacaccaagagctcgcgcaccggccgggccaggtgggaatgggcgccgcgcaggggagcgagtacctcggagacagtgcgcgccgcccggggcctcatccacagcggggtcgcgggcggcccccttagcccgcgtgactgtgggatcctgagaacattccgctgtatgtcttggaaccttctaaccctaggaatttgcaaacccctcccagtccctcatctgggggctcagagactggaggtgccttttttatttttttcttcttcactttatgaacacagaaaaatcgtttgtccctctccgggccctgcacccgccagcgtcgtgtgcaggcgtccccgggctgtggataattagacacgttcttccctcattgcccaaggctcgttagaattcgccctagagctgtatcatgtattttctttcaaattaactttgcttgcaattaagcttagggaaccagcaacaaaagcaaacttggcccgaggtcgttcaccgcgaaaatggattagagaaacttcttccccgatttaaggggaaagattcctgcggccagcgctttggggaaagtgccccgaccgcagaggcgacgacaggggagcaggaagctgctcacggtagtcggcgttggcggcagcggtggccttcctcatctgggcgatgtgggctcctagaagagt

SEQ ID NO: 234295 - DNA, 194 bp, Homo sapiens
  chr9:100818670-100818864
  hyper
ttacaccatagggcgcgctctccccatgctcctgagagcaggacatagactatgccctgcgcaggcagccgtccgcctcctgcagggaatgcttgctcctgggtgcacgcacggataccgcgatggtccgagaccacgctctgggacagcaagcctcaagcctcgcacaggagagggccgcggagcttcctcga

SEQ ID NO: 234296 - DNA, 165 bp, Homo sapiens
  chr9:101469271-101469436
  hyper
ctggggcagaggacgcctctccgcctgcagcagcctgcgcgtaccgctgccaactgccaccggttccttcaccttttatttacagcgcagagcaagctggttcaccggtgaagcgggggaggcagggaataagatacaatctagattctgctctttctctgggga

SEQ ID NO: 234297 - DNA, 31 bp, Homo sapiens
  chr9:101470336-101470367
  hyper
ccccatgagcgggacctggacagggacaatc

SEQ ID NO: 234298 - DNA, 1438 bp, Homo sapiens
  chr9:101470649-101472087
  hyper
accccaatgccccccgaagccccgacggcaggggcagccggacactcacctccgtgtcatagagccgcaggtcgaggaagtaggggcgcaggagtgactcgttgcggatctgctcgatggccagttccacggcggggagcacaccgcgcccgatgctgcccttggccacctccttggtgagcggcatgaggcccatgatggagagcggcgggctgctgggcggcggccggggggcgccccgcgcccagccccaggccccgggcgccagaggcagcagcagcggcagcagcagtagcagtagcaggcgcgcgggcggcggtggcggcggcggcggcggcccgggctgcccggagctccgcggggaagccatgccgcgccgcgggctgcgggcgccggctcactcggcccgcatggcctggcccggcccgccgccccgcgccaaggtcttcccgcggcgcccgcgcaatggcgccggcccgggccccggctccgtctcgggctagggttccggctcggctcagaacggccgcggcggcggcggcggcagcggcggcgcccgtgacggatcaatcacgccgggaaggggtgggagcgagcggagtgcgggaggcggggagcaagcgagcaaacgcggagaggggggccggcgtctccgcgcgcgcctctctccagcgcggccgccccgcaccgggccgcctccgcccgcccccgtgcgcgctctgaaccgctctcccgccgggagctgctaggcggcagcccctggagctcggccgggggagggcggacggcaggaaacgcgggaggcgaaggcgaggctgctcaggggcggctcgggccgcctccagggacggggacgagccgtgcgcgccgggggagggggaggcgctggcgctgcggcggccgcggggagggccaccttcccagcacacgcacacacgcgcccccggccctccgctgcgccagctgccgctgcccgccgaccgctgacctccaggcaccagagcgcccggggacagcgatctgggaaccgggaccgcgcgctggcacacgcagtggccgccgccgctccgccgagcgctgcctgtagcacctgcacggtggtttggaaccgcttctcggaggtctggccgggaaggtctgggcaggagaatgttccacgaaggcgtcccagaggcatctgcagcctacgctctcccgttcttttctggcgcccacgagcccctgaccgagtcccgggggtcgctgaagacgcccacgggtgctcgaacgcccgttggtgccaggctgcccggcctttagggccttggctgaggacacccctttcctccccaccagacggagcgaccgccctttgccaaccccaagcaaagctggggtcccaaccttacgtgcgctaccgccccctccaggcatttgacctccccgcgtccccattctt

SEQ ID NO: 234299 - DNA, 52 bp, Homo sapiens; identical to SEQ ID NO: 201813
  chr9:101558601-101558653
  hyper

SEQ ID NO: 234300 - DNA, 64 bp, Homo sapiens; identical to SEQ ID NO: 201814
  chr9:101558886-101558950
  hyper

SEQ ID NO: 234301 - DNA, 111 bp, Homo sapiens
  chr9:101559158-101559269
  hyper
tgagtccgcagctgcgtgggccttgactttactagcgggctccgctgaccccaccgcagcccctggcactgaacctgcccttctagaataaggaagcggctgaattaagga

SEQ ID NO: 234302 - DNA, 64 bp, Homo sapiens
  chr9:101569829-101569893
  hyper
gcgcttgggctggcgcggggctggacggaaagggggcggcgcgcaggtggggcgggccgggggc

SEQ ID NO: 234303 - DNA, 241 bp, Homo sapiens
  chr9:101570313-101570554
  hyper
tcactgcaccgccgcctgcccgagcgctggaacccgctgtgagtgcacagctctggggaggaagcccgccctcagagccccgggcctcagtttctccatcagagcagtggcagggcggggagctggggtctccaggatggcgcgtcttattgagtctttctccgaagacgatagtgtaagagctcacatgggggcggggaggcaagaaagtaaaaaagacgaaagtagaaaaaaaattacc

SEQ ID NO: 234304 - DNA, 234 bp, Homo sapiens
  chr9:101706717-101706951
  hyper
atgggatccctgggcagctggggcggttggagcgttgtctgggcacccgagatgtctgagctgggtgcggagcctccaatcttaggcagagagggacttcagaaacagcgccagcgccagcgccaacagcctcagcgcacccagcgccagcagcttaggttgtgcgtgctggctggcttctggtaagggcaggtctggtgcctctccgcacacaggtgcgaagcatgaacaccg

SEQ ID NO: 234305 - DNA, 96 bp, Homo sapiens; identical to SEQ ID NO: 201817
  chr9:101866822-101866918
  hyper

SEQ ID NO: 234306 - DNA, 147 bp, Homo sapiens
  chr9:102585801-102585948
  hyper
ccgtcattccatcgcgagtccagtgccggatctccttttcccacgaccgggaaatattttatagaatcaagttagggaaagaaaaagctgcctaacgtggctgatgggcacaatgaatgaagttactttattcgagttattttcgct

SEQ ID NO: 234307 - DNA, 1028 bp, Homo sapiens
  chr9:102586189-102587217
  hyper
agggttggaaactccgcagaggagccccggtcacaatggtgcgtttcacggtttcctccacacacttcaccaccgggaggggaacacgggggtgttcctttcgtctgcccacgagaaagaaaggggctttgacagaggtagttatttcttcctaatttacaaccccaaggctctgtgctcccggccccggcggccgcaagcaggagcggcggaacgtgtttccaggcactgaggctttgcctaggtaaccggccgcttgtggggtggagagagcggcggggcgctgggctgggctggaggaaaggctgtgtgggtccctcccgcgaacgctgggcgctcgaggggaactccttcgttggggagaggcggtccccgcccacccgagttctgaggcctcctctcagagaacgactccgcttgaaaggccctcagggaatgcgggacgggaatgcgggcacccactgaaggggcgggtgggggattgctggagacccccattgaagatgcggggagacgggaagcacgtgctacagccgtgggaagatccgcttctacccgcgctacatcgagcgcaagctttccgtccgagcagctccagctggggctgggggtggcaagggaatcccccatttcctggtcgtcgagggtttcctggacctgggagccccgagtccctttctctcttcctgcaggcaagccccgggctcaggggcgccaggagatgaccctcgtggccccgcgcacctcggaggtttttggtttggtttgatttggggtttttcggtccctgttcccactcttcgagctgcgcccaccccgggcaaagggggcgctataggccggagtttgggcacccagttccttccctgaggcctgctgagctgcgctttcagctacaaagtttcgctgaggctgtgggctgagacgctggtcccggagctgcgctcggcgccctcaggaatgtgcccccgctaggccgctgggtggccaggagcctccaagccgcccaccctcgaagacaccgccct

SEQ ID NO: 234308 - DNA, 916 bp, Homo sapiens
  chr9:103235426-103236342
  hyper
cggggtctttgtgacgcggtggcaacggccacggacacaaagggaaggcgaggaggcgagcaagaggctgggcctgcctccggcccgcgacccccgcccgccgcgcgcgcgcccgcccgctcccctcgccgcggtgtcccccacgccggctcgcaccctcgcgcgcacccttgcgcgcccgcgaccctcgcacgcgcccggacccgccgactccgtcccgagcgccgcgggcccgggcctggcggacgctgcgggtggggcggggatgctgacgggctgctccccggctcagcggcgcggctgctaggaggcaccgaggcagcggcggggctctgggcgcgcggctggatgcccccggcctgcggctccctgcgcttcccgccgtccaggggcaccagtcatgggcgccgcagccgctgaggcgccgctccggctgcctgccgcgcctccgctcgccttctgctgctacacgtcggtgcttctgctcttcgccttctctctgcccgggagccgcgcgtccaaccagcccccgggtggtggcggcggcagcggcggggactgtcccggcggcaaaggcaagagcatcaactgctcaggtaggaccggtcggagccggccctaggtcttcccacccctccgttgccgcctccctcgtggtccctgcggtcggccgggctgggaaagaccccgtcgtgggggtcccaggggtgggcccgagggtgagcgagggcggagggcagggcgcgagcgtgcggtgtggctttgggaccggcgctggggatgggagtggccgtgggtgcgtccgagtgtgtcgagtggctgggcgagggcggcccggcgtgtggggaggcggtggggccggggccggggccggcgaggctgagcggccggccggggctcccggtgtggtcgtggg

SEQ ID NO: 234309 - DNA, 1142 bp, Homo sapiens
  chr9:103790598-103791740
  hyper
gacctctggggagacgcatctcggttgcccgcagggtagaaagcaagagaatggcccacaggaacgcccgcgccagcgctaaaaccacaccgggagaggacagccccacgttaccgaggactcgaggcagaagcggtctccaaggatgggtggggatcccaccactggcttccagctctgcatgcgccgcggagtccccgcgcagggcgcacctttgcggcggggtttccccgctgccttctgggaaccccgcggagcgactgccgctggacgcaatctggctggcttgcctctaccccgagctcactctctctgctctgtctgggctctggagccagagctgagtctctcttgagcatgcgcagcccggcaccctccccgcctctcccctcctccgccccctccgcgccagccttttgctctttcctttcattaaacaaacaggagatcctgaaacctggaccctgtgcaagctgcagcgccaggaggaggcagcggaggaagcagagcgcgggatgggcgcccagcggcatctgtgatcccgcgcacctccgccccacgggcgcgcgcacaaacacggacacacacatacacacactcgcgcacacactcgcacaaacacacactcgtacacgcccgcgccgctcgctcgccggcttgctctcccacgcaagcggaatgcagcagcgcctggagagcgtgtctcggaccgccgcctgaatgtacctcgctcccgggagccggacggcccagtagggcgcactggaggacgctccgctgcgggaggtgagtgcggcgcccgcagccgggccgctggggaagtctctgcaccggggcagtagggcagcgcggggcaagctcctggccggacccggcggcgcaggtgtcccatgccttgcttgtgggtgtcgaggtgcagatgaaggcggcgctggggctgtgcagaggagaggacgaacccagggagggtcgcctcctgcgaggtgtcagattgacccagcagaaagctaccacctccctgctcataaactttccttccatgtcatctgggaaacgtggagacaaagggggcgtggaggctccctccgtcccgttccaccctcctgactgcattccgggctgcaacgcgagcctgcacgcgt

SEQ ID NO: 234310 - DNA, 265 bp, Homo sapiens
  chr9:103791971-103792236
  hyper
ggtgccaaaggcgccggggtgaggctcgggtcagtgcggggataaatgatgagttactgacaggcttgccataatcacctcctagaacggaggacgctaggatctctcctcctcagggaaggtgctgtcttcacgcacaccatcgcggcagcgctgggagctgaacaggggctgctgctgcggcggcggcagtgggaagacggggctttatcctctcccaacccatttcccaagggttttatgacacgcacgtgtggaatatgtg

SEQ ID NO: 234311 - DNA, 227 bp, Homo sapiens
  chr9:104161277-104161504
  hyper
ttggggtcgtgaccgtctgggggccgaggcaggcactggccagacccagccagggatcctcgtattcgtcgagcctaatttccagcagccgggtaggcctcaccagaggctcctttccgtgaggccgcccccaattcctgcccctattctctgcctgggagatggcttccccgagccccccgccggagtcgaaggtaagtaagcacccccccggggatcccggttgt

SEQ ID NO: 234312 - DNA, 590 bp, Homo sapiens
  chr9:104248979-104249569
  hyper
ggacccctgcggggtcctcgcaatcctccggcaggaagcggtcggagctgcgggcagggccgctaggcaacccgcctgcccgaggcgcactgcccggggcacaggccctctgcgatgactctccccaacccccagctgccctgcttgtgccagctgtggccacccctaatccttgtcccctcgctctagtgtccagggctccgaccaccgcgccagaagggctgggcagatcgtgcgcaacagaaacctacccggttggggcgaccagctcggtcccctgcgcgcgccgagggccgcctctggtattgcccaggctggctagctcatcccggtggaggcgccatctccggggcccggaaggagcgggcgcagcgcggtttgggtgtgcgccggagcctcacctcctcccgcctcgcagctcaggcgcagggctccccttgctcaggcgggccatgtgacccgcgagctgcggagagaccgcggcccccaaagcggcttggggaaaaaggacggcaaaaggcgccaactgatgggcagccagggaaaagcaggagtcgcccccaagtcacgcaaacaggaagcctgtttct

SEQ ID NO: 234313 - DNA, 1201 bp, Homo sapiens
  chr9:104499977-104501178
  hyper
gcgcccggcgagggcgccggggaccgcctagtccctggctccggctcatccctctgggctcctgctcggctgtcgtccggagcgcggctggccgcgcggggggcggtggtccagggctgcaagtgcaccgcgcccaccctcaccgcgtgcccgatgcgcttgaggatctggcagggctgcgggtgcgaggaggagctgggcaccccggccagcaccagtgcgcagggcggcggcaacagcagacagaccctgctcagcagccaccacaaactcagtctcctcattactgagacccgcagggagaaagcgcgccccctcctgcgcccggctcgcccctctgcagccgctgcctgaggtctccgcctccaggtcccgcgcgcagcttcactccactcggtgaagcggtcccaggagctggagcggtctctaggccatgcaagttggagcgtagcgcgcctccggcagtctcagatcccgctcccaggtccctccgcctggcatcctctgcccgcccggtcactgcgctgagcaggcaggcgggcgggccggcgcctgtcacccgcagctggagcgcccgttccctgcccgccccatctgcagggcgcctcgggcactgcgtccggccccgcgaggcggccgggatgagaagcagccggagttcctcgggggcagcagtgacagaggagcgacgcgctctcgcctggattcttttccttttctgcccaggcgagacccacttatttcctggggtcgcgttggagagggctttcacgcccggggtgcggaaaagaagccaaatccaccttcctccactgttggccaccctcctgcaggctcccccagcgccgacttcattttctctcttctctcgctacttcctctctgcctttctttcgttatttttccaccgagtcgccaccgccgcttgcttcctcggaggagcaacgcgactggccagcaaagggtggctctgctccgagcgccaaagttctccccgcctcagccggcgcctccctgttgctgagccctggcgcctgcctgtcgcttggctgcgctaaacgcccactgttggtgagattcccgagtggcacatcccgcgcccctggaaagtcctctcccctcaaaggctgggcgtcatagtttgcaaaattccctaaaacctaagaaggaaaataggactatgagccggtgagaattctga

SEQ ID NO: 234314 - DNA, 110 bp, Homo sapiens
  chr9:107526188-107526298
  hyper
atctacacaactgcgcatcggagcgaatgaggtcagggcccagaaaggtggggcaggaacgatcccagccttcagctaattctgtcacctctaacgtctggggcaagaac

SEQ ID NO: 234315 - DNA, 330 bp, Homo sapiens
  chr9:108455719-108456049
  hyper
ctagcagctaatcacgtttctccaatttcctggtgccagcataatctgttcacacatcaaataagtgtgccaagctagttttttttcttacccaaacctattccttcttgtttcctatttatcagaatgcaaccacaatcctcctactcacccgttcctcattttatttgacaaatgcttcctttcccgcctgtacagactgacactcactgacgatattctgcttctacccatgtttcccacaattggtctcaatttctgctgccacagcctccactaccttttgcttggaccagtgaataccctctgattttccgttgtcagtcgctt

SEQ ID NO: 234316 - DNA, 903 bp, Homo sapiens
  chr9:109622313-109623216
  hyper
ttgtcccttctagacgtggaggcttggagaggaggtttggtttccaaggattggagcgctgtgaagggcggggccattccaagtccatctcccctttttgtcctcttctcccgggacgggagggtggagccaagtccccccgcggccggttcgggagctttctctatctcggtcgctcgaggtgagtgtgaaagggcggcagcccgtttaattgcagcgcaggttaatttcttgagttcaccgcagtcggtccgccagccgcttccccggtctttgccaagtgggtttacgaggtctgaggcgtgttggggcgcgctcacgttctcgcaaaaggctcctccccagggctcaattccccgactgcgggaagccctttggtgccccaggagccttggaaacccaaggtttcctctgacctcgtcgctcctttctccctccccaccgcctggttccctacgtccctgcccccagggaaggacggcccccatcttaggacttacgacccaagccaacccagaaggtaccttcacgtcgatgaagattttatcgcagcctccaaaacccagcagtaataggagctttcaacctgaaatacgattgttattttcccggtgcagagcttgacagaaaaagtcagctttttattaaagacaaagaggtaaattatcagccgggacagtggagggacggcggagacctggcgcgcttcctccggttgccacgaggaatttatggggtggcggcggccagcgctcagacaccccccgggtcccggtggggaggagctcggggcaggaggacttccctaggtccctccgggcactcggaagggggagtcctcccaaagccgcacaaagccgggatcatttcaatccggaacagcctcagcgtcctcctcctctc

SEQ ID NO: 234317 - DNA, 241 bp, Homo sapiens
  chr9:109623557-109623798
  hyper
tgaagccccgctatcggatgggaaccaactccgcgcgcgtctcctcctcttcctttattgtatggatttataggtatatatcttctcggactgttgcttggggggagggaggagaaagggcgagtatttaaagaggacagacttgcccaggatccttaacaccgcgccttcaccggatgcgcgctcctcaatgcaaaggaatccagcaacatccccaattcagacgcggacaaaagaaact

SEQ ID NO: 234318 - DNA, 615 bp, Homo sapiens
  chr9:109624113-109624728
  hyper
gcttcatcttggctcgcgtgtcttcaacaccatgacaccttatcattaagagcgctgattgttactttccgagcctttagatgatcagccagaaagtgcaaacaacgcggggctggagggtgtaaagttatttaagcaggcgttctttttttcttttggtgcgcagtcaaaacatttcacaagttaggaaaagaaagtggtggttccgaagctcggaatgatgggctcttttcctcctccacccccccaccttccatatcaggaaagaaataaaacgcacaatgagcctttatttcaggagagaagacttcaaaatacgtgccagtaatggacaatttgagcttttcactggaaatactcacaccgcaagctggaaagggattaaaaagccccacgtggttgatctgggtttatacttgcaacctccagttccccacgtatgttctttgcaaaggttggcctctagatggatgcaagtaagggaccctctggggctcgggctcggcgcctcgggcagggctgacgttgggagcgctatgagctgccgggcagggtcctcaccgggggcttcctctgcgggccagggctgccgggcgccaccgggacgcgagcgcg

SEQ ID NO: 234319 - DNA, 316 bp, Homo sapiens
  chr9:110187425-110187741
  hyper
ccagctctccttcccggcggaggcttcttccctccccccagagtctggttcagaggaagccaacgcctgtgcacgtgggaaagcagcgtggctggccctgggcctggagccacctcccgggcccactctgccaggccccattctagatgccagcaggccggccccgccccttggacacggttttggttttcgggtgcaaacagtctacattcctctgaagaggcccgctccggcctcatcagagctggcgaaatcaacgagagaaacaggggacgtcggcccgcagttcccgcgagcgccacgaggggcgcacgca

SEQ ID NO: 234320 - DNA, 766 bp, Homo sapiens
  chr9:110227804-110228570
  hyper
acatgaccttgtcccgtctattttcacgttagccaaagggaagcctagaagtccacagtccccgggagctggaagccaggcagtgacagcgccagcgtattctccttgacttgattgtaaatttcacaactttggtagcttcaacagggaggaagaggaggggcgccggctccctccagcaaaggcggcgcggagcgggtagccaggtccggagccgtcctgtgccgggccgtccggtggggggcactgcagaccgcgcgggcgctgcgcccgcctctagctccgggcgcagaggggtggccacgctctcctgagtccctcgcgcccctagccgcgcctgggagagcggactggcctcccagagaggatgcgggggaagccgcacaggggcccactgggactgggtaagggcgcgggatgggatcggctctggatatgggtgccccccgagccgcgccccaccccgcgagcgctcccatttgcacctccacttgagcacggagcttcaagaacgagctattctggggtgcgggttccgacactaggccccacacggatctggggactggtttggctacgacctggcggaaggggggaaacctggcctgagaacggaaactgcgggacgatccggcggcgcacttaaatctggctccgctgcttcctcgccccgcccccgctgtcaccttcctctgcttctgcgcagcgattccacaccccactccaccccatcccacccagaccgctcacccgattctgactttga

SEQ ID NO: 234321 - DNA, 2905 bp, Homo sapiens
  chr9:110249880-110252785
  hyper
ggcgccaccaccaccgggtggctgccgtcagggctgcctttgctgacgctgatgaccgacgggctgccgtactcgctgccaggggcgctcagcgacgccttcagcacgaacttgcccatcagcccgccacctggcggctgcggctgctgcggcggaatgtacaccgggtccaattctggccgcaggagctcggccacgaagccgcccgaggggctcacgtcgttgatgtccgccaggttgaagggagccgtcggagggggagcggactccctgccatagaggaggcctccgcccgtgccgcccggcgccacgcccgggtcgttcccggcccggatcggataggtgaagctgcaggtggagggcgcgctggcagggccgctgctcgacggcgacgacgaagaggaggctgacgctgacgaggacacggtggcggccactgactccggaggatgggtcagcgaattggagagaataaagtccaggtccaggagatcgttgaactcctcggtctctctccgaggtaggggcgccaggttgctaccgccgcaagccgcaccggctccgccgctctccaggtctgtggccacggtcgccgccgccaggtcataggggcggccgggaagcactgggggaagtcgcttcatgtgggagagctcctcccgccagcgctgcggggacagggcgggagagacctgtcagtggtggtcccctgttgccacccgacatactgacgtgctggcgggccacgcgcgactgcaccgcccagacatggggactggtcaggcaggaagcacccgggaacccagggcgccagcgctgcaatctcggcccactcccgggtcgaagaagaggtgatgcgtctgtattgcgggtgttatgtcctgtctgcccaattgcgtgtgagcgagcgccgcggctggtccctccccctccaggtcccgtggacgtccccggaattggcacaccgaggctctctcggtgcgctctcgccacggggccgcctacgcgctaaactcactctggcccagccagtgtctggggacgcggccacctcccgcccggtggcccgagagcgcccgccctaccgacagcgcgcccggggactggtgaagacccggcttgcgccccaggcggctccgcagtgctcgcaccacgggcatacacagctgagccaaggacacggaagctatcccgggaaggttgcggagtccgcgcggtggccgctccttaccctcgttcagtggctcttggtgaccccaaggctccgcccgcccccaccacacccacgaaaacccaccgggcgttcccggcggcccggagcgatactcacgttattcggggcacctgcttgacgcagtgtcttctcccttcccgccgggccagacgcgaacgtggagaaagatgggagcagcgcgtcgctgacagccatgtcagactcgccaggtggctgcctgcgagcaaggcagggagcggagacaggagagtcaggggcggctttcggccgtcgttccggcgcgtcccaccggtcctcacccctccctgctcccagcgccgcgcgcctcacctacctcattaatgtgggggcccagaaggtcctcggcagcccgaagcagctggggcacctgaaccccaaagtcaacgaagagaagaaacgaagccaaaacccaaaaccccaaattggccgagatccttcttctttggattaaatataacttggaagcgtcttttttaaaaagttcctttgtatacaaaagttcttagaaaagttgtaaacgcaaaaatagacaatcagcaaggcgagtaagtaggtccggtggccgggctgcgctctcttccactcagcagcgtcccccaccactgtcgcggtcgcctcgagtgctgccgtgggcgcaggggctgtggccggggcggtgggcgggcggtgccgccaggtgagactggctgccgtggcgcggagctgcgaactggtcggcggcgcaaggcgcggactccggtgagttgtgtggagcgcgcgcggccatgggcgcgggccacgggcgggtgggagggtggggggccagaggggcgggggagggtcactcggcggctcccggtgccgccgccgcccgccaccgcctctgctccccgcgcgcccgcagacacgttcgttctctctggtcgggaaactgccggccgccggcgcgcgttccttacttataacttccttcgctacagccttttcctccgccttctcccatgccccgcccctccctttcttctctccgccccccccgaggctcccttccatcgttgctatggcagctaaatcaacaaactcggcgcacgtgggggcgggggaggggaaggaggggcgcgggcggggctgggccgggccgtgacgccagccaggcagctggcgggctggagccgagctgacgccggcggcagtggtgtcggcggcggcggcggcgtccgccccagcgcggggcgcgaggaaccgggcgcaggttcggtcgctgcgcgaccagggccgtactcaccgccattgtcggctccctgggttcgaagcccgcgaagactggtggggtcagcgggcggcacggtcacgcgtccgcacccctgctagcatacgcgcttgccgcgctgtctgcgcgctggagaagagcgcgattatccgcgtgactcatccagccctccatctccccctccctctctgcgctcgcaggagtccgctctcgtcgctcagcgccagtgccggtggcggtgccggcgctcggcctgacctcgcacggttcctcgcgggcccttctgctgaggggtggggggcgctaggggtgtggagaggaggcagtgcccagcactgtgcagcgtgaactgggagcctcaagagaaggccagaggagtgttccgccgggaacaggcggaa

SEQ ID NO: 234322 - DNA, 502 bp, Homo sapiens
  chr9:110399860-110400362
  hyper
cccgaggtcaaggtcggggtcagggtcggggtccggtcgtacgccctagcactgcctgcggtggggcgcgcacagtcgagcgcggggcctccccgcaggctgcgctgcctgccgggcggcctcgggaactgaccaggccgcgtgtgagcgccgggattcctgatcctgccttaaatatgccggttatttttatctccctacgtcaggcagcgaaggccatcccaccggtggcccaggcggctgctacacaatgtttccctttagtcgggaggggaaatggagggaggccagacttcctgatcacatggtgctgaagtcaatgaaaaaaaattaagggggacccctccctttttcttcaatgcctgatccagattcccccctccccgctcccccgacccaccccctctgggctccgcgcgtcggagggaagcgcagcctcccaggcggagggccagcgaggcaggagagcgcgcgcaaacataaacacgagactgttgcagta

SEQ ID NO: 234323 - DNA, 189 bp, Homo sapiens
  chr9:111696912-111697101
  hyper
agatcataagccacgcgcgctctccctggctctccgtccccacgtcagaaggcactggacttctgtgttccgtctagccccagggaatggcatttgcaaagacctggtggcctgaaatacttcagggcgcattctggggccggcgattgcagtgcgagctctagggtgttgctcgcagtaagatgagta

SEQ ID NO: 234324 - DNA, 336 bp, Homo sapiens
  chr9:112081254-112081590
  hyper
gtccaaacatttctcccacccgggaaggcctatatacttccttggaagtccgggtatgttatttcttcccttgacatcctcgagatgatctgtaacattcatctaaagctcaattaccgctgtgtcctcagtcacacccagaaattcccgaaggcaccgtctgccgcagcgccgggtgcacagtgggcgcccgattaatgtgtggtttgatttgatctgatctggccccttcagccaggaagactcactggtaactggacgccctgcagcggaccgcagcgccggcccagctctcagctggcgcggggcgggggtgcaaccacctgtgggcgggtg

SEQ ID NO: 234325 - DNA, 213 bp, Homo sapiens
  chr9:112081890-112082103
  hyper
cccaaacttggggcgcctgccgagcagcaagcgaggggatctcctctctgctgtctcatcaaggcctgatggcgagtttgaggggggacaagctggacaccccaggacggcctcacattgatttgagattttctacccaataacccagtatcaggaagacccctgctggaagctagggacggaaggggagcgccggccacccacaccaggggg

SEQ ID NO: 234326 - DNA, 81 bp, Homo sapiens
  chr9:112082283-112082364
  hyper
agtgctcggagaagaggatgggggaggggatccccagggaggtgcaagggaagcgcccccgatgcaagcactgggggaggg

SEQ ID NO: 234327 - DNA, 858 bp, Homo sapiens
  chr9:112259825-112260683
  hyper
aatttttaaggcaaccgcaacttctcagtaagtttaggtagctgaaaatgggaatttcgggggggctgggcactctcacatacactcccccatctgcagctgtctcaccgcaggtacctgataaatcattccatatcgtccgcggaacggggaggatttattggctctggagtttcgtgccaggcccaggaaatgccatctttgaaagccgagaggcggattcgccctgggagccgagcgctggcagccgctctcggctagctccccgcgggctgtgtgccccctcggagccccgagccggggtcgcggcggcacggggtcctccggaggtgccggacgcacgggctccgcgggttgcgcccgcccctgcccggctggagcgcacgcccacgctccggcgccgcgtcccggccgccagcccgccccggccgagccccacccggcgccccgcccgcgccctcccgccccggccccgccaggtgagcgcagcggggcgccccctccccgccccgacgtggtgcggggatcccggtgcagccgcacccgccagcccgcccgcgcgtccgccgcgcgccccagggacgggtgggggcggggtggcgccgagcgcgaccccggcccccggcagccccgcaccctgcccccggcccgctggggtcgcacgggcccgtacctgcagcatccgggggcgcggagcgcccaggtaggtcgcgcgtgcgggcggcgcggaagctcgctcgcggcgcgacctggccgccgtctgagcatgcccagtgccgcccgcgggcggttcccgccggccgggctggccgcgacgggcccgcgcgccgggcggggggcgggcgtccgggctggcct

SEQ ID NO: 234328 - DNA, 292 bp, Homo sapiens
  chr9:112262008-112262300
  hyper
ttcggtccttgtcccggagtcgcacgtcccgggatagcgccgctgcagcgggtgccgcccgtgcatcgcgtcggggggatttccgacggagcccggagtccaggggcaggaccgcccgcgccccgcccggcccggcccggcctcgagtcgccagcaaaacctggagccgcggcgcccgctcagcaccactcggacgggcggggagcgcactgggcatgctcggagccgggcggggccggagcccccggaaggaggagccccctggaggggcaggcgacgccccccgcagagc

SEQ ID NO: 234329 - DNA, 925 bp, Homo sapiens
  chr9:112402426-112403351
  hyper
gtcttcctggcaggcgggaacacgcagaatttggagtgaaacggaaaggggcatggggtcgccaaggtggtgaaacgccgcattaaggcgcttcaagatagctggagttttgcttgggaaactcagagggatctcgcccggccggcacaatggcgtttctgaacccatgcccagcccactgggggcagtccttgctgcttgcagaggccagacgcttcttgcaacttctaagcggcgagagctgccaccttgccaatgactcaaccgtttgcctatgccctctgggctgtgccaccagccgcagccgccctgctcccccacccacccttctccccaggctccgcgccgcgccgccagtcccaggggagccgccggcgcacctggcgcctagggcgcacggcactgcgcgctggtgggcacctcacccgacgccagctgccagcgcgctccctccccgaaaccctgaagtggggtgtcttgtctagcgcccagcgaacaacattatccaattgcttcccgttttattcgcaggctgggagctgagagagcctgagcattcactttcaaccctccaggggaggagggggtgcgggtggggaggggagacggctcccagctccacctcgcgcgcggcgcggccagtgcactcggctccgggagaggcgagcagcgccggtgagccccgcagcagcgcacccggccgcggagccccgcgatggagtgagtatccccgagccgcgccgccagctgctctcctctcggcatgttgccatggtgaccgcggcggcaggcagatcccgctcgggtccgcgtccaggatgggtgtttaatttcagccccgtgtgtacgcctggtgtttctatagcagccgccgcggcggcaggaggcaaggggtgggagccccgggtggcgtggtttttgcggc

SEQ ID NO: 234330 - DNA, 667 bp, Homo sapiens
  chr9:112542127-112542794
  hyper
cccacgtaacagcacgtgctcgggtcccacattcggtcagacgcccctctccactggcatctgcccggtggaggcgccactgcgctctgcctccgccccagcaagcgcgtgtccacgcgggcgcgccacgccagccgtgcgccccagcggctcgccgtgcgcccgcgccccaggtgcccactggctcgcgcgccctccgtctgcgccttggagacccgcggcggcgatcgctcggagccgccttggaccgcggcctcgggtccatcacactccaggggcggagcgaggcaccgagacgtcagggcggagaactagcgccgggctagcgcgccctcccggcggctgccggcgtcccacgtcctcggctggcgcggccggcggcggcggcgaccgggagatgcagtgagcggcggcgctggggcgcagccaggcggccgggagggcgggggccagaggctgagcccgggcgagcccgccgtgcgcacagctctgcccgccgcccctggagcggatccccagccgtccctgggcgttctcccgggttctagcaaagccccccggggtgcccatcagtttccttgggtgactacagcgtgtgttttttctttcctctttcccctgcctgtgtgcccttctccaggatggcagaggcggaattgcacaagga

SEQ ID NO: 234331 - DNA, 88 bp, Homo sapiens
  chr9:113017848-113017936
  hyper
cgggcagggcagccgaggcccccgggcccaaccttggggactcagtcattccaaagccactgctgccggaaacgcgccctgcgccaca

SEQ ID NO: 234332 - DNA, 912 bp, Homo sapiens
  chr9:113341130-113342042
  hyper
taataggcgggtagcgatgactctggttttgtggatggggacgcttgacttggggtggttatgccttgcccaggactgaaccccgggatagagacgggcaggcagcggtgggtcgaagggcccggggactagggcccgggtcgggaggggcgggcgccttaccgcggcttgctggaaggcgcccttggtgtaggtgccgccacctcggtaggagatggcagggatctcttggaggagcagcgcgcacttgtgctggcgcgcgcggcgggtggagatgtaatcgacgcgcggcaccacgtagttcttggacgagaaggtcacgatggccacgcgcgtggccgtgggcaccacggggaagtcggacagcagcttgcggacgaacatgagctcgctgcggaagttgacttcgcccacgctggacgaatcatccaccaggaagacaagctccaggcgctcgctgagctcccgcagcagccgcacgcgtcgccggaacgcctggcccagccgctccactctgctccccgccgcttcgtcgccaggagcgggcggcgcggggatactcccgggggccccgggcgcggtctcggggaagaggcggaagctgaaattgcgcgacggggacatctgctgaaaggtcgcccagcccgaaacgagcgccagaccccagcaacaaaaggccaggcgaggccacatcgcgctggagacagagcggctgccccggagcgcaggcggcggctcgggcgggaagaggcgctgggcggccggactcgcagaggggcgtgcgcggagctgggcgcggggcagcggccaagagcctcagcgccctttcatctgacactggggacagacacaatccagactcctcagcagctcgggaactccggagggaacggcgcgcgctctctacccctc

SEQ ID NO: 234333 - DNA, 41 bp, Homo sapiens
  chr9:113342300-113342341
  hyper
attcccgcagcaagcgcaccagcgccgaagccctgattgat

SEQ ID NO: 234334 - DNA, 1630 bp, Homo sapiens
  chr9:113799864-113801494
  hyper
gcacgtttgttaggcggctggacagaaacttagttaaaagtcctcagcccggtggtgggggacaaccgagtcgtcagtgggaagcgagaggtgcggagccccaggggcgcagggacccctcggaggtgcaagtccagcgggacgaggttttgggagaatttcgagggcccctcgcaagccctcccgcgcacccaccccgacccaggtaaccggaggccacctacgtgtcactgggcgggccccggggcgcactgacctggcgcgggacaggagggccggcggcccgggcggctgcggcaacttccctccaggggctcggtccgccgctgggtgcgggaggccaggggagcctcgcctcctgcaggccggctcgcaagaacgcacggccacccacccgcgccgcggcccacagcgcgcacccacactctcactggcactcgcacgcgcgcccccaaccacaaagcccgtccgcggcgggacagtgtgagcccagcgcgccgtgtggcgggccgagcagtcgccgcggcctctggcttcgcgcccagggggcgccgtccccacacgccgcgccggcccccttacctgcgctcgctgccgccgcgcgtccctctcctgccgcccccgggctggcttcaggccgcgcgcccagtcccggcggcccccgccccaccgccagccgagcccggccctccgcccgcccctcggcagtcgcccagagcggggccgccccctgcgcccaccccgccggggtcccgtgctcggccgggcggcggggagggctccgcggctccgggccctggccgccccagatccggcccgcgctccgcagcggggctggagacggagtcgccactcagggagcgtcagccgccagtcggcccctactgcccggctttggcgcgctggcaggaggagggggcgcagagggagggccagaggagcagcgccgacgccagcctcctctcttcctccgccttccttcttttctgcttgttccacgtagcacaagtcagcaacacccgaacccccagagtccgccctccccgctcccaagctggaccccttacctggtgtggcgcccccagcgcccctgacctctgcgccccctcctccattcattggctcgacagcccacggtggtggcagggccggggctggggggtggccttagcctcccattcattatctcagcagcctcccccgccccgcccccgagtcgacacacccgcagcgggagacccgtggccgccagctcgggtcccacccccgcccctcctgcgcttaccccagcgccggacagctggcaggactccggtggacgccccggcacggggcattttcacgttgtcgctctcctcttcccactcgaaaagctctggaaaacatcgcggggcccgcaaaaccccggaaatgtggcctctctttcgtggctcactttctaaactttccagaaggcgcaaagtttctcccagcgccgccctgcactggaggctgcgaagaacgcagaagcggctttgctgctaggaaggtgcatacgtttctagttctgatttttcacttcactggatctgtaaacgaaagcaagtgtgtctgctcccctagttctccatatccacgattataaatttct

SEQ ID NO: 234335 - DNA, 269 bp, Homo sapiens; identical to SEQ ID NO: 201847
  chr9:114360505-114360774
  hyper

SEQ ID NO: 234336 - DNA, 1020 bp, Homo sapiens
  chr9:114361074-114362094
  hyper
ctacgtatcatttttacggtgagacatttgcagtttactctgttatttcgaaatacacattattggctctagtcactctgctgtgcaacagatctcagaacctactcctctcgtctctgaacttcgtaccctttggccaacaagcccccattcccccccgaacccgctcccagcctctggcaaccatcattctagtcgttatttctatgagttcaacttctttagagttcacacatctttgtccctttccccaaaaaagcaaccgctgggcttccaaactcgctacaagtccagaagccctcctggaaagggtctggccgcagaggggccaggtcccgggaaagtctcgcccgcccgaggagggggcctggcgcggcgcccggcctttgcccgctcgccctttgctcccaccctcgcctcccgccgcccgccgcccgcttgcccattcccgaatccccaccccgatctttcttcttctaccctcccccagttgtgcagtccagcaagttccctggccagccccctcccgggtgcaggaagctaccgggtgtcccgggttgtaaccaagctttcctattccctccggcgcgcggctccaagctctccaaggaactgcgggggcgggaggcgtcgggacgtcggctcccaagatcctccgagtgcaagacccagcggtcatttcgacgtaaggggaggaggtctaagagcaaacctcctccactggggcgtctagaaacttggcaggaagaaagcaagggggttagaggagggagaaaagggaaggaaagaaagcaggaggtctacttacaggagcccgaaggttccactgcctggggaaggcggctgggactgcgcagccgggcgcccggggtccgacttatgacaggtcccaagagagggtggggccaccccagggcggggctgcttctttagggtgagagcccggccccgaaagggtcacaggaggaaaaccagggtccgggaaatctgagtgcgtttgtgtgtgtgtgtgcgcgtatc

SEQ ID NO: 234337 - DNA, 43 bp, Homo sapiens
  chr9:115095506-115095549
  hyper
aggaagcagcggacgtgtccggggcgccgcgtggggaaaggag

SEQ ID NO: 234338 - DNA, 34 bp, Homo sapiens
  chr9:115480611-115480645
  hyper
tgccaggcaggggcgggacggagaacacctgggt

SEQ ID NO: 234339 - DNA, 68 bp, Homo sapiens
  chr9:115607127-115607195
  hyper
cccacagggccacaaggtggcgccaatgagtcaaactccgggaacgcgaacagttggtgctttaggtt

SEQ ID NO: 234340 - DNA, 532 bp, Homo sapiens
  chr9:115652921-115653453
  hyper
gcaggtggcccctccgcgggcaggtgacctcggggctcatgtgacctctctgatggggatcgaagggctttctggctgcagtgacaaggatatgctcccaaattcggctgctacggctgctcaggtttcagtcccggagcgcgagtgtgctccgtgcgccgggagcgcgagtgtgctccgtgcgccgggagcgcgccggccagtggcgagcagagccagggcacgcagcgcctgtgacagcagcccgcccagcagccgagtgacctcccgagtgactcctcctcaggccagaaaaggccgcgctccaccctgccctcgccacctcaggcagagtaggactggcgacagtccagggaagccaggcgcgggggagcgcaccgcgagtgctggctcctggcgccagcacccccggggccgacgggtcacgctgctcctgtgagcgcggccgcctgacggggccgaatttccccacagccaggcgtgcgtgcccggacctcccgcggatctctgcggaccccccaccaccggggca

SEQ ID NO: 234341 - DNA, 296 bp, Homo sapiens
  chr9:115774339-115774635
  hyper
tctcccgacccgcccgaatggttgtgtttgaaggggacctctctccccacctcccacacgagtgcaagggtcgggaaagaaaaagctcacctgctccaccgaaaaataaagagcacggtcgggcgatgtggttcccaagccaggaagtacgcctgcgcacgcggccgccaggaactacatttcccagcatcttctgcaaagcgccctcttgagctgcgtctttcaccggtgtctttctaatgctttgcgggttgcgaacgtgcgtcgtttccatcgttgtttacatgaaaagaaga

SEQ ID NO: 234342 - DNA, 568 bp, Homo sapiens
  chr9:115818681-115819249
  hyper
ccacagataactcagaacaccgacctcccaaaagaccatctagcatcgattccaccaattcccaaatcacctatcgtcacagactactccaatcactgccccgcaagtacaccatctctgaccgccaaaacaccctgtctcatcacagctctcaccgcggcgctggcctcgggctcggacacagccatctccagtggtcgcccggcctctttggtcgtttccgcacttctcctccggtccacggtctctggctttgtcagaatctggacgccgctggagaccgacatggcggctacccggagggcggccttagcgggtccggcagccgcgatggcggcgcccttcggtaatagcgcacgggcgcggccatcttggcaaacactcagccgtacagcggaagtgcggggacttctgggacaattagatcgggaggtggaagctggcgagggcgttacttgcaggatgcaggagtgatgcgatcagagccagccggaaccgagttccgttacgcactacaggactgacctgggcctgacaacccactgccggagttcggatcgcatcactg

SEQ ID NO: 234343 - DNA, 215 bp, Homo sapiens
  chr9:116102325-116102540
  hyper
ttttatgtgtatgtggaaagcggggagaagagtccccgaagatgggaacctagcgccacccagcccaaggttggccctcataaccgctctccgcttcgaccaaagggcgagggttgcccgctcctagtctgccgctatgcccctttctcccacctcaggctcagtacccaccggtgggctgcggggctggagctggggccggcgggaacgcggag

SEQ ID NO: 234344 - DNA, 137 bp, Homo sapiens
  chr9:116163725-116163862
  hyper
tggagggcccgcccgtccccgctccgggccctgcgcttgtgcagcgaactgcaggagggaggccacgagggggcgcaggaaccgcttgggagggtccctgggtgtgagccggcctcggaggcggttacagcccaggt

SEQ ID NO: 234345 - DNA, 229 bp, Homo sapiens
  chr9:116450196-116450425
  hyper
ttttccaggctgcgcggtgcctcgcgctccggggtacggagggtcggaaactgcggagtcagcgcttctgtcgagctcccagcgcagcccctgaggaccagctgggggtgggggtcaggggagggagcgggcgatctcaccctgcagcccgcacactcaggcctacactccccggtttggagcccagataaccccttcccgtcctcccctcacccgcgggaaccctgga

SEQ ID NO: 234346 - DNA, 232 bp, Homo sapiens
  chr9:116638746-116638978
  hyper
gcccggggcgctgcgccacttcattgcaagatttgcaaaatgcaaagtgcctgggcacgtttgcgggctttttgtgggcgcaatcgggagggtcggggtccggagagcacccccccgggcgctgcggggtgcgaggagggtgggggtgacgagggggtcttttggggcccccacccagcgccccctccggccccgggctcggaccggagcccagaaaacaaagcggcgagag

SEQ ID NO: 234347 - DNA, 102 bp, Homo sapiens
  chr9:116756510-116756612
  hyper
ttcagacacagccacgtgggtttcagcctgtgacagacccaggcagcgtaggtgccaggtcctgcttcatcgtgccagctgatagttcgtttcctgtttcaa

SEQ ID NO: 234348 - DNA, 94 bp, Homo sapiens; identical to SEQ ID NO: 201853
  chr9:116860421-116860515
  hyper

SEQ ID NO: 234349 - DNA, 934 bp, Homo sapiens
  chr9:116916214-116917148
  hyper
ctacctcccctctctcggcttgggacttttcctaaagtttgttgaaaccagacaccttgctcgaccgagcccgcgtgcagccagggtttaaaaggccgccttcagcgccccctccccgcccccagcggagacttcaaaaggcccggcgggcgccgccgccccagcacctatgagccgcccccagctctcggagcccgcgccggagcccgtggacgcagagctgccgaagttcgagcgcaggcggaccgggtcggcggcgcagtcccgcgcgcccatgcccctcccggtgccgctgcgctccgcgcgcccgcgccccgtttagggaaggggacctcgccccccgcccccgcgcccacggctgcggggacccatgaatacaaatgccgttaggcgccggaggaaggaccgaccggccagcctcgcacgtagggacccagtaagtgcttgggggctcctggagcggtgcgaagtgttatatgcctgtgtgtgcgcgcgcctaaaggtgtgcgcgtatggggaggtgggtacacgcgtgaggagtgaatgcgtgtgtgcacatgtgcggtgggcactctcggagaactgtgtgcaagtgagggtgtgcgcgcgtgtgtccacccggggtgtgtacatgtgtgggggcgatatggccaggatagcgtgcatttgtgcctgtgtaagcatccgtgtgcatgcttctgcgagtgtagagtatcagcgtgcgcctgagcccagatatctgaggatgcgtttcgtgtgaacctaggaagggtgcgtggctgtcccagaatgggaccgtgtgtgagcgtgtgtctgagtttggggaaagggtggatacgtgtgggagtgtgtgtgtgcaccggtgaataagtgtaactttgctcgtgaacgagtggcaagaggtggtagaggcggagggagctgtggtcccagg

SEQ ID NO: 234350 - DNA, 450 bp, Homo sapiens
  chr9:116918463-116918913
  hyper
gggcgagagttggcgaacgctgcccgccctgccgcgcctggcccggctgcccgatcccgttggggcgggggcagagccagcccgggggtcgggggtgggggtgggtggtggcgcctggagcggccggcggggtgcggaggggggctttttggatgcttgggggaggaggggggtctccgtttggggccgtctcggtgtgttccggtgtctcagtgtctgcaggtcccaagcctgtacgtctccgtttctatctgttcttgtgaaattgtccgcaagtttctaggtcaccaggtctcgggttctgctcctgtctccgtgtctgtgtggctctgcacgtccccgcgtttctggaaatctccgcgtgtttgtgttagtcggcctgggtctgtgtgtctgtgtttcctgcttctcggttcctgtccctttcacgtgtgtaagagagaaaaagtg

SEQ ID NO: 234351 - DNA, 315 bp, Homo sapiens
  chr9:117267162-117267477
  hyper
tggatccccgggagcgcggagacgacggctggagcctgggtttggggagcacgggtacagtggctggatcctagggggtcgcggagaccgctgctagagtcccggaggcgcgaagacggcgggggtcgcgaacctggaatccgggggacgcggagacgtcggcgggttcctgagagacacaagagttggctgctggagcccggaggtggcggagactgctgctggagtccggggggcgcggggtcagcagctacattctggagggcacggagacgacgggtggctggagtttgggggcgccgcaaagctgacctg

SEQ ID NO: 234352 - DNA, 157 bp, Homo sapiens; identical to SEQ ID NO: 201855
  chr9:117268030-117268187
  hyper

SEQ ID NO: 234353 - DNA, 255 bp, Homo sapiens
  chr9:117880316-117880571
  hyper
gcggcggttcccacgtgcgcgttcccccgagttccccagcagcgctgcctttgtgcccacggaggcgggggcgtgtatctgcgcgcgggagaggcgggtgacagtaggcaggctgtggccggtgcagccaactttggctggcttatatagcgagctccttcctctgtaatgggacgcctcgcctccagacatcctttcccactttttcagttggcgaattaaaggaacagccctcccagcggaacagggttagct

SEQ ID NO: 234354 - DNA, 256 bp, Homo sapiens
  chr9:118916932-118917188
  hyper
gcgcgggtggcgggcgggtcgggggcttgcgggcgtgtctgtgcgagagctgccccgcgagcggcgcagagacatccgggcgagctgagagcctcactttgctccatcggtggaatgggcacactcggaaggcgtagctgctccatccctgggaggaacctggggagccctcctggcggccccgcggaccctcggccagtgagggctggttcccggagcctagggcacgtaacccgtgctccgaatggtcagatgc

SEQ ID NO: 234355 - DNA, 2068 bp, Homo sapiens
  chr9:120175190-120177258
  hyper
gccccacaggtgcacgtgggaagagctactggtttgtgtgtgtctgtgtgtgtgtgcttggtgcgtcgcaccccagaagcgccgccgcggggagtccccgaggaacctgcaggacgctccgctgcctctcctcccggaacgctcggcacgctcaggttacagcctgcgagggtgggtacaggggctcgacccccgaggttcaagctcagagcgggagaaccactggcactcgctcaaatccccagaggtggtagcatgaaaggatggggagtgggtcacaaaaatacttttaacaatatcagggctaccaggagagtggagcgtagtccgctgattattctgtgggtcttttcaggcgagcaaggagttaacctcggaagttcagggatcgtaaaggttctcacctggaaggcccctcacctgcggtgcccgaggcggatcccgccgaggaaaagacccggggaagaagagctccgggtctgggcgagcccctggcgcctcacgggcgctgttgttggccagactccgacaaccaataaggccccgcgcccccaagaggggaggggagagcgagcaagcagcgagcgcgggagagctaaggggaacaacatttttgtaaacgctctccgagataattaagctatcaattacccgggtgggaaatcagctgcgcttcccacagctccactgaagggccgactcctccgggattcgcgcagggaaccagcaggcagcaagctgctggcgaacttttctgattaacttttccgttggagccccccacccacacccatctcctctcctctcctttttcttgcctttaagtaattattattagcccagggagtgagctgcaaggacaaaccggctctctgcctggaggtgggtagaaagggaaggcggtaacgggggtagagggaggctctaaacgtggagacctcggagtcggaatcccagttctcagcaaccactcaagtctctccagccctatttcacagatggccagaactgaggctcagagaagggaagcgacttggccaaggtcactcagcccatgcggaagccacgcttttgcgggttgagcgattccacacggaactactccattcctactctcatgaaaatccatctggaagggcagaacccgcaactccgaggcgagagcgagggggcggtgacggcgggtggccagtgacggtacccggagaagtgggaggctcgacctgaaactggcttaggatctgggatgctccggcccctagccagagcaccttcagtgaatggggtctccggcttccgggatggatcaagcagagctccaggtcgggactgagaggcagaggggcaggttcccactgcgggagggttggcacgcccccaggctcccgccgcgcgctctccaggacctcctcccacatgctcgtttccaaccacctgtgcgacctctgggcccctcctctaccctctgccaaccccactcggggcagccccgggcagggatccccagggcgcccccacccgtccggcatgacgcaggggctcggggttccttgggatctagcgcgtgccggcgcccagccttacccagggtgaagaagggcagctcggtgttgtccaggtcgtcctgcaccgcgatgcgccccggcagctcgttacgcacaaagagcaggaggcgcgactcggcggcggtgccggcagagccaggagagcccggggacgcggcggcggcggcggctccggccccggtcccagccccggccccggcgcgggcgccgctccagccgatgtcgctctcccgcagggcgggcagtgtggacaccgtgacggtcttcagccggcacgggctgtcgggctcccgcgaggcagcggcggtggcgccggccagcagcggcggcggcggcagcaggagcaggaacagcagcagcagcggcagcagtggcggcggccccgggtggaagcagagcctcggccgcccccggagccccgagccggggccggggctgagccgggcgccggcggcggccatggcgggaggggctgcggtgctgcgggcggcggcggcggtggc

SEQ ID NO: 234356 - DNA, 65 bp, Homo sapiens
  chr9:120177438-120177503
  hyper
cccgatctccggctccccccgcagaccccgagcgtttcggaggctccgcccggcctcgtgcaagt

SEQ ID NO: 234357 - DNA, 161 bp, Homo sapiens
  chr9:120249908-120250069
  hyper
acattcccagccatcgtccttggcccggggagcttgggtggggtgtgatgactgtgctgccccagcagagggcagtgttgccatgcctgccaaggcggagggctacaggaaacgggagggagcctgggctacgcaggcctggtggccggtgccgcgtccct

SEQ ID NO: 234358 - DNA, 1392 bp, Homo sapiens
  chr9:122130811-122132203
  hyper
tttcccggtgactacgtgatcctatagtaagggtcccattccgtgtaagctggagagacctaattaaaaagacacacgagggcacacatacaaacacatacgtacaaacatgcacacacacatcgcgccgtaagtaggttataggacctctctctcttcacccctcccttacacacacggacacacacacacaccacgaacacacgcatcaaacgcaaacgacgccgcacacgcaaacacactagcaccacatcaagttcccaccatggtgcacacgtcgggagcgcgcggggacacacacgccactcactcaaacccgcaattagccctttgagccccaggcacaggaaccccctccctagaactggagaagacttggaggcggcggggcggccaggtgaagagcggacaagggtgccggtagggggaggggcagaggagcgcggggacgccccgaatgcggcccggggccgggtccaagggcagcggggctgcggggcgctgcacccggcgccgccttacctggagtcaatgtccgtctttggcggagagctgcgggaggacgctttttattcggctcggtgggaacttgggagagccctgcgtgcagctcgcattccgggcacggcgcggggactgcaggcgtgggggtacctggctcctagcagcctggctcatactcagccgtaaagtccccttcgctggtcccgaggacaggcatgaatcccggctccggaaggcggtcactactccctctgcctcccggctctctcgctctcgctctcgctgttgctcgctcgctctctccctctctcgcgggttcgctcgcctgcgctctcctcctccccgcgcgccagatcagtttgcagccgtggggtccgggagcgaggcggctggcgaatggagagggaagtccaagtgcgccgcggtctccgggcggggagcggcggaggccgggctacgccgggggagggacttagccggcgacggccgaaaatgaatgggggagcggcggccggggggcggggagggaggagctgaacgccggggttgcttccgaggagtgttttgtacatctttaggcggaggaggaggagaagcgagaggaggagagacgggaggccgcctcgagggaagggcggcccgggtgggctggggctgagccgtagggagtttcgtgggtctggggcgtgtagggtgttgtgtctatgcgcacgagcatccaaagggaccgcgcatacgcgcaaacccggaatcctggtgcccttaagcgtgactgtactgtgtgtgtcgcgagtacctgagtgtttctggggcggcaggtgtttccacggccgcgtggatccatcgagtgtgggttttgtctcgggagttgcccgtgtgggtccgttt

SEQ ID NO: 234359 - DNA, 405 bp, Homo sapiens
  chr9:122318422-122318827
  hyper
ggctgtggccaacacgcgtctccaggcccacaggctctgaggcggaaaccacagttccaggtccccaggctccagccgccaatgcggctaccgaccagcagagggcagctgcgggaagccgtccaaaggcggcctccacccccattagtgccaattaagccgcgagatgcaagaggcgagcgcgtggtgaaagaaaacacatctacttctgggttgagctaggctgggtgatctgctgggagggacgttgacctgcttccaaaaagccggctggatggtgccgtggtggctgcctgcaaaggaacaccggcctatgggaaccagaccctggggcttcccgcgagcttctcttcctccagccagcaaaacaggaaaagcctggcccagggacggagggagatgttg

SEQ ID NO: 234360 - DNA, 334 bp, Homo sapiens
  chr9:123883882-123884216
  hyper
ggaagcaaaaggtaactgttcgctagagggaacgagctgtagtgatctgttgcaaagtttgggcgtgattggcccctgggagcttcctgtgttatgatttaactcgcggagggtggggcctgcccgcagaggctgctggtgattggatgggcggggccgccgctcactcttggccaagaatgtggtttgaggctctgcgaagttacagaggctcggaggcgcttgcaaaaatgtggctgtcagagagggaagtgcacatgaatttgaagacagcattagaaagcgttccgcccacagtttctctgttctcaacggctcagttttaacaggataa

SEQ ID NO: 234361 - DNA, 192 bp, Homo sapiens
  chr9:124062289-124062481
  hyper
gcccggggggccccggggctcccggagtaactctctattgtaagttcttgcagatacagcgctaggaaaaggggagtaattcaggtctagaatggaaaaactgttttgttgctttgtaagtatctcttgctgcttccggggctctggctcgcagacgagggtgggagcctcggggccctggctgttccttcc

SEQ ID NO: 234362 - DNA, 106 bp, Homo sapiens
  chr9:124131893-124131999
  hyper
agagagacttcttccttctgcaaatcggtctaagtttcgggaggtgggattgggggaggagggggttcaccctggggccaggccagggctgggtggaggaggcggc

SEQ ID NO: 234363 - DNA, 221 bp, Homo sapiens
  chr9:124132599-124132820
  hyper
tggccaatcaacgcccaggatcgaggaggacccacctcccaatccccgccctcctgtccctccacggcgcgactgcttcgcagtcacttcccgctagttctgtgggctgaggggcgtggcctgaggggcgtggcctgaggggcgagagcccccaaggctgtgggtatgaggccggggccctgcaccggaagggagggcggaagccacgggacgtggagcag

SEQ ID NO: 234364 - DNA, 91 bp, Homo sapiens
  chr9:124262330-124262421
  hyper
caggaaccccgggcgttggaggatggggtggggtctgtgctgtgctgctgggaggggctgcgctgcgctggcgcacggccaaactctggga

SEQ ID NO: 234365 - DNA, 868 bp, Homo sapiens
  chr9:124361491-124362359
  hyper
tcatagcgccgaaacggaagcagaggttatctctggactcctggaggcctggggactccgggaggggagggggcgtgtggtcccgccggcatctcgggccggcaccaggctggggagcgtgtgctcggagcggagggcctcggctctgcccagtccggcctgggcggggcggtggtggggaggtcgattgaccaaacaggtgcgcccccgcccctctgctccccgcccgcgctgggtcccgggcctggcgggcggagctgtgggcggctgggcctgcgattggcagggctgggcaggccgggtggccgcgggagcccgggagccgtagagcggcggcgccgggggaggcgcggagccggccgtagcgcgctcctgcctggccagccgcctactccgcccgccccgctccactcggcccagctggcgcgaaggaaactttcctgcagccgcccggcgacaccgcgactccgccgcttcgcaaccctggccctgggccgctcaggctccggagcctttgggatggcagcgcccagcggcccggcccgcgcgtagaggtaaaagctgggggccgcggctcaggtggaggggggctcggtggtttgccgggatccgagcggcatcccgggttcgagaggatccgggggctccgatgcgaggtgttggggtaggggactgaggaatgggcggcgactttgctttatttaccccgcttttcccctacagtcccctctcccgcaaggaaatctgcgcgatgcattgagcctttaaactttcctgtgcgccctgcccagatctcgaccgccgggacccagggctggcgctgggttcttgggagagtacaatacaggggatcgcgaggaaggcgccc

SEQ ID NO: 234366 - DNA, 143 bp, Homo sapiens
  chr9:124461191-124461334
  hyper
cggcagggaggtgagcggggcggccggccctggcggtccccgggggtctccgcccctccgcagccccgccccctcgtcccggtactccccctcgccccggcgcccggggggctcgggcagcctcggccgcggtcggcgcggct

SEQ ID NO: 234367 - DNA, 296 bp, Homo sapiens
  chr9:124857515-124857811
  hyper
ggggaactttgcctcgctcgacactacagggtgaaagaaacacagaagttgtcaaggaacgtggcccctcttcctctctcatctctccaggtgtcttgtttctttgctttagtccaggggtttcacttgctgaataaactgccttgaaatgtccaagtcataaacttaagagatccaaacctcctttttagcagcagagggcgctcgcatctgttcccttcatgactttgtttcagagtttctgtaagcatggtcgtctggccacttgcatgggaacaacccggggtgtttattta

SEQ ID NO: 234368 - DNA, 48 bp, Homo sapiens
  chr9:125675546-125675594
  hyper
gtcaaggattccgcggcagcgtctgcccaagccggaagatggacttag

SEQ ID NO: 234369 - DNA, 671 bp, Homo sapiens
  chr9:126135525-126136196
  hyper
gaggcctggctgctgcgtgccgcggcgggcgccctggaaggcgtgtggctggcggtgcgcaatggctcgctggcggggggcgtgcgcggaggccatggcctgcccggcgctgtgctgcccataccggggccgcgcgtggccgatggtgcctggcaccgcgtgcgtctggccatggagcgcccggcggccaccacctcgcgctggctgctgtggctggatggtgccgccaccccggtggcgctgcgcggcctggccagtgacctgggcttcctgcagggcccgggtgctgtgcgcatcctgctggctgagaacttcaccggctgcttgggccgcgtggcgctgggcggcctgcccctgcccttggcgcggccccggcccggcgcggcccctggcgcccgagagcacttcgcgtcttggcctgggacgccggccccgatcctcggctgccgcggcgcgcccgtgtgtgcgccctcgccctgtctgcacgacggtgcctgccgtgacctcttcgacgcctttgcctgcgcctgcggcccggggtgggaaggcccgcgctgcgaagcccacgtcgacccctgtcactccgccccctgcgcccgtggccgctgtcacacgcaccccgacggccgcttcgagtgccgctgcccgcctggcttcgggggcccgcgctg

SEQ ID NO: 234370 - DNA, 246 bp, Homo sapiens; identical to SEQ ID NO: 201864
  chr9:126759127-126759373
  hyper

SEQ ID NO: 234371 - DNA, 144 bp, Homo sapiens
  chr9:126760302-126760446
  hyper
gagcagtttctgtgcgctgaggccgggacttcccagcacagcctacaagacactgcctgcccacgcctggccccgcccacctctgcagcctcatcccgctccccaccccacaccggccactccggctttcgcgctggccttgct

SEQ ID NO: 234372 - DNA, 202 bp, Homo sapiens
  chr9:126761349-126761551
  hyper
tgcatttgaggaggcgtgaacttcaacaggggaccacaggcacggggcacctcctgcgtcccccatcgccaccccacctagagctgctcatcaactccttttagagacaggaaactgcagccctggcggggagtgacttgtccgaggtctcagagcagggaaatggcttcagttgcattttgggggccgctgttccaaggag

SEQ ID NO: 234373 - DNA, 251 bp, Homo sapiens
  chr9:126769112-126769363
  hyper
acctgctcagctgacgcccagggaggcggtttcagaattgttcagatcgctgcagggagaagaggaggaggaattgggcttctctctgcctgcaacaggccaagccacttatctattctaatgtcacagacacggggttcctcttcggaaacaactaaggctccactaatttttattgtcgatagcggtgataagcagattttctgtgtagtgtgaccaaggcaatgagctgatttcgtaaagaaagagat

SEQ ID NO: 234374 - DNA, 211 bp, Homo sapiens
  chr9:126770235-126770446
  hyper
gctcccaaatccggcgttttctctgccgcctctccctcgggggagactcggaaaggctgcaaaaatctgggcgcccgttcgctcgcttgtcaagaagcaaactgtcttcacattctccaagagcaacatccctgcctaggaagaggaaggaagaggcaaaataaataaaaccagttaatgttgtagttaacttgcaaatcaagtaaatctg

SEQ ID NO: 234375 - DNA, 830 bp, Homo sapiens
  chr9:126771346-126772176
  hyper
gtcaggatgtgtgtttacagcctgttcctctgcttgtttagtctcggcggacagggctcagcggttgcgcgacgttccccgccgctgggggagattagcaaagttacccgcctctggaccccggggcctgggcccctagatcccgccccgcggcgggagatgcgtttgagccttttacagacggagcgcgtcccagcctgacgcagagggatgaatagacaagcgcaccgggcgggaatcccgactgcctgtgtatctggggtcggcccagcgttggacgtgggctgctggtccgagaggtggcgacggaatcgcgtgcctatatgtatgggggagtggaaagtcgcagggtgtgtttccacgtttcttgagcagcccgcggcaagagttgctgagtaccccaccccccgcccccagatcctaaggcagcccctcgagctttccaaacgtattgtatccagccctcccgagagtggagttgcaccaaggacaaacactctagcgtcattacaaattttttctgccccttgggcgacctccagatgaaccctggtgactctcagattggattttcattccttactttctttgaaagaaagtgccccagatgcgtcaataaaacatgcctatgtattcgtgtaggcgtccgcatgcctgcgcgccggccgtgtgcaggcgccgaagcacacgtctgtgtgaacacacgggcacgcgcgtctttgggtttagtggtccttccctcgcgttggggcatctgtacacatgcagaatatacacatatgattgtaacttcaagttttttcaattatgcaaaacgacctcgtaggagc

SEQ ID NO: 234376 - DNA, 1962 bp, Homo sapiens
  chr9:126773160-126775122
  hyper
taaatggcagagctaggattcgaaccctggcctttctgagttcctaaagccatgctcgcccccactcttccaggctggggagagaccgggaagagcgagaagctacacgctgggctgcagattgggccctagcgggcttggagcgtggatatgctggctggcccccctccccgggagtcacagctctcgccggtctcgccactcaggctctgccgggtacccaggaggcttgcacggccgcctgcagcccgctgtgcagagcccgggccgaaggcggagctcgatgggaaacggccggccgaaggctcttgcaactctgccacaggcctgccttcccgggcctcccaggcgggtgcctgaggccgcggctccaggccgaggggagaccgcagtgagacgagcatccccttgctgcgccttcttaggatagagggtttaattttcctttctgaagatatcgcaggaagctgttcgtatcttaaaaactccaaaccccgcgctctccctcctccctgcctcccccccacccccgccctccagcctcgcccaccagctcccaccatctcgactctcctctgctcctcttgcctctcccctccctcttgggtctcccgccttcccggagcacgcgctgccagggcctggggcgccgagcggccaatggcacggcggcaggacgtgatgtcaggcgcggctgtagaaaaggcgcggaggcttgcgctggcgcggactgcagagccggggctgggctaggcgcgcgcttggagagcattgcgcgcggctgggcccgcggccggcggctcctcctcccactctgctcctcctcttttttctcctcctccacctcctcctccgcctcctcctcctcctcttcctcctcctcttcaattctcccggtggctcgactcggctcgcaggcttcggagaaacccctactccagtcgccgactcagcgcccaagagggtcgccttgggctgggggcgcaccccagggaggggaggggtccaggcagctgggccgccgcggacacctagcggcttcagggtgaaccccgaccgcagccgtcgccgcctcgggcagagtttgcgcccttgctttgcgccccgggcgctgaagccgggcgggcgatgcccgcggcgtgaaagcgcccgcggcgggcgccgacctctgtcctagtctcctgctccccccgccccgcttgtcccgtgcccttgtgaccctggctttggcgccgtcgcccaggcgccccgcaatgtagctgcccctgcgcctcggcgggaggcgtcctgccccgcgagcgcccggggcccggagcccggcctgggggctcagccgagctcgggcggggccggggccgcggtggcgatgcaccgggcccgttagcgccaggagcgccaggcagctgaggcggggggcaagccctccctcggaggagccgcgcccccggccccgccggtcccgccgcgatgctgttccacagtctgtcgggccccgaggtgcacggggtcatcgacgagatggaccgcagggccaagagcgaggctcccgccatcagctccgccatcgaccgcggcgacaccgagacggtaggcgcgcggctgtggggtcggggctgagagctgggatggggccgggccagtcagcgcctctgctccccgaagtttggggagcgtccttcgtgccgcacgggactgggtgctggggatcctcggtcagaatgcaaggccggtggctcccggttcgggggaaacccggctgctgggacgcagaagggaaacaaggttgaaaccgaaatctcggccctgggggtagaggagagcgtttcttccgaactggaagcgaagtcccatccgcggcccggggcggctcccttctcaccttgcccggtgccggggtcgacagccccgcgctctcctccacctctcggctccggttgctggcggcgccgcgagcggcgccag

SEQ ID NO: 234377 - DNA, 514 bp, Homo sapiens
  chr9:126775917-126776431
  hyper
cctaaacacagcccgagcattttgggggaaaggacagggaggactggaaggaagagaggtaagcaccagagccatttaggccaggagcccggcctgggcccgtggctggcgagggctgcgcaggcaggcctgggttctgaaccgcccagaaatggaaatgggccttttggggtggggggaagcgcgccgcatgtcctggcagccccctccgcgttcagggtagccaaggccacagagggagttgtgggtgccggtttcccggcggcggaggggccgctggctgacgcaggcgctgctgtcttccgcctccctcccttcgcagaccatgccgtccatcagcagtgaccgcgccgcgctgtgcgccggctgcgggggcaagatctcggaccgctactacctgctggcggtggacaagcagtggcacatgcgctgcctcaagtgctgcgagtgcaagctcaacctggagtcggagctcacctgtttcagcaaggacggtagcatctactgcaaggaa

SEQ ID NO: 234378 - DNA, 579 bp, Homo sapiens
  chr9:126777302-126777881
  hyper
aggggattgccccccgcagcagcagcggcacctggaggaggaaaaggggggtacccaaccgtgtgttcccacagcccctccctccatggtccctacaggcgcttctctgtgcagcgctgcgcccgctgccacctgggcatctcggcctcggagatggtgatgcgcgctcgggacttggtttatcacctcaactgcttcacgtgcaccacgtgtaacaagatgctgaccacgggcgaccacttcggcatgaaggacagcctggtctactgccgcttgcacttcgaggcgctgctgcagggcgagtaccccgcacacttcaaccatgccgacgtggcagcggcggccgctgcagccgcggcggccaagagcgcggggctgggcgcagcaggggccaaccctctgggtcttccctactacaatggcgtgggcactgtgcagaaggggcggccgaggaaacgtaagagcccgggccccggtgcggatctggcggcctacaacgctggtgagtgcgcggcgcacgaagcgcccccatagggttgggggaaagtgtgcggcctcgacggccgggagctggattga

SEQ ID NO: 234379 - DNA, 663 bp, Homo sapiens
  chr9:126778106-126778769
  hyper
cagggatggagaaagcaaggcggcgctgacgccaaacaggttttgggttggcgcggctgagggccgggaactggggcagcgaaggaacgaggcagggcggcgagggtcccaagagaaagggctggctgtggcccggggcgccgagctcggcctggagtgcggcctgacctcgtgaaatgtcccaagggcggcaggcttggggaactcgggcttggggaactcaggaaagcaaaggctgcggttccttttgctcggcccgatcctcctttaaagacaggtctcagttttcccggactttttcctccgagtttcctggcgcctgctggggtgagggccgtgaccctcggaagcgagccccccgggcggggacgagaccggagcaggcctggcctcgcgccggggtggggtggggtggggtgaggtggggggcttggttcggatttccggcatctttgaaccccaggccattcccggagaagctctgccccctcccgcgcccctccctgctcaggacagctgcagaggttctgagttccggcaaatgagccgtcaacatctgcccgaagtctgcaaggcccggaaaggtttatgactctccgggcttccgaactagagtttatgtgcaattattttctttctttcgtttgcaacagaattagattt

SEQ ID NO: 234380 - DNA, 153 bp, Homo sapiens
  chr9:126779024-126779177
  hyper
aaatggtgaagcagcggtaggccggtcggtggcgcggatttaagatttgctgaaggcactaccacagatgtagctctctggaacttccatccctcctctcctaccaccccccaaaaaaagacaaaaccgagttcagaccggctcccccaacac

SEQ ID NO: 234381 - DNA, 1227 bp, Homo sapiens
  chr9:126779532-126780759
  hyper
gtcgtgtttgttcccgtgccctcctctccgaccttggccggggctcctagtcctgagagaaacggcgttcggtgcgccggcggtggctatgcggctggctctttcggggctcccgggactaggttggggaaagagggcatctccccggcctctcggggcccagcccagtcttcctagatctggcgtccgcccttccctcccctcccgcactggcaggagagaaatggccgcagtgtgggccgcggggcagctaggactggaaagcggggaccctggagggtgcgatcgcggacggggtgtgcgggcgcgggtcgtgtgcgtgtgcgtgcagggttccgaccacggggacacgagcttgtttgtggcagtgtcccacatcctgtggcccagccacgacgaccccttgcaaagcctcttgctctggggacagtccctccgaggcgcggcggcaccttactgaagggcggcgagctgggggccgagtggggagggggcgccgtcggggcgccgggcgctgggcttacagcagagccgcgggccgcggggtcggaaagtccttccggggcggggccgcagcggcctcttcccgcagcccctcgggcccgggccccggtggaacggaaacctccccctaccccgggaggggctgccagcgggctgggggtgcgaaaacggcggcaggagcgggcgaggggcccgggccgcgcactttgcgcctgggtttgcgcgccgcggccgcgggagtcccgcgcggaccggccggacgcccggcctcccccagccccagctttttgtgtgtgtgtgcctggcggcgtaattactgatttgattccaatccattatttagacaattgaacctacaatctcgtctttagtaaaatgaggcgaagtcagatttgattacaggttcagtcccagcgacaagagctcgaaacccgatgggttaataacagatcacgagtaaattattcatgattttacgagctctttagctccattgaatcggcctaattgagaggaaaaaaaaaaaaaaggagagagaaagcccgggtcctccccctcccctcggcccctcgctcctccccggatccgatcctggggaatctcgacccgcccccgggcactgggggcgggagtgagggggttcggggcgccggccaaacctgggccccacggctgcctcccccgccgccgccccctgcccttgcctctggccggcctcggcct

SEQ ID NO: 234382 - DNA, 277 bp, Homo sapiens
  chr9:126782416-126782693
  hyper
ttcatttcccttagcgttagtttccacatctctaaaatgggaatagtcatagccacctctctgagaggtaatgatgtacagtgacatttgtaaagccaaacacacaccataggtgtctactacatgtttatttctgcctcggacttccttccccgtccactctgccgctctctgtggactgccgcagatctctgaacttccccgagcctaatttgctccacttgttcacggagaaacaatcatcttacagggtagcgatgaggattaaactgcaaaa

SEQ ID NO: 234383 - DNA, 303 bp, Homo sapiens
  chr9:126783290-126783593
  hyper
atgtttggcagtgggtggggcgagtgtggatttggcatggggggcgggtcaggaagttcacccaccggctctgtgtctcctccctagcgctaagctgcaacgaaaacgacgcagagcacctggaccgtgaccagccatacccgagcagccagaagaccaagcgcatgcgcacgtccttcaagcaccaccagcttcggaccatgaagtcttactttgccattaaccacaaccccgacgccaaggacttgaagcagctcgcgcaaaagacgggcctcaccaagcgggtcctccaggtcagccagg

SEQ ID NO: 234384 - DNA, 553 bp, Homo sapiens
  chr9:126784840-126785393
  hyper
gaggtggtgggattcgagtccaggccagtctgacccaccctccagccccaggtctctgggattgagggctgggaggtgacacagagggatgacggagacggagggctgcgcagctgccctgagaaagttcttgtgagtttgtcagaaacaaaaaacaaacaaaaaaatgccctctgtggggcgggtggaggctgtgacgcggcgcaactgcagctgcagctgcggggggagccgggagttggggcccctaggctcccgaggcgcccccttgagcagcgctgcccacggggagcgggcgaggggctgcgggagagggaggactgggtgacgtagccgagggagggagcgtcggccaatgggatgccgatgcgcccctctgggcccgcccctccctcatggtctgttttgctttggagtcccagtggcctgagctcctggtggatggagaacgtgactacactggctggggtagcaggtccctctcgtctgtttccttcgttgtttgccttcttggggttaggtcaaggaccctctttggcgtcccctcccttca

SEQ ID NO: 234385 - DNA, 116 bp, Homo sapiens
  chr9:126794679-126794795
  hyper
tccctgtcgtcccccgcaggtctggttccagaacgcccgagccaagttcaggcgcaacctcttacggcaggaaaacacgggcgtggacaagtcgacagacgcggcgctgcagacag

SEQ ID NO: 234386 - DNA, 85 bp, Homo sapiens
  chr9:126872694-126872779
  hyper
aacgtcacagaggccgatgaacttggagacacggggaagaatggtagagattgtaatcctttatcagcaccgcggacagcatcca

SEQ ID NO: 234387 - DNA, 171 bp, Homo sapiens; identical to SEQ ID NO: 201872
  chr9:127005138-127005309
  hyper

SEQ ID NO: 234388 - DNA, 339 bp, Homo sapiens
  chr9:127212694-127213033
  hyper
tatctgccagagcccgccgctgcctccccgacttcagtccccgcagatgcctcgcagacggtgaacggccacaggcgccaggccagccatagcgggtgaggaactggagctgggaacaggggagggaccagcggatgaaggggaggcccctgactcaggcccattggcgcctcgcggaggagggacgcgcagtggtgggcaaacttcgcatctccctctcgggcctcaacgagtgtttggagagcaagaaaagtgggcgccagggggcttgagggcgcgaatccaggcagacgtgaacgagggagtgcttttcagaatccaaaacgcgggagcctccca

SEQ ID NO: 234389 - DNA, 137 bp, Homo sapiens
  chr9:127215885-127216022
  hyper
tgggacccgggcgccctggacgtcacgccctcgctgctgcccactgtgtgggtgcgccttctctgtcccggtacgacccgccccgccccggccccaccccatggccccgaatccttcccttccgaccctggaactcg

SEQ ID NO: 234390 - DNA, 108 bp, Homo sapiens
  chr9:127265975-127266083
  hyper
ttcgattgggattcgtttgtctgagaacaaaaccccgattctgagaaaaagagatgggctcagccgcggggaagacgccaggggacccaggagcgctggggcgcccgg

SEQ ID NO: 234391 - DNA, 950 bp, Homo sapiens
  chr9:127266440-127267390
  hyper
gacacaacgatagacgacagacagagacgccgagacgagaggagccccggagagacgaggccggggagctacagaaacacggagagaaaacctggaggcggaagcgcccagcccgagggtcggggacaggggacgcgcggaaacctgccgggcaggagcccaagcgccaaggcgaggccccgcagggtcggacccagacgggggcccgggccgcaggaggcggaaaacgacggcgccgggaccgagagcccgaaaacgcagagccgccgggaccccctccccgggggagacaaagccgcagcagcgacggcaacgggaggcgcagcccgagccgccgctgccaccgggacgtcgggcggggagacctcgggcgggggtcggcgggctccgggaagccgagcccgaggcgagggagcgacctcgggcggagaggcgaagtccggaggagggaagcgcgaagagccagggcccgggacgcgagagggggcgcgacggcggctgcggtcggcccggcgcccacctggtcgctcctgcgagcagcgccccgcgtcccgcccgcgcggagcccgcacctctcggccgcgccgccgccgccggcgaggagccgcacccgggcgcagcgccgcccgcccgcgatgacggccgctcgggccggggacggggaggcgggggcgcggggctggcggcgcgggggcctcggctcccccctcccgcctccccgccccccatcctgcctccctgttcccccccgcaccgccgccggggccgctccgaggcgcacctgggacccgggcccctcagccgccaccccgccctgcgccaacccgccgcgccggggccgggggccggcccctctatatcggcgcgtgcggtatccgggggcggaggcccggtcgtgtcctccccccaagcccggcccgcgccggcaccctctccgcagtccagctcga

SEQ ID NO: 234392 - DNA, 198 bp, Homo sapiens
  chr9:127421471-127421669
  hyper
catggacaaaggcacgagccaaaaccagacagtcctggccgttcgataggccagcagtgggtgagacaggtcagccagctgcaggggcgggagcgggggggcgggtagggacatggatgtgtgaggtgctcatgcgtgcgatcgtgactagattctgaaactgccagccattttcccagctccgctttgtgcaatcta

SEQ ID NO: 234393 - DNA, 427 bp, Homo sapiens
  chr9:127531978-127532405
  hyper
agcctccctttattcggaaatgaggagatgtgaaaggtggaaaacagggcaaataaataaatcgggtttgccgccggagcgtttgccggccggtgcgagcaccctttgtaatgcaggcctcccggggcgatcgcctgcgctaattgctccagggcgctttccaagttcaaaagttcaccttttacgacctcacaaaagctcctaacacgttaccaataaaaacattccgcggcaaacaccgaggaggaaaatatcaaacagatacaaataaaacaccccgcagggggagggagcgaaggggaggagggcgaggaagccccgaggaacctgaggacccggcccgggcgagggggcgagggacgagcggtaggaagggccgggccaggtgagggattctcagctcccaaggtcccggatcgggacaaga

SEQ ID NO: 234394 - DNA, 92 bp, Homo sapiens
  chr9:127533784-127533876
  hyper
tctatgtagtaagcggatacttccgggccttgtcttgattgtgatttctacctgatcaaagttccctaagagtcctcgtaaccccccacccc

SEQ ID NO: 234395 - DNA, 96 bp, Homo sapiens
  chr9:127905903-127905999
  hyper
gaaatctgtcagtcgattggacgctcggcccgtcacatcccgcgctgcccacccagaggtttggttgagactgcaggtggcggcggaggtgcctta

SEQ ID NO: 234396 - DNA, 248 bp, Homo sapiens
  chr9:127962948-127963196
  hyper
agtgggcccaagccgggtgcaaagaacggggaagggccttccctggctccgtcccggccactttgaccgaatcagcctgttctttcccgaccccgtctcctatcccctagaactgccacgtggggatgagatttgctgggctggtagcggcggctgctgcgggaggtcccgcccacgtgaagccagcctaactgagctctggactttggggacagctgtcagtggcctaggccgcaggtgagatttat

SEQ ID NO: 234397 - DNA, 224 bp, Homo sapiens
  chr9:128510756-128510980
  hyper
aacttaaaggaaggcgccatattattccataggtgatgctaatacctttgtgtttcgttatttgttttttaggaaacatgccctgaactgtcacagaatgaaaccagcgctcttcagcgtcctgtgtgagatcaaagagaaaacaggtaagacgctgcgccccgcagtgggcctggagacccccgaggtgggggtcggagctactccttcgactctccagttga

SEQ ID NO: 234398 - DNA, 534 bp, Homo sapiens
  chr9:128984885-128985419
  hyper
gtaggaggcgtggccgcagccccaccctagaccccagggccgggcaggaagatgcgtctgcgcgtgcgggcaggtgtagggggcgaggaggtggggagcggtaggaaggggaagcagcgaggggagaggctgccgagccgagcctccgcggacccgctcgcccctaaatcacgcagccgcatgaataataaataaggaccgctcggatccttaacagtagtcgcatgtcttattaaactaatatttcacaaacttttattctccctgtggttggaggtcgggagcgaagccccccgccccctaccccgctggctctgcacagcctggggcggaccctggatgggaggagctcagcgcgcccggcagggccctggagggggacacctctcgcccccgtctcccctgtgggttccttctttcaactcacgtggccctggttcctcccctgtgccaggccctgcccagaggatacagatgggtccaccccgctccctctcaaggagccccctgggcccgggacggggagacagaccc

SEQ ID NO: 234399 - DNA, 237 bp, Homo sapiens
  chr9:129276713-129276950
  hyper
ggccgcgcactggggatgctcggaccccagcacacacgaggcggagctccgcggactggaggcaaatcaatccctcggcaccgcgctacggacgtgtgtttggaaggaggctagcccgccgcgcaagtccccgcagcgccccgccggcctcccaccccctgcggcgtccggacctcgtggacctggggtggctcccatagactgcggggccgggcccagccgcgctcgctttggtcg

SEQ ID NO: 234400 - DNA, 923 bp, Homo sapiens
  chr9:129372402-129373325
  hyper
tctggtccccccaatctggccgcctgtcaaggatctgaggcttggcagggctgatggcgccgggacagcgtgggacggcccaggctctctgcagccctggttctccgggcagagtggaatagagacactcgcagctcctggtccttgccttcccactcctccgaacccggccaggactgcaccctgcgctgccccagatccgtgcctccagctggaatggtaaactgggagggggcagtgtggctctggctctggtcagaagcacaaaacaatccagacagcccggagcgggatggacagggctgggtggggtgggggagggcagctcatagagccgtgctcgagggaggcgggtagcgcagaggagagggtgcaaggccctaagaagaggagcggggggactagggcggggctcaatggagctggggcgtccgcagactggaaggagccgggacccccgctccagagcctccctttccattctcgcttcttccagtgattccgagcccccgactcagtctttcccccaggtagagagaatccgaggctgtttctgccgctgaaatctgagcgggagagcatcccgaagccgcctgcgtggagcgagcagcccccgcgtcatgggccagaggcgcccgggagaatctgcgggtcacggatcacacccgcaggggcctggcggagcaaggtgccgttcgccgcctgcgggcaggagccggctctgggcctcggcccctgctgtgccgtccagtcggccgcttcttcgcttcttcggcaagggaagcggtggagaggcgcgggagccccgattgtgctggagagatctgggacccctgcgcgtctgcgtgcgaaggacccgagaccggccaactcagctgggagcacgggacacgaggagtgaggacaaagggcaaggaacgggg

SEQ ID NO: 234401 - DNA, 322 bp, Homo sapiens
  chr9:129373385-129373707
  hyper
gtgtgtgtgtgtgtagggggaatgaatggacagcggggaaggcatgcagaggggcccaaggggtgtggactcagcagccccaccccagaccagagaaggcagccaggctctggcgtccaccgagccagcgcccctatctgggcgcgggccgcatggcggcagaccaccctatatccgccttggtggcgtgggatatgactggcaggagcgcggaagaggcgctgagaatgcatgcgcacccggacagaccagacgcggcacggagggggtacttcccacaagtcctcctgccttgagaccaggccttcgagtggtccgggga

SEQ ID NO: 234402 - DNA, 141 bp, Homo sapiens
  chr9:129375185-129375326
  hyper
actgtccttgatccgcgcgtcccagcgacccctggccgggcacccgacccgccaaaggaccccgatcttggcagccaacctaatttcttcagagccgctaccctggggccaccactccctcctagcgcccctcactgcaaa

SEQ ID NO: 234403 - DNA, 1290 bp, Homo sapiens
  chr9:129375663-129376953
  hyper
ggaccaagcggccccgagcaggcgccgccgcccgggggactccgactcagcccccgcgacctacctcggccgacagtcgggggttcccaagcggccactcccggccggcgccgtcccctggcggagccgccgcgctccctgccgtccgcgcagtctggcctcgctcggggccactcctcgtagcgctggagctttacaaaatattaataataaagaaggcagaggagaaaaaagaaagccttcgctccccaactcccaaatcaatttttcaagggggtggagcagagggatttgtttcgaagacgatcaaaacttctgcgaggggcccgcggggcggccgggccggggagccggggcctgagctcggggccaggcgcggcgcggggcgcgggccaggggcgcggagccccggggcgcgcgggggggcgggacggcactatttgacgtggagccggcggcgcatcccggcgcagggataccggccgcggggttcaaatgtcaggaagtttcgggaggtgaggcggcccgtatccctccgccgccagccccagctctaaacccggcggctcagcgggcgcaccatggcactggagtagcgcggggagcgcgcccggagccccgcggcccgctgcgccccgcccgggaccccgctgcgccgcgcgccccccccgcggcccgcggggccgcccctgcacccccaccccctcccccgcctgccgccgccgccaccgccaccgccgccgccgcctcctccccgcggctccgtctgcagcagccgccgccgccgggttccgggactgacaagcaggtgacagaggagccggcgcgcgtggctgcaagtgtccgggagagcgcggcgcgggctgcagccgccccggcccgcccgcacgacgccggggcccggggccagcgcgtcgccgctccacgatcgccgggggccggcgcaacccctgccctgcgggggccgcgcctccccggttccagggccgcggcggcggagagcgggtggacgggccggcgggcgagcagcccggccggcggggtccgcagcgcgccccgcgtcccatggatatagcaacaggtcccgagtcgctggagaggtgcttccctcgcgggcagacggactgcgccaagatgttggacggcatcaagatggaggagcacgccctgcgccccgggcccgccactctgggggtgctgctgggtgagtgcggggtcggaacgcccgagtggtctcgggcgtgggatggggcgtcgtccggctgtggacacgggcgttggggccaacgg

SEQ ID NO: 234404 - DNA, 862 bp, Homo sapiens
  chr9:129377209-129378071
  hyper
gggagattctaagagaaaaacgtctccctggtcactcaaaccacagattttggggagatcggggatagaagaccacgaacgccaccgtggggcgtgtcagccagcgagcgccccagcctcacctcgcctgtcttggtcccagccggccaccctgcgccgtgctcgttgtcatttgtcttaacacggagcgcggattctccggagaaggggagagcacagcgccgagccaaggctcgaggcccgcggcctctccacgccggagcccgaggactgggacggactagccggggccgcccggcccctggcgcggcggtccggggagcgcaggcggcaggcggtgatcccgggcggcccgagccctcggggccgagggctgtgggcccggtgcgaccgggacgccggggctgggccgggcggcgctgacggccgggctttcgccctgtgcgctacaggctccgactgcccgcatcccgccgtctgcgagggctgccagcggcccatctccgaccgcttcctgatgcgagtcaacgagtcgtcctggcacgaggagtgtttgcagtgcgcggcgtgtcagcaagccctcaccaccagctgctacttccgggatcggaaactgtactgcaaacaagactaccaacagtaagcgcttctcgtcctccttccccgccaccgcccggcactcgagcccggtcagccccctgccgggcccggcccgcgcccgctctgccgccggctctgtgcgcggctgggccgggcagctccaagggttccgagagctgcgcgtcttggggctggggcggaccagcccagcccagcgggcactgatggggtcctgggagcctccggacggcccccagttgcc

SEQ ID NO: 234405 - DNA, 214 bp, Homo sapiens
  chr9:129381054-129381268
  hyper
cctggaggaggctccggaaggggggagggtcggtgggagagtccaaaaatctgtcacaaaatggagtctaatcgcttgtaagacagctcccaggtttggcgacccgagacccgctggggtgcaagcgggcgcctttgtgcacggcgagacgcggggttccggcccgggccgcgctcctacctcggcggcggggccgcggcgtccttccgcccgc

SEQ ID NO: 234406 - DNA, 166 bp, Homo sapiens
  chr9:129384573-129384739
  hyper
aaagatgtttgcttcctggccgggccagtgctgtgagagaggcttccccgggaactgtggggaggtggctagctggggaaggttgtgacggccacccagagcaacagcgatgcccactggggctggcaggaatgaggaggccaccgagctgctgggtagctgaaga

SEQ ID NO: 234407 - DNA, 3425 bp, Homo sapiens
  chr9:129385810-129389235
  hyper
actctgtagcagatttttcccggcccagagttaccctgtagcagatttcccccccaggcgggtccaactcccaaagccggatgggttctctaagtcctcctataccgaccttccggaaggtgcgggctctacattgttgctaatctcccccagaacgcccagcctgggaggggtggggagggggagtcgctacccgagggctgggagcagggtgtcactgacctcctctgcgcggattgccccctgtagggccagccctggccagcggaagaaaaaggttagaataattgccttcccctgggcgggagagcttccttcgacgtccggacacgcggatggggcggctttcagcggcctccacccgcgcacccctccaggcccacctctcggcggttcgtgcagcatgttctttactgggagtgggatgacaccatgcataggctcctgggctccgcagccgagccgcgggcaccagcggcggttgatgaatttcggtgtcaccaggggtttagcccggatttgggaaccgcgcgctctaatacgcgcacacggtcctgccctttctaaagcgcagccctttcacccagcagctgatttatggaggaattcgatcctgggacgcgctaggctgaagcccggagtccagggccctgcagcagctttcgggcttctcagcgtttcggggacccttggtggctcgggggctctcttgggctggggtcggggtgccccgccaggtggggccttacgcggtccagaaagagccagtgattctccttggagccactgcaggctcccgctggagggagtaagactggcggggagagctggcattttcattccttgttgagcacagccctcgcccctccccaagccctcctgccgaccccctcgggctggccaaaagcagcaagttcgggaggtttgtttattgagagaacagaaaattaggggttgcgggggagaatctaagacccttttcccgcctgagaaacgtgcgaagtccctcagctcctggaggcaaccaggcggcccgaaagccgagttcccggcgcggatgctagggccgaccccagccccctccctcctgcgccccagcccgagggcggcgagtggcaggtttttttttatcttgtttttttttttttggatttggtttgcaggggggaaatgtggttgtatcaatccacaaatatttactcttaacagacttgtatctgtggagatttcgaacaaagacagtttagggggattacaaaaaccctaaaccccgtttttctcccggacttggtgctttaaatgccaattataggcgagccatatccaacagcaacggggaaaggcgagcaggctccggggagggaggtggggggagagtccggccattaaatgtaacttttcattatgaaaaggatttcgccggttttatcttctaataagattatgtcacgaacacaagtacctaggatggtgctgagtgacagggctctgtcgtttaatcagaggctgtgccgctcaaaccgcggggccctttgtcccacggagtgaacgacggaaacttgccatcctaatccccttattcatgtcaagcacagaaaagaagccgagcaccttacaaccgtgtcccctccaccccttccgaggacggcgggaagagggggctccggccctgtagccccctgacgcttttcgtttccgagcgcgcttgggcctcaggagccggagcgttgccgtgggggcgggggaaggggtggttttgcgggtgccttaattggcagcgtctggaaaatggggacagtgaccccacgactagaggatgaatggggggagggttagtgggatgtgtttgcctcctctgaccgagagcacgggtcctgctctgtcccctcttcccaggaaaggtggcactccgggtgcacacccaccacccccattaaagcgggattgaccagaagagagaggccgaatggagatgccaggctggggccctcggcggggcagatttcgttggatccctgggactaatgtcgcagcgctcgcactcctgcaggtctccagggttggccattcccggctgcatgctcggcccctttcttccgagggtgaattcctttgttccacccccacggaaaccctcttctccgccaggcccgtggcgcctttctcgccacctccgccgccgccgccgccaccctcgtcccaccgtttgcagggctttcctgcggcgctctggccgcagagacccagccctgtctgccgactggcccttcgacgtcgccgccgtgcctgagccccgctgcctgctcggacaagcagaactccggcaggcgcagcgggcgccgaggcttgggctttagccgtggcgctcgcctcggcgcagtggggagccgcgggcgtcggagaagcggccgcgctgttccgggtcactgcaccggctgaaaaaaccaaaagcaaaaccaacacccagaaacgaagcctgcgtgcccccgggggctccgttttgctcccctcatggacatgggggtggggagctcgtggggtttcagcccaaaggctccagtcagtggaaccggagggggacttcggaggaatttgtctctgatgtcccggctccctggcctcctattagaactcgtagaggatccgctctggagtccccgtgcgccctggcagaggtcggggacgccagagtgcacgcagtctcctgcgcgccgagcccaggctccgggcgcagggaggatcgggctgagagcagggtgtcacctcgtaaaagcgacaggcaaggactgttttatggggagggagaaggagcaggaagtgatgcttccatctctgacagcatagggaccgggagctccgatggaggaaaccctttccgggcaggacgagtagagggacaggacatggccggggaccatgggattcgctgccattaagtatgggacgggcaggcgagagcggggaaggggaccgatggagccagaagccctgagctcacctcccgcccgtcctctcctggagccccctctgcaatcccggctcagtcggcaaccggcccttccttccaggtcaggggtgggggagagactttctccctcgaaacacttgataccaactttgtttttttggcaagaaaaataagccttgtttggaaaggggtgggtggggggcgtcgagcgagcgagggaaggagcaaggaggcggcggcggagcaaactctgcggattaggtttcagcgcctccgccccacccccagccccgcggcggtgatttgtgtgcgggggtctgtgaccctgcaagcatcaaacggcccgcgggaaccggccgagttcagagggacagtgggccgaagggcggcctaagacaacgcagatggttcctatcagcccggccgggcccgcagcgtccgccggtccgtccgggct

SEQ ID NO: 234408 - DNA, 259 bp, Homo sapiens
  chr9:129393156-129393415
  hyper
tgccttcctggctccgggctgccggtgcagcaattcagggcaggcgttgtctggcctttgaagggacggctgtctgagtgtgtcactttgaactgcaaaggggcctgtggtgagggctcggccccctcccacgtgcccccgcctgcccacccctccagctctggttctagtcggcaggcctggagccaaaggggcgggcagggcagtggcccccctgtgggatgtcagcctgataagtgagcagcgacagacccctgga

SEQ ID NO: 234409 - DNA, 573 bp, Homo sapiens
  chr9:129400693-129401266
  hyper
ctgccactggctgccctgcccgcagccctgccaccctggggagctgaccccgaccccacccggccccccacgtcccagctcgggggctcacaaagggagaggagggaagagcaaaatcgcagagatttgtcttgtctggggctgacagcggagcgagtgattgccaggcccgcttggcagtttttaatcattttatctctgttctcggctctcgggggagacagccagtgcttagcagtctgctcagaaagacctcggggcgcgtggcgcagcggcggctcggagctcccattattagctgtgctcttcggagcgcgctccgatctctcccgggggagccggtgaaaaattaacacgggccggcggcgcgggcgcccgatgtaactgtaattactccattgatattcctcacacaatagcgctgtcatcagtcatttacataaactttctctccccaggacgggcggaggtgcctaatcctattgggcgcttccactgcatgcattatacatggcagctcctaggtgcggactgagggaggggcggatagccgggctctaggtgaggagggag

SEQ ID NO: 234410 - DNA, 361 bp, Homo sapiens
  chr9:129439099-129439460
  hyper
tgggagaactgctgcgggcgaggggaaagggttaaagctaggcgctttttaattgtcaaatgactgcgggcgattagcactggcagcttcctcaataatcgctcttctctgtacctgctgggagcttaattaaaaaacaaagaggctcaatttaaaggccattactatgctaatgcggccgggcgggcggtgattaagcggctcaggcaggcagcgggcggctggggcggggcatggggcgatcagttacccactaaatgggcgggctgcgtgccctgcctgtcccgaaggccgagccctgacctgcctcgcctgccctttgcccgtccccagccagagcgcaggagacccagggatgtgg

SEQ ID NO: 234411 - DNA, 527 bp, Homo sapiens
  chr9:129445250-129445777
  hyper
gctggcctgggatggctccccgggctcccggctgtgcccgtccctccctgtccctggcccgtgacctccagccccggctgggggctcccgacagcgcccctggcgcggatcaaagggccgaggggccggcggccccgcacagctgcgggccgcaggaagcgcaggggcagccctcgctgcaggcccggccccgacgcggcgaggaggccgggggaggccgggaggctgggagaggccccgcgaggcccgcagagcgcgcccgtctcgccgcgcattccagccgcgtgattgacgcgcgtaccggggcccccgcccgcggctcccgccgccgcccgcccggcccgcggccgccgcatcaaagcagatgtttgcagctggtttgagttggatccccatcaacaggcccttttttgtctcaaaataaaaaacagctacgcccggaatgataaggacgcggcaggcacgtgggggagatgtcagcgagtccggcagggaggaggccgggcggctccctctctaagtgacag

SEQ ID NO: 234412 - DNA, 506 bp, Homo sapiens
  chr9:129485493-129485999
  hyper
aacttgtccctctcctttctcggtgtccatggtgggtctggttcccaccgctccctccctccccgcacagtctgagacccccttccccgggccgccccgtcgatcccaggtgatggatggagccttcagggagcccgcgcgggcgggctaggctcgggcggaaatgaagaggataagatctgcgagcagagccgcctgacaccgtgatatccgcctggctcgctgcgctccgggtgatggatggggcggagctccccaccccccagccccggaacctggcgcccctcccagaaacaccgctccgctgccacacacgcggccgccggactcccagccaccggcgcactcacgcggcgccccccacgcatcagcccggcgcgcacgaagggaaccgttcctcttcccagtcccctggcgctagcaccagcaggactgcccttagcgcacaccacaccttacccacttgcccatcacacagcctcttccgcgcacgcacatacacatgc

SEQ ID NO: 234413 - DNA, 254 bp, Homo sapiens
  chr9:130213934-130214188
  hyper
catattcctttatcgtgagtgtcaccccggtccccgtcacccaatcccagagccccgcccctcccctgaggggtccgtagtcccattccgagaccccagtaccgcggcgacccctgctccctcgagcacttgttgtgtgcactttagttatcaaaacagtctatgtggaaatccagtcccgctcttcattcggagagtccgcgattcctagagcctcagacttcgtcatcccggtctgcgtgactttatgagat

SEQ ID NO: 234414 - DNA, 209 bp, Homo sapiens
  chr9:130308066-130308275
  hyper
ttacacctcgaggccgcctggtgggaggaagtccattcccatcttgacacaaacagaaggaaacaaaagccctctcatcccctcctgccccccaccccgcctgcctggcagcggccccagcccacagcccacagtggcagcttgttctgggagcccaggatgaggcatgcctgccgtctgggaacacagatcctcgctgggagggcagc

SEQ ID NO: 234415 - DNA, 336 bp, Homo sapiens
  chr9:130330786-130331122
  hyper
acccctgccccagctcggccaggggtcgtgggctgggggtccgccaagcccgggctccgaaggggttccgggagagaaggagttccgagtccccttgagccgggaaaggtggcgctcagaagagcgcgggaaggggcgcccaggctcagagggaacgagctcggacgcggggcacgctccctggcagctcccaccggcccggcctgactcccccgagcccccggccccggcgccaactgctggccggggcgggggcgtggtccgggggttccggcaggcccctgggcgcgcgtggcgcggcgcgaccctcacctgcgatgtgctggcgccgggcgt

SEQ ID NO: 234416 - DNA, 314 bp, Homo sapiens
  chr9:130461624-130461938
  hyper
actgtgagcaaggaaaaggccgacacccaacaccggtcacgcggcggatcagacgcggcctcgggactgggcttggggaggccgggcttccggggctagtaagcgtctactagccgggctgtttagggattggtcgcctctggccctggaggcgggggttcctggagtaagacggttgctgattggctggctttccgaggcggggttgtgaagcgttggtcattctatctgggtgctgggttaggcagtacgaatactaaaattggaaccagtgacacgcagattggtgaagcgttccatattttttccatgtg

SEQ ID NO: 234417 - DNA, 203 bp, Homo sapiens
  chr9:130477657-130477860
  hyper
cctagtgcaggaacggagcttcaagaagtttggagcccgtcgagcactgaactcaccagttaagaaaacagagcagcaatttgggggcactcggctcccgggacataatggccgaactgaagctagggaccgggagcccctacgtcgccgccccacgccactcaccatccaccgcttccccggggggcgaggctccaaaacac

SEQ ID NO: 234418 - DNA, 139 bp, Homo sapiens; identical to SEQ ID NO: 201888
  chr9:130661051-130661190
  hyper

SEQ ID NO: 234419 - DNA, 376 bp, Homo sapiens; identical to SEQ ID NO: 201890
  chr9:130679368-130679744
  hyper

SEQ ID NO: 234420 - DNA, 842 bp, Homo sapiens
  chr9:130689371-130690213
  hyper
ggtgcttcgggccgcgagtttcggctgggatgggggcccaaacctgcttaggccactcacctctcggagatgcggccggcggggtagaagacgctctgcatgacgatgaagtacgtctgggggccgggacagggagtgagggaggccggctgtcgccctccagccgcccgctccgcccagccacctcgcctcggcttcacccaccttctttccccggtccacccgcagactgtgcactcctggaaggggagagggcgccggatgaggatccccaaactccacaacccggggtgcatccggcgccaatcccagcgccaggccacgcctccttctcaagatccgcggcacctggacccttccttggctggtccggatcccgacccgatcccacccctaaacacagccccagtggtgccccgcccccacgtatggccccacccccatgccctacaaccccaaatccgcccatttgggccccgcccacataccccgccctccccaggtatatgatgacctaggacccgcccccaccgagccccgcccccagccaagtacccagcaaccgcgccagcagcgagtgcgggtgccgctgcaggtgctgcacgtagcggggcaggtgggcgagcagagcctgcacctctcggcgcccctgggtcttcaggaagaagcgctggtcgtggctggggggcaagagaaagaggtcactgcccaggcctggctggagcggctcccacccggcccccttccccgacctgtgcacgtggatctcgctcccaggtctcggcaccgcctctctcgccttcggccctcgccctcctctcctccccgatctgtccaccatc

SEQ ID NO: 234421 - DNA, 273 bp, Homo sapiens
  chr9:131127214-131127487
  hyper
ttgaaatgcgtagccggcccctccccccgaggagggggccctgcttcctcccggcctaatgatattctgggctcagccctcgtctttggcggcagtttaacccgagccggggcggatttctttctcactgatctcagcttgacacccaattagcacaagaatgggaggaggaagcctgcgagaggcgcctcccagcctcccggggcgcgcgaggggagcaggcgggaagacaaaggacagcaggcaggggggcacccgcgccctcgcctcccc

SEQ ID NO: 234422 - DNA, 182 bp, Homo sapiens
  chr9:131133703-131133885
  hyper
agagctggggcgccgtggggatggattgaagtcgtcgggcccagaattcctttccttctgccgtggggcctgacacggccgaatcactgggtgtcccagtgcccgctgtgagctacgctacccgcctaggagagtctgagaggccagtctctcttggcagtgaggccgtctgtccggaaata

SEQ ID NO: 234423 - DNA, 80 bp, Homo sapiens
  chr9:131183174-131183254
  hyper
gcgccgctgctccagctgctgctcctgctggggccgtggctggaggctgcgggcgttgcggagtcgccgctgcccgccgt

SEQ ID NO: 234424 - DNA, 89 bp, Homo sapiens; identical to SEQ ID NO: 201893
  chr9:131219288-131219377
  hyper

SEQ ID NO: 234425 - DNA, 86 bp, Homo sapiens
  chr9:131419086-131419172
  hyper
gtgaggctgacggcgccatgtttgaattggtcgcagcgcctcctgcaagacctggaagaaagaaaagtaacgattcttctcggcca

SEQ ID NO: 234426 - DNA, 251 bp, Homo sapiens
  chr9:131486506-131486757
  hyper
tggatggcatctgcggccgaatggaccctcaagccaacaggtgcctgaagaggctgagggtggggccggcgcgcgcgcagctggtaactccctcaactccagccccacccgccaggtaacttttgaaagcgccggagcgcgcgcgcacctcccccgcgctccgctgtgccctcccccgcgttcccctgtgcccgccctcgcagcctcgcgcatgcgcgtagctccctgggcgcttcgaagatccagcggct

SEQ ID NO: 234427 - DNA, 86 bp, Homo sapiens
  chr9:131709401-131709487
  hyper
cccacttgtattggacgtagaaggcctgcactgcgagggccacggcgcaccacgagtatcggtcccatacggttgcgtggatgctc

SEQ ID NO: 234428 - DNA, 92 bp, Homo sapiens
  chr9:131709727-131709819
  hyper
caccgcaggtcacttctgcggcctgggagctggcgcccggccaccccccacagcctccaacctacggcgtagacgtcgccactctgcagcct

SEQ ID NO: 234429 - DNA, 200 bp, Homo sapiens
  chr9:131842775-131842975
  hyper
tttgacaaaaaggtcgcctgctctgtgtgacttgccctttcgccggccagtatggggcagagggaaataagccccctctgctctctggtctcagtttactcgtaactgaaagtgggtcggttcaaaccccctggagctgaggttgcctctcctcttcgagcacgcgctatcggacgcgcaggtccccaagaccgcggatc

SEQ ID NO: 234430 - DNA, 73 bp, Homo sapiens
  chr9:131843575-131843648
  hyper
cgccgggggaccggggtgggaactgtcaaatagtgaaccacggaggggctcggccggcgcgcgcgccgcgcag

SEQ ID NO: 234431 - DNA, 414 bp, Homo sapiens
  chr9:131872521-131872935
  hyper
cccccttgtctttcctgggtcgttggaactgaatgctccaggacgtgggtttaatcccgcttctgaccttgcgccccaatctcctgctctgccaaacctgggacgcccgcctgaccccaccccatcagctggaggccgggtcgaacagcggccgcaggacgcggtctccgttcccggacgcaaccgcacggcccgcccaggccgtccagggccctcaggcccgggatccgccgcactcaccacggtcctggcagcgaaggctaacatcttcgctgcccgtccgcggacacgcagtccgctccgccccacacaccgggcaaagtccgcgccgccgccgccgcggctggggtcggtgggtccttgctagagccttcgggccaaggtcgctgagttacagccgccagccggtagagg

SEQ ID NO: 234432 - DNA, 63 bp, Homo sapiens
  chr9:131940533-131940596
  hyper
aatgagtctcggccggccccggccccagctatttagccgggtgcccgggccccgccccacatg

SEQ ID NO: 234433 - DNA, 79 bp, Homo sapiens
  chr9:131940896-131940975
  hyper
cggcgacggctcctcccctttccgcacggctgggcctcacctgcggcaggtgcgcgccgctcatcgctcccccagcggc

SEQ ID NO: 234434 - DNA, 118 bp, Homo sapiens
  chr9:131965405-131965523
  hyper
aggacagttctgtcgcgtactcccgggaccctttaaggggcggggctgggatcctgccccacccttgactcccccaccctcctctctcaaacatcaccccgggcgctttaaaacgctt

SEQ ID NO: 234435 - DNA, 536 bp, Homo sapiens
  chr9:132020645-132021181
  hyper
agatgtcaaaaatacgcggtaagacgtcagcccggtgagcatcctccgcactgcggaccgcccggggtcggggtcacccgggccccgccccgagcttgctgtcgtatcggccccgccccacccacgccctcccggcccctcctgctccgggcgcgctcggctccgcccccacgggcaacacggcctcccattggccgcggtttccatggttacgcgggccggcggagctgcgggctcccagacacgtgtccccgggagccgcccagaatttgacaggggaccatgtgcgcggcagcgcgggagcgagacaaaggaccgggggaggcggggaacgaagccgggcggaggggtccgcgtggcccgggcggggatgggccccgcgcttctcctgcgagcagggcaccccctcttcctttttattttgaaggaaagggaaaaaaggaattgctacggaaagagaggtgggagaggaacccagtcaatttcacctgctccccttcctccaggaagaatcgggtacgcgggcatctgagaac

SEQ ID NO: 234436 - DNA, 180 bp, Homo sapiens; identical to SEQ ID NO: 201897
  chr9:132176628-132176808
  hyper

SEQ ID NO: 234437 - DNA, 80 bp, Homo sapiens
  chr9:132200925-132201005
  hyper
tcacgccattcaggtgatgatgttttttatttatgtgcccacctgccccactccgtagggcccctcgaggccaggactgc

SEQ ID NO: 234438 - DNA, 826 bp, Homo sapiens
  chr9:132244499-132245325
  hyper
cctcaggttcccccgcgctcctcccggaccccaccccgaggcagctttctcacaacgggatcctccccgggcggcgtggggacgcctcccgaccccgaggcccggcaggagagccgccaccgcggccgggtggtctccgcgtcgcatggcccctgccggcccccccgcccatggcagctacataattaattcgcccataaataactgattggggtcgcgcacgcgcccggtgtccctaggactgggatccccgttagggttaggggcgtggggggtcgggggccgcggggctgtgcgtgccggggcgcacggttttgctccgcgggcctctctcgctccctcgcgccggctttttccctttttctctttcctttttttctttcctggagcggagcccggcgccaggagtctggaaccagcttgacaggcttttgagttatggaggggggagggggagaggcgggcggcggggagggggaagggagggcgccgccgcggcgtgggggcggggccggctccccggtttggagactcgccccgactttggggtccgccagcggcggccgggcggagggcgggggaccgcaatcgtggggggagtcaccccgcggggcccggcgggcgaaacgggccgggcttcagagccgcagtaaatgaggcccggggcgggcgggggtggacacggcctcggggccacggcctcccccgccgagcaaggcattcctttccgctgaactgggcgcccgggcccgcgccgcgccctgcacgcctcgcgcccggcgatcgggcccagggcgggggagcagggaggcggccccagccggtc

SEQ ID NO: 234439 - DNA, 270 bp, Homo sapiens
  chr9:132245805-132246075
  hyper
ttaggagcagtccgcgagacagttggtaacagtgctggccttgcccgggcgccggaaggttccgtgaggcccagcaagtcctgacttggcacagggcccagcacacggtaagcgctcggtacttggtcactgttgcttgattttaccatttcggaggggctcatctacgcctagcaaagcccccctcccggtgacccaaggggagctccagaatgttgagcggctgagcggcctggctcctcctctcgaccccatcgagccaagtgtcga

SEQ ID NO: 234440 - DNA, 427 bp, Homo sapiens
  chr9:132312371-132312798
  hyper
ccccaagagagccccggccgggacgcgcggaccccagaagctcgggcgggggcgcccctcggaggaatgtttccggggcccggaccgcgccgccgccgcagcctttcctccctctccccgcccggctcgccggccgccctcgcgccccctccagggccccctatcttcccccacccgaaccccacatcactgccctccgggccggctgcgcccaggcacttggtgcagatgtaacctctccgcgggccccgcctccgccgggaagccgcgcgcggttgccaggaacgcggcaggcgatcggagctggacggcggcccgggcatctcggcactggcggcgctcggccctcctgggcggccctggcccggccctctccccactggcgccgctgcgcttgctccgattccctccgcggggctgagcctct

SEQ ID NO: 234441 - DNA, 174 bp, Homo sapiens; identical to SEQ ID NO: 201903
  chr9:132373579-132373753
  hyper

SEQ ID NO: 234442 - DNA, 261 bp, Homo sapiens
  chr9:132382777-132383038
  hyper
gtcggaagtctccgtcgccagggagccccttgggcgccaggtcctgggcccctgggcgaagtcgacgccagaacatgcttggccccgcactcagctcaccgcaccctcagcgcgcgtgggtggggggcgccggctgaggtggggagggcatagtccagccccaggccatagtgccccgggcggggcagcgcggtgcggggtgaacgccaccggcccggcggacagcgagtggcttcaggcgagagctcccagagcctctgt

SEQ ID NO: 234443 - DNA, 162 bp, Homo sapiens
  chr9:132387303-132387465
  hyper
gagctgaaggtctgacgtgcaatgtcccacaagtttaaccctctcagagcatcagaagttgagtaattattacgttgctcaacttcctcttctgacaggagactgaagctcggaaatgttaacaggctctacccacctgcaagctcccgtttccatcaccgc

SEQ ID NO: 234444 - DNA, 99 bp, Homo sapiens
  chr9:132427556-132427655
  hyper
ctctgtcggccagcgcgggcgggcggggccgttgttgggggcgctgaggcgagtgaggctggagctgggagtggggggctcgtcgccttcgtctctggg

SEQ ID NO: 234445 - DNA, 410 bp, Homo sapiens
  chr9:132427910-132428320
  hyper
tgtggccggcgcagcgcgtgcaccagcggctccggagcgagcggccgtggctgagaaggggagggcggaaagtttgtttccccgacgtcagcgccgggcgggccgcgaggctaggaggcggcgggagctgggcagagcgcggggcggccggggctctcgctccgacccgcgcccgcgacccttcctgggacccgagcccgagacccccgccggcccccccggggccgctcgcgggcatggacagcgcggccgccgccttcgccctggacaagccggcgctgggcccggggccgccgccgcctccacccgcgctggggcccggcgactgcgcccaggcgcgcaagaacttctcggtgagccacctcctggacctggaagaggtggcggcggccgggcggctggcggcgcgc

SEQ ID NO: 234446 - DNA, 34 bp, Homo sapiens
  chr9:132459655-132459689
  hyper
gcagctgggcggcggcggcgcgggcagcgcgggg

SEQ ID NO: 234447 - DNA, 475 bp, Homo sapiens
  chr9:132499948-132500423
  hyper
gtaggtgctcaatactggatcgcgcccttcccgtttctctcccgagagccgccgcggcccaaaaacagaggcgtccccttaccaccagggggcagtgtttcccctctcagctccgaacgggacccggggcctcacggcgctttctggcggggcctggggtccctgcgctgctggagaacccccggcacggcaggtcccatccgttagaggggctccggcctcggggtgctgggagggggcgttcagggaaagtgaggccgtgcagcacaggggctccgcccagggactttggcagccccgactttcagacctggccccgcacttccgggcgctggcctcctggagtctccgtgtcctggttgacggagctgataatggcagcccgcgggcggggcagccccgcagggaggggtgacctggccggggcaggatttgggtgctcctggctcacctcgccagatgccaccttacccgc

SEQ ID NO: 234448 - DNA, 664 bp, Homo sapiens
  chr9:132647780-132648444
  hyper
tggcagccttcacacgctcatcccgggtctcagagggcgctggcaacacagatccctgcctcccctatcgggaaagcgttttaggaccagggaaaaggaggcctcccccaggcgagtgcgcagagccagggaacccgtctggatggtggctctttcccaccatccttctctggcagcagcagttcaaagtggagcttccaggctgtcccatacatttcacgatttctgagtctttcgcttcaatttaaaaaaagctgggggcacgaccgaatcctgcctctgtccaccgccatctcgttcctcatcgcagggggcccttcttgctccctccactgctgcgctctgccgtctgctcccgccaggggtccccaccacctctgcggacggaggagccgcctcccaggcccgggcgtgcccagggcgggtggagggcgtggggcgggccggtatttcctgacccgctggaggagccggccccacaggcttgtggcctccccggagccggtgagtcaggaacttcctacttcaagaggcttccccagtgcagcagaaaacaaactagtcgcccccaatgctcccgacctctgtgatgtccacacccgcggaaatgggggccccaaaccagcaggctctgttctaggcttctcagcgctggtgcggctct

SEQ ID NO: 234449 - DNA, 942 bp, Homo sapiens
  chr9:132804485-132805427
  hyper
actggaaactattctccgagcaaccgttaaagatcattgaccccgcgaacgcctcttcctgaggtagatcacgtaagatctctccctaactcccactttcccctccagaccagacgtcgcagtgcccacatcccactcaggattgagctaccccgaaagaacaagtgcgcccggagccgccacgggccagaagtcctcgcctccagagcgaagaccgcactctcgccccagcaccccaaaacccgacccccggcgctcgccccggccgccccgctcccggggaagtgcccgatccgccagcgcctccgcggagccaggacagaactcgcggccggggcgccccgagacccaacgcagcgccgcgcagccggggcctccacgcccccacgcccggtcccggccctccccgggcatccgcggctcgccccgggggattagggctcggcccgacacacacggcccgctccggggcgccggggacagggaggcccgcccgcgccgttcctcaggccgccggggacccgcaccaactcccctcgcctccgaaggacaagccggcccgcacctcctgctcgggccaaggcggacgaggggcattggaaccccgcctcctccccaggccgcgaggaccccgaccagcgcgccctcgcctccgcccagcagcgcggcccgcgccccctccccaggccgcggggaaacgcagcgcgcgccccgcatctgcccgcgggcccagcccctcactcacccagagctcggtgccccagctcatggtgcaggggacgcgaaggggcgctccgcgcggcgggcgcggctctctggtccccctccccggcgatccctttgccccccgagatccccgcgacggcggaaagcccggagtccgcgcggcctcctccggctcgcagctcctcgcccggggtctcctcggcggctcctcctccc

SEQ ID NO: 234450 - DNA, 281 bp, Homo sapiens
  chr9:132805667-132805948
  hyper
cggatccctaggactccccctgccaatctggtaatgacttcttagtgaccactgtctgctcgcagtactagcgcttgccttggaacgcggcaggccctgggatcaccgatgctccgccgcggtctgagatcgctcccctgcgcgtatcgccgctctggatttaaggacaatactttcccctggcagccatgcgcgccgagcagagtcagcccgggaggctcttttcccaccgcccgagggaagcccgagagtcccgcaggctggcgcggtgggagtggggc

SEQ ID NO: 234451 - DNA, 374 bp, Homo sapiens
  chr9:133308885-133309259
  hyper
accgagctcagcatgctggagcccgacccccgcagccccttcgcgctgcgtccgctgcgcgcgggccttggcgcggtctacacccgtcgcgcgctcacccgcgccggcctctaccggctcaccgtgcgtgctgcggcaccgcgccaccaaagcgtcttcgtcttgctcatcgccgtgtccccctacccctactaaacgggagagggcattggcggccgccctggcgtgacccccgaggaaggggtcgaggagaagcttggtccacgccacctgctgtggcaagcggagcgtcatcgtctcccgccccgtgcgtcagcgagaccttgggtcaacacgaccctgcgcacagccttgacccccgacagcgaggacct

SEQ ID NO: 234452 - DNA, 272 bp, Homo sapiens
  chr9:133319785-133320057
  hyper
tttctcatccttactcggctaccagaggctatggttggggagggagggggctctgggggctgcagaaggcccaggctgccggcaccggatagaagtgagcacgaagctccctgcgccagtggaacttttatcccggctcccaccgcgaagcgtttaaattgcttccccagggccaggaggcaagtctctcgaaggacggctgcggccaccctccgcccctgagttacatgggtcgcagccactgccgccctccttggcgcctccagcccgcg

SEQ ID NO: 234453 - DNA, 328 bp, Homo sapiens
  chr9:133320468-133320796
  hyper
cccgccccggggcccgcggaggcagagggcggaccccgatcgccactcgccggggactgggaccgaggcaggagggaaggggctcccgatgctcaaacgcctggcaccggattccaggtttctggagcgtgggggacgcggcgggggcgcgagtccccgggggcgcgagtccccgggtccgaagagcggctcgggttatttgttccctgcgcagccgggtcctttctggactccttgtcggatccggcttcctctgtgtcgtgaagcccccacatggagacctggggagtccggagcgtgtgggggggctcccgattctctctccctc

SEQ ID NO: 234454 - DNA, 1769 bp, Homo sapiens
  chr9:133535556-133537325
  hyper
gggggcggctggaccgcgggccgcgggactcacagacagtgcgaggcggcgcgggggcccctctccctatgcggggctggggcgcaggggctgggcggggcgggtgggcgtctgagcgcggcgcgggcgcattcttcgccttttcttcctcgggctcattccggccgatcgatacctgcgcgggacctgcccccgccgctaatatctttttaatgagttcgccaggcttaaagcgagcgcgatctgccctccagggtggattttcccccggcagatgtttcgggaggaggaggcgcgcggagctcccgggaggggggacaaatctctccctccgaggggcgagaacaggagactttcttctaaagttcaaaagaaagacgggctttcactcggcccccaaaaatgtatttctcggcggacaatgggcttctttctgcgcctctgagggccggcggggcgggcagggcggggacccgtgcgctttggccccgcctgaccgactcgcacccccctcccccgcacccaggcccgggccccagagcgagggcgcaggagccgcgaagccggccgcccttccgagcgtccccctgaagcgcactgtcgggacctggctctcccggagctaagccccggcgcaccggcgagaacgaaagcgtcgtgcggggccctgggctgtcccacacgcccccgttctcataggtgcctcagccgggccgaagggacgcgcgctggtgcctcaaggggaggacgaacggacctccgggcttgggccgcggcctccttcccctcggcgctccgccctgagcggggcaacaactagaaattagccaaccccgggcggctgccgggccctgagactgtcttgcccgccccggcccagccacccctccgggtcgcccctgctcttctcctccacttccccttcaatgtccctccgtggggccgtcggcctgccgcggcggccctctctccactcccgtgggctcaggggaagagggcacccgggcggcgaggatgacctccgaagagccgcggcaaattgattcgttccgcccggagccggggccgcgtgaatgggggcccgggcggcggcggcagcggagaagaggataaagatgttctccctgaaagggggagggggcgcggagcgggaagcggggccattcactcctggcccggcccctcgggaagccgcgccgaagaaagggggccgaggcctattcaagtcctacgagccgcccacaatggaccgatatactgagggcctctctattaacgcccatgaatattaaagagatcgccaagtggcggccagcgggcgaggggggcgacggagcctgagagctccggcccggccgaggggagggggcttttgcgcgagcacattccgcgcctgggccccgcggaaaatgacaaaataacacgggtcatccgctgggaaagcccggaatgtttcccctcgaaatctcctcccggggagatgtgagcacagggtcttgctccctatttcaatgcaccttgagactgggcgctacctacgggctcctttttccccgggcgggggtccaggtgggttttgccgctagactagaagcacaaaatgtgagcgcggtggagatttgggcgcaccagctgggaggacgttctgcgctccgcttctgcccggctcccagtactgctctccgggcttgcgggtccggaggagaggaatgggactccctggccgcagtccgagcccgtggtcactgcgccagcggaatccaagcctc

SEQ ID NO: 234455 - DNA, 436 bp, Homo sapiens
  chr9:133537659-133538095
  hyper
gcgctccccgacgtcgtctccctcgctcctagcactttgtcctctccacctaggtcttcccagaagccaagaagtaggccccggtgaggctcccctgcaggagccatcggactccatacgccccctcagactcgagctctggccagggagccgatgcgacccacaagctgcgtcgaaaaatgagtggagggttcggcgaccctaacccacctccctcctcagcagcgctgccctctgctggcgccctgcccaacggtcctgccttctgccaggtgtgcccttccttgggctccagcctcgggcggacccggacgcagggtctgaaggccagctaccgccgccttcctccctttgcgtcccaacggggacgggggatgccggagactactggcaggaactggggaccaggggtctggagtctggacgccaggtgtga

SEQ ID NO: 234456 - DNA, 108 bp, Homo sapiens
  chr9:133538275-133538383
  hyper
gccgagagggtccaggcacctctgttagcggcatctgaaattgtaggctggtgatgggagccagaagtgcggcaggtggggtgagctccctcacccagcatgtcaggg

SEQ ID NO: 234457 - DNA, 94 bp, Homo sapiens
  chr9:133538833-133538927
  hyper
aggctgccagggcgattcctgtccgcccatctcgacccccgacctggccccgcaagggccgggagcctggccttccatgaagctgtctcaggcc

SEQ ID NO: 234458 - DNA, 140 bp, Homo sapiens
  chr9:133539569-133539709
  hyper
gtctgtcctccgacgtcagggggtcattaataaccaattaggagggtcactgcggctcctataaaggcgctgagattttgccaaggggaagacggccccggccgagtgtgcgagaggctagcgcgcgcctgagccccttg

SEQ ID NO: 234459 - DNA, 334 bp, Homo sapiens
  chr9:133540115-133540449
  hyper
gaggttatcacctccgacatcctgcacagcttcctgtacggccgctggcgcaacgtgctcggggagcagctcttcgaggacaagagccaccacgccagccccaagacagccttcaccgccgaggtgctggcgcagtccttctccggcggtgagtccagccgtcggagcccggcgcaatccctcctcccggcgacccccattcccgtcctggcgatgcgcgagacgcggctgggatacccggcctcgctgctactcgcgccaacctgggctctcccggcgctcggtgcacctcagtttccccatgggccaaaccaggacgcgagccaccaagcag

SEQ ID NO: 234460 - DNA, 1701 bp, Homo sapiens
  chr9:133540728-133542429
  hyper
agccgcggggagagcgagggagagaaagagagagcgagaaaagtttcttttctttaagatgtctcaagttcttattcctcattcatcaacccgcaaacaatatctttccctggctctggcatctctgcgcgtcgccctcttttccccctttacgatttctgttcctctcttaatttaccgtgaagactaattccacttccattcacgctatgtcaaccatctaatcccccttttttgtaaggggaattcctcggccccttttaaacaagtcccctccgcattgagctacaatttactgctacagcattcttccagggctaatgaatttagaattagcaatttctttcgaatggagccgaatgaatgcgatcactttaacagcgtgacaaattgcccgccgcgccgcaatggacaccgtttaacccccccctttcagccggcccgctcgccgggtattttcccaggtagcttagaggggaaccttgtaagacatggaggccgcccttgtgcgcctcgccgcttccagccctgccgcagatgcccgacaggggaaccctcggggagctgggggccgccgcggctcctccccgcccagagagatgacatcggggtttgtctgagcccgggcgccgccctccctggcaccccagggcctgggagcagagagggactcgggcgcgcccggggtcacacagcgagcgcagagcctggccagctgctgccggtgcttctttggcacctccaacacctgccagcccgaggtctgtccccagcgctgatcacggcccggctcctctgccagtgcccagagcctggacacacagtgggctcccggaagccgactaggcgaaagagtctccggttggccttcacctccttgcaggacctggcctcagtttccctgtgcataaaaccgctcgctgccgttggctcattaattcttaaacttatccggggcagaggatggaagaagttgcgaatgctttgagaattcgcggagagactaaaaacccacttctaaaaatgatccccaacgcaccactcgctttccagggcacggagggtctccaggttgcaaacagaggagaggtcgttgagcctccgcacatccgacttcctccacacccgggtggcttctctggatttggggccgacttgggtttggctggtctgggcaggaccgaagccggggtcccggcggggaaggaagggccgggcctcggctgcctcgggctctgaccggttttcctggccccgccgccgcagaagtgcagaagctgtccagcctggtgctgcctgcggaggtgatcatcgctcagagctccatccctggcgagggcctcggcatcttctccaagacgtggatcaaggcgggaaccgagatgggccccttcaccggccgcgtgatcgccccggagcacgtggacatctgcaagaacaacaacctcatgtgggaggtacgcgcgggctggggcagaggggcgcaagggccggcgaggggcgctggtcgcgggtaggactcgggcgtccggccgtcgccgcttccacccgggctgagagcggcggacactcctggcctggacgccccctgagccgggactctaagccgcccgagcctggagctcaccccgcctctaggctcctcccaacccgtgccgaaaatccgaccctccttcccccggacaccctggcagagcaaga

SEQ ID NO: 234461 - DNA, 274 bp, Homo sapiens
  chr9:133568977-133569251
  hyper
agacatggcagctcggctcccttcccttcgggttcgccttattgttgccaattgtaaacatggcctctaggccgtgagttctcattggcagctgctctgagtccccgcccttccccgcccctccgaacgcggcctggagttgtggagtcggatatcgcagctcccgactgagctgcgcctgcgcaactcattggcgccaagatggcgatggagatgaggcttccagtggctcgcaagcctcttagcgagagactgggccgcgacactaagaaac

SEQ ID NO: 234462 - DNA, 580 bp, Homo sapiens
  chr9:133710035-133710615
  hyper
tctcactctgaactcacacccgtctgttcgcagcctgacctcatatcctggtctggatgtgcggcctcaccggggtgtcgtgcgcacgtgtggttgtcctgtgggtgccagctctgacttcctccccagacacccactgcctcagccttaatcacaggacgcgcgttgagtagaaatgagaccagttagtattggtaactgcagaggaatatgcattttcaccagcgttctcgggtcagagggtttgcctggcaccgcgtactgggaaactcgccaaaagcggtgcaggttggagacgccccaggccgcggtggagttgcgcgcggcttctaaagtggagtggagcaggcctgcaccctccccgccggggctgggacggcgcttccaggcggagaaagacctccgcgggccgcgcgcggccttccccctgcgaggatcgccattggcccgggttggctttggaaagcggcggtggctttgggccgggctcggcctcgggaacgccaggggcccctgggtgcggacgggcgcggccaggagggggttaaggcgcaggcggcggcggggcgggggcgggcct

SEQ ID NO: 234463 - DNA, 572 bp, Homo sapiens
  chr9:133710855-133711427
  hyper
tggtgggctgcaaatccaagaaggggctgtcctcgtcctccagctgttatctggaaggtaagcccgggccgcacgggttgggctgagtagccgcgcgccctcccgctgctgctgggcccttcctaggcctcgccgcccgcgcgctcccgcctgcgccctccccgggtcttgtcttttttttctttcttccctcttctcttctcttctcttcagttctcttatattctgtctctctttctttctctctgtgtctgtctcttttctcttctcttgtctctctctttttctctctctctgtctctttctctttctcgcgatggcccctaggcgccgccggcggagcgtggcccccagccccggcaccagccccggtagagccacgccggatggtgacggcggcgtccggggccccacagtgcgggctcccccgaaaaagtttgagaaagccaactcgccaggccttaacatccctgggatcccacgttgtggaatttccaccgttaattgggactgtgtgttaaaaagatcgacccgtgtttgtgaaaacatgcgatttccattaagcatcatgt

SEQ ID NO: 234464 - DNA, 572 bp, Homo sapiens
  chr9:133815173-133815745
  hyper
aaaagcatttaatccgcccggagcggccttcggaggtaattgacaaagtccttaatctgcgcggcgaacgagctgctattgtggcttctgaccgggaggcgcccacactgcccgacgccgcgctcccctcccgccgccccgccgagcccgccggccgcccctcctccgcccctttctgcgtccccatctttttctgctcccccagctccagacagacccccgttccccgcccccgcttctccccaaagctgttttccggctcccggggcgccttggccgccgcgctgttccctggcaccgtctccgtctctcccccactggctgccagtctgtcgccccatcttcgtccctctcccgatccctctacgcgtccggcactggcggggcagactggttgggggtgggggccgcgtccagcctgggctggggcactccctggaccccggagcgggggaccctgtggcccggtgccatccgaggagactgccacccgccaggcgctgggttcacaaaccaccggctgtttgtccccagccgccttttccttccaggacaaccgctggcctcaccta

SEQ ID NO: 234465 - DNA, 702 bp, Homo sapiens
  chr9:133971932-133972634
  hyper
gagcccggaccaggcgcctgtgcctcctcctcgtccctcgccgcgtccgcgaagcctggagccggcgggagccccgcgctcgccatgtcgggcgagctcagcaacaggttccaaggtaggcgccgccgtccccgagcagccacctgtgcgcgccgggcggaccgcggggtccaccgcgcgcgggaagcgggcggggacgggggcgcgtggcccgaagaggaccccgcttcccaggccgcctctttgtctcctccaggagggaaggcgttcggcttgctcaaagcccggcaggagaggaggctggccgagatcaaccgggtaagccccgcgcccagggcagcacgcgagtcccgagccgcgcgctgcgcgggtgccacctctccttccgcgaggccgtgcccgcctccagatctaccctcttccttcccttcccctgggcttccctcaggtgcctccctccgcccccagccccgtcgcctccgactccaggtaggtccgcctccgcctcccgcctccggtctcgggttgcaagttgttactcttgcaactggggactggggaggtggggccgggtcaggagctcggatgccagccggctcgtggctccccgcaagcccgcttgggagcagcccaaggatttggcgcgggaagggccctaggccagtgatctctccagctcagaacacaggctccgggtcattt

SEQ ID NO: 234466 - DNA, 171 bp, Homo sapiens
  chr9:134131735-134131906
  hyper
agccgactccacaccgagaagccaaaccacgacagtgaactgcaccacccaggagccatctgcgtggagctcggccagcaatgcctgttatgcaatttcctgctttggtgtctcagccccaggaggcaggatgtgagcgccgttggtttgctgcaacgtggagaacccaca

SEQ ID NO: 234467 - DNA, 253 bp, Homo sapiens
  chr9:134158023-134158276
  hyper
tccctcgctgcccaccgagggtcccaggtagggctcctggcctcgcactccgccccccgaacccccgcaacaccctccactccccctctggccgggcttccccatcctcctggaggtttctaggagcctccagccaccgccctgagcgcctaaggtcttccccgcccggggcgcgcgtcagaacgcacagtctcccagcccaggtccggaggctcaggcagcccaacgccggcaccgcggagctgcagcgcgc

SEQ ID NO: 234468 - DNA, 1010 bp, Homo sapiens
  chr9:134421320-134422330
  hyper
ggtgccccggaggccggcggtagcaagatgggggagaatgcccggcccaggacaccccatccggagccagggtggggagagccaggaagctgctgtggaaagttcaggagctctgggggcgcccctgcgggcaagccagggagggggcagcggcggttcattctctgagcattttgcccactcccgccccgtgtcccgcctctggcagctcagctcaccgccccggccaggctgaagtccttgcagcaggggagtgggcgaccctggccagggcggggtggagacagagcctgcagtagggagcacgacctgggaagagaccccacgggctaattcggggacggagagctggagacagggaccgagagaggtggggtgggggcagagctggagagaggcgcggacgcgggtgggatccggccaaggctgcgaccaactcgacgtcgcccacccccaggcgtcaggcgctggaaggggcggggggcaaggaaccgagacctcgtccttgccctggggagtctctggctggctggaagcagtggggcggtggcagtgggacccctgcagagtctcgcgcactccccgccccctcatcccccagcgcgactgatcttgagagcccggggatggggcgcaccagtcccatctgcaagcagctccgggagatgctggagcgctggcccctccccgccgccccgccctccaggactcccccccagaccctcaagcacttgcccagcggggagcccggaccccccttcccagctggaatgcctggcggaggctccggtgtcaagagcctgagaacctgagaacccacccgaggcccccgccaggcagcgccgccagcagatttatttactctggggccctatctccgcgccatcgggccagatatttgccctggcgggatccagggaaactgcggtttttgttatgatagctggggcagggacaccatcccggagagacctgtttagagtggagagctgactcgctgagacccacgt

SEQ ID NO: 234469 - DNA, 80 bp, Homo sapiens
  chr9:134989616-134989696
  hyper
gcatccgagctccacgagggccgacttaacccagcccgccacagtgccctcagcaccatggacagcgcccagcagagcgc

SEQ ID NO: 234470 - DNA, 167 bp, Homo sapiens
  chr9:135036693-135036860
  hyper
ctcacttggcccccctccctcgtgccgatggggcagcccccacacccatgggcgctggcaccccggcaggcccccgggttttggaagaggaagctgcagcccggctgcgcctgaccggagccggctgaggatgcgctctgggcgcagggacccgctggcccccgggc

SEQ ID NO: 234471 - DNA, 391 bp, Homo sapiens
  chr9:135117799-135118190
  hyper
gtgagccagagggtcgggagaaacgctgctcgccccacaccccgtcctgcctcccaccacacttacacacacgggactgtggccgacaccccctggcctgtgccaggctcacgggcggcggcggaccccgacctccagttgcctacaattccagtcgctgacttggtcctgttttctattctttatttttcctgcaacccaccagaccccaggcctcaccggaggcccggtgaccacggaactcaccgtctgggggaggaggagagaaggaaggggtggggggcctggaaacttcgttctgtagagaactatttttgtttgtattcactgtcccctgcaagggggacggggcgggagcactggtcaccgcgggggccgatggtggagaatc

SEQ ID NO: 234472 - DNA, 150 bp, Homo sapiens
  chr9:135286818-135286968
  hyper
gttaattggctcctggcaaaacattgactccctcctcttgccttccctaaactcggtcctgagaggaggaaggatactgcctaggcgcaggctgcacctgggggaggctggcttcccacactcgtgcctttccatcgaataggctccttt

SEQ ID NO: 234473 - DNA, 227 bp, Homo sapiens
  chr9:135455234-135455461
  hyper
ccctcactcccggccgctctcaatcgatcgcagctcccttcgctcccaagcttcgctttcgctgggtccgggatccaaatcccaacccaagagccaaaggccagaaaaggccctggcgttgccagctgcttgtcgccctggggaggggcggctccggacccgcccggggcagaggaggacagagcggacgctctggggaccaggcggtcccgcgcatgcttggccag

SEQ ID NO: 234474 - DNA, 821 bp, Homo sapiens
  chr9:135455760-135456581
  hyper
actgcagtggccgccgccgatccagagcctgggcccccgccctcccgcctccccgacagcttgcagccgagccgggccactgtcccccgggagccgcccgtcctcacccccagcccggccggcggcggggccgcttccaatctgccggcgggcacagggggagagcgccgggagccgggcgcggggccaccgccgacctagcccgagggaggagaaagtttttgctcctcccgaccacgccaggctgcccccgggagaattctgcgtttagagggcatgcgggtgccttacgatttgctgcggtctcggtcgctgagcccgacgtaggagccggggtagtttcctgggggctgggggtggtggcaggggcgtgcaggccgggctggaaaggcctggcttcccgagcctgcggggggtaaaaggacgcctctgacccgcccgacctcgatgaaggcgtttgggctccgctctgtccgccctttccgccgcagacccgggttgcgatccctggggctgtgcagagaggatccaggcccgggacacagttcggatctgcccgcggtcctgggccccaacgccgggggctgaccctagaaaggcgctggactggagcccgtgacggggtgggaagggcgagggggcgcatgattcacaatgaaaaggccacgtttccagagttgccttgaaaatgcatccctggacgagctctggctctgcgtggaataagaagccgttagcaggcgtctacactcgcactcggaagctcttgcgtgggtcctgttcagaggtacaacagcaccggccccccaagaggtgcccat

SEQ ID NO: 234475 - DNA, 500 bp, Homo sapiens
  chr9:135456901-135457401
  hyper
aaaggggttctcgacgcgcgcgcgcacacacacacacacacacacacacacacacacacacacacacaccacacttcttcctccgctggttttagtccctttctgctgctggaggaagaaaaacgggggaaggaaaaaggatctacaatagacctgccgacgaataatttgaataactgtgggaaagggtcggggaacgctaaaaaaaaaaaaaaaaagcccagcgcacatcccagcccaccgcagcgcagtcggctcggccccctcccctccagccgtaccccccttggctaatcaccctcattaggagcttcgtcaccggcctaatgaaagcaaaccgtgtggaaatcgccggtaaacagttgggtctgtgctgtaattaattcggtgtctcttttaatcaaactgaaagggaatcgggcagcggcttgcggagccgtgacatcacccccaaaatcggccagagccaatcagcgtcatcactccggggacacgtgggc

SEQ ID NO: 234476 - DNA, 335 bp, Homo sapiens
  chr9:135457644-135457979
  hyper
ccgcgggcagccgccgccgctctccgcggtgctgatgccgccaggtgcgctcctttccgcccgctgctagcgcggcccgggcccgcagctatctgcggtgctgacctggccaccctcagccaccacttgcctggaagaagcgtgcggtttggatttttaaaacgccattctttatttagattccaacatcctcgcgtttcttctgtgccaagggggccctcgggccgtccgtctccccctttgctctccccaacttggcgcgccctccctcccattcctccctgacactcccaccaccccccctcggctcggcggctcggcgcgatgctgcagaa

SEQ ID NO: 234477 - DNA, 200 bp, Homo sapiens
  chr9:135458266-135458466
  hyper
tgctcggggactgccgttcgcccctggagctgagtccacgctcagagagcagcagcgactgctcttcgccagcctctccaggaagggactgtttggagacggggaccccacggcctggcggggcatccggcccaggtttggactcccacctgcagcccgggcagctctcagccccggcccagtcgcgcaccgtcacctcc

SEQ ID NO: 234478 - DNA, 746 bp, Homo sapiens
  chr9:135459997-135460743
  hyper
aaaccgaaattcatcggtccgactgcacatcccattttcttgatttcccccacacaaatggccgagcctccttcagccaggctgtgccgaccatgcctggaaagtaggcaggtttaacggagcggccaggaggagatccagaggcatgcgggtgtccccaggcccgggcccagtggtccttgctcctcccccggggggcctgcttagagaggcaaagaaaacttgcgctggagagagactggcatggagaagggggaggaggaaggagggggaagtcaatgtaaatatatattcataacatcatggttattatttaccatttgcaacaagaacggccccgctttagttagagcaaagagcacgaatcttccaccgcccatgctaatggctggaactggagatagtgaggcccttgcctccttttatttatttgcccccaggaaggattttgaggacaggtttcgtttaagataattagaatatcaattttcttctcctgtctctgaggatatctgatcgggaggtgacgagggccggctgtctacatatcgcttaaataggtttggagcgaagggggtagaaggtcttgcccaacccccaccccaggtgttgctgcctttgcccctagtgaaaaaaggagcagggtcaggcagcgaggccttgtctggagcgtttctcaaacgtggaggggaccttttcagagctgagaaacagacaccctgagccagtccgtggagcatttaagc

SEQ ID NO: 234479 - DNA, 994 bp, Homo sapiens
  chr9:135461506-135462500
  hyper
atgccaggccctccttgcagcgaagcgctgccttttcagttgaaaagtctcgatccctaacggctcaattaaccggattattgtttcctacagagagaaatcaccttgcattcagctgaaccccgtcactgcaaacgccacgcacaatgaaactccaccataaaagaaaacagagaaaaaagggagtaggttgggggaaagccccagtctgagccgccaattttggggaagtggtctagctggttatataatcgctttagagggagaaggagggtgagcattgagcttgttcgattaagtgttttctgtgcagtcaaagccgaacgaaagtgtctgggataaagaaactacctgtgccaggtctatccttcgacctcaggagctgggcccccggtgtaattctgtcccgactgtggggtgtaaacacacgatgccacgcaggtgtagcaggagccatcgttagcgggcaatgtaatgacaacggaacgcagacctgggcaatgcgcgctgcgcccaaggggcaagcgagtggcagggtcgcttattctcccagtgctcggcgctcgcagacccggagccttccgcccagcgccctgtgtaggtagcgagtgtcgggagaaatcatcactacgaattcgtttccatataggggcaacgccaggcggggcacaatgatctgtccttgaggacaaagagtgattccggagagagcaggtttttgtccctccacgcaggtttctctccccagaccccagccttcggcttcctcccttcctgtcacggacgcagccggagaaactggggcccagacgcggagctcactccgccagaaaccctgggtcccttcccctacgctggcaggctgggtccggttccatcgtcgcggctccgtttatccctccagggagcgcgggcagagcgccgagcgcggcgcagggactggagttctcgccagcttcgggttctttctccccggagctgcccggggggtctc

SEQ ID NO: 234480 - DNA, 928 bp, Homo sapiens
  chr9:135465126-135466054
  hyper
gcggccgctctgtccgggagccatccccacccgccgggtgtacatacgcgtctctgccactccccacccccagcctctgccggctcccctaggcaacccctttctccccaggagcgggtgcggctgattcccaggcttcgctctctcccacgccccttctacgctccaggtggagaacagcccctctccccgcgcccccgccagggagagaaggggagtgcggagccccgtctccctacccctcgagcacctgggccagcggctgagctgtacataccgtgtgcaaagtgtatatgaagttatttattcgtgacccatgagcccgtgaccgtgtccgtggattagtgagtctgtggcctgtgccctccccactcccaggcggggcaggaaggggccaagggggcttgcccacccaccccgaccccagcccccagcctcagccccggtccgggggcagccaggcctctcgggttctctcttttttaaatgtcgaaataaacttcttacaaatgaccaggcgcctgtccgcgctcgcgtcgctgggtccgcactcaacccctctcccatccctctcctggggactcggtttccttccatcctcaataacgaaacatttttgtcccccttctcttccccggtgctgtggacatgcgcgggggccccgacgggactcgctggggcccgggtctcccctccctggcctcagtcttcccatctctacagcgaggccagctcgttgttcccctcctcctcctctgtctccatctggttcctagcggctcccagacggtcccgagggccggggcgggggtccgtgccggaacaggcgggggtcagcgcggggcctcggtcggctgcgggccgggctgcggggccctcgccgagccgactcatctggccgcgacaagggccccggcagctggtgacc

SEQ ID NO: 234481 - DNA, 738 bp, Homo sapiens
  chr9:135644985-135645723
  hyper
tctaaaatggcttttcaaggcggtcatgagcttgcctctaacccagcaaagcgtgtggaagaaacatcggcagtgagggctcccatctctcatttctcaaagagccgagactttcagcgaggccacttgccattcctggtaggtaatcagatcgctgttaattaataaagctgtcaggtggctcgtcctctctggtcattagtatcctttcagaaagagaatcctgccatcaccgccttgtccgcccctccgcttgccagcaattaacttaatgctatgcaaatgagaggctcttctcatcattagcttatagccacgaatgttaatcgcataattgggtcttcaacagggtaattagacacgatttcctccattagtcttacaaggctaattattgttgagcggagagggggactgctcccagggctccaggcgaagaggggcatctggttaaagcgaattcgggcgcatcgtccgccaggtaaaaacagcagtcgcgatccattgtcacagcccactgtccccacccatcgtggggaccgggctagggagggaaacggaaccaggggaaggcctgggggggtcacactcgtgccccttgcctgggtcctgggatgcagacaacgtggcatttaaaagtgaaagcggaaacaaacagcagccccgccagcccgggcccggaggcccagccccgcgccaagggccacccctcggcgcgctcagcttccctgggcctct

SEQ ID NO: 234482 - DNA, 75 bp, Homo sapiens
  chr9:135906376-135906451
  hyper
gggccctgccagacgcacagggatggcggcggaggcggccgatttggggctgggggccgccgtccccgtggagct

SEQ ID NO: 234483 - DNA, 626 bp, Homo sapiens
  chr9:136399587-136400213
  hyper
gtggcccccagttctggacccgggaagaaggcctccctgctcgccgctcctgggccgccgccgccggcagcagccaacaggcagctgggccggcctggccgggctccagaggcgcagagcgggttaaagtgtgcgccaggccggccggcgcgggcgggggagcggcctggtgggaagtgtgagtgttcctccccgtctgcctgacagctataaaggcggccgccggcgcagagccgccactgggctgcgcccctcccgggaaccccctctcttggatgctctttgaagtgggagagggaggcggcgcgggggaggaggggaaggggagagggaggccgggccgcagcctctgcactcacgccgcccccgcacgcacagcgcacctggcgccgtctgccctccgcagcgctcgcccctttctctgggaggacaacctgctgacccgaagccaggtaggccacctcgtccccgtccccctcacgttgcagcgtccaccaggccagcccactgctcagagtggggctgggggtaggagcaccccgcgccctctggagccgttacataacgtggggaggcttgtggggaggggtcgggccgcagagcacggggcagggtggcctcccagc

SEQ ID NO: 234484 - DNA, 552 bp, Homo sapiens
  chr9:136474216-136474768
  hyper
cgctgccccggccgcgaggacttgggcgcacgtgacggggcgggcgggcgtccgacccgggcagggcgcagctagcggcggccgctcatgcccaggccacggcggtggcgcctggtgtggctgggcgggcgaggcgggcgctgagaagcccgggaggcccccggggaggcgactgcgtgcccaggcgggcacccctgccagctccgcgctgcggccgcgactccggacgccccggctggctccctgcgagctgcacgcgcggctccagcctggtcccgagcgcagggcgcgcgctggcggggagggcgcgcgcccgagcctggcggggagcgcgcgtcaccggcccgcgcgcgcagtcgtcgggggatgccgggagcggcctggggagctgtccctggtgctgacggctcgtccgctctcgcccgggacgcgcgacctcctggaggcctgggggtgcccccaccctggccggcgccctgcggtgctccctccgctctccgcctgttctcggggcgttccggcttccacaacgttgggatctggagtcaggcc

SEQ ID NO: 234485 - DNA, 224 bp, Homo sapiens
  chr9:136603451-136603675
  hyper
agcagtggcctggccggaactccaggcctcccccgccccccaccctcgctgccagccccatgtctccgcccaggatctgggcggagcgtaccgcccaccactgcggcttctaggccagcttagttggggcttctaggccagccctgtgggcagctccctctgagggcggcagagcagggttgtgaaccccatgccccattacccgtaggcgacctggcagtcac

SEQ ID NO: 234486 - DNA, 115 bp, Homo sapiens; identical to SEQ ID NO: 201923
  chr9:136856335-136856450
  hyper

SEQ ID NO: 234487 - DNA, 159 bp, Homo sapiens
  chr9:136890934-136891093
  hyper
tttctcctgacatcgtttttgtttgggtccaggggcctcacgggagctggatgctcggagcagcaaggcggccctgggggccccttccggtcccggggctgacgcctggcggcgtctccgggaacccgcgccctttcaagcgccgctggctcctgtttc

SEQ ID NO: 234488 - DNA, 115 bp, Homo sapiens
  chr9:137273878-137273993
  hyper
ttgggagaggccagcgggccagctgggcactttggtctctgtaatgaggaccctcccaccccaccaagatgcacacatgccctgccaggatgtgggggggcgcagggcagtgggc

SEQ ID NO: 234489 - DNA, 519 bp, Homo sapiens
  chr9:137298990-137299509
  hyper
ctcattccaggcaccgaggtccatgtgaaaggaggctttgcggtggtttctgctttgcttgcattgagcctcaaactcttcctgtcccgtgagaaggggggatgggatttggaggcctgaggaaggaaggaggggagcttcctgcgcacaagcggcggcaggggtttgcagaagtggaggctgggggctgcctggccaagcgcttaccgccctgcgcagccaggctggctggcaggctgcagcgggaagcgcctgtgggtcctcggcgctgactgcagagctgggtggaggcagcggaaccaaaactgctgtgtcactgcacgctgcagctgttgccagggtgaccgggtgagtttcccacgcttgcccgggcggcagcgtgcgggccggcgggtggggcggaggggtgtgcagagaggccagtggtgtcgtgccacccgatgcccgggggtgtccactcccctctcctgggtcacgtgaccagggcccctgccctgcggtgttgtggggtgtatgtgt

SEQ ID NO: 234490 - DNA, 1326 bp, Homo sapiens
  chr9:137533127-137534453
  hyper
ccacagtcttgggcgccctgatctggctggatgggaagtttagtctccacccagaagaggagctctgaactcctccacgttaaagaaaaagttaggcggggtaaactgcaactttctttttaacccgaagtgatcaaacctcggggcccctctgcactggttcttggagcatggccaggtgcgggcacctggggtgggaacagtggggggaccagggtgggcccctgggctccgaggccgccccaggcccgcccgcctaccggctctcagagaaagaacagggggccgcgcccgccccacgtccgctccgccccgggccagccccttcctcgctgcgactcgcccgctgtccccaccccctcgcccgcggcgcccagtgggaggcgggggctggcctcgccgagcccagcgccgggctctgatttgctgcgggcgttggggatcgacagcctccgcggctgccttccaggagagagggagggaggaaaagggggaaaaaagtgctccgcgccgaaggcgaggtccgcactctccgtccccgcggctggcgcaggacctcactcgagcggagcgcccacggggagcgggtcgcggggcggcggcggcgaggaggaggcgagaaggagttggaggaggaggaggaggaggcgagggcgagctagcccagcggggtcccggccgccccgcgggccaaagtcgagccctcccgcccgtgggcgagcgcgccagccgccccttccagaacagccgccgccacaaagaagaacggggggtgccgaggtccccatgacctcctaaagtggtgcggtccctgctgagtgcgctgcccgggccgtgacccgcgcccctgtgcgtccccgcgcgcctccgagcgcccctgtgcgccccggcccgcgccccgccggcatggacgtccatacccgctggaaagcgcgcagcgcgctccgcccgggcgccccgctgctgcccccgctgctgctgctgctgctgtgggcgccgcctccgagccgcgcaggtaagggcgccccggggcgcggggctgcgggatggggcgcgcgcagcccgggcgccgctgtcatccccgggcgccttcgcccgcagaacttttcttccttggcctgtggaatgcacgggccaagaccacgaatgccatttgctgggggcccccccgagatgacgacacgcagacacaatgcccgcgggcgcgccgccgccccctccccagacgggcgggtcgggtggggctgtcgcgcgagccgaggaaggaccgagggctggatcagcaggaggggttgtccacgaggcgggcaaacttttgtcccaaaa

SEQ ID NO: 234491 - DNA, 393 bp, Homo sapiens
  chr9:137967096-137967489
  hyper
ccagcctgcttccccgccggccgccgccctcctccccgggagagagcgaggcgcgcgggtccctctgcgccacccccgcccccgccccttccgagcaaacttttggcacccaccgcagcccagcgcgcgttcgtgctccgcagggcgcgcctctctccgccaatgccaggcgcgcgggggagccattaggaggcgaggagagaggagggcgcagctcccgcccagcccagccctgcccagccctgcccggaggcagacgcgccggaaccgggacgcgataaatatgcagagcggaggcttcgcgcagcagagcccgcgcgccgcccgctccgggtgctgaatccaggcgtggggacacgagccaggcgccgccgccggagccagcggagccgg

SEQ ID NO: 234492 - DNA, 161 bp, Homo sapiens
  chr9:137979100-137979261
  hyper
ccctcgaatcaccgcggaaaagggctccagtaggcaggacggcgccgtctctctgccggcaacctttgccccaaagcggaccctctgcggggatcggagagggatgccccggcgtgaggatgggagaagccccgggacgggagggccgcgggccgtgcccc

SEQ ID NO: 234493 - DNA, 1365 bp, Homo sapiens
  chr9:137979545-137980910
  hyper
ggagcccggagggacgcagccgggcaaggcagggcgcagggcgggcggcgcgaggcgcagggcgcggcgggcagaggccacctggccaccttccctggcgcccggggaaggcgcggcgatggccggggcgcgcggggcggcggcggcggcgggcgggcggcggcgggccgagggggcgcggggacacagccaggcgcccctgcccgccgcggtgcccgccgcctgaaggccgcctgggcgcgggagccggtgccagctcggagcgggcgctggaggcagctcgaggcgcgatgtcggtgccgctgctcaagatcggggtcgtgctgagcaccatggccatgatcactaactggatgtcccagacgctgccctcgctggtgggcctcaacaccaccaagctctcggcggccggcggcgggacgctggaccgcagcaccggcgtaagtgcgcccgccggccgccttggcgcggctcctcctcctcctcctcctccccctcctcggtccggagccccgggctgggcgggcgccgcgcgggacccgagtcgcccagggaggcggcggggagcagggcgggcaagggcaggcgtcgcgggccggcgcagcggtggcgaccctgctccccgctcccccagcctgggccactccatctccgcccgcgcgcccctggggcggcgtttccttcgtctgggcccctcgccgcggggccgggggagcttggtgggttctcggaggcttggagtcctgggtcagtaatcatgagccccccattgaaaaggttaggaaactaaggctggggacttggggacttgtccaaggtcacactcagcgagtgaggggtggagccgccgctagaccctagtctgggctcggtccagcggggactgagcccgccctagtttgtaaaagccagactggccggaccgggctgggagtggggccccagccggtgggctccggagctcctgcccgcgcctgcattcccaaagtcccaaggcgccctttcctccccagtccataggagggtttgttccttctcctccgaggacggtgccgaggggcttgggtggggcccctgggagcctgcccttgggcgctcaccccctcgcctttgccttcgtcttctgcgcgcacccctccctcctggcctctgaaattgaaatcgcgtctccctctcgagcctagcgggaggggaaccgtggccggggctgcttctgggcagagctgacttagatggctgagcgaggctgagctgaaaccgccacccggagggccgcgcggggaaggggccgctgccgggaaggcgcgccccagaccactggccctttaggctgaaaggagaggtgaaggacgtgagtctccctcc

SEQ ID NO: 234494 - DNA, 366 bp, Homo sapiens
  chr9:138628363-138628729
  hyper
gccgttccactgcgcggcggcgtggggagggcgcggcgcgagctgagatggttccgcccggcgccgcccccgctgcccgccgcccgccgcccgccgcgccgagcgctcccgcaggatggcgcgggccaagctgccgcgctcgccgtccgagggcaaggcgggcccggggggcgccccagccggcgccgcagcccccgaggagcctcacgggctcagcccgctgctgccggcccgcggcgggggctccgtgggcagcgacgtgggccagaggtaggggcgcgcgggcctgggaccccgcttgtcaaatcgcgcttgcatcctgctcgggctgcgctggctgggctgcacctgcgttgcctgcagccc

SEQ ID NO: 234495 - DNA, 36 bp, Homo sapiens
  chr9:138987691-138987727
  hyper
acgggagcgcccttgggcgaacgtctgcggggctcc

SEQ ID NO: 234496 - DNA, 40 bp, Homo sapiens; identical to SEQ ID NO: 201929
  chr9:139001729-139001769
  hyper

SEQ ID NO: 234497 - DNA, 1644 bp, Homo sapiens
  chr9:139084516-139086160
  hyper
cccgccaaggggacgccacccagagccctgtgccacccccagccccgcccccgctgcaagggggatggggtcctgggcaagggtcggtcctctctggtcagcgaccccgctgcctctcgggtcgggaccccaacgagcgggaaaaaaaaaaaaagacagaacgcgtgccggggagtatgaccccggccccggctccctgcaccccgggctgcgcagagccctcgccctccgggttccctctgccagcgacgccagcagagccgggcaggtcccatctcggggtctccccgcgcccggacgacccctctcccactgcggccccggccctgcctcacccgccgccccaccagggtccgagaccgggagaccccagccgcggggggggggggacatcagccttcgacctgcccccgcacctcccgctccgcggggagactgggcgccaggaaccccgaattcggggctgacaacccgcaggcgcgcggctaaagcttccaccgtccgcgagaaggcgtctccaccctggaaggaagggggctcggacccagggaggatgaggggtccgccttctccttcccctcacctcgctgcagcccagagcccgcagacagccccgcggcccaaggtctctctccgcccgaggtctgcagctctggctgggcgtcccccggcctggcgggggtccgggtgggggccgcggcccgaagtctgattctgggttcgccctcgcgggtacggagcaggagccggaggaggtcggagcccgcgtttctgtccctggggcgcggggaggtcacagggctccccccaggcccgcgcggggcggaaccgggtacggccagagcggcgcgcgctgcgctccgatcgggaaccggaggccggcgaggtcacgcagacgcgctctccagggcaccgcgggtctcccatcgccgaggccgcctccgcaggccccgctcccctccccgcggcggccagggcggtgtcgggggcggccacgggctccgggattatcgacgcgccgccagctggagcgggcgcgggcggggtccccgcgggaacagtcggcactttattaacctgtcagcgcctaaaaggtcccgggcggcctgggggaggggccggaggccggggcggggtgggggcgcggctgggggatttgcgccccctcctcggggctgccccccgccagcccgcgctgcaccccggcggccgcgccccctccctaaattccgccttcgacctgggcccggagccgctttccccgcgggctgcccgttgcccccggagagttcggggtcgtccctccagcgcccgtccctggccgcggggccgctggctggagtctctgccctggggacaccgactccgcaggccggccccgaacctcgcactttcccgccggcgcgcctttgcccgcactggtcgccgtcgccacgcgccatcctcgcgtccaaccccatctgcttccacgctcggctccagtgttgccgccattcccagtggccgtcggggcccttctcccctcccgggaccgccctggtgatccgcgcgtctctgcgcttcccaggggtgctcggtgcctccttagacacagcgtggctgccagagcctgggggtcgaaggccatgcgccacagggagggag

SEQ ID NO: 234498 - DNA, 481 bp, Homo sapiens
  chr9:139089078-139089559
  hyper
tggccccacttcctcggaaaccccagcagccccgagccgcccacccaggggcagctccctcgtgtgaggtgcagggtggagccgggcctgggtcagaactgagcgtggtctacctcatccagccaggaggcggggctggcagggaagtcggggtaacccccgctgctccccgtggataggtcagaactgggtccgttccctgccagcaccctcatgggtgggggcccgccgggggctcccgagggcacaaggcccaagctggtgtctgggtacaccaggctggagaggaggggctgggggccagggaggctctgcggggcggcgggggatggggggacaccgtaggggctgccgggacgcagctctcggtactgctctgggcctgccaggcctccatgctccagggagaagttgcccagggctcccgagggccggcccaaggcctgggtgggttcccccaagctcccgtagaggccattgg

SEQ ID NO: 234499 - DNA, 254 bp, Homo sapiens
  chr9:139091479-139091733
  hyper
tttttcagaccaggaaaggtgggagcgtcgtcccctcggctgacctcgctgcttggcggtttcgtagtccgccttgcacacgagccggctgtcctccatgaggtagaactcgtcgcccgtggccagctgccgcttgcacacgacgcaggcaaagcagtgcaggtggtacacgaagtcctgggcgcggcgcaccacctgcgtgggcgggatgcccagctggcacgcggcgcacttggtcccgaagcgcctgcggg

SEQ ID NO: 234500 - DNA, 187 bp, Homo sapiens
  chr9:139093902-139094089
  hyper
tgtcagggatggcggggtcggcggagcctggacgccagcccgcccgctccggccagctctcccgagcgcgggcgcgcagtcctccttcctccctccctctctccgccccccagcccccgcggccaacccctcccaggaaccgtcgaaaaataaataaataagtagggaaccgcgagcccccacagcc

SEQ ID NO: 234501 - DNA, 98 bp, Homo sapiens
  chr9:139334408-139334506
  hyper
ccggcagccccgcagtccggcaggtcccagcgaggcaggtgcaggtccccggagaggacctgggtgcggtccaggacagcgccgaggcctgcggacac

SEQ ID NO: 234502 - DNA, 119 bp, Homo sapiens; identical to SEQ ID NO: 201932
  chr9:139377007-139377126
  hyper

SEQ ID NO: 234503 - DNA, 70 bp, Homo sapiens
  chr9:139440690-139440760
  hyper
ggtcgggagcgggcgcctgggactacttctcgtttgaaagttttcagaggccaaaagtttgagccggggc

SEQ ID NO: 234504 - DNA, 104 bp, Homo sapiens; identical to SEQ ID NO: 201934
  chr9:139519836-139519940
  hyper

SEQ ID NO: 234505 - DNA, 68 bp, Homo sapiens
  chr9:139606986-139607054
  hyper
ctcgcctttaacgcgggcccgggggcgcgcggcccgcatggcgagggagcggcggccgctgcgggccg

SEQ ID NO: 234506 - DNA, 168 bp, Homo sapiens
  chr9:139607534-139607702
  hyper
cagaaacgccctggcaaggacatgacctccccgccccctgccccttcatcccatcagccagccgtagcgcggggaccctgccctgaccccgggatgaccttgaaccaccgtcccctccaggggcctggccgggtccgcaggggaggcccgggccgccttgggttccag

SEQ ID NO: 234507 - DNA, 102 bp, Homo sapiens
  chr9:139621210-139621312
  hyper
atcaaacattcaaacgttcacggggcagaacgctgagcgtagacatagcctctctaatctctgccacctaatgacacagatgtgacacggcagccacagctg

SEQ ID NO: 234508 - DNA, 238 bp, Homo sapiens
  chr9:139694853-139695091
  hyper
tggagaacaacatcgagaagacaatgatcaagatcatcaccagccagaacatccacctgctgtatttggacctgctggattatctgaagacagtgagcccagcggcccgggaagggcgggggtcaggggctgggatctgggaggggcgggagcgtcctggggcggagccgccccgcacccgccagggagagggagctctgcctgaccaccggctacgcaggacgccgaggcatgtgga

SEQ ID NO: 234509 - DNA, 148 bp, Homo sapiens
  chr9:139703273-139703421
  hyper
acgccacacattctcgcctttttttttaaaagaagcgtttgtaagagacgtatctagaaaagctccagaaggcacgggctgacttgcgactgtaggagacatcccatttctcgtaggaaggaggagtcatttacggactcctgagtgc

SEQ ID NO: 234510 - DNA, 292 bp, Homo sapiens
  chr9:139739086-139739378
  hyper
agtccgctgtgccgcgcgcccggacccgcgaagccgagccacgccgccgcgcccgctccaagagtgcgccccgcgcgcccccgggcctgacgcccgcgcccgcctcgccgccggtgttgccccgccgagggcgggaggcccagcgtgcggcgcgggccgaggcatcgccgcgccgggagcccgcgtacccggcgctccgcgcccttgccaacgagctgcatcccatcaagttgcagccgcagcggggcggccccggccgcgtcgcgcccctgtgcgccgccgcgggccgctg

SEQ ID NO: 234511 - DNA, 1026 bp, Homo sapiens
  chr9:139740765-139741791
  hyper
gcctcggccggcagcgccgaggagcccgcggccccgggagaggcggccgacgcgtcccccgaacccagcgccgacgaggacgacctgatgacctgctccaatgcgcgctgccggcgcaccgagaccatgttcaacgcctgcctctacttcaagtcctgccacagctgctacacctactactgctcgcgcctgtgccgccgcgaggactgggacgcccacaaggcgcgctgcgtgtacggccgcgtgggcagcgtgtgccgccacgtactgcagttttgccgcgacagcggcccggtgcaccgcgctttctcgcgcatcgcgcgtgtcggcttcctgtcgcgcggccgcggcgtgctcttcctgggcttcccaagtccaggctcggccgacaacttcctgcgctttggcctggaggggctgctgctatcccccacctacctatcgctgcgtgagctggccacacacgcggcgcccctgggcagctacgcgcgcgagctggcggccgctgggcgcctctacgaaccggcagagtgcttcctgctcagcgtgtccgtggccgtgggacccggcaccgcgccaccggggacaccggccctgcccgcgcccgcgccacgcagccacgggccaacagtgcgcaagttcgccaaggtagcgctggcggccggcagccccgcgcggccgcccccggcgcggagccgcgagcccgacatggagacgctgatcctgacgccaccgccgggcacggcgggcctggatcaggacggcgaggcgggccggcgcgcgcgcgaggtggccttcatccacatccagcgcgagctgcggctgcgcggcgtcttcctgcgccacgagttcccgcgcgtctacgagcagctttgcgagttcgtcgaggccaacaggcgcttcacgcccaccaccatctaccccacggaccggcgcaccggccgccccttcatgtgcatgatcatggccgcctccgagccgcgcgcgctcgactgggtggccagcgccaacctgctggacgacatc

SEQ ID NO: 234512 - DNA, 155 bp, Homo sapiens; identical to SEQ ID NO: 201937
  chr9:139838241-139838396
  hyper

SEQ ID NO: 234513 - DNA, 40 bp, Homo sapiens
  chr9:139872823-139872863
  hyper
tgtcctcgggaggggcgtggccagacgggggtgctgggtg

SEQ ID NO: 234514 - DNA, 194 bp, Homo sapiens; identical to SEQ ID NO: 201938
  chr9:139923388-139923582
  hyper

SEQ ID NO: 234515 - DNA, 59 bp, Homo sapiens
  chr9:139940159-139940218
  hyper
gcctgtttattccatcgtgggcgaggcggggcccccgccaccagcggaccaggcctgca

SEQ ID NO: 234516 - DNA, 157 bp, Homo sapiens
  chr9:139943294-139943451
  hyper
cactgcagtgtccgcggcctgcggggaagggcgtggcctcagctcccgagaggccccgccccgcaaggtcggccccgccccgccccgccccagcccaccttcttctggaagatcacgccgccgaaggcgcgctcgtcgaagccgtagccgcgactca

SEQ ID NO: 234517 - DNA, 392 bp, Homo sapiens
  chr9:139964699-139965091
  hyper
gccctccagcaccccgcggggcagctcccgcgcgtcggtgccctgccagcgggactcgatctcgcgcaggtgcacgcagccgcgccgccggtcgtccaggatgtcgaacagggtgcgcaggctctgcaggaaggcgcgcggcagcccctccgtgctgggcgcgggtgcggggggaggcacgcggccccgctcggccatggcggccccggccatgggcgcccgggatcggtcccctcgtccacccgcgtgcgtcccagcgcggccccacggaggggccggcccggcgagctcagcccacggcgacaatagcgactacttttgaatggggccctcctcgcggcgtcagccctcattaacatgcgccgcggccattggccgagcccgtcccatct

SEQ ID NO: 234518 - DNA, 388 bp, Homo sapiens
  chr9:140023876-140024264
  hyper
tgcccgcccaggccccgctcggagccgcaggctgggagggcggcgggcgcagcgaccccgggcctcggtccgcccggcgcggtcctcaccctgcagcacaagagccgccggcagttcttgctgttgccgtagctctcgccaaagctctgcgtcaccgaaatgaagtcctgatgaagcagcggcggcggatgcgtggaagggggcctcgaggaaccaccggcggcatcaggagacccggtcctgtaaaagactgagagctccgcctctccgatactcgcgggcagccattgcggcgcacagaaccgtccgcgtgtgagcagcgcgcacgcgcacgcaatgcgcctcaaccccgcagcctatgcgcctgcactgagagctcacggcttgc

SEQ ID NO: 234519 - DNA, 393 bp, Homo sapiens
  chr9:140051056-140051449
  hyper
ggcctgcggagcgccgcggtgggagtgctggagtcctggcccgtcatccccgtctgccccacagcgaggacgatgctgccactgtataccgcgcagccgcgatgctgaacatgacgggctccgggtacgtgtggctggtcggcgagcgcgagatctcggggaacgccctgcgctacgccccagacggtgagtgctgggccttggcggggtccccgaacggggaggaccccacgggctctgagtcgcatgctcgcctaggcatcctcgggctgcagctcatcaacggcaagaacgagtcggcccacatcagcgacgccgtgggcgtggtggcccaggccgtgcacgagctcctcgagaaggagaacatcaccgacccgccgcggggctgcgtgg

SEQ ID NO: 234520 - DNA, 143 bp, Homo sapiens
  chr9:140095337-140095480
  hyper
caagtgaccctaccgattggacaacactcgcctcaaccccgcctcccaagggacttcattggacaacgcctatcaccggagctggcctccattggggacggccccccggacacaccccggtgcctcgcgccgctcactggcag

SEQ ID NO: 234521 - DNA, 98 bp, Homo sapiens
  chr9:140100291-140100389
  hyper
ggagagactgggtcgcgaggcccggcgccggcggcttggctgccgggtgcaggccctggactcctacccggtggtgagggctcgctagggcctcggcg

SEQ ID NO: 234522 - DNA, 146 bp, Homo sapiens
  chr9:140172820-140172966
  hyper
gataagcctctaccccgccacttcctcaaggcccgcggccgtttatgggaagacccgagagatttgcatcggggccctgcggaggggcggaggggcggaggggcggaggggtcgcttgccggtctgaggggcgaggccgcgaccag

SEQ ID NO: 234523 - DNA, 98 bp, Homo sapiens; identical to SEQ ID NO: 201942
  chr9:140195121-140195219
  hyper

SEQ ID NO: 234524 - DNA, 676 bp, Homo sapiens
  chr9:140195552-140196228
  hyper
ctcggggctgctcctcggctgcagccggcatcggcgcgtcccgggcctgcgggcgggtcctgaaggcggcggcggagcgctccgagtccgccttcggctcccgccgcccgcctttcaccttcgggagaaaacattttgcgcagaggatccggtatctcgggattccgaacttgctggttgcgagactcaaatttcaaaaggggctggagcccgcgccccgcccccacccgcgaggcggcgggcaggcgagcgggtgggggccgtgggaagctgctccggcccggccgggcccggctaggccgcagggaggcgctcggccggcggggctgccggaccctggggccgggacgcacgcgccgtattcgccgtggccacgggccttctggcggggcctgcgagccgggcgcgcaccgaggtagttggcgggaaggtacagcagagacgacgcgggcgcagggccggggtccggggtcccggcgggcatcaccggccgctggccgcgtacttcgccttggtgatgagatagagcacgatgtcctggtggccaccgaacgcggcgatgtgcagcgcgctccagccgtcgcggttggccaggcggatgtcggcgccgaacttgaccagcagcttcacgagctccaggttgccgtcgatgaccgactggtgcagcgccgtctgg

SEQ ID NO: 234525 - DNA, 86 bp, Homo sapiens
  chr9:140196828-140196914
  hyper
tgggggcggggcgtgggcggtgccgtgcgcaggggtccgggggcgggtcccggcggcggcgcgcttcgcggcagggggcgctggtc

SEQ ID NO: 234526 - DNA, 342 bp, Homo sapiens
  chr9:140446133-140446475
  hyper
ccgccccgcgagccccgccccgcgagccccgccccgcgagccccgccccgcgagccccgcaccgccggccccgcaccgccagccccgcgagccccgccccgccccgcgcgctcctcgcattggccgagtccccgcggccacaccccctaccagattggggccgctattggacgcggcggccgcggccaatcggagccgctcttgctgcgacgcagcggtcggaagcggagcaaggtcgaggccgggttggcgccggagccggggccgcttggagctcgtgtggggtctccggtccaggtgagtctgtcggattggggcgggcgccgcgcgcggccaggggcg

SEQ ID NO: 234527 - DNA, 162 bp, Homo sapiens
  chr9:140500666-140500828
  hyper
cgtgcggtcccggcggggtgcagacacctgctgcggctccctgcgccccctgccacccgccagcaggcctcgccggccccccgccgaggtggacgcctgggcctcggggactgggtatcgggttgctgcagtggccgctggcagggcgccctggaggtgagg

SEQ ID NO: 234528 - DNA, 375 bp, Homo sapiens
  chr9:140771927-140772302
  hyper
gtctgggccgagtttgaggagccgagggcacccaggggcggtgcggccggcagagtgggctccggggacggcccgggctggcgctgagcggccgtcgaggacccacaggctcgtccgctcctgggcccggcccagccccggggtgggaggcgcggggcgagggaggcgcagccggaggggccggggcggggcgggggcggccgcggggcggggccggcgcggcagggtgggcggggccggcgcggattggccgggccccgccacgtgaccggccccttatagggcgtggcgcggggccgcggagtcgggtgaggcggcggcggctgcggcggtggggccgggcgaggtccgctgcggtcccggcggctccgtggc

SEQ ID NO: 234529 - DNA, 1403 bp, Homo sapiens
  chr10:734724-736127
  hyper
cacaaaccctcctacgagaggaccaggacggcaaggccggagcccggcccggggggaggttgacgattccgcccagccctccccgcgcagcgcccgcgaacaatgggggtgggatcccccgggccgcgccaggaccgctgcacggcctgagccaccagagatcgaacccggggtccaacgacaagtttcgcattgaaatctggccgggcgttccaggccgaacccgccagcgaggaggtggcgcgcaccgcgctgctgcaccaaggacgccgcggctccagcgcagagcgcacgggaaggccgatcccgccgggcccgctgcatcctgcgtccccgcgcggcgcccaggccccacagacacccccagggcgcggggggatcgcggccccacaaacatcccagggcgcgggggatcgcggccccacaaacacccccagagcgcgaggggatcccaggccccacagacacccccagggcgcggggaatcgcggccccacaaacgtccccagagcgcgggggatcgcggcctcacaaacgtccctagggcgcggggtctgggggtccgggggacgcgcacgctccgggctggggtcgcacctccccctccgggcccggcccccgccccgccgcaggccccgcgcccccagccctccgcgcgcggccctccccggtgacagcgcggcccggcccggggcgggggcccggttaccttccgacagctccagctccagctcggccaggcgcgcccgcacctccaggggcagcgccatgccctccaggctgcggtccgccatgctccgcgggcgccgcgccccgcacggcctcctctttgttcgcaggcggaggtctcggcggctcctcgcgcccggcggaaccgcaccgaggaggaggcggcggcgcgggcgcgggaggcgggcggcgggcgcgcagggacctccctcccctcggcgcctcctcagcgcggccccgccacggccgcctcgcgcgcccccgcgccccacggtccccggcccgccccgcgcgcgctcggcccctccccgcaggcgctgcggacccggacccggccctgctgctctcggccccggcccggcgggagcgtctctgcgcgcgcgcgtcacggggccgcgggggcagggcgcgcgcgcgcggggcgcgaggacgcgcaggagcgggagcgcgcgggggggcgcgcggccgcgtcggcgaagcgcgcgctcccgggggcgcgctcgggggcgggttgggggctcggggcccgcggggcggggcggggcggggcggtcttgtctgtcctgggctctgcgcgtccagcggagcctgcgggcccggccccagagcctggtccacccggctccctgcgaaaatcacgtcctggagccgcagcttgacgtctgcgcgaaaac

SEQ ID NO: 234530 - DNA, 404 bp, Homo sapiens
  chr10:830674-831078
  hyper
gaagccaggacctacgcacacccctggccggctccccgctggcccctctgcgcgtgggagcttccagcctcccgggtctaggggactgggggatgcgtcttcctcccgcccccgcagcgcccggggcaggagtggcatcggcgtccccggcgtccccgcatcgggcttctctggtcctttgtgaatcgggcctgagtcatccccggctcacggctgcgccacgtacccactgggcgctttcctccgagcgctgacgacagcgactccaccggcagctgcttcccagcgtctcacggcgggcccttggctcccctctctgctgtttaatccgctgaggagccctggtgagcacgagaggggctcgtggctgatcaatgcgggccgaggctgctggcacctttctc

SEQ ID NO: 234531 - DNA, 101 bp, Homo sapiens
  chr10:1034387-1034488
  hyper
tgccaagtacccgcgtgcatacggctgccggcatggcacattacaacttcaagaaaattacggtggtgccgtccgccaaggtaggcggccccgggagggcc

SEQ ID NO: 234532 - DNA, 152 bp, Homo sapiens
  chr10:1094292-1094444
  hyper
ttcccaggagaagcgccttgagtgtgttgctgtcaccctcttgcacggacgcaggtgtatgcacccgcgtcacacgcgtggactcggcacggggaggccggtgtcgtcacgctcgtgtttctgacgatgctgtctacgcttgtttctgaatt

SEQ ID NO: 234533 - DNA, 134 bp, Homo sapiens
  chr10:1094962-1095096
  hyper
cgtacgcgcttgacgacacaatctcgccaagcttcgcctggtggtgccacctccctggcctgtgacaacggcagacgcgcgaagcaccgggaacctgagccgtgaccgcgggctctggcgcctttaagggggtc

SEQ ID NO: 234534 - DNA, 89 bp, Homo sapiens
  chr10:1102299-1102388
  hyper
aaaagcttcaggacgctggtgagtcactgcggaggagccgaacactgaccgcgccgtccccgccaggctcccgcgcggccggcaccgcg

SEQ ID NO: 234535 - DNA, 231 bp, Homo sapiens
  chr10:1462892-1463123
  hyper
agccgctgcctgccgctgagaacacaggctctgcacccagggcacagaagcaggagaagatgtaattctcgaggaccacattgattaacgcccgcccagggctagccacaaattagagccccgtcctgaaagaagcagtgctatgtcttgtaaggcatgcttccaaaggagcttgcattgcacacaccccggagcaaaccggcaagtagagaagacggacacttcccaatg

SEQ ID NO: 234536 - DNA, 266 bp, Homo sapiens
  chr10:1651054-1651320
  hyper
gtagggacagcatttccctccgcattgccggccctctgtcttgagcccctgcagggtgccggatggccatgccctattgtgcgtccctcttgcagcaacaccacattaaaccgtggcatcctcttgaggctgcccctgcggattgcacggctaatgcagaaggctagaaagaaggacccgaaacgcccaccaaactataaattaaggcgaagatctcaggagcaatgtgcctggtgcccggcgtcgctggcctttggtcccctttc

SEQ ID NO: 234537 - DNA, 1442 bp, Homo sapiens
  chr10:1778724-1780166
  hyper
caatgtttacaaatcgacgggcaccacattgagtaaaaactgccagccaatttggagaggcgatcgcagggcttcgcctatcccttcctccgggacagtttggatgggagtagctggcgcgagggctcgttcccccgtttttgggtaattcctttggcactgggagacgagatggcctccggagggtggaaggcagtgccagcccggccggccactggggactgcggggcccggagacgcgcggggtccccggggagctcctcgccgccctcgccccacttcgtccgggtccctcaaacatgtcgcagcgtggctgctcactgtcccctctgggcaagaggaggccccagacatttccacgggatctgaactcccgagcgccctgcacggagcagccatcccgccagcaccccaaagtgaagctgctcacaacggacaagcccggagaccccatgagaggccggggtggagaagccgggggtgaaggggggcaggggccggcgcgccacgcggtccttacctttccgcttggacctccgcctcctcctcctcttggacttgcatttgagttgactgctcagccctccagaccctctgccgctccccaggaccgaggccatggccgagacccaggcgcggagcccagagccgcctccctcctgcacctgcacctgcctccttcccggcagccgccgccgccgctgctgcgaagcttgaggttgcaaacccgggagcggctcacttttcaggactgagcaggaaagcgcgctccgtctctctgtctctcgaattgttctctatgacttgctcccactgggctgggggcctcggctgggcgcctggagcgagctgctccctggtcagggagggcggggaagggcgcgcggcgtcctgagtgctccgagcttcccgcgggctctgcctcctgctctgggctcccagcgcagggaggctacttttgcgcctctgctagttgtttggcaccagccactttgaagccaatcacgcagggagcttgtctatttgctgcagcagcgtctaattagatccaatcacaactgctttctggctctgacatcagcagcagcaccagccgcaccgccgcctggccgcttgcaaactcagctcccgtttggacggtgaagctcccaggaccggcggctggagggaggctgctcccggggaacaaggacgcggcgcgggtgcgtctgggagagaccgggggagcctccaggagggaccctgcccgggaggacgaggcctcctgccgcagcctcgcggacagctcagctcgccctgctcagaaagacacagggacgggtttttccaaccaacagtttttaactagtcaattcattaccatgctccttgtgtcaagggggggaaatacctctttcagaaatgcagagaccgcacttcctcagaaacggactgaggtttgc

SEQ ID NO: 234538 - DNA, 371 bp, Homo sapiens
  chr10:3110012-3110383
  hyper
cggggaaaggtggcgaagcgatggggagaaccggggagaagagcggggaagcgatggggagaaccgggaagaagcccgcgcccggaagcggcaggggtacctgcggggcggcatgagccggcgaggcagccccggggtccttgcccggtggggcgggggaggaagggacatggcggtaggaacctccatccggaagatcagtgagttttccaccttcggttttgttttaaatggaacctggcagagggagtcgcctgaagcgccctcgggggtcgttctgcctctgagctgtaggacggggccgggcgtcccctccgaagcgtgggtacagcgcgatcacttcctaagtgcccccccgccccccaactccg

SEQ ID NO: 234539 - DNA, 138 bp, Homo sapiens
  chr10:3214943-3215081
  hyper
ccgcccgccgcagcgccacattgcgcatgacgagcacctggctggcgaggaaccccctcttaacccgacgcagggcgcggggcggggcttgccgtgacagctaccactcctattggtcaacgcgaacagcgacgtcct

SEQ ID NO: 234540 - DNA, 43 bp, Homo sapiens; identical to SEQ ID NO: 201957
  chr10:3239422-3239465
  hyper

SEQ ID NO: 234541 - DNA, 99 bp, Homo sapiens; identical to SEQ ID NO: 201958
  chr10:3239495-3239594
  hyper

SEQ ID NO: 234542 - DNA, 78 bp, Homo sapiens; identical to SEQ ID NO: 201959
  chr10:3827581-3827659
  hyper

SEQ ID NO: 234543 - DNA, 238 bp, Homo sapiens; identical to SEQ ID NO: 201961
  chr10:5454341-5454579
  hyper

SEQ ID NO: 234544 - DNA, 120 bp, Homo sapiens
  chr10:5707985-5708105
  hyper
tcggggtcacgcggacgcctctgcaggatgctcggacactgcgccacggcctcacccgcgccagtggaggggggtttagctcttaccgtgggctcgcgcctggcttccccgagagggagc

SEQ ID NO: 234545 - DNA, 195 bp, Homo sapiens
  chr10:5708645-5708840
  hyper
cccgccgccttggcgaggttcccggaggcgctgtccctgggtccggactccgctgtcgctgcccaccccgcttcgcccgtcgcgccgaggagtgtgtgtgcttgcatctgcaaaccgtgcgtcccgtgcacagaatacgtccggtgcaaaacgtgtcctgtgcacttgtcctatgtaaacgtgtgtgtccgtgtg

SEQ ID NO: 234546 - DNA, 373 bp, Homo sapiens
  chr10:6018596-6018969
  hyper
ttcctctggctgccgggacaaaacccctaggaatcgctcattccgtcctccctgccgagatcagagctccgcgacccgctttcttctcgaatacaccaagcgatcacagatctcttccccctttttctgcgagtgtagactccaggctggcccccactccccacccccatccggtcccgaccgcctctgctggtttcctgatcgcttaagaattggaagttgtttccaggtccccaggtgtgcaacttgcccgacgcgtttccccctgggacacagctcctccccaccctcccagctcccactgacataatttacttttgcctgggagtcgggaggagtagtttctcccggacccctccgaggaccgcgtgct

SEQ ID NO: 234547 - DNA, 106 bp, Homo sapiens
  chr10:6130773-6130879
  hyper
caccatctgggggcgctgccgcgctccccaagccttgtggaatttcgaaaatgtgcgccagggcgacacctcttgatggtaagaagacgccggcggaggggagcgt

SEQ ID NO: 234548 - DNA, 199 bp, Homo sapiens
  chr10:6244500-6244699
  hyper
ttcccaagggattcggctgcggggtccacggtctacactgggcaggactgcgtctctgctctcctcccggccagcacagttgaggtgaggggccggaattagtcggggaagctgtgccagacgtcccgaggggacaacgggacgaggggataacagcagccaggacccttcagcagggctgggcgcgctccaggcccgg

SEQ ID NO: 234549 - DNA, 282 bp, Homo sapiens
  chr10:6245257-6245539
  hyper
agatctgggtgcccgtggaccacaggccctcgttgcccagatgtgagtgcagctgcgcggagccgggttgcagggcgggctgcgccgggccgggccattgtgtggggcggctttgtgccgacgcccctctgcggggggcgcgcccgtgcgggtcgcgccggcggggcggggcggaggcgcgggctgcgcgtccttggccgggcggcgggggcgctgtggcccttgtcccggtggctgccccgccggcccggaaacggcgagtgcgcccggccgggctgcgta

SEQ ID NO: 234550 - DNA, 145 bp, Homo sapiens
  chr10:6246027-6246172
  hyper
gcgcacgcaccccccggtgctcggaattggctggcagtaccctgccccgccccgccggtcgccgcccccgccaccagcgatcgcttgggagagggttacctcgagctccacctcagctgcggagcgccgccgcggaaaagggcgg

SEQ ID NO: 234551 - DNA, 74 bp, Homo sapiens
  chr10:6622733-6622807
  hyper
taccccaggcatttgtttgggcacacttctgtcctggggtcatcgttcctaggtggcttcggacctgggacttt

SEQ ID NO: 234552 - DNA, 103 bp, Homo sapiens
  chr10:7449889-7449992
  hyper
gccagagcggtggtcggccgggctcctgcccagtctcggctcctccctcctccccaccagaaggaaaaacttgggcccttcgagaaccctgtggaatgttctt

SEQ ID NO: 234553 - DNA, 221 bp, Homo sapiens
  chr10:7451912-7452133
  hyper
ctccctccagccccttcccaccgcccctggtcaaaatcaataaatacatctcgcagttcctacagttgcattttggcggatttctgcaaaacatacacacacatacacatacccacgcacgcatattaaaaaataaactccagaaccagctcaagtcagcaattttgaaagggggtcgaataagaggagacaaccggaaagcccctaagtgacaggatatt

SEQ ID NO: 234554 - DNA, 99 bp, Homo sapiens
  chr10:7452613-7452712
  hyper
ccttctctttcgctcccctgcaccctccccagccttcccccacccgccacctccaaccccagctccctcaggcttccttcctttttttttttttccttt

SEQ ID NO: 234555 - DNA, 49 bp, Homo sapiens
  chr10:7453192-7453241
  hyper
ccattccctgcgcctaagcaggcgggcacccccaggaccctgggacctt

SEQ ID NO: 234556 - DNA, 891 bp, Homo sapiens
  chr10:7453421-7454312
  hyper
tcgaccgtgtgcacaaacttgcgctttatccgccggggatcgctgggagcggagataaattcaatccccagggcaatcttggccccgcccgccccaccccatcctgtgcttaaatagagcctttcttgaagctgcgaacatttccaggccccttgggcagggctggaggggccgaggagagctattcgagggaaaggtgccccgaggggcaggaaattaagttggggctgcccgggcgagctgccaggtagccgtgctcgccacggcgtctcatggggcacctagctagtggcgggcctcatagggcgggaaaagaatcgtcgctcacaccccagcaaaacgtggccctcgacggtccgttggagagccccggcggccgtgagccccgggcagggctggacgtctgcggagccctcgggcactttgtcccgggcgcctggggaggaacgcggagctcccagggccttaggtgcaacggctgcgcagagcccaaacgaaatgtccccagtgcggaaaagccggtgacgccctggtagcaagaccaagagcttccgaagaacgctgcgcccttaactagggggcctcgcagagatgcctgtgtgggcctgcattgtatatttctgcgaaatagcgaatggacacgtttgctcagggtttttatggttgccaaagggggtaaaattacccagtcccccaaatctgtgtcccatgaatccctctcatagtacccctctccagggggccaagaggtcctccaggtccccgtgggttcgcagctccacccgcccttcctcgccctgcatccctaaggagaggtgtccgctctgaagggctaggggccagccatggagtgaggggaccggggctgaccacgcgcggcacagacagagg

SEQ ID NO: 234557 - DNA, 684 bp, Homo sapiens
  chr10:7708265-7708949
  hyper
aatgctaaaccaccggtaggtagtcgctaaatgggaaagtcgtgttctcccggttttcaggtgggaaaagctgaggctcccaggagtctagaactcctctcatattgcctttctccctggatcaactgggaatgatgataacagcagactgccccccacgcgtgataaggaaaaaaccttgtaattataataacttttggagctacctcagaaattaacaacgacgaacagaaatctgcgcaatcaacaggagccaagaagaaaaactcggctccgcaggacaagtcccgggcacagttctgcaggaagcctcaggccagatcaggcaccgcggctcacacagaggtgacgcacgagtgacccacagagagggacccctgggcctctggtgggggcctgggagacggtcgaagggggcccgggcagaagctccgcggccgggccggcggagggaagggggcggccgcgcccgggacccggctcccctcggctccacttacctgctccgaagagtggccccagctctgcgcctcttcctgcgaccccacacacagggacagccccaggcacagccccagcagcaggagcatggcggggcgagggcgcgggacgctcggggacccggcgggacacgctttgcagcgcccagggctccagccactgcgggacgctctcggggccgcc

SEQ ID NO: 234558 - DNA, 71 bp, Homo sapiens; identical to SEQ ID NO: 201969
  chr10:7729413-7729484
  hyper

SEQ ID NO: 234559 - DNA, 202 bp, Homo sapiens
  chr10:7829457-7829659
  hyper
ggcattgcccgggcgtctagtattgcagtatccccgcccctgtgaggggtgcaaaaccttttctgatttcatttctttggtggtggggatcggactggggaggaatgaggggtcgcagaacacaggctgcccgctgggcccgggggctgcggggagggacggctctcgtgcgctgagtagttgactcgcccactgcagacct

SEQ ID NO: 234560 - DNA, 41 bp, Homo sapiens
  chr10:7829885-7829926
  hyper
gacttccccatggcgaccacggcagcgatcactttctggac

SEQ ID NO: 234561 - DNA, 37 bp, Homo sapiens
  chr10:8075904-8075941
  hyper
gctcttctgagccaagtgagttcccagctggcagcca

SEQ ID NO: 234562 - DNA, 591 bp, Homo sapiens
  chr10:8075971-8076562
  hyper
ccacgctcttggagtaggaccaggatgggatcgccctgggcacgtggtatcccctccgcctgcggggtcacgacagcctaggcgacggacagtcccgggcttagggagggaggctgatcccgggagctctcaggagtccttccacctgccacctaggagcccagttcgcatctctacagcgccacacatctaggccagcccagctccggtcccagtcggtctctgcggagccccagccagctccgcgtcttggtcctggcttgcgggtggcacacagacaagcgaccggggtggcccggagaggtcgtgcccctggctgcgagacgacgcgacagcagggcgctccgggggccgcagcggcgtcgaaggcggtccctgggggcggggctctggcacgagggggaccctcccgggtcaagttcacagaggcggaggggcctgggctgcgccccagagccccagggggtcctctgctcccataaaaaacaaagacgggggcggcggagggtgtggaaggaaagaaattgaaaagggagtgcgggcgactgagggaagctggaggggaaataggggcctcggccaccagtggcc

SEQ ID NO: 234563 - DNA, 333 bp, Homo sapiens
  chr10:8078024-8078357
  hyper
gacagtgaggggccggtcctgggcccggaggactcagcagccgccttggcagcaaatcctgtaggctgtcccctgccttggttgtctcgatgttccgctcagcgctggggaaataaatcgaacctggtgcacacccctcccccaggttgtaacacaactgcccccccagccaacacacacgcccaagcacgcagactttgcacacgtgacatgggggtctcaacaataaagaaaaaaaagaagaccttacagcgcgaagaagcgggctttagttaatcgatttcaaacacgcctgtggtgcggctcagtgaccccctccgctcggctgagtcc

SEQ ID NO: 234564 - DNA, 157 bp, Homo sapiens
  chr10:8079256-8079413
  hyper
gctcgcagcggtaacgtagacattggacaagtccagcctgaaaccgaagcctcttgaaaggggggagacggggagaacctgatagctggaaactcgttttctccaaaggctttcgggacattttagcccggctccgggtccgcggagcgccagggcg

SEQ ID NO: 234565 - DNA, 97 bp, Homo sapiens
  chr10:8079655-8079752
  hyper
agtgacaatccggccggggccggggccgcggggaaggggcaatggggggaacctcttctggttttgctccactcctggaggcgacaccattcatctg

SEQ ID NO: 234566 - DNA, 62 bp, Homo sapiens
  chr10:8079998-8080060
  hyper
caaaggacagagacgtctcactcagagcgtggcagttatgctgctccggaaagggaggctgg

SEQ ID NO: 234567 - DNA, 381 bp, Homo sapiens
  chr10:8082851-8083232
  hyper
gataaggaaagagtcgtttataattctccacctcgtctaatattttaaaataaagtcagaggcaagaaaacgccataaaacactggtgagcaggcaagcgccgaatgaaaaatcacttccatgttattatatccacagtaagatttaattaaaattctccacgtccacgtgctttattttcagataggattttttcccatcacgtaataattgataggaatttgcaaacggggctatttatttagggcgcctgggtggaataggtctgatttttttttttaattttcagtcattgcttttgaaactttcatttgcgatatccatagtttcagaccacctaggcccccatcacccacccgccccacccgggctacagttctt

SEQ ID NO: 234568 - DNA, 1202 bp, Homo sapiens
  chr10:8084991-8086193
  hyper
tcaaggagtcactttggacccgagaaaagcaagtgcccgcgtcagcagaaaaggaacgaggagcgaggccgccagatcgacgggaaacaggcggagagagggtcgtcggcgctcagggccggggtggcccgggggacggaggagagataggagagcccgccctgggtctcagagggtgctgttgcgtgctgcaggttctaagggaaaagggctttcccctggcaggagagccaaaggcggggaagggagaaggaggggcgggagaatgaggaccagaagccggagaagggaggctggaggaagacgcaagtggcccctccgacctagtggacggcgagttgaggtacagttaatgcccgggccaaggagacaactgtcgccgccttggtgacggatgccccctccctgggcccccgccctagtccccatggggggagcagcgcgccagaagggagtaggcgttgttgggaccctctgggggtctggaatgccagcgacacttctcttcccagccgcaggggccttcctgggacaggccaggtagaccccacccccccgaccccgttcgtcagggcaacaggttgggtgcaagctgtcaagagatggccttctccctgggtcctcaaaacgcgccaagaacgtggctctgccacttggtggcggaaggcgggaggcacagggcaggaaggtggaggaggggctgcattcgtgacgacgggggagcagagagggaaggacttagggactccccagagggcagacagacctggccagcttggcaaatcataaatccctctccctggaccctcggcctaaacctacccccagggtgtgcagcggaggcgcacaggggttggctgacgggctggggtgcgcctgggtggaggctggtttggggttctggcgtctggaggcaggccatggaaccagaggagagggcaggagggcccaccgcgcagagctgcggcccggctcctagagtggcgcccccagcctgggcatcgcgctcaactgctctctgaaccccatgtccacgagggttcgccctcaaaccacctccacctctgtccacaccccagttctcccgactccagggaccaagtgcctcggcctccccgccacgaaatggccacccccaagccctttgccccatgaaaatagcaacttcttcctacccaaccggttggagcacaagaaacttc

SEQ ID NO: 234569 - DNA, 177 bp, Homo sapiens
  chr10:8086680-8086857
  hyper
aaatattcttatgcctactccgaggagggtcagagggtagcagcccgtcacccagcatcctgcacctcctaacttttacggggcaactacggctcaggagagatgaaagtagaatgggggcgttttggaggcatcagcatagacagaaacaggagaaatagtcggaagggagaggga

SEQ ID NO: 234570 - DNA, 2664 bp, Homo sapiens
  chr10:8090494-8093158
  hyper
aagatgtccaaagcccgggagacccagggacgccggctgggctgcctccaccccttcttttcctcccgtggcacccacctgtccccccacctgccaaggccaggagggagggagagagctgaaaagggcacttttcctccagggtgactccaattcctttccactcaccctcaaggcgagttccttctctcccacccaacccggggctccccccaactgccactcgcctcacgtgtgagttgttaaacccgaaagcagaaatcccctgccctctcccttcctgtctccccctttccgctgcacccctacctacccaatttttatctcgctacaatcaggggttttctcaaccggggaaaaggtggtagtggcggtgggagggtcaggatccctcgaagtggaggccggggccgggctgggggcggagtgcgggggcggggggaatctcccagcgcatctcctcttttttgactctccccacggctcgcggctctcctggcctgggcgggtttccttccgagttttaaacggtgatcgatgaataagcaaaacaaacaaacaaacagaaaaaaaaagaaaaaagaaaaagaaaaaagaactaaaggaaggaaaagaaaaaagggtaaatcaaatcacataccatccccaaaacgatagctcatttcacggggaaggtagactcctggcccggggcgcgtgggcgtgggagccgcgaggagagttgccccttggacgcacccgcctccatcatcttcccattgccagtgagttttagggtccctctttctctgctttcccccaagttccctgctctctgggttttgtttgaagagagccagccttgctgggccgggatcctcaaccagtattgcccactgcccgactgccttttcttcccgtttaggtcttgctccccgctctccgcatttcagctcgcaagggaaagaaaacgggggcccgagtggcagagacagagataatatgtatttaacctgcgcggtccggggcgccctgccgcagcgggctccccgcggtgtggcccgcgcagccggggccagcggcggcgcctggagccgtgtccccggcataaccctcccgcccggcagccggcgagctgtttatacagctttacctgtgctatagtcctatccagtagaaacccttgcgcggccagggtaacctaatccaggggccgaggcggaggagggggcggtgaggctggctgggttggagacggaggtgtgcgcgctccaatacccgggatctctcctttgcccctcctcccaccatagggaaggaaatatggacatggttcgggtgacagaaatggggacccggggctaaggaggaaggaggccagttttcacggcccggtcctccggcttctctcctttgaacaggcgctggggacctccgcggcggccacagctggacgcgcgccgcgaaaggcgcggcggtcccgcgggcgcccggcgtgggctagagaggccggccctggcctggctcaggtcgccctcgccccgctttcatcttgccccagtcgccctttacaattcccacaccgaaggcaaagcaagcaaggaaagaagccggcgcctccccaagcggaccctcccttccgcgcagcctcggccactcttccagagcgccccggtgcgtactgcggcgggcgcagggaatcgaattaaacgtctctgggcggttattgtctttctctaattgctccaacaatggcctctattaaaatggagacacccaattaaaggccccgccgggccgctctcggctgccggcaaagctctggcccccggcctgcgacgtgcagaccgcggggccgcggacccggctggtgcggggtactggcgccggcctcgacacctttggcctccacttcctccccagactcacagcgacagcggccgcttcacaccgtttttattgaccgatcgcagcccagcaagattgatcgagctggaatgggaagggacttctcctcccccaggcccagctcgccagggcctcgggccgtgctgcagtttctggcctttggtgtcgctccccgccccccagccccgcagattcccggcttcttttctgtctgcgcggccgggaccgcccaggcaggcgccggggctccggggctccggggggagggactcggcggctcggctcggctccgcttctttcttctgcctgcaaatatttgctgcctcgctggaaatccgacgatttcgcgcgcgctctgcttgcaaagtctttaagtaaacacgctcaaatgaccgccccgggcggcccgaggcacgctctctccccctccgcgggattagtaactttaggacttcgaccccggggctccgctttgcctgttacccaggtcgggcagcgcgcgggcgcccggggccgcttctcccggcacctcggccccgcggagctcgcctggaagcgccggttgcctggctctggtgggtggcccggccgcgagcatctccgcgccctgggtctgtagccctagggctgagccccagaaagccgcgcctccgctctgcgccatggcctctgctttctgtacccgactgggtttccccacttccactgggacagggtctcttcgcccctgggagggcgggtgggagggacttgcacgtgggcatgtgtttgggggtg

SEQ ID NO: 234571 - DNA, 1284 bp, Homo sapiens
  chr10:8093388-8094672
  hyper
cccaaggtcccaggcgtccaggttgatcgccagccccttaccctggtgagggaggccttgcgccctgcagaagccccgggccctgcggcggcggcggcggcatcctcctggtcgcctcctcgctttcctccacccgagctccgccggctgctccttgggaggaaggggactcgctagaccaggccgaggcccaggtacctgggagggggtcgcgtcaggtctgcgggaaggcgctcaggcttctccgcaggaggccaggatcagctttgtggcggtggcacagggagaatcaggaccacctttcccccttacccccggccaggatccccctttccctcccccgcccgccaagggaggaggaagcccggcctgctcttgccggcgaggcgggtcaggccggcgcctggcctggcccggacccccgcagcccggctctccgcctcaggccacgcgccgcagcctctccagcctcgctcccttcccccttccttccccgtgggtcccgaggccgacctcggccctccctcctcggcatccccctcccatccttttcccttccccgctgccctgtgctccgggctccggggctgggcccgtgacgtcaaacccagtgtggcgtcggcgagactggccggcgcgggccatcaaaagagcaacgtcctctctcccaattacccactgtcagtccgggaactggggcgggccggctgggaattaaatgctaaataccccctaccggctggctccattacccgggacatccagccccaggccccccacccctctctgccagcctcaaaccacccagaccaagaagggccttcgagatcttttatttttctaaaggtgggggttgcccttctccatccccggccagtccgacttggtgctcgcgattgaatttaaacgaataatccctacttccccatccaaaattagcggataggcgcccttgcaccggaaggcctcctcaccagtcttttctttttgtctttgaaataattcttagcctcagaagtcagcattttcaagacctggcatccgcagcgtttctgacgcggggacttctctcttcggctctgaggtctccgcgcgcagaacccatggcagcttttggtcttacgcgtggctgtgagctgggctcacgctgcgtggcgcatccacccctcgattgacgcgcggagaagcatttttcattttttctttcagcttgtatccttaaatcttaatcccgggcttcttagcaaaaatgcgtgtgcattcgtttctccttgtttatggaga

SEQ ID NO: 234572 - DNA, 1422 bp, Homo sapiens
  chr10:8095107-8096529
  hyper
gttgttccttcaccgcatgaaaggaatccttcagaacttactttcagggacggcttcttctatctcgaatttttgcatttgtagggaattttatggggtagaggagcgaagagggaacaatgtctccaattcaaataaaaccccaaattaagctctcagccccatcggtgggatagcctgcgggggaacccactccctctcctggcagcattgccctgggggcgagcagagagtggatttggagtcttcttttcccgcctgacccctgctcgcccgagcagcattttcgggccagcggctgcagccacccgggcgccgctaggggatgcagtggctcaaaggaccgagcgggcggtgcaggttggaacccgcggggcggaccaatcgcggctcggccacagcctcgcccgctgattggtccctccaggccccgcccccgctcgccccgcccctctcgctggggcgcctcggagccgcgtgccctccgccccggggtgcccattgcgcagagcgtggcctggagacccgcgagccggggaaggtcgccgtggagtcccgaccagaggccggggttggggtcggtgcagaccgagggctggtttccttgactgtgggagaaacgccgggagccggagtaagtagggctccgggcggggcgaaaggaaaagttgggtccctagagtgaagaccgagttctttctgtccgtctacactgagcgtactcggggaatgagttagagccagtctcttcctcccctccccccttctcatccctcactgttgccactcaagtcaaaagcacacattgattacaaatattaggtctggaaagggcagctgcaacagctgaagcgtgttcactctgggggcttgagagcgcagaaggctcgggaaagaggtgacaatgacaacaaaattgacgcggacgctccagtcaaaggcatctcccctttatccgatgactcaccctcttaggaagtcggcccgagaggcaaatctcaaaataccttgacatgaaacattttgtttttctgatcaatttaacgcgcacgtttccccacatcgatgcgctctcccaaacaccctgcattagatcctaataatgatccatgcgtgcctattttttaaaagtctgaaaaagaaaattctgcccatcgaaatgaacttcatgaatggggcaggctggctgcaccgggacggaatcgtccacccgacccgaatgaattggcaggagccgcggccacatttaaagggccagagcgcgcgttccctcccgtccgcccccaagccccgcgggcctcgcccaccctgcccgccgcccctccgccggcggccgccctctgcggcgcccctttccggtcagtggaggggcgggaggaggggcgggggtgcgcggggcggggggagaagtcctggagcggg

SEQ ID NO: 234573 - DNA, 76 bp, Homo sapiens
  chr10:8096889-8096965
  hyper
attttttgcccccaaccacttgggaggacctaaatcaattttaaaaactcaactctcctcttttggaggttttcta

SEQ ID NO: 234574 - DNA, 67 bp, Homo sapiens
  chr10:8097445-8097512
  hyper
tctcctttgctcacctttgcttcccagccttcccatccccccaccgaaagcaaatcattcaacgacc

SEQ ID NO: 234575 - DNA, 456 bp, Homo sapiens
  chr10:8374272-8374728
  hyper
gaactgttgagaagggcttacgatgatctttgtaaaaagaaacatctcgtaagagtcaggactctgggcggcagcggcagagggaggtgctgggggcggtggcatagcgcccacaccgcgtggtccccgcgcgcggctgggctggcagcgccccaggcagcgcgcacggtaagcaggaagctgcggccgagctgagtcgctcaaaagctactggagctaatagattgtggtcatgaggagagcggcagcatctcggtagtgatgggaacactcaaaagcatcatcaaaacagttgcagaaacatgctgagctctgcactcccgagcccgtgcctgctgcagccggcttggagtttgctggtagccactgcagccccggccccgcgcgtccagcctgggggtgcgatgagcaagagaaatgaggtgcaaaatgttgcatccgcggagctgcttgcaa

SEQ ID NO: 234576 - DNA, 1159 bp, Homo sapiens
  chr10:11206735-11207894
  hyper
ggggagccccctcccagctccggcctttttctccagcgtgggcagccaatcagctgcgcagagctgcatagctggaccgctttccattctgagtagcaacaacgtactaatttgatgcacacatggatgcctcgcgcactctgcaaattcatcacccgcatcttgcattagtcatctgacggactgccaagtgtttcattttctttccatgtgactttattattaccacctctctcctctcttccaaaaacctcccaaaaagggcggtggggcggggggcggggcagggagagggagagaaatccagcagacatctagctctgcctttctttcccagccacagccagggtagggctgataaggcgctgatgcgttgatggcagccttgcagagctagacctgcacttaacttgcagctgcctcccgagcctccaagatgtccacgccctgggtgacaggcggcagggcgctgccccgtgctcccccggctctgctcgacagcagcacgcagtgagagcctcgccgccgccgaggagcaactcatggtgcctccgctttgttttagttcatcaaatttctacgactcattaggcactttgccactgctcttcttcctcctccttccgcctccccgctcccccacccccactattttttcttcctgtccctcatcgtgccgccctaactctggctcccggttccgtttttgacagtaacggcacagccaacaagatgaacggagctttggatcactcagaccaaccagacccagatgccattaagatgtttgtcggacagatcccccggtcatggtcggaaaaggagctgaaagaactttttgagccttacggagccgtctaccagatcaacgtcctccgggaccggagtcagaaccctccgcagagtaaaggtacagagcgcggggcgggggtcgccaggcgtccaggtgggcgtcgcggggcactggggctgtccgagcccccagcctgcaggaggaagggcgggtaggcaggagggctggaagcagccggtgctggcggcccctgtgctccaggggctgctcccgactcctccccgcacccccgcccgcctgcccgccgggacaggttggaggcgggagagagggaccgaggcagggcgggagcgcagaggctcggtc

SEQ ID NO: 234577 - DNA, 105 bp, Homo sapiens; identical to SEQ ID NO: 201981
  chr10:11652860-11652965
  hyper

SEQ ID NO: 234578 - DNA, 168 bp, Homo sapiens
  chr10:11653475-11653643
  hyper
cggacagagctggcggtcccgggcggccgagcagatccggcgcggcgcggcgcggcggcggcggcggctaccgcagtgccctccgccccattgtttcccttccaagaggatcccggcgaagccgagcccgggaaccaggaagttccccggcgcgacacctcctgccgc

SEQ ID NO: 234579 - DNA, 298 bp, Homo sapiens
  chr10:11865127-11865425
  hyper
cgtgggtcgctcggcgatggggttggggattttcacggtgctgtcccccaactcgaacttcacaccttgaccgaggacccccgggaggcggccgcgaggtcccccagcgcggcggggcccggccctttaagcgccgcgggcgcgcgcagtgcgtgcctaaggagtgcgagttcgggcggcgcgagcgcgcggcggcagtagagcgcgcgcgggtgggcgcgcacagggagagcgcgcggcggggcgtcccggaacagtctgcgccagacgggcggcggcgtgagggctccgggtcgct

SEQ ID NO: 234580 - DNA, 47 bp, Homo sapiens
  chr10:12110722-12110769
  hyper
ctacatcctgtttcgtactgggagcaggtgccgccccgcggaacact

SEQ ID NO: 234581 - DNA, 194 bp, Homo sapiens
  chr10:12237744-12237938
  hyper
gactggcttgccccggttacttactccaaggtgtaggggtgaagaacggaagaggacgaaataactagctggaggcagcagtgtcagccgatgccggtgccacggctcgaaacaccggcgcctctcgcggtgctaaaaggatgggcgcgcaccctccttccggcatccgtagaacccccgcctttgacctagct

SEQ ID NO: 234582 - DNA, 53 bp, Homo sapiens
  chr10:12238327-12238380
  hyper
gagggggttcgcccggtcgaccggcaaaagggaactgcgacttctgagcgaat

SEQ ID NO: 234583 - DNA, 218 bp, Homo sapiens
  chr10:12391277-12391495
  hyper
ctggggctctcccgcgtgcgccccgcacctgccgggggcccgtacccgccctcgccggggctccagggggcacgacggccgtggcccggcgctcttgggaggggagcgggacatccccgaaggcggcgcgctggaggcggggagcggccggggcgcacggagagggcggggagcccgcgggagggggaggagggggaggagggggaggaggcgcgagg

SEQ ID NO: 234584 - DNA, 367 bp, Homo sapiens
  chr10:12391855-12392222
  hyper
aaagcaagctgaagacatcaagaagatcttcgagttcaaagagaccctcggaacgtaagtggggaccggggaggcgagggtggaggtggccgcggcaggggctgcacgggcagctccagctgccgccgccgccactaccgcggcagaaacccagcctgtcaccgcgtcctcattgtcccgttctcggcgctgcggagcccccccgagcgcgcccgacgcgtgggcctgcgacccccgggtgggcgccgttcccgggagggggagggggcagcgccgggctgtcagggagcagcccacgcgggcgcgcgacttcccacttctcctgccaccgccgccctctccgctgccttctccccacgcgtgactg

SEQ ID NO: 234585 - DNA, 263 bp, Homo sapiens
  chr10:12392402-12392665
  hyper
gactttgggtggccacgcgaggatggaagggaagggcttcgcagtgctcagggtcacacgtgggcagagcctcaccggagggtctgtgcatttcacgcgggctcggccgcacgcgccggggagcgcgtctccaagggagggtctgtgcgcgtcgctgcgcgggcggtgctctctccgggctgcatcgagtcccatgctgatggctgtgtctcaagaaagcagaaataatccgaagtcgatggcaggaacgctccaagcatgtg

SEQ ID NO: 234586 - DNA, 861 bp, Homo sapiens
  chr10:13043140-13044001
  hyper
acctcgggaggtggcgcagagagagagagaggtggcggcggcgccgccgggctcacctgaggaagaagaaataggagtagtcctggaccacggtgtgggagtggcacgagaagtagcccaggccggtgaggttgagcctggagccggcgggcacctccagcatgctgccccacgcctggtcgcacagcatctcgacctcggccgagtagaagaggcccccctggccggcgtggtactgccagggcaggtggttgtagaggccgggcgcctcggggtgcagcgccagcaccctggcgtacacgatggtctcggccagctcggcgcggcagccctcgctcaggggcctccactcggagggcagctggcaggcgcgcgcgggcgctgggggacccgccaggcagagcgcggcgagcagcagctggcgcagcatgccgggccctcccggggcgcacggggcggcggcggggagcccggggagcccgccggcccgggaagggcagccctgggcgctcggctgctcgggccgctcccgggagctgagcgcaccgctgtctccgccacggggctcggcatgcccggccctggcgcgccacgctttaaaagggtcccggggactggacgcgccgggcgcccgcctcccgccctgccccctgcggctggggcgtgggcgggggaggggcggggagtcgggcgggtcccggcgccggctggggcggggaccagggactcggagaacgcggggacgccgggacccagccctgaattggggacagtggcccagcaatctcctggcgccccacgatggacgtggtccgagcttgccaggcgtaaagcctgtttgcaaacgcaaggcattcatta

SEQ ID NO: 234587 - DNA, 82 bp, Homo sapiens
  chr10:13141818-13141900
  hyper
ctgcgggaagacacggggaagacgaactccgcacactgcatttgattaatgatttattttgattaacgccgtcacagtgacg

SEQ ID NO: 234588 - DNA, 145 bp, Homo sapiens
  chr10:13570123-13570268
  hyper
aggtccgagggtccacgctcggcctgatggccaggcaggtccgcggccgccccagccctgccccggaggcgccccgaggagggctcgggccccccggtgtcattgtttgctaatttcctgagctgccctccgacttgtttacgtt

SEQ ID NO: 234589 - DNA, 33 bp, Homo sapiens; identical to SEQ ID NO: 201986
  chr10:13629001-13629034
  hyper

SEQ ID NO: 234590 - DNA, 363 bp, Homo sapiens
  chr10:13933006-13933369
  hyper
ttttctgaattcaacgtgcaccaacatttgagcagctgcctccaatatagaagcactgcatttagccaattttaaatgagcacgtactaaagggggttcccttctgttctcctccccttccgagcgtccgttttctctgcatcaaacttgctgcagccatttggaacgtaaaaagcagtccatcttagcagccccgggcaccggcgatcggctgctggcccccgccacccttgtctgaaacgccctgtcctgcacccaaaggaaagggctcccctggcactctcagaaaatggttttaaaaaaagcctacacagctctgcctaaagccatgtcctttcctatctccccgggtagattcagaca

SEQ ID NO: 234591 - DNA, 44 bp, Homo sapiens
  chr10:13934269-13934313
  hyper
ccttggctgaaggcacagctcttacccctcgatctagtccaatt

SEQ ID NO: 234592 - DNA, 577 bp, Homo sapiens
  chr10:14215643-14216220
  hyper
gctaaacagcaatacgatctgagaaattggtacttcctgcaaacgaacagctccgagggctgcacggccccaaagcaagagtgactggaaatcctgctaaaatatggctgtctaatcaaccgagaggcgaactcatttactgaggttcccattgtccacgctgacagatggctcgctcccctctctgctctccccttcccctcagatcgcgctgccgtgcaggcaagcctattctttgagagatccagttgcaatcgccagcctagttctgaaatgagacaaaagctccgtgagcctcctcccatgcacagagccttttctgtccctccaagcagaaggaaaagaaatccagatccactccccttaccttcgtcctcatcggagacaggagcccttccatggtggcagaatcctcatgccagtttctgtctcctgcaagttactctctctgtgtgccgtgcttaagcatcccacatgaaaagagccatgtcgggagccgtggtggctcccctctcccgggtggcgcctctgcaccgccacccggtctaacttgaatccccagcgcctgcaaagcgcc

SEQ ID NO: 234593 - DNA, 114 bp, Homo sapiens
  chr10:14879967-14880081
  hyper
cctccgccacccgcgcccaccgcccaccaagctgccaaagcgagctgagcagaattcgaggttggaaagaatctgccagtagttgccaggacaaatgacgcaactgaacacaga

SEQ ID NO: 234594 - DNA, 773 bp, Homo sapiens; identical to SEQ ID NO: 201988
  chr10:14995671-14996444
  hyper

SEQ ID NO: 234595 - DNA, 39 bp, Homo sapiens
  chr10:15130885-15130924
  hyper
gctgggcggtgagcggtactgcacgccgggttccccagg

SEQ ID NO: 234596 - DNA, 342 bp, Homo sapiens
  chr10:15481461-15481803
  hyper
cccttcccttcaccacgggaaatgcaggcaaagcccacaccggtttgttttttttctcactgatggcagaggaattcctatcccttggggtttacactcattttgtgtgctctccaaatctccccacttatctttagacagactcccaacaaccctctggacacaactccaaaggaaagagttcgcgggcccacgtcgtgctggggaatgacgcagctcactttttcacaggacggaaatctgggaagtgtttagtcagtttcacggtgacaggcaggatatcagcgggaaccaggtcatgacagaatccacaccctgctctcctcccgtacacagtaagaa

SEQ ID NO: 234597 - DNA, 224 bp, Homo sapiens
  chr10:15760997-15761221
  hyper
gtggagggcatgaacgtatttatgatgaggaccgactgtcaaacttgatttcctcttggaaacgggggtccgcaacctggtttgcaagaatgcaaacggtcctgcttctctaggtggagctctgtgggtacagtgagatgagagaagggggtggggtaggaggaagccaaggacagagcccagctgctggtagccgacagctcttgcgcccagacgcaatggtt

SEQ ID NO: 234598 - DNA, 151 bp, Homo sapiens
  chr10:15762181-15762332
  hyper
ccccaggtggagcgagagcttgctccagttgtgtcaaaggcgcagcttggatggagaatgtgaaaaccaaccccaccaccaggaggggcaaagcaattatctcttcatcacctctgcagcctgacctcagcgttcacggctttgcacgtct

SEQ ID NO: 234599 - DNA, 41 bp, Homo sapiens
  chr10:15902579-15902620
  hyper
gtgaaattggaggcggaaacaggcacggaaagcggtggaag

SEQ ID NO: 234600 - DNA, 329 bp, Homo sapiens
  chr10:16478540-16478869
  hyper
aaccaaagttctccgtatgcagcatgaggatccagaacccactgtgacatcaaattgccagagcaccacctccgatttattcttggggaaaaccaaaagagctacggaatgctcccttgttccagactgttctatggagaactgggatctggggaaaatgcaacagtttctttccgtttggggatctagccccgaatttttttcattcagccaaactaccgacagtcagacagcgcctgcaggagggtgtggccaggcaaaaacgcggggaacggccccggaccagggtggggcgtggcaagggtttgaagggcgtgtcctacgaagag

SEQ ID NO: 234601 - DNA, 1711 bp, Homo sapiens
  chr10:16562191-16563902
  hyper
agctcccggcttcccgcccctcgagggtcgcgctcgcaggggcgcgcaccgatcgagggtcccagactccggaactgccctctccaggccgcggggcgccctcctgcgcgcacgacccccgcctctccagggtgggacggcgtccccccttgccgtcgctccagggagcccggccgccgcgcccttcctccgcgggctcccacccccatttccggggtctcctccctctcgcccgcaccttcccgcgctccctccccgccctccccgccgcccgcccgcgctcacctggttgtttttgcagagatcagcccacatgctggtgccgtcccctccgcgcatcaggacgtggtaggtgaagaagtagatgcccgggatggagcaggtgaacttgccggtggtggggtcgtagtggtttccgaggttggtgaccacgtcgtcgaacttgagcacctcgtagccttcatgctgccgcttgaggccggcgtagaaggcgatcttgggcaccgtgctgtaggtggcggcgctgatggccccggccgcgttcaggccgggcgccccgggcgggcccggcaggccttggcggcccggctcgcccttctcgcccgggggccccatggggccgggtggcccgggctctccggggggcccgcgcggacccgccttcccgggcctgccggcctcgcctttggggccctggatgaaggtgggcagggactgcatgaggccgcggtcgggcgtggcagcggtgctgggcgccttggtgcccccgtaggggtcgcagaccatgcggcaggtgcccagcatctcgtagtgcgccgacgtgccggccgagctcaccagcaccgggatgaggatcaccagcagcagcaccatcaccacccccagcgccccggcggcgatcaggcgcctcctgctgcccaccagccggctcagcgcggggcgatcctcttgtctgcttttggacagaattttgaaggttgggcggggacctcttcagagccgaaaacaaccccctgcgaaccccaactcccctgggcgtgcgtgcgccggccgctgctgccgactcctgctccccccgcggaggctgcggctggggagggagcgcgggcgcccagtgacttgagccgaagtcccgagcccggggtgggggccgggggaggggtgcgcggggcgccctcgccccccgcgagctccttcgcacctgtggctgcagccggcgccggcgcggccaccgggagggcagagccagccgccgcctcctgagctcgcccgggcagctcacacttttatgccgccgccgcctgcgatcgacttttccgtttttgcagactgcgcctgttcgcaccaactttccgtctgaagttgcctttttctgcctcctcctcctcttctttcgctcgctcagttcgcccgtccgctgccttttttttttattgcctcctttctctcttcctcctttgccaccaccacaactcgaatagacgcgcaccccaaagccccgcgtgggcccgggcgtcccccgggtgcgcccagcggcggcggcggcgggcacggtcggcacggcgaggctcagagctggggcggaggagcgagcgagcagcggcgagcgcctcacggccgggagcggagcgagagagagactgaaggcagaattctgcctgggtaccacctgccaggagaagaggaggctgacaaacgcgcgccggagcaa

SEQ ID NO: 234602 - DNA, 148 bp, Homo sapiens; identical to SEQ ID NO: 201991
  chr10:16870093-16870241
  hyper

SEQ ID NO: 234603 - DNA, 52 bp, Homo sapiens; identical to SEQ ID NO: 201992
  chr10:17243812-17243864
  hyper

SEQ ID NO: 234604 - DNA, 118 bp, Homo sapiens
  chr10:17270073-17270191
  hyper
tattttgaaactacggacgtcgagtttcctctttcacccagaattttcagatcttgtttaaaaagttgggtgtggtttcatggggggagggggaagagcgagaggagaccagagggac

SEQ ID NO: 234605 - DNA, 580 bp, Homo sapiens
  chr10:17272051-17272631
  hyper
cggcccccgcgagagctgccacgcccttggggatgtggccggggggaggcctgccagggagacagcggagagcggggctgtggctgtggtggcgcagccccgcccagaacccagaccttgcagttcgcatttcctcctctgtccccacacattgcccaaggacgctccgtttcaagttacagatttcttaaaactaccactttgtgtgcagttgaaggcccttgggcacaatgagagccagtcctccaaactttcagaaagtttcctgccccttctggcaggctgccaatcaccgggcgggagaaggaaggaggggaaggcggtggagggagcgagacaaagggatggtccctcgggggcggggatggcggggctgtcctgtaggtctgtgcggccaccgtgattgcccctctgcgcggtgcccgaagtcccgctgaaacctgccgagggcagcaggtctgaaagctgcaggcgctagttgcgcggaggtggcgcagctgctctggaggcgcagagcgaatacgtggtgtttgggtgtggccgccccgcccctggcggtttcctcgttcccctttggtta

SEQ ID NO: 234606 - DNA, 213 bp, Homo sapiens
  chr10:17495120-17495333
  hyper
atcattcctagcacgcaaaacaaacctgaatcttaacaccggtgccctttaaagcatagaaaagaaaaagcaaaccaaccaaatccctccataaagacaggctgagctgcttctctccaaaggtggcggggtcgggggcgggggtgctttcaacacaccattgtcgagaggaaaactcagcacccgtttttcaaatgcagctgctggaggatc

SEQ ID NO: 234607 - DNA, 416 bp, Homo sapiens
  chr10:18429023-18429439
  hyper
acccagcctccgtcgtccttcccctccaaagttaagagatctgctctaagggttcctgaggggtggtctggggccatgggaacaggatcaaggccccctgagcgccgggcctggcttctgtggcttcgcaaacttttcagcctgtgtgccacggcgacgcgcagcggctgagtcggagcccacgcggcgcgcgcctcccgcgaggaacttttcggcttgtaggctgcttgtcactctcgctttccgacgcgcctccccctggctcgcgctcccggagttccctcccctcctggcgaggacctttcccggcgcccgcggctccgatccccgccgcgctgcgcccgctctcccggccccggctgccccgctgagggctcccctctcccaggcaccgcagccgcgcccccgcgtcccgc

SEQ ID NO: 234608 - DNA, 451 bp, Homo sapiens
  chr10:18429859-18430310
  hyper
cctccactgcagggatctctagcctcgcacctcctcccctcgtcgcctgcccaccctctgctcctctcctggcgccggggaccctgcccctttgcgccttttcctggctctgcctcggcttccatttttctctgcttccgaaaagccagtggggaagggcgggggagacctgccagtcctcccagacttctcccgggttgctccagctggccctcctcgccccttcccgggagaggcacatggagagacatgaatcaggggagtggactggacctgctgaagatcgtgagtccgggtgggcgggagggggcccgcttcccgcagcgctttctacgatgccgactctcctggccacgctccgagccggggtgggcgtgggtgtgaggatgatggggtgcaggtgggcaggaggggagcgaatatgggggtgccctgccggatccccccagag

SEQ ID NO: 234609 - DNA, 2612 bp, Homo sapiens
  chr10:20104309-20106921
  hyper
aagatatcaactaacgagagggccggcaagggttaacgcggaaacagatccccgagctgaaaaaacaaaaacaaactggggagccagagcccctgaaagctccggtaggaaattcaatgggcctcctgttcctttaaactctcgctttcgcccccgctgacactttgcaaagccgcggcggcagcggcggggaccacgctgcggtgcaccaccttccgccaccctcccgcgctgggctggggtcgagggggcttcgcagagtcggtaaccgaaccggctctggtttgctttctccactccctagccactaccagaaccagcctccgcgaaggggcgagctgtggttaaccctttcgtgcccagggagaccccgccagggtcggggcggggcgcgatcgccccccgcagtcgggcgcgaaggcggcccgggagccaggtgggtgtggggcgcagttggcggagctgcccagggcgtgcgagcaggctgcgaggatggcgccccggcggcgcggaggtaccgccccgcgctcccccgatagctccccggcctgtcccctctccccgcgctctggggcagccggctgcctggggcgcacggggctggagtggccctctccctccccttcgctaggctcccccggcttaatctgttggccgcgactcctcagccagccccgaggaaagtgcagccattggacaggtctgtgcgggctgccggtttcagggaggaaggtgggagaagcctggaggagcgaaggggagggcggagggaggagggaggagggtgcggcggcagatctggcaaattgcgagctgccttccctcctcaaagtgtggagaaggagcgcgggggagcgtggcgacggcagcgcctcctccgccaccaaactcctggggctccgcgggggcttggggccacctcctcctgagcccggaggaaccctctcccgataggttccagcgtgactccctcccactccacccttttcctttcttcttcctcttttttttttttttttttaaacacatttttttcctggcttcggacctcagactgctgcagccctaaccttcccagggctcagctctttggagctgcccattcctccggctgcgagaaaggacgcgcgccctgcgtcgggcgaagaaaagaagcaaaacttgtcgggagggtttcgtcatcaacctccttcccgcaaacctaaacctcctgccggggccatccctagacagaggaaagttcctgcagagccgaccagccctagtggatctggggcaggcagcggcgctggctgtggaattagatctgttttgaacccagtggagcgcatcgctggggctcggaagtcaccgtccgcgggcaccgggttggcgctgcccgagtggaaccgacagtttgcgagcctcggctgcaagtggcctctcctccccgcggttgttgttcagtgtcgggtgagggctgcgagtgtggcaagttgcaaagagagcctcagaggtccgaagagcgctgcgctcctactcgcgttcgcttcttcctcttctcggttccctactgtgaaatcgcagcgacatttacaaaggcctccgggtcctaccgagaccgatccgcagcgtttggcccggtcgtgcctattgcatcgggagcccccgagcaccggcgaaggactggcgggtggggtagggaggtggcggcggcggcatggcgaggttcccgaaggccgacctggccgctgcaggagttatgttactttgccacttcttcacggaccagtttcagttcgccgatgggaaacccggagaccaaatccttggtaagtaagatgcactttagcttgctgattttgtgcgcagctgaagacctctctggcactctcgtgctccctaccctctccccccaacatcacctatctgcccttgggaaacttattgcagttgcttttcggctaaacttaggcttcccaaatggggaaagagggttatcaagagaaggacgccggggactaggggttttcttgaggctttcgggcttacttcacctgggcggcagggggtggtactgtctccccaaagtagcccagggagggcttcagtgtgagagcaaagcttcttccgtggatacatctcctaggacctggcatctccaggctgtgtgctctccggctcctcctccttcctcgctgctggttaaactaagcgtgtgtggtatggggtgggtgggggacgttgtgaaagccagggattgcaggtctcccctctgcacgagaaaattccctgtggcagcaccttccttcccctggcgatccccactagctccgtctagtgacctgggccaagcgggcgctggaaggggggcggggtaaatgcggccggcgcagaggtggggagcaggtgggaaaggtggaggcgggctcgcctctggagacctacccctgctcccattgtcctccgcctgccagcttcacagacaggcctgaacgcgcagagagttccttggagtgccctgattttgtccccgagagggcccccaacctccgcatcctcttagtggctgtcctggcaggtgcgcgtcctgcggggagttgcgccccgggggctatcgccgagcgggagct

SEQ ID NO: 234610 - DNA, 1617 bp, Homo sapiens
  chr10:21461964-21463581
  hyper
aaatttccccagaacgcccctggctggtttcaactgtcagtcactccggatcgctcctgggtgtctctctcccgggctgttcatctccgtccctgcccgggaagggcagggggcagggctggaggggcccggctacagaactacttcccctggaattccccacccggtggattagacacccgtgggtccggcttgccgcgctgagccggagctctccagcagggattattcttagcaatgcggcagcggccgccccatgacatattaattactatttgcctctccccctcgccgcggtcacaggaggcgctgcgggtgggcggtgaggtgggatcgcgggcggatctgtggggcggggggcgggggtattgtggaacacgagtggaggtggagggggcgcggctcgccgaagtgcccccctgggtgcccagcctggtccctccggggtccggggctgcgcaccgccgtgcgccctccgcagaggctctgccgatgtcgcaccgccccgcaccgcgacaaaagcccttcccggttccaacatcacaatcgccaagcgtggtctctgacactcccgctggcgtcttcgttcgcgcgccctccccccgtgccaaggcacacgcacacgcaccgacccactcattgctttccatcccaggtgccaaaacttctcgaagcaggtgcagcccctcgcccggcaggtccaggctggcccggcgccccctcgctcaccttatccaggcagttgactttctcggtgggatacacgacttttccgcaacgggcgcactgggggttcatgatcgcggttcccgggggcggcggcggcggcggctgctggctcccaggagccgctgtgacatcccccggcgagccccgcaccgcctcctggcaggcgggagggctgcgggcggcgggcgccgggtagggagtcggcgccgggccacgggtgagtgcacggggagggcgacggggcctggcgcctggggccggccgcgctctcgggctcgcaggcgctgggtctcggctccggctccggctccgcgccgctggctctgcgtcgctcgcactccaggtacgggtgactcacacagtcactcgcgcccgcccctcgcgctcactcgctcccccgcctcgccgccgccgccgcgcaggccaaacccaccggcgcgcccggaccgaagtggcagggaacgtgcacgtcgggcaccctgggagggagggcgcagcgggggagggggcgggcagagacccggaaagctccgcagaccgccgtgggtgcgactgtgcggcctggggagtgagcctcgcgccaccgccgctgcaggccggggagcccaggtgggcggcggctggggagggagggatccaggcgggggaggtgacaaacaccggtggggagagtgctcaaacccgcgtactcccttccctccctcttctcttccccagccgggggcaccctcatcccaggctgactgacgtccctggcacccaaatgtcgcggggagtgcggggccagggtgcgccctccctcctcctccagccagtgaaacccgggacagcggcacccagccccagggcggaggccgtctctgctgcgcgcagcgacgcacccaggcc

SEQ ID NO: 234611 - DNA, 1055 bp, Homo sapiens
  chr10:21783525-21784580
  hyper
atttaaaagtggccgcctaggcgacaggcctgcggttttcacagtgtaaaacggatcagagggaaagctccagcccctctcgactttcgcttgcggtttgcaacccctggggtgggtctgaccccgcgcggcacttgcccaggcgagcttccctcgtcgcggcccgacccgcgcgcggactcggcttccccaggtcaggacccactaggtgggccgctcggccccaagcctggcagggcggagcctaggccgcgcgccccggggttggaggttcccacggagccgggaaactgcgcgccccaggtccgcaggccgcctcccttccctcgcgccctcgcacccgccctctgctctgccgctcccggtcctgggtgtgcgggagtcccgggggtccctctcctggacgcagaggaggaatttggagcaaaaggaagggaatttactgcggatggcaccggaacctgaattgacttgtgcgtttcctgctctgggcacgtaggtttcccctaggaatctggagttcgctgaggacacttaattccaagagatgatgggttcacataaacataccatttagttaagaaaaatatttaaaataaagaaaaaagaaaaactgaacttcgatcttcttctccacgttccctggtgtcaccaaataaacaaagcattcggacgagagtgggctgctgggggctcgggaggtgcgcgagacaaggttaccctgcgggtccgccactgcccccggcctccagcactgcactgcccacgagtttgcggggtgtgagcgccgaaggagaaccccggaccgcccagtctcagcctaaaaacttggatccaagagtcctacggttgtggatgtgccagtcctccgcgaccctttcctgctggccttctgctttttataaacgaaaataaaagtttgatttaggcttaaagaaatgtcattctggtcgttcctccctgaagcgggacttactcaacctcatatactcgcccggaattttcaatctcgcctgtcgaaatcgctagctgcgcatccgcggaagaagtcctgg

SEQ ID NO: 234612 - DNA, 154 bp, Homo sapiens
  chr10:21785547-21785701
  hyper
gcaaggcaaggtgcggcctctcagcgccaggacccgagacccccagctggagagaaggggacaccgtggtccgcgccctggggaggctaattgcacacgaacgcccccctcttccccgccccccaccgtaccctctgcagcgccacccgcgtcg

SEQ ID NO: 234613 - DNA, 178 bp, Homo sapiens
  chr10:21805239-21805417
  hyper
tctgccggcatcctcgaaagcagcgggtttggttgcagcggcggcggaggccagatggtacaagaagttggcctgcgcctgcacgctgggaggcttgcagaagctggtgcgcctgaatcggatgctctgcactgacacttggctggagccggagctggagtccgactcggtggacgag

SEQ ID NO: 234614 - DNA, 47 bp, Homo sapiens
  chr10:21814506-21814553
  hyper
tatagtcctggtttgtagtagtgtcaagaaccgcagcaagaggaagg

SEQ ID NO: 234615 - DNA, 129 bp, Homo sapiens
  chr10:21822289-21822418
  hyper
catcaaaactggacgccactgtctgatggcgttaattatgttttagcgactgactaggagggctagagttccttcttccttttggtgtaatacaactgcattttccggatcatcgtattatattgctaa

SEQ ID NO: 234616 - DNA, 67 bp, Homo sapiens
  chr10:21823423-21823490
  hyper
gtgagtgactgagcggcaaagcccgagtgagcgagcggtgggctgccgggccgggcggggggcgccg

SEQ ID NO: 234617 - DNA, 213 bp, Homo sapiens
  chr10:22292569-22292782
  hyper
gggccgcagccagcgctacgttccgaagaccctcgcccccaggcctacacacagctgtagaggcagcgcccggcgcctgggctgcacagtgggtgaggcttcccttcgcctcagcctatcccaggcctcgcttccggtgacatcatgtctcctagcaaccgcgggaagggggcgtggccggaagcctggacgcctggcgccccagatctgggc

SEQ ID NO: 234618 - DNA, 607 bp, Homo sapiens
  chr10:22517901-22518508
  hyper
gtttaagtcgcaaacggagatgtttacgctgacagggaacagacaaaagggcggccatgcttcaacaaaatgtaggagttttcagtttgcagcttgaacttgacactgttgaaatacatgcatttcggtggccccgttacatttcacgcgtcacgaagccgagcaagaccagcccgggccgccttccccgtgtacgcgcgggcctccggggacgcgcagagctggagcggcgggcgcgcgcggcaaacgggcccgcgcggcctctgcgcgtccccgctccagcaccctggcgaggcctagaccgccgtgaagaccccggggaaggagtggccgcgctcacctgcagccgggagaggacagcgggggagaggaggccgctctgcaccggccgaaagcgaagggctcgccggctggccgcgtagtgtaagggtcggtggtttctttgcttggtccctggaaatccaccccttcttatcccggaggcctgaactcgatttctgcaaaacttcccgcgaccagctcataaaaggagagcgcgtccctgggtgggctcgaaccaccaacctttcggttaacagccgaacgcgctaaccgattgcgccacaga

SEQ ID NO: 234619 - DNA, 33 bp, Homo sapiens; identical to SEQ ID NO: 202011
  chr10:22518859-22518892
  hyper

SEQ ID NO: 234620 - DNA, 266 bp, Homo sapiens
  chr10:22519355-22519621
  hyper
gtacacttctaagttccaaacgctctttttctcccttcttctctcctcaaataattgcgagtttccacttgagaacgtgaacgtgtttaaatttttaacagtcactaaaccgctctgtacagaatccctccaaaaacaatcgctatcatgatttatagacgttgtaagcgacgcgtcttggtccaatcagcattttgagttcccgttgcatggtaagacaacttaaattggctttggaaccaattagaagccgagttccctgaaag

SEQ ID NO: 234621 - DNA, 340 bp, Homo sapiens
  chr10:22542118-22542458
  hyper
tcgttcttcactcaaggttaggtcctcgctagtgccagagaagcccctgggtccccagtgccctcagccccgcagcgtagggagcagccggcccgggagataaggaggccacagccatggaggccccaggcccggagtccccgcgccgtcgggttttgagccgcgcggctggccaggaccgccggctccttctctgtcccggtcctccgctcgcagccccgcagaggtgacggtacctggaggctggaagcgacggtttcctcgggccggtggagggaaacatgtcagggtcacagcgaaggaaaccgagacccacaggggtccccgggcgtccgggacg

SEQ ID NO: 234622 - DNA, 44 bp, Homo sapiens
  chr10:22609889-22609933
  hyper
gagggggcggccacgggcctgactacaccgacactaattcccag

SEQ ID NO: 234623 - DNA, 641 bp, Homo sapiens
  chr10:22614079-22614720
  hyper
gcctttccaaaactttgtatcgctcatttaatctacaggagagcgtcacattagagaaggaagttttaaagaggttcggttcaataaacatctctgcaatttgagccctgacggtttcgggctaagtgcacagttggcaattctcaaaaaatcccttcgtgaaatttctgaccgagtgattgcagacaggacagaccgagagagtcgagatctgaaaccagctctgcgcaccaagtcgacgtgaaaagaggcccccggagtgtccgaaatggccgggagtgcggtttgcattttcctttcgcgggcgctgccgcaggctccggggtccccgccgcccaggactgggtccctggtccccgatccccgctccccgctccccagcgctgtggcctcgtggggctgccccgcccccccggcgtcgccgcacccaccccgcccccgcgccggccccgcccccgcggcgcgccgcccctcccccgcccgcccgcccgcccgccgccccgcacgcccgccgaggctcggggctcgggccgggctccgcgcggagttgcagcggtggccggatgccaagtgtaagtgtaagttgctatggaaaccccgaccgaggcgagttccgaatccggagcgagacggagccccgg

SEQ ID NO: 234624 - DNA, 2099 bp, Homo sapiens
  chr10:22624050-22626149
  hyper
tcaagatctgggcaaaggctcgcgtctcgggacgcgaagtcgacgccaaaatgggtccccggacaaggcgaccctgggagtgccggcgcccccggccgggcagaggagcgggtgggccgaggctgggacatcgcctccgaaagctgccgggacgcggcggcttcctgcagagcctgcgcctgccggatccccagaacacagaagcttctcggacatgggagctccccgtgcgccctaaaaccaggagaggaagggacgacttgggaaaagggactggggaaacagcggagaagtgaaagcggcctaaaatgggcgacggcgggcgagtcctctttatcagtgcagcaggctgccggagccgccatttggtggcggatctcggtagttcagtagcacgttgtgctgaacgtcacaactggcttgtctacgtggcatcgtcatttcttaaccgcggttttacgaaatgcaaatttccccctggccttcctcctccgcggccgtcgacccccctcggcgctccgggtggacggctccggggcgcggctcgtccctcgggtggtgcagcccccgcggcccgagacccggggagggccgggggtactttctgcgaggcgccttccccgcggcttctgcccgcgccaaagcctggtggaatccagcgcagacctaaagcacgcttgacaccccgatttttcgagactaggacgactctctgagccagcagctttcctctccctctcggggagaatctcatttccttggggtggtgagggtgacgggcactgtcttttggccccgcgtgtccgttccccggtctcccgcctcacccctctgcgaggtgaggaggggaaacggcgagcttaggcctggcgggaaggagcctacccgacgagagggctccgcggggagggtcggttggaatcccgccctagcgcctcctgctctgcccggtccccaccggggacggggaatgccagtcatttctgttgagtgctagcagggccggtgtcaccacctcgggtggccgaggcttcgaggttttcatgaaaagcccccgaagcgtgaggcgcccgcccagtggagaacaaagggccgagggccgaaggcgaggcgaggcagcgcgcgcggctcccttggctcgacctagctgggagtcgggggcgcgggcagggctcactcccggcctagaaactggagcccgccacccccgccccgcaggcgaccgcagggatcccattcttggagcccgagctgccatgttgccttcgcggaggccgccagtcacttgacgcttccgagacagcgaagcccccaacctgagagcccttcggccgtctttgccgcacagctgcagtcaaggcccggagggactgcgggacgcgggcgggagcgagagccctgtgggctgccaagccggcgcggccgcgccgcggcagccgcttcccttgccaccttcgttccaggggctgcggggctgcgcgctcggcagaggctcggttgccagtagcaaccacacgacggcgatttgcagccagggccgccgccgcagccgctggtacctctgcctcctcctacacctcgggctcgagcatttgaaaccctgggggttgccttcggtgacatctcccgcccccacctccagtcctcagtctccaaaatcctcagctctgctcaaaagccagcgcccccggctgggccctgcccccaccgcagacaataggagcggctgggagcgcacagggcggcgcgcgccgcgagcagcgggcacctgagcccccaaatccgggcgcgtcgctgagtctcagccccaggtgccctcttcgcggagttgatcagcaattctttttcagtggccaattagaaagcttttcttgacatcagaaataagggtggtgccaaagaaagaagtcaaacgcccactccctttctaataacatcgacacaaagaagagctcatggttgcgtctgcgcttggtaacagtggctttcctctgggttagagccacaggcacaagcacccgctgctatctttcttcttcgcctaccatgaatattttgcatgaaatccagaatgtaaccatttgcgttgacttaactgt

SEQ ID NO: 234625 - DNA, 55 bp, Homo sapiens
  chr10:22634629-22634684
  hyper
ccaccgactctctctcccgcagtgttcgagcaataccagaaggccaggacccagt

SEQ ID NO: 234626 - DNA, 62 bp, Homo sapiens
  chr10:22634714-22634776
  hyper
gaccccaaaacatcgagacgctgcagaacgcgggtgagcccggagcccgaacccccgtcgcc

SEQ ID NO: 234627 - DNA, 184 bp, Homo sapiens
  chr10:22726716-22726900
  hyper
gacgcctcagacacgggccctgacggcatcgccggcctgggggaggcgtggagagaggggaggaaggcgggagggctgtggggctgctagctgatttggggatcccatcatcttcgaatttttatgcagagcccatggaagcgcctggtcagagaagcgggaggaaaccgaacctaagaaaggg

SEQ ID NO: 234628 - DNA, 1264 bp, Homo sapiens
  chr10:22764688-22765952
  hyper
gagtcctcctcatttatgggcgtcggcgctaagcagctctggaaacgggcagacccagctgtgcagcgatgtccagtgtcgccgcatctgccccgcggggtgcagcatgagtcttcctttgtggcgtgcggctccatcggaacgcgcgttgcgacgacaaattccttttttcccccccgcagttaacagttctggggcagaggctggtggagaggtccagagcccactcagaccgagatgaagatgaggaaaagcatgagcaggaagaggctggcggctgcggcggccacagggaagagctcggtgcgcggcgcagcctcccgcgaccgcgactcctgggctgcgtcgaggagccgcgttgccataggaaccgtagcggcgccccagtgaaaccctgcgttcggacaggagaagctaaccgcggccgcccactcccacccgcgcttcctccccgcccccaccggccgtgcgcgaaaagcagagatccgagaaccgcgtgcggtacaaacggcaaaagcttcgcgcgcattttccgggagttgagcgcgcggccgcaggccgggaacctaccgctctcaggctcccagcccgggcgctacgaccctgtgggcgccgcctgtgcagcccctccttccagcccgctcgggcgcatcccccaggccgggccagcgacgcgggcaccgggagcccctcccgccggtccgggctttggcccacacccggggaccgcggagtgggaaaggaaccaaagcgcggcgcctggccgaccgcggacgaaattcgaggccggagggcgttttcttttttgcaaaattgccccaaagccagggccgcatgtacctactgtctcctttgccccacatgctccaagaaaataagacacattctaccccgagtcctaattattgggccatttccttaacgcgcggtctgtccccgtgggcagaaacatactgcgagatgcagtttgggtaattaacaaagagacgagacctaactgggcttccgaaatgctggatactgcggccgggtcgccccgcattcgggcatcgcgcggttcccggccttcgggacgttccggcccggccggactttgaccgctggcgtaattaggagaaacgcagaaggcggacgctccccaatttccccatcgagccttctcctcccgagtctgcgaagcccctggctcaggagacaccggctccgcgcctgggcctgcaaatccgcttccagcgagcgcaggccctgtcgctccgggctataa

SEQ ID NO: 234629 - DNA, 41 bp, Homo sapiens
  chr10:23001787-23001828
  hyper
gaaaaatacaaaaacgatgcttttaggcattttaaacaact

SEQ ID NO: 234630 - DNA, 137 bp, Homo sapiens
  chr10:23001888-23002025
  hyper
aaaaaccagcatggttttctgtcatttccattacgctgaaaaggacatacagacatccatcgaaatcaaaagcagggaaagcgaacttacacttttccccagatgctaagtgactgcagtggctaaggtcatggtca

SEQ ID NO: 234631 - DNA, 76 bp, Homo sapiens
  chr10:23002325-23002401
  hyper
cccggccgcccttccgcagtcggtgacttctgcctgactccccaaagtggggggaggcgacgaagggaggaagact

SEQ ID NO: 234632 - DNA, 304 bp, Homo sapiens
  chr10:23216820-23217124
  hyper
aagcactggattcaggtaatcgcggacgcacttggctcctcccgcactggccgctgccctcggcgggacaatgggcgccctagcagccccgagcgttcccagggcgcaggcgcggcgcggcgtggcgtcgcctagcaacgaggcacaacaagggactgggggttcgtctgctgggtttgcggagcagctagctactcggcgggatctcccggcaggtaaaggtaaccccgtggggtggggaggcccaaggcagaggcctgaggaaaacctgggaaaggagaaggtgccacgtgggcgcagactg

SEQ ID NO: 234633 - DNA, 282 bp, Homo sapiens
  chr10:23460285-23460567
  hyper
aacaagcacacacccgggacgggaggtattaaaaaggtgtgatccccttgcttttagatttgagcagatggcccatggtttgaggcggttgcctccgcaggctcggcctttaccttcagcaccaaggccagcgcacctggctccacgaggctcccagaaccttcgccattccgggactctcatgcccagaactgcaataaaaaatgttatttctcaatgaaattcaccttcctaactcatgaattgcgcttcattcattgctcttcacgaagtggtcattgg

SEQ ID NO: 234634 - DNA, 432 bp, Homo sapiens
  chr10:23461223-23461655
  hyper
aatgagatggaggtcggcaggggtgtgaggccacggatggctgctgcttccttgcttccttcttttgaagccagaatcgactctgctcttgctcgatgacagcccctcgccggaggcgcggctcctggcctctgcgggggtccgcgcaatccgggcgcctccagctgcccccctcctccgagggtcgcagccacagagcgcaggcccaagctggggcagaccaagggcggctggggtgctcatgccggtgccggcatcactgccggagccgccctgggcgcactgcacccagcgctgcttctctcgctggttctgtgccgctgctcctcccgatgcttgggggaccgcagggaggccgaatgacaaccggggagcctcggggccgcgcctgaggcccagagtctgggctgtgcagagcgcagagccccagct

SEQ ID NO: 234635 - DNA, 59 bp, Homo sapiens
  chr10:23462057-23462116
  hyper
ttttttttttaaatgggcgaatacctgtttaagttttaaaagcacatggaaattgcccg

SEQ ID NO: 234636 - DNA, 1247 bp, Homo sapiens
  chr10:23462596-23463843
  hyper
gtttaattagttctggggccgcggagagccagcgtggccgacaaagcccggctccccaggtaacccgggttccctgcggacccgggagggggcgcgcggggccggagcaccggccttgggctgcgcgctccctccggcgacactgccgtccccctggcctccggcccggtcccccgcaggccaaaggctcatctgccgggcttgggtggcccgggccagcgccgcctgcggtccccgagtgcggctggctctaaggccggcgccctctccccggctttcagtgctcagagccaggccagcgggaaagaaggcagcatggtccgcaaaagacaggtggcagtggcagtcttgcatgatacttgtccttcttccctgttccccattttggggaaacactggaaacacttttctctttatgcgcattcgcgtctcagcaccgagtgctccaagccctgcgcgcagcgccgggcttggaaggcggcgaatggctgcctagccgccgcccctactagtgacactcggccgccagcccccgcccaggatgtgcacatctgctggcagcactggcccgggtggcagtcaccgggccacccactccacaggtacaaccgcacccaatccaacctggaactcggagggctgtgcgcgccgagctgggatcgcgccccagcgagccgggcctttggctgcgccagggcccaggccgagtcatcccgccgctcgcgtcgccgcgaggcgggacaccgtgtgatacctttgccgtgggctgggcgtcggccgcggggcggagagcgggtgtcccacctcgcctcatcatttgatttccgccagcgtctgaggacggcgcacccaattcgttccactcgctgcgctctgtgaaccagcggcgggcagggcgggggaggccgggctgggggagggcagggtggtcccaatcccccgcccccgccccgccggcctcgcggagcacaagtgttgggattcccacgggcaggcgtgctctgcggctggaggcccgagcgcccagggcccaggagacgtggcggacacagaggggtttgtaggcacggtgacctccgtgctcctgctctgaaagggcctgaaaggagcggtttatggtgcattaccagtcaagggctcaggtaccagcgccttgtgtcgggaacccgggcggccgcccgtgctgcaggtgtctgctatacaaacgccccgggagggggagggcaggccgccggattgggggccgg

SEQ ID NO: 234637 - DNA, 2519 bp, Homo sapiens
  chr10:23479943-23482462
  hyper
gcggcccaggaggacgactcctttcagtcctctgtagagagaatacgcacgatggctgcgcttctgaactctcccggggtggaagctgcagcctggcttttaaccggaattgcccagaccttgaaagtgtttctttgttgctcttaaaaagaggaattcacgttgcatcgcagtctgtgataaagtctgtcttggggcagagctgcatacgttttgtgttttttttttttttcagaaaagaaaggtcgagaaagaaaaaaacaagtcattcagggatggtccctgtggccagtcggaaaggtgagagactcgggctttgaaaacgattcacattctgccctttaacttcaatgccttccctccggactgcgccggagcagacgattcaatggactccttttgtatccagtttattgctcagaatccctagggtctagatttgctctcagaagaaacgcgccccgctgagctgctctgggggctgcccctcccgtctccccattcctttctccgggccggggagggcaggggaggcagccactgagccgatgtcgctggggacccgcaccaggcaccacagccaggctccagagcggagtcccataggtgcgctcccagcccccgtgttgcgtctggaacgcagtgggagtgggcccggatcaccttccaatgacacccgcatatactctgcaaactgtgcaaaagcccttgaaaagtccagagatgggacagaagcccccagcagaacccaggccggagccccgcgcacctcggataagggggtggcggaatgcacccacctggtccctgagggcagcacccttagattgcccaggctgccgcggaggaggacgatcgccgcgcgggctccgctctcgccgtctgggccaccggcgcgcacccctaggaacttctctggccgcgtgtagacgcggcgcgcggctgccccagtcccagggcggaaggagccggcgctgctcagcgcgcgcgggtacgcagcgggcaccgcgggacgcaggtgcccctggagccgcacgcggggcaggtacagaatccagtatgcagaggcagaggagagggaagagagcggtgcgaggagccccgggccgcgcgaccccgccttttcctcgccccaggagctcccaaagggagcaaaacgccccccacccccgcccaccgccgcgcctccgggccccctcgccgccggcacaccgcgctctgattggctggcgcgatgggtccctggcacgcgcctatggatgttgttataagaatcctcgcgtgccggccctcagctccaggaagtccgccacagccctccccagcgcagcgcgagcgcgggccagagcgcagcggccgcgggcactccagggaggcccgggggcgggcagcccggcggccgcctagctgcccccagccagggccccgggagggaggggctcggacgggccttagaaactcaccaagaactaacacgcgcagcccggcagtcccgctgcccactgcggcggcgagcatggacgcggtgttgctggagcacttccccgggggcctagacgcctttccttcttcgtacttcgacgaggacgacttcttcaccgaccagtcttcacgggaccccctggaggacggcgatgagctgctggcggacgagcaggccgaggtggagttccttagccaccagctccacgagtactgctaccgcgacggggcgtgcctgctgctgcagcccgcgcccccggccgccccgctagcgctcgccccgccgtcctcggggggcctcggtgagccagacgacggcggcggcggcggctactgctgcgagacgggggcgcccccaggcggcttcccctactcgcccggctcgccgccctcgtgcctggcctacccgtgcgccggggcggcagtactgtctcccggggcgcggctgcgcggcctgagcggagcggcggctgcggcggcgcggcgccggcggcgggtgcgctccgaggcggagctgcagcagctgcggcaggcggccaacgtgcgcgagcggcggcgcatgcagtccatcaacgacgccttcgaggggctgcgctcgcacatccccacgctgccctacgagaagcgcctctccaaggtggacacgctgcgcctggccatcggctacatcaacttcctcagcgagctcgtgcaggccgacctgcccttgcgcggcggtggcgcgggcggctgcggggggccgggcggcggcgggcgcctgggcggggacagcccgggcagccaggcccagaaggtcatcatctgccatcggggcacccgtaagtgcttccgcttcccagctcagggagaaggggtcgggcactcgaaggctccggaggggctgggggagctgactgccaagcagacagtcggaccgacggattgtcggtgggcacggaaaaacttgaatgcgagctcgcgtttctcgtttttttttttttttttatttttctgccacgttgaccgcggctctcaagggcgcgcgtccccgccagact

SEQ ID NO: 234638 - DNA, 670 bp, Homo sapiens
  chr10:23483901-23484571
  hyper
cctgaggcggggggcgtagggtagccccctagcgaaggggagaagagcgagggcgcggccgaggtcgcttagccagaaagcctgggagtccaggcttgggtttgtctcctttgtggccaagagcgcctcccgggctctcggggcgtcctcccctgcccgccagagccggggcgccggcactgggccctgaggcctggcgcgcgcgcagatggcgttggcgcgagcgcggactggagacgcgctcattgacgtggcaccgtagccccgtgcggcgcaggcctggcccaggcggggtgtggttccgtgggccgcagcggcctggtgggcgaaggtacaattgcggatagcctctaatactcacggccctgccgcaggacaatatgttggcagcatgctaattgctttaacctagtttcagacccaccgaggggttccccgcgcgccgcgggtgccatggacctcgtccaagagcaattaaagcgaggccgcgagcccgaccccgcagcgcggcctggccagacacgcggagattctgggtcgcaaggctcccgggagccccttggccgtggaccctctcaccccttttaagccttcgcgccctctccctccactcctcctaaaagaagatttcacactggagacagaatttcagaacgagagaaaataattc

SEQ ID NO: 234639 - DNA, 1656 bp, Homo sapiens
  chr10:23487783-23489439
  hyper
gcgggggaagggctcggctgtaatgaagcgcctctaaggcggaggtgctgccgtggaggctgaggcggcggcggagcgcgctgctgcgtttgtgcgcaagtgactctcctgtgccacacacaaaaggcctccctcttcccaccttctgccgcctttcagccctccggctcctgccgagcccgctcctgggactctgggggggatcctggctgcatccccagggcagcctgacctttgggacatccgccgctgccagggcaaacctcgccaaactttccccaaactccgcaggccggggagggaccctggccggaggcgcgcatgcgccccgcccgctgctccgcgttcccagggttccggagagccggggtggagtcggacgagtgtccccggaggcccgcctagcccttgctcccaggggcattcgggactcctgtgctgcctgtcttcgcttgaggctggaagtggctgcccgacgccttgctctccgcagttctgctatctttgcgcatggaagtctccaagaggggctccaggaagcagcgagcagggaggggagcgaacggccaaaaggagatccggggatgggaccccaggcttcttcggaggaggcccggggcaactacgccccgcggccgggagggaagccctcgggcggccgcctgtagagggccccgtggcccggggcgcaggttgtggcgagctggtttttgcctctgggccgaggcgccagcgctagcagcgacagcagcggggggcgcaggtttctagccagtccccactttcggacctctgggggtctgcccttgcttctcggggagtcttggcccttgactgatccccgcaacttaaggccaatcccatccctagctggccggcacctgttccaaacaacctgttgcgctgacatcgctttggagaggcgccggcgctttgctggtggaggcgggttgtgtggaggccccaagccttcaggaaatagtttagggttccgttgtggtgagaggcaccccctccccgcttcctgtggcatgtggggtgtttcacctctgcctgtgtcccaggaacccaaggcgtcctgggcacctctgcacctcgcccactctagggacttctcatgtagagctcggcagtttgggtggattagacaaagatgaggattagagacacaccgccggctaattaaatgggctcttctcctctcctcgtcccctccccgcaacccgcagccagataggactcttcggttccctacccccactcctaggccctatgtaagtgcggatggagaaagctagttacattagcccttctgtcttagaggtaccggcacctcggggcattctcgctcttaaagatgcgttttctgaattatttctagttttacaatttctcttcggtgactgcacaggatcccttctagctcttttcctgttggagtcgctggacgtctcccaaacagctagttagtcgcctatctctggagcgcaggccttcggaattggattcagggtatgagtctagctaggggatgtttctagaagttttataaaatccatttgggcaagcgttggcattcggattttaaaaatatagacgtgcactggcattgggcaactcaaaaaaaaatgtgtctcctggcgcttgtcagtgaca

SEQ ID NO: 234640 - DNA, 367 bp, Homo sapiens
  chr10:23489688-23490055
  hyper
agagttcttcttgcgtgcagcgctttcatccagggcttgaattgtgttgtcaaagtttagcagacaagaggagggggcatgagaacgggagggtgtcttgaaaagtcttggaaatcggtgtattttgcaggtgtagaagtgcctaataaccatggctagtgcgcgctccccaatggcgagggtatgacagggacagctggctcagttttcagtgtgaaaacaccccctcggtggaccaaacacaacgacactgacctttcttcggggggaaccagggatgtgcctttgactgaattagccataaagacgtcttgctatgacttttgttccccacgaaagcaaagaaatattgcgtttaatatgagaa

SEQ ID NO: 234641 - DNA, 239 bp, Homo sapiens
  chr10:23491090-23491329
  hyper
cctccaaactatttcgatacaatatgtttccatgatgcacttaatgtgctagggacatagaactcattacaacctagctagttctgcggacctctttgttccgcggcagaaagtcaaagaaaaaaggaaaagcgctgccagttgccagctttctgaaatgctaaagcatgcgtcatttttcaccaggtctcgtcttgatatcctcaaaagacaaactatgaaaccggcctcagcccttt

SEQ ID NO: 234642 - DNA, 230 bp, Homo sapiens
  chr10:23982372-23982602
  hyper
ggaagcaagacgctcgcagttaaaaaccgttgccactcgacggtggcaaaattgctggctgcactggagatcactgcagagcgctcctgatgcctcgatgctgacggcggatctggcgcgggctggggcgcattgcacattctgctccagccgggaggcggcgggcgggcaactccgggttggtcactcggcagccggcagaggtgcgcagaaggcgcacagaaccaggc

SEQ ID NO: 234643 - DNA, 585 bp, Homo sapiens
  chr10:23982857-23983442
  hyper
gcttggagttgtcacccctacgactgacctcagacccaggacccaagggcggggccctcttgcatctggaatccagcctcggccttgacccctttcgcttgttcggagtgctttcgcccagcttctggcggaggttcacgcagggaggggactcaggtggaaaaggctggcccctttgatctctttgcaggaacttagtagacaggggccccgggctggagatttgcttcgagtaggctagaggcgcccttggcgcaccgaagctggctgccttgctggaacctgccgcgggggtggaggttgaaaggactctgagctcttcttccccaagccgaactccctcctacaggagcgtggaaaccaactctcccacaccgtctatcccactcttcccccctaaacctctagcgcagctttttaaaggcatcctgtgcagcctccaactttggggaaagagaatgcccaactcccgctctccaactacccgtactgccttcttccttttcctgcggtcgcctccaaactctgcttccctggtatccccgccccgacctggaagcgagcgcccccggctgctcgcggcag

SEQ ID NO: 234644 - DNA, 254 bp, Homo sapiens
  chr10:23984282-23984536
  hyper
gagagcaagtgagcgtttcgagagagggcaaggacccccccaggagggccaggccgggaggggtcccggtgcggtgatggggtgccaaaaggagaagacccccaactgggaggagggactggagaggaaccggaccccggggatctcagaaagggaaggatgtggggagagtgaaggtggaggcagtcacacctatcctggtgaccttggcgtgcccccctggagtggcgagccaggggcttatataggtgcga

SEQ ID NO: 234645 - DNA, 189 bp, Homo sapiens
  chr10:24497858-24498047
  hyper
cgcctgaggacggacggacggacggacggacagacctagggacggagggccaggggcaggggagatccaagaggccccgcgctggaatgcagttttctcgggcgagggagactttgcaccggagtggaaaatagtttggggtggggtttcgcaccgtcccctcctccccagccccgggccccctcccag

SEQ ID NO: 234646 - DNA, 33 bp, Homo sapiens
  chr10:25011378-25011411
  hyper
aatctcgaaactgcccagcggttgcgtcaaaca

SEQ ID NO: 234647 - DNA, 239 bp, Homo sapiens
  chr10:25011795-25012034
  hyper
ggtgggacgccggcgccgctcccgctccagggcatgattctggagctacacccgagcaactctgaagtcgcggcttttcccccaactaccactcgacacggcttcccttcccctgtggccacctagggggaaaaaacgagaaaaagcaaaccaccacccacctccccacgattcccccgccccttcctgaggcgggtcggggacctcgagctcccgaggagagcggccccaatatggac

SEQ ID NO: 234648 - DNA, 744 bp, Homo sapiens
  chr10:25241260-25242004
  hyper
gggactcagagtttcgtcagattgggggcggggagaggaggcccgggtccgaggatggaagcgatccccgccgggagggagaacaaagcggtggccctctctctcccccgacgcacggcaagcatttaatctacaagcagggtgccagggagggaggggagcgggccgagccccaaaatagggagtttgcatttaccacgacgcctcgcccgtagtctggcgcctcctcgctgctcccggccatgtttctcccggggaacgcgggaagggaagacggcgcgggaaggagcagggagggcgaaggctgcgtgggggatgggacgtggggatggggacggggacggggacggggacggggacggggacgggtccgccccgccccgggcccgccggcgggaagcagcggcctgacgcggatccatggccccggcgctgcgccccctcccctggctaggccgcgggggcgcggggagcagctgccaagccgctaccgctccccctgagcgcgggccccggacgcgtcccttgcggccgccgctgtcgccgccgccccctgccggatggtcgcgtgcagcccccggccccgccgccaagccccgcggggactctggagcaggaagcccgcggcaggaagagaacgtgtcccccaggcccctgattcccagatccaccgtcccagccctcgggctaacaatctccttgactcctccctgccagatttcatgcacgcgattgtcccaagca

SEQ ID NO: 234649 - DNA, 49 bp, Homo sapiens
  chr10:25305303-25305352
  hyper
aaatcctagtagagacggcaaagcgcagctggtgcgcaggcgtcaccca

SEQ ID NO: 234650 - DNA, 1461 bp, Homo sapiens
  chr10:25464224-25465685
  hyper
actgggtgccatctggagaagggggaagactcctcgaaaaagtctgactgttgagaaactgacgatccaaatttaaaaagtgattcccccccctcccgttccctcctcttctctctgggaggcagatgggagccatggcttaccccttactcctctgcctcctgcttgctcagctgggattgggagctgttggcgccagccgcgacccccaaggacggccggattcccctcgagagaggaccccgaaggggaagccgcacgcccagcagccgggtcgagcctctgcctcggactcctcggctccctggagccgctccaccgatggcaccatcttggcgcagaaactcgccgaggaggtgcccatggacgtggcctcttacctctacaccggggactcccaccagctgaagcgagccaactgctccggccgctacgagttggcgggcctgccggggaagtggccagccctggccagcgcgcacccctccttgcaccgggcgctggacacactgacacacgccaccaacttcctcaacgtgatgctgcagagcaataagtcgcgggagcagaacttgcaggacgacctggattggtaccaggcgctggtgtggagccttctggagggcgagcccagcatctcccgggcggccatcaccttcagcaccgattcgctgtccgcaccggccccacaggtcttcctccaggccacgcgcgaggagagccgcatcctgctccaagacctgtcctcctccgcaccccacctggccaacgccactctggagaccgagtggttccacggcctccggcgcaagtggaggccccacttacaccgccgcggccccaatcaggggccccggggcctgggccacagctggcggcgcaaggacgggctcggcggggacaagagccacttcaagtggtctccgccttatctggagtgcgagaacgggagttacaagcccgggtggctggttactctttcctctgccatctacgggttgcagcctaacctggtcccggaattcaggtagggagggccggggggcaggggggaaggcaaaagcgaagctttccttccggtcttgtgggtgggtgcacgtgtgaggaaggaacccttggctgtgacgcgaacgcttctcaccctcagagtagagacccgggctgagggacaccccacgcgggcgcgggtgcttgggggcaagaagcgccccacgcccgtcagcttccggcgctcggcgaaagccattcattctctcggaccagtttccccgcactgggcgagggacaggcagcccttggcaggacggagacacccccgctgctctgtgcttccctccaattgtccggagagcagggaggggcgttccccaccggggggcgatgcgacaacttggcgagcgccgggtgtgtccgcggagtggcaagcctcagatgagaggcgaaaagggagcaggaggaaca

SEQ ID NO: 234651 - DNA, 253 bp, Homo sapiens
  chr10:26055806-26056059
  hyper
cccaggatgccattatcagccgccaacagatggagcctatctgcgcgctgtcaatcatcccccacctgtggatcgcgcagcccagccaaaaaattaattgcttagaaatataaaatcggtggactcagatcggaaaggattaggagaaaaaaggttaagcgaggggaagaagccgtgctgtgccagagaaccttatcaacgtcggcctatctaagagtctgacgtactcagcgtttgatttggttttcaaata

SEQ ID NO: 234652 - DNA, 1154 bp, Homo sapiens
  chr10:26222950-26224104
  hyper
cggagtcccgggaagcccctcggcagccagccaagggccctgcgaggatgtggatggcgcggatggcgcggcctccacctgcgggcagtggagagagcggcgagaggaagaatattccccgcgagccgggataaggggccccttcggctcggttgacccaggtcagatcctcccgccgaccttcggcccgccctctacaggcggcccagttcttcccctgctcggctgcccctgcccgcccctcgagggagcgcccgtagccagcgcccccgtaaagaaataaggaggcgcccggcttcccgcccaggtacgtgtcgggacagcgcaggggactggcttggggcggcggtgggtagcggcgcccgcgcggcgctggaaacggccccgcttccttggaccccggggcttgcagggcgggcccggggctctctgagcgcgaggctgccgcgaccgcccgcccgcccaggtcagatccggaggacctgtgtgtttgtcggggcctggggtgagagaggggactcgaggggagaagtagagcgggaaaccaagagggggaatgtgaggcttgaacgagctggatgggagagctcgaggggaggagagggatgaacttgagggggaaacgggggcgggggtgaactcgagggggagccaggaggagggaacgggaagggtgaacctgaggggtggacttgagggaagatcttgtgggtgaacccgaggagggaacgcgaggggatagtgaggggggatctcgaggagggaacgtgaggaatgaacttgaggagggaacgggaggggtgaacgtgaagtggaaacaggaggagggaacgggaagggtggcgtaaggggtgaaggaagatctttaggggtgaacttgggaaggaaacgtaaggggaggacctcgaagagtaacgaggggcgagaactgagggggccctgcagggagactggagggaggaggcgccgagtctggcgggtgtcgcctcggagacctgtggcgcgcgcgggctttgcggcgccgcccacaggtggcgctgggtcggcccgtccctgagggaactgcgttccgggtgatttctcagaacaagcaggtcggtggagctgggctccctgcaaccccaaatgcatccgtaaaggagttttaattttaa

SEQ ID NO: 234653 - DNA, 480 bp, Homo sapiens
  chr10:26500689-26501169
  hyper
ggacccgcctaactcggggtaggtggggacgcgctgctcactgtggtgaggttgacacttgggccctgggtttcacttgcaggtgctgggcggcggagagccccgagaaggaggaggagagagagccagcagccaacccctacgacttcaggaggctcctgcgcaaaacctcccagcgccggcgcctcgtccagcagtcctaaccgttcaacgaggcagtcaccgccgtcggaaggcgctggagcctgcggggcagcaggggccaagcaggcactctggggctggcaccagcaggcactgaagctgcggccctgatctccgcagaggctgcctgctgcgctcggccctcaagtgcccgggccggccttcgtgctccgaaacaagagacctgggagccctcgggaaacctcccccgacgctctctctcggaactcccgcaccctcctttctcaccagcccgccagttgtggcaaccctgtc

SEQ ID NO: 234654 - DNA, 168 bp, Homo sapiens
  chr10:26501560-26501728
  hyper
ggtgccttcatcagcgaactcccagcaccacccagccacttcagacaaacacaatctaagctaaaaccccttgccacacaaacgcagaggcctccaatgtctaaatccccaacacaccacacgtgctcgcctgcacgatgccttcccaatctgcgtgactgtctttgg

SEQ ID NO: 234655 - DNA, 1324 bp, Homo sapiens
  chr10:26503616-26504940
  hyper
agtctttaggtttccggagttgttattgtggtgacctagagtgtcagagccaggagagcaagaaagaggagccaaactgagccctgagttttcgaccacccgggctcccacagcctggaacagacttcacctagcacgctcagtgccagccttcggcaggacgctatcaacgcccgactggtttcctgctctcatcctggcgcctgggcccagttgccatagtgtggatcccatgactcctcagggaacccctggactcaggcacgcgagaagaagacagcgctttgtggagagaattgaccagggacagttatgctcgagcacacaggacttgggcctgtatgcgtccagcatgggccccaggatgtcccttctaagcgagggtcgaggggtgctcgcccagacgggatccccgggtctctgctttgttagcagctttggtggctggttcaggaggtcagagaaataaaacgacttgtgaacacaatggaaatgacaggcgctctggccaggcgcggggaaggcagccgcctcgggaagccgacctcagccctttcctctctctccctccctccgtctcccccagagccccggagctccgaggtgcacttgaagttcatctccactgccaggagaacgcagcgcaaactgtcaaagggctcccaatccttagggcgtcctccctgtctgcaatagctttttgtagaaaggaaatcatcagaacgattctgactttctcctcctttctttattagaaaaagagaaaccgcctcctaatacgcctcagagagaaccaatctcgcgcttccgggtcacccgctaccgcgaagattctctgggggcgagggggggcattggtttgaagccccttaaaacgagggccctgcaggcgatgccttctttcctactcggatttgtaaagccgagattgcttagttggaaaccctgttctcccctcccaggcgcacacagatcccccttacacgcaagcagcgggcgcttccacgcctccgcgggccaaggtcaccaaatgccctgattccatcccccacccgccatcaatcctgccgactctggccgctctgcctcattctcttccaagaagtttccattcgttttatttttttttccccagcccgaggtcctcagtagactccagcgtggattttaattgcctcaatcagcagtcattctccccagccgtcactcagagcctggacggtgggtcccgcgatctagcccttggctacgcaggaacggtgcgcccccgggtacggcgcggttcagcaggcaggcgtcaggttctaccaaggcgctgaaatga

SEQ ID NO: 234656 - DNA, 110 bp, Homo sapiens
  chr10:26505300-26505410
  hyper
actctgactccagctggcgtgcatggtctgcctcgcatcctcacgactcagctccctccctctctcgtgtttttttcctccgccgccccctcattcatccccactgggct

SEQ ID NO: 234657 - DNA, 1445 bp, Homo sapiens
  chr10:26505950-26507395
  hyper
aagtccttgacggcccaagagctcaagacctctacagcctcttgtaccctgggaagacgcccaaatagtctcaggcccgttccacagaaggttggaagagccccccaaagaccgcggtgtctcggggacatggaattccgtggtcctggggcgctgctaagatccgggtgtctggaccctggggtgggacggagtgaccgtgaagatagaaaaaaaaaatgggaaaggtgagagatttctttatctagaaagacagtctgcgaaaaaatggatagcttcagtgtttaggaaaactcgtccaaggtaggcagggagaggaatttgcctgagccgattggcacctggaagggcagcggtgtgggcttctcctcgggaaacagataaaggaaatgagggctggcccgggccgccagcctcccgcttgccttctgcacctgccggcctcaccgagtcctgagcggcccccaggaggaaggcggcccctcctaggaccccggactgattgattttcacatagaacgaaatttcacacgtccgtctgttgttctctttctgcctcgctgtctgcctgcctattcttccttgcagcgcgagcctggtgccaagtggctcagaagttcacgggcggcatcggaaacaaactgtgcggtgagtgcccagggaccggggcggccaaggtcggcccgcggggtccaagcagtcttctcacctccgcatcccagtcagcggagtcggggtttcctggctgcgggtaggcgggagcgagggagccgggcccggcggaggattgacgaggcccgcgttcggtgtccttacccagccctgctctacggagacgccgagaagccggcggagagcggcgggagccaacccccgcgggccgccgcccggaaggccgcctgcgcctgcgaccagaagccctgcagctgctccaaagtggatgtcaactacgcgtttctccatgcaacaggtaaagactcagcggggagccccggggcgcccctgcccctctctctgccccgcccaccgcggccggtgcgggtccggcgctgagagccggacaggggcgtcgaggtggcagcggaggcgggacctgccagaatcttcagataaaagcgagaaatgcgggacctgcccgctgggtccaagcccccgaacctggcctcggagctccaagagggctctgaggccgtggcgctcttcccccagcgcggcccttgggatggcgggtggccgacgatccaggcgctcgtgcgctcactgaatcgatgacggctggcttccctaggccgctggggcctcgggtgggactcagtttccaaataccgtgcccgagaattcagaattgcattttttttaggtctttagatcacgagagtgatttgtagctgcaattgcacaagagaacgattccattcacatgaaacccgcgcgccgagttttac

SEQ ID NO: 234658 - DNA, 190 bp, Homo sapiens
  chr10:26680814-26681004
  hyper
cgccccccgagctccgcggcactggagtccccgggcggtgccatgcgtccctggagcgcacgacactttcgggccctggggaccccgggaggccgggatctggcctggggtggagggcgaggccagtcggcccccacctgctcaccgggcagactgtacccgggcaacggctccccgcagctccggcttt

SEQ ID NO: 234659 - DNA, 547 bp, Homo sapiens
  chr10:26726984-26727531
  hyper
gccggccaactgagcgtggttaaacgtggggagggaggagggtgaggttaccaacctgatggttgagaaagggcctccgcccagcgcgcccttcctccacccccacccgagagacagctgaactccggccgggacgcgcgtgttgccagtccagccctgcaccgcgtcccctgagggcgggctgcaggcggccgggaagccttgcacaaccggcccaaaagaggaagcccagaaagtgctgaagtaaacactttgggagaccgttgcaacataaagcggcctctcagtctttggtggaaccatcactaggccccaatcccttagtccctcttgcgtcgaggctgcaaaatggttccattcgccaggagacgctcctgagagaagggcgcgcgcggcacaggtagggggaggcgcaacgtttcccagaattaaaataaaataaaataaaataaaataaaaatcccttcaaggtggttgtgtagtaggggtgggatgggggagagaaaatcaggcgcagactcgatgagttggagaaagcagcccctaa

SEQ ID NO: 234660 - DNA, 63 bp, Homo sapiens
  chr10:26727831-26727894
  hyper
cctcggggctgtcaggaacccgtttgtcaagcccgtcgggtccgacgccgggggcagctccag

SEQ ID NO: 234661 - DNA, 113 bp, Homo sapiens
  chr10:26728074-26728187
  hyper
aaattgctgcaaggtcaaacggggaactgctatgaacccttgcacgtccagcaggtcagcaggtcagcaggtcagcaggtccgggagccccagtctcccggaacctggaggga

SEQ ID NO: 234662 - DNA, 239 bp, Homo sapiens
  chr10:26986366-26986605
  hyper
ccggggaaggttacgctcggggtccccagaccaggtctccgcacgcccctgccccgtcgcctcccgggagcggctgcagtccccgttggctgcagacgggcagacacccgaagtgtccgcgccggcagccggaccgcaagcgaggaagagcgaaccgcgctcccgggcctggccgaagcgcttcctgtgccaggtttccggctccgggtcccgggaggaggatcgcgggccagaggcgg

SEQ ID NO: 234663 - DNA, 241 bp, Homo sapiens
  chr10:27444473-27444714
  hyper
ccattagccggggcgccttcgggaaagtgtatctggggcagaaaggcggcaaattgtatgcagtaaaggtaggaagtcaacgagtagcaaggaaggggttaggcccttcggccctccttcctgccccaccggcttgggcaggccccggggttgctggagcgaggagtctgggtggcctggcttgctgaagcctccagagccctgcgagctgacttctttttggggcgacatcagcggtcgg

SEQ ID NO: 234664 - DNA, 162 bp, Homo sapiens
  chr10:27529644-27529806
  hyper
gcatcggtggccgcggagccgctctcccaccctggggaccctggcggagcagccacaccccccattccgccggagtccgtctgtcagtccgtgccctccccacagccccgccccagagtcaccggaggacccactggcgccgccgccgccgcagcagcagtg

SEQ ID NO: 234665 - DNA, 33 bp, Homo sapiens
  chr10:28030466-28030499
  hyper
gcgacgcgtttgcccgcccggacgctccacgcc

SEQ ID NO: 234666 - DNA, 2734 bp, Homo sapiens
  chr10:28030732-28033466
  hyper
gcgtatctgggcagcggggctaactgctacccttccctcacccgctggcgccgcaccctcgagtggccctggcctggcaggcctggcagggtatgcggctggctctcgaaacttccctcggggatctcttgtctgctcccagaggctttccgtcgcttgtggtcaggggaaaggtcgccgactggacatagggaataaagcaaaggagcattgccgccccggctctctttaagctatttcctttgatcttttaggaaaagggggaaactttctaaaggagttggtggtttgtggaggaaagctgcagaacccaaaaacaccgtcgggccgtttcccgactaagggagggttaaaagtacggcaagctctgtcccatcatgtaaggtaaaaagacctcaggaaaagcacattcaaagggggaggaggcagaggcagccaggagcctggagcgtggcctggggcgctgcgctccctcacgggtccgggaggtgtcgcgcgcggccgccagcgagcccagccgctccccgaggcttgcgcgcctgcgccggagcctcctgggtttctgcctctttaaacactttgaaatgcaattccacccgaaacgactggtagtaacattttgacgaaaccgaatctctgttttactaagcagcgacgccgcagaacaagcagctgatgcaatcgttcaggtggaggcggctaggacggccgcccctccccggcggggcgcccggggagccgccggatcgggccaggcagagcctgccctccactcaccggcagtctgagcagctggcccacccgcaagctaccgccccccccagcatacccctcaccccgctaaactcaaacccggccccgcaggcccggggcctccccctccgggttcgccgcgggcccagccgagccgcgctcacgcccgggactccctggcgggaggcgaccttcccgactccttgggccaggcgagccgcggggctctggcgaggggctcgagtgaccgaagagaagtccgcggagcctgagcctggactccccgactgctcggcttcgcctgtttctctgcaccgagctcagtcctttttcctcgccctcagccgcgcaccggcacccacagtccggagaggggcaaataacccccaactccgaggtccaggcagcggagggccgaggggcagctcctggcgcccttagtctccaccaagctctttggagctgccccgacgaattgatccctcatgttttaagataggagccccttaacatgagaatgcgcgagccctggaggggcagacctgcactcccagggaactccgggccctttcccgtccacccgcccgcgttgccacgggaccccgtcacagctcaccacccccacccctccgggccgcaggcgggcagggcccccaggggagtgcgcatacccggtcctccggtgtctcaggccgaggttgtccttgaggggcgggccgtcgggaatgcccacctcggggcgggcgtgaggactgtccaggacaccgctgtagggccggccaccccgctcccgctccgaggcgcctccgtcctcaaacagcaccgcaccgctgagcttgttgaagacgatggtgttcatggtgtcggttggtagggacgcgcggcgcggccgcagagcctcggggctgggccgccgggagctccgcagcggggctcggcttctaggagaggaaggtgcatctcgttacttactggctgagagtgctcagacccctgcaggttcagggccttgaacttggccgggtcgccgggctgcggagccgaggggaggagcggcgccgccgcaactggcagggaccctgcggctctccccagttggctacacgcccccgcccctgcaggttccccggacaggtacctgccctcttccttgcctgggcgatcgatccccccaatcccttcactccccagaactacaaccgggaatcattcacccgcagaggcaaaggaaacgaattcccaaacgagcctctgggtttcagtttgaatctgggagaggcatactccggactgcggagcgcgaccggcgtgaggccgcgcgtggttcttcaatcacagcagaagactaaagcctctaggaaccccaactcggggcgtcaggaggggttggatggaagggaagatttggggtaatgtgccaaccgtatccacaagaccccccagctcatgagtcccaggccataccgggatttgggggattttcgtgttttctagatcgtggatggtttggttgaaacccccgcatcttctgtccgccaaggtcccccggggtgaggttgggttcaaggacaggaaaaagttaagtggcgtcaggacgaaagcaccacttctcccccttctctcccagaatcttcctatcatcccccaacgcgccccgggaagtgcatggtcctaaggtccaaggcgccaggacccaggtccccagagccctcaatcagtgccattctcttccgcagcgcgggtgtcagccgcgagctcgtagcccctcgacacccgcctctctctggggtctccggggaccctttcagaggctgtaaaggtgtcagaagcccaaggcaggaggcagcttggtcggcgcacctcccgggccactgctgccactgtcggggagagccagcagctcacctctggggtcgcggaggccctgagcctctgcctgccgcgcaccggcgtcaggagcaagtccgcgcggccgcggagc

SEQ ID NO: 234667 - DNA, 61 bp, Homo sapiens
  chr10:28033689-28033750
  hyper
gcgcccacactcgccaacgcccccgccccgcccttcggccaccgcagcagaggccacgcgt

SEQ ID NO: 234668 - DNA, 78 bp, Homo sapiens
  chr10:28035275-28035353
  hyper
gagcgtattgcgggaagtgctagtgcccaggagcctcttttctgatgtcactgggcttctggggtcctagttgtctca

SEQ ID NO: 234669 - DNA, 987 bp, Homo sapiens
  chr10:28287169-28288156
  hyper
gaccgacagaaaatcgaacttttagacatgacatgaacagggccctaagtaaaaccaaagctaagcctagtgtgggatgacggcccccaccagactcgttacaagaagggggcgtcagagctgagaccctaagtttccaggaatggattcggtaaggggacgaggagggaagggacggcgaaaaccacgctgggagcgggaggcagagctgcaaagggcggaggagaaagacgggctgggggaaggagaggcagggaagcggcgggagaagtggagagcggatccgggaggtgatggggccgaggtagtgcagagaggggcgcagggactgaggagcagacggtccccaacctagggccgaggcagggtctcgcggggaggaaggagtgagatggggctgggagagagaagggaagggggcgggtcttggtccccgggagggaaaggggagcaggcgagagcggcagcggcggggccagagagccgcctctgtttcccgatccacgcgggcggctgcagaacccctgcgggggtgagcgtggagacccccagccgcactcacctgcagcaccctgccccccgcagtcggcgcccgcctgttgctaggacgcgggtcaacactgcgcgccctgcggccgcgcacgccggcgcccttgtgggaggcctacagggcccgtgccctcccccgggcgccgccgccgccgccttccgctcccagcctcacccggccgcgaccgcagcccagtccgttaccctggtctcgggacctccgcgcatccaagattcccgcggacccgttgcaccgtatgcccgcgccagagacgctctgcgcccgcgctgggttccacccgccccggccacctgctgctttccgctcggcccctcccgggaaacacttttattcaactttgcatctccctttctcaaacacttttatgcaactcccgagtgtgcaccctaactcactccacgcggtgggaaaggttg

SEQ ID NO: 234670 - DNA, 160 bp, Homo sapiens
  chr10:28591947-28592107
  hyper
cccagtgggagcccggcccccgcctccagcccggctagtaaccaacacggcccccaccctcggaggggcgggaccgcggttggaggggcggggcggggctgcaccgcccgcgggtaagaggggcctgctgataggctgcgaaggcgataggcgtctcaga

SEQ ID NO: 234671 - DNA, 166 bp, Homo sapiens
  chr10:28821230-28821396
  hyper
gtgcacgcatctccgctgagggccgccctgacgcacggccttctgccttgaacacagaacccctcagcccttcctattagccgtttctggccgggactgcacgcgctccttcctgcctcggggcgcagggtgagacttacgtctaaagggcgcccggcgagctcgc

SEQ ID NO: 234672 - DNA, 728 bp, Homo sapiens
  chr10:28957388-28958116
  hyper
aaaaccttttcctatcctgtcggccacattcacgaactcccgggctcccacgcggtttatttttaagacgctggtttaaatttctcgagttacggggggaaggggttgcggtgggagcgagactgagaaccacagcgcgaacaggggcgcattggtaccaggatcggtacagggatgtctccagttcctatagactctagcctcggggggagtctgtccagactacaagtgtctgtgcccctgttttattttgagacaagtcggggtcgctcaatgagtcagcacagaggaggcagtgggggagacagacagcggctgggacgcgcgggactggggcgcgccttgcgcgctgggcaccggagctgcgcacgggcggcccggggcgggggccccagagagcccgggagggcgtggactcggccggggaggggcgggctcgggcgcgtctgggttggagctggatgatgtaaaacagcgcggagctccttggcgcctcggcaccattaccttcaattatcataattggtgcctctctccagcgtttgcatttcccccgagggatctctcactagttcccgttccttctcctcgccctctctcgctcactcgctctcggctcccgatcgctctcccagcctcgccctcccctcagtatcgatctttttggatgttctccctgcctaaaacggatgctaatatctcttcgattgaaccgaaatggcgctgcg

SEQ ID NO: 234673 - DNA, 305 bp, Homo sapiens
  chr10:28965844-28966149
  hyper
attgatcccatggcgggcagctcgaggcggacacgctgagggggtggggggcgaaggctgaatgcagaccccagcgctgggccgcctcccccgggctcccacccgaaccctcctccgccacctgcacaggccggggcattgtcactcgcccctgggggttccagaaaacgcagtgcggccggggaggacgaccacacggaccccctgcgtgtttcggggggcacccaaaagaagccccgcgctggggaacgctgaccacccgaggctgagccgtcagggtctcggaggcgggttcccgagccggt

SEQ ID NO: 234674 - DNA, 51 bp, Homo sapiens
  chr10:28966786-28966837
  hyper
ccggaagccggcgggggcgccgcggccgtgcggggcgtcaatggatcgcca

SEQ ID NO: 234675 - DNA, 308 bp, Homo sapiens; identical to SEQ ID NO: 202030
  chr10:28968985-28969293
  hyper

SEQ ID NO: 234676 - DNA, 590 bp, Homo sapiens
  chr10:29010987-29011577
  hyper
ggctgtctgtttgcgtggggctgtctccctgtaatgagaaccaccgctgagagctgtttagacaaacgggctcagcgctccggagccgcgcgggcctccaaatgcaagggtttgttctgctggggcagcgtctgtcgcgaaagcagcggcggggaggaagcgcagagctgtgttttgaattaatgggttcagcttcatgttgagcacaagtgggaggctattttagagaaaccttcccaggccagccgtcactgatgtggcaaactcagcctctgggcagaccggctggaaatagaaacgtctccgcttcacgatggcgcacgcccggacgtccccttccgagagcgggtcccctttgtcccccgaggccccgccgccctgtgtcacgtccccacctcgctctgggtccactgatctcttgatgcacgcgtcccatcagcagcagccgaaagagggtgctcgggcgggagtgaaatccctgtgaaatgtgatcaagaacacaaaatgctgaggcagctccagctaacatcagcgctcagtctccccgcccaggtgggatcctccaagcgcctcaacgcaccgcccatccc

SEQ ID NO: 234677 - DNA, 194 bp, Homo sapiens
  chr10:30023989-30024183
  hyper
tgtaatgcaattaccgccttctggagctccactcggggtgccagggactgctggctgtcacccggggactaaaccactcccttcggggagcccgcacgcgcgcagaaacgtgggcagctggggtggcctggcgcaccacgcatcgggttcaaacccgcgcgggccctgcggaggcgccggtctgggaccccggg

SEQ ID NO: 234678 - DNA, 164 bp, Homo sapiens
  chr10:30024783-30024947
  hyper
gttcccaccgcgcggggagcgggtccccgctcgggatgattcacttcgctccttacctggaggctcgcgcgtccccaccccttgcgacccgcgcggcggccgggagctggcgccctctgctgggccaccaggcgggagcaccctcggactgggcaaggatcggg

SEQ ID NO: 234679 - DNA, 1030 bp, Homo sapiens
  chr10:30025127-30026157
  hyper
ccacggccagcgggtccagccgcgtcctcggaggtggcccaaggaaaccgcgatgaatcggcataagcacgtcctatcttaaaacaccggaaaggcagattttactttgtttggaaactaagtttgtgtcctgtgtctcagtagctctcagggtggtggcagtcacgcccccccggtcccagggctgggaagatgcttgggctagcccccgctgcagccccggagatgcggggctttaggatcccaggggctggaggccagggccgccctatcgctctcccggccgggggtgtggctgtccaactcgctctgtcgcccgagtgaactcttccagcaggttggcctctcaggctgtcccctgaggacctgagcgaaactctggaggggaccaggaagaagggagagaggacatctccgagaccttcccgggggtgcgcccacactcacgcgcccacactcgcgtccccaccttcccccccgtctcacctccgcgcgctcctgcagagcccgactgcgcccgccctcctcgcccacctgccgggcccgggccgggggtgcacactagcgcggggccttggtggtgcggcaccgtcccctgcccaagctggctctcgaggaggtgtgggccccgggaaagtcggccagggccactgtcgccgtcgccgccggagcagagccagtggcgagctcgtcagggcggaccgggcgcctccgtccccgagagccggcgcgcgagtcccggccagcgggcaggcgcccggtattaattgtagggcccccgggtgtcggccgccaggcgctctgagtggctcggaccgcgcgccaggccggcggggccggcgccacccaccccctcggcgcgcgcccggcccagggacgcgcccacgcgcacgcgcccagcggctcagggctccctggctctcaccggctctgctgcccggaggcagccgcttaccctggagccctgagaggcccctttgagtctccagaccttccagggataaataaaatctggcgacctgtgccaacg

SEQ ID NO: 234680 - DNA, 816 bp, Homo sapiens
  chr10:30347908-30348724
  hyper
gggaactgggacctcggggacccagcgcggcggctgtcagctctggggtgaggtccgcgagatctgggcgcgagggcgcgggaggggttggtggacacaggctggggagggcgacttcgagaggggagtgagtgaccccggccccccaggccctccgcgcgccgaggggcgacgcgagcgctaacgccagccgcggcccgcggtgcccgccccgggacccccgcgctccgagcggggcacctgaggggaggggacgcccctcccgggctggcaggcgccctccaccccgaggctgccgggctaggcaccgcgcggggggcccaggcggggctgcgactgggggtgcagacatcccccaccgccagggtggctggaaccggagcgacgtcccagctggagaagttggggggagtgcgggaggctgcgggtgaggcccgcgaagcgccgtgggagcggccctaatggacggtgggagccaggagggttagacgccgggacttaccgagcggctccctcatgccgcctcgcgccgccaccgccgccgctccggccggccggggaccagcgcgacccgccccgcctgcagccgccgaggccgagcatgcccggagaaccgccgtccgccccgcccaccgcccgggcccgccccgcccaccgcccggggctgcctcctctgcgctgagggcggtatccaggccacgagcttcctaggcttttggggtccgcctgcgtgggtcgcgcagaaggcacaagtgagctgaccaccattccctcttttcttgtcacttgggtttgggccacgtcaaccctgtggaa

SEQ ID NO: 234681 - DNA, 168 bp, Homo sapiens
  chr10:30509063-30509231
  hyper
acaaaagcaatgggcgctcttcccgggcagccccatgttccagggagccaaagcttgcagcgtgagagggtctctttttggaacaaaggtcggtgagtgaagtcaagtccaggcttggttttgagagatcacatgtcagttgcacaaacaggacgagaaggcagcaga

SEQ ID NO: 234682 - DNA, 70 bp, Homo sapiens
  chr10:30722681-30722751
  hyper
cttccctggggaccgggaagggcacaaccacctcttgcaactccgccactaagacgccttgggtcaccag

SEQ ID NO: 234683 - DNA, 126 bp, Homo sapiens
  chr10:30723838-30723964
  hyper
tcaagtttgtaacccggactctatcccatgactaaagaggtcatagcagaacacgaaggctgggcttttggtctaagaaagaatactaggagaaaaaaaaagttattttcacggaagttgttttcg

SEQ ID NO: 234684 - DNA, 541 bp, Homo sapiens
  chr10:31072973-31073514
  hyper
gctattgcccacggcggtctagttggcctccgaactgggggtggagggtgggaagtggttagaaccatccccagcaaagagagaagagagtgctgacttcaactcagtggcaaccagggggcatagatgaaaaaaacaaattgcaaattcttccacctcggcctcaatctctgtgataaaaccctgcggttctctgatgatttctggggtgatggggtggggctgggttaagaagagacttatactgtgattcctgggttgggggacggcgctacgactctaaggttttaagcagtgatcccagcaggttaactggggcagtaagtgctgtctttctcggggagggagggagttcagctccaaaggcggcctggttcgcaggctcctttccctaagatcctttagaaatcgttcccatcccagaaaggaagctggggcgcagctgtgagcgcccccctctccccccgcctgcccccaccccctctgagctccccgctttgctctgaaaaaaaccaaaagcatctctcgatgctggggtttc

SEQ ID NO: 234685 - DNA, 351 bp, Homo sapiens
  chr10:31073815-31074166
  hyper
ttcagaataaatccccacttcggatcccgccgcggcgaagctgcgctgggccgcccgcacacacctgcgggtccccgagctcgcccgggcgcccccgccaccgtccccagagcgcgcagggagcggggcgcgcgatcacaccctccgcgctgcgcccgaccactcgggctttcaattaggagccaagctgagaaaagtaggcttttctttatgcacgcctcgccgaggtcaggttacgacctctcaaccgtcttcaatcggcggtggcatccatattcatgaaggctaattaactctgaaaggctcggcggggctggccctccccgggccgcccagcgccgccccccgcgg

SEQ ID NO: 234686 - DNA, 597 bp, Homo sapiens
  chr10:31422648-31423245
  hyper
ggggagaagggcctcgtgggccagcgcagcttgctcctctgcagacccagaagcatttgtgcgtcccgggcgtggcaggcccggcgcccactccgccctcccgcccctcccccgcgccacgtcacccgggtcacgtgagtgaccaggctcctcaccccaacccccctccctactcccgccagactcagctgctctccccgggagctggggagccgggggcgggcagccgcgtctgtcctgcccctcctcgccccctcccccgcagcctgaggagggcgttaagcaaggggcttcggagaaattagaaccagcgttctaaattaaggggagcagatgtccttgttttgctcgcgaggcctgggtggcctgctgttcagacagaaatcgttgaggcgctgaccttccgggactgctgtcaatctccgcgtgcagatggccagcccggagcctcgccgctcccctgcattggaaatgcggcagccgggggtgccggcagcttgagagaaaagtctgcgtggagggggggtgggggggatgaggggaggcccggggagacagagggcaggagaaaaaggccggccccgctcacaatggagc

SEQ ID NO: 234687 - DNA, 185 bp, Homo sapiens; identical to SEQ ID NO: 202035
  chr10:31607136-31607321
  hyper

SEQ ID NO: 234688 - DNA, 99 bp, Homo sapiens
  chr10:32049025-32049124
  hyper
tggcaaatcatgccaagcttcggggtggagctgagggggccctgactccgcctcgcagcccgggcttcggggtggggcgcctaattagtgtttgcgcat

SEQ ID NO: 234689 - DNA, 69 bp, Homo sapiens; identical to SEQ ID NO: 202038
  chr10:32217899-32217968
  hyper

SEQ ID NO: 234690 - DNA, 106 bp, Homo sapiens
  chr10:32345462-32345568
  hyper
accactcctggcccggggtcgcagattcaaattttactgcactgcccctgtcgcagaagttcctggggaggcagggcggcagctcccacccgccatcccaagccgc

SEQ ID NO: 234691 - DNA, 3112 bp, Homo sapiens
  chr10:33623014-33626126
  hyper
cagcccaaggatcaacgtcaggagggagcccaaagacctgaaatcctcctgctctaaaccgcctgatctcatttcttcttctctcctcccagataaaagtttccttcgcccgggagtcggttgttcccggctgatcccgggaagccccgcctgagccccggtccggggcgggcagctgggagccggggcgccgctgtcacccgcgcctctgcctgtcacttaccgttgcgaaaagcgccggccggggcgaggacgagggcgagcacggcgcagaggagcggcagccccctctccattctcccttctccgggtccgcaggcagacgcgggagaacgaggacgtggggggaaatgcagcaaagaggagaatctaagcgatccgaagagccccaactccgcctagagctgtacaatcctcagcccgtcttggagaaaagaaagcagcgaggcaatgcctggatccgagaggaacgcttctctttttgtgtctcaagtcgcctgcatcctgtcatttagctccggcttcctctcccttttcccacacttgttcctcttccaggagccactgcccgggccatgtctcaaaaaaaaaaaaaaaaaaaaaaaaggccgggggggggctgtgggtgggagggggaggagggaggtagggcaacacacaccaaagccaatttccaggaagaaaaaaaaaaaatccggcttgtttctggacccgttggagccgcggagctggcgcccaggggaggtccgggtgtctgcgggaaggaggggaacgagcaatgaaaagatgagcgggagacagaggagtttcaccaactgcacccccgcctcccctcctgcggcctccccccactccggagcccttccctcgcttcctcccgcccctctccccgcttgggctcgcctgtaattgcctgacaggagactgggaggaacaactttccctccgagtgctctccccgtccgtctgtctgtctttcccagagaccctgcagggatctccgcgggaaggaaggcgctgggagtctgcgccccggtcgcgtgggtgcgggcgtcggaggaaggggcgcggaggtcagtgccagccgcagggtctggccagcccacctcgcgtgctcgctctgcacccctagagggagagctgggcagctcctgcaggcgcagatcccgccgccgcgcagtgcggagcgcccgggaggtggcggctgcttctcgcaacttcaaatcccggggcccgcgccctcggcggcgaggaacgcagggtcaccccctgccactcctcatcgcgccatcctgagacctgtggcggggagcagcggggcacccctggacgcccctgcccagagctggagggcgaggaggggaaagccgggctggagtgggagccgcaccgcgaagccgggcgaggggcagcagtgtcgctgtggtgtgaagcgaagacagaccgcctgggcgggcgaggccgggctgcagccccacgcggcctccctggcccgcatcagggcgcgcggctgggtgccctctgcgcgccgcggaggcttcattgtttcccgagatttggtgcccgttcctctggggcagagggaacaccggagggtgggaggtgctgcgccttccaagcaggggggcaatcgccgcccgaccccgcccaaccttgtctgggagcccaggtgctagggaggggtgtggaaatcaggggtcgggcggcccccgtttctctgtgcatcccgagggagggaaagagtggcgggggaggggtgctcttcgctgcgccctctcagtgtccgctcccggccacagacaacgtgcacgccggccctggagctcctgccacccccacttcccacagcggctcgtgcccccagcccgctggatgccccccaggcccgtccccgagggttttccgagaagtgctgcaggaagcgtttgtagatgcgaaaagcaaggacatttctgggaagaaacaggttgcggtcaccgatcaggccccggagaagggtcagtgcccacggggcacctcccagggagtttgtgggtaaggtgaaaaggtcacacgcctcctggggattggcgtctacacacacagccaaagtacagcctgattcctacctggcacaaatagctggccaaagggaggtaggaatgctggcaaggagactctggtcaaaggttttggcggaagaaaaaggggcgggcagggagaaagcccaaggcgcgcgggccccaggccaggactgcgcgctcgcgactcgggctgggagcagtgacgtgcgcccctcggggtgcaggccgttcccgggccagtgggaggtgcacccacggagcccgcactcgccactctcttgccccgggtcaagcctgtcttctcctccccacgcgcctcgggattcccagtcgccaagttggaaactcggcccccccgagcgcctctttcctctgccagtttcctccttcttctcagctgtcggacccctgggaggcgcggggtgggaagtgggcaccgaagggctgggagttaaatgcctaagttgagcggaaggagcactgtcgaagccatgggcagccctgcgcccgggcaggcgggcaggcgggaggcgaggcgggggcgccgaccgcgcccagcgcagaccccgggggagtgagcgccgcagaggcagcctgggctctcggctactacccgcgcgcggtcgccgcctccccaggtgcagccccgccagtcccagcccccggctgcgccgggcgagcggcatcatcagatttagggtgacccggagcgacctcggtccaggctcggagggagaggcgcctctcaggacctggcaggttgacagggaaggggaaccgggagggagcggcggccggggcggcctggagtctcggaggcccgcctgcgtcctggggggacccgacctccgcgctcgctccggagcgcccgtttggatagctctgagcctcggcggggtgagcgagggggcacacgagggagacttgagctgtgttgtttttagaaaactgccgccaatctctcttcccctttccctgctgagtgtgcattttccagcctagacccgccaggccagcaaataaagccaccggatcgtgcactccggagc

SEQ ID NO: 234692 - DNA, 682 bp, Homo sapiens
  chr10:35102970-35103652
  hyper
ctcccaagtcaggcccggccccgcagcccagccacatggaaccagcccgggataggtaggagctgaggtcctcgcaggaaaacttttcattccgcgactcttccaaggttgtgctttccagagcccagcaagtgggatcagctcagtaaatgctcgcaagcgagtgccaagtgccagcggtggccctcccgggaacgcctccccgaccccaagccggcgactccccaaaccctgcagcccccggacgcgacgggccgcccctgccggcccctaccagcaggggacatggaggaaaagccccccgccgctgttccgcccccgcccgagtaagggagaggaggcagaaggctcgcaacccgcctctgtcggaagggcagtcacgaaactctcctcacaccaaaagttcccagtccccggcctgtgcccccggggcctgggagccgggaaaggcctggggctggatttcccggcctgcgccccccgcgcgctggctcggggcttggctgggtctgcagactccggggaggcgcccagggccggcctatgcgccgctgcccggctcgccccgcgctaccgaggccggagctcccgggcggagggtgagggcgggggccgcgggacccggctgggtgtcccagaggctgcgccccggcccgcgcagagaactttggcgcccgcagtc

SEQ ID NO: 234693 - DNA, 1176 bp, Homo sapiens
  chr10:35103892-35105068
  hyper
gggtccgtccgaagcacacggtcactttcatgccgccgccgccgcgggcgggcccgcgcccctcgccgagcgcagccggagcagccgaggccgggaccgaggacgctgggcgcggaggagccgctggggactcgggcgcgcgggcggctaggggcgcgggcaggcggcggcgacgccggggggccgctcagctcgcatgcccggcccggccgccctcgcctcgcctcgcttcgcccggggcttgcctcgcctctccccgccgcggcgcccgcagcctccggccacctgttcggcgtcgcggcgcgctcgccggcggctgcccggggctgtgtggcgctggcgctcgctcggggccgctgggggaggggacggcgggaggggaggggaggggaggggaggggagggggaggagcagggcagggcacacaacaccgcgcacatgcggcagggggaggcgcggccggctacccgcgcggggcggagcgcaggaccgcagctcgcgcccccgccaccgccctcgggggccgacctccttccctccttccctccctccctccctccctccgggggcgcgggacccctcgccccagtgccagcacgggcaggcggccgtctgcccccaccagccctggcccaggcgccccccagcccccttcaccccgcccgcccagcaccctgcagggctgcgtcgcccctcctcggggacgccccttccacgcctccagaagtctccacggagccccccttcccctttctttgtcacttttaatcccattcctcgaactggagggttttgggtgcaggcgctcccggggaaagcagtttgtgctcagtgcggtgagtcccctcctcaccgccccggaggctccagcccgagcctctccgcccgcggggactcgagcctgcagcttgctcggctgggtttctgccctgcccgctccctagctctgctgcagggccggcagcggcagttctgcctgaaacgcaagaattaatagtctgctctggggagacagtggggaagccgtgagcgaccgggccttttccagaggccactatttaccttgaagtttcctgttgaccctctgctgacccacccgcttaaatagattagaacttaaacatcgcaattctgatacatttatttctttgaagttctgcagcataaggaatcct

SEQ ID NO: 234694 - DNA, 305 bp, Homo sapiens
  chr10:35105248-35105553
  hyper
gaagctcattttgtcttagttatggactatgagtccttaataaatgtatgtcattatgtttaaagaatgacaaatgtctgcaaagagtggtccctgtcccaagccctttccagactatgtgaaattcttttttgccagttgtttccaagacacgtgaaagcaatcaagctcccctgggttggcgcagaacttgagcacttaagagctggaagagctggcgatcgaccatccatcccactccacctccaatcttaaaacaaggaaacaagacacgaggttcgtccgcttgccacactccctgcgct

SEQ ID NO: 234695 - DNA, 334 bp, Homo sapiens
  chr10:35415501-35415835
  hyper
ttggggttggcggcgttaggaagaaaccgacctcgagaccctgaagacctgacaacagccgttactctggctgacaagtcattggatttctggcgcacgcgcggcgcggcacgggcagcttccggtttccagccttgcccccgcccctaccttccgccccacctccaggctagttcctcctcttggccccgccccctgaccttccttctccctatccctaggccccgccccctgacccgcaccttcccgccgcccctccccggttccatttcattgttggattgtggcgcttcactcctgctggcggccggcagggggcggagttcgagcctgg

SEQ ID NO: 234696 - DNA, 484 bp, Homo sapiens
  chr10:35929169-35929653
  hyper
gcacagcgcggggccggtggtctcgtagcgcacgtgctgctccaccgcgcccagctcctcgtactcgccgcgcccgcccgggccgcccgcgcccgcgcccgccgcgcccgcgcccgccgccgcgccgcccgcgcccccagcgccccccgcgcccggcgcgccaccgctgcacgccaccttctcgtggcccgccaccaggcgcactaggtagcccaccgacacgaagaggtagcaggccgagaggaagataatgggccgctccgggtacttgaagcgctccatgtcgataaggaaggtggagacggtggcgaaggtggacacgaagcagagcaccgaccacaggccgatccagaagacggtgaaggcgcgctcgtcctggctgaaaaaggggttgtggcagggcagcgcgcagttagcgatctggcctgtcttgacgcggttgtagagcgggtggcgctcgctggacacgctcaccataggcgcg

SEQ ID NO: 234697 - DNA, 2341 bp, Homo sapiens
  chr10:35929893-35932234
  hyper
tcggtgcggttgtagtccatgcacagcgtgtcagggttgccttgctcgggcagccggtcgcagcgcatgcggtcgggccaggcgaagccgtactggcgcatgagcggcgcgcagccggccttggcgcgctcgcacaccgagcggcagggcggcagcggcttcttgtagtcctctaggcagatgggcgtgtacatgctgcacaggaagaacttgagatcgggcgagcactggatctccaccagcggccagaactggtgcacctccaggcccgcctcgtcttgcgtgtcgtggttgaactgattgggcatgtaggtgtagttgtagccgatgcccttacacagcggcacggtgatctcttggcatgccagctccttggccgaggcggccgcagcgccgctagagcgctgcagcagcgccaaggcggccagcagcgaggtcacttccaacaggtaaccccactccatgctgtgcgcctcggcccggtgccctcgccctccaggcggcgcgcagaggggtgccggggggggggcccacgagagagccgcagacgggtacagcgggtgatctggggtctcccttatgcttcgcccgggaggggggtctgccgataatctaaccccttctaggggcgcgtccgcagcggcgcggcccgcagcctgggcagggcccttccgcactcctttccgccgctccgggggtttgaaggcggctgcaggcgcgcgccacagtccgtaggtccgctctgctggccccgggtcgcgctcagccctcgcggcgcagagcggccgggcctcggctcatcgtcccgcgctcgctcgcctcctctccgcgcgcccgaccacttctccccgccgcgccgggcggcggtgactccgccggacagagagggcggaggcgccgcaagtttcctctggggccgcggtgcgcagtcaagatggctgggccgggccgcttgccgcgccgggtcagccctggcggccaccactcggcccccgggggctcatgcccgcccccaaggccaagccgccgccgccgccgccggagttggggacccgcctcggcccaggccgccgccctctttctccggcgtccgtccttcgtccgtccgccgccgggacagacggacccccgccgcctggaaaagtcagcgccgcgctccggccgcagtcgggcgaggtgcacacagtctccttcctgctggacacccaggagcaaatccagaccggaaggcggagcggacacctgagtggcgcggcccgcgcccagccgccgcctcctcctcggcgggagcagcgcccttagcccaacttcccggctccagccccgctcgcgccgcgctgccggctcatgaatatttatacagcgcggactcggtctccgcccccagccccgcgagccaatcgccgggcggtagggcggagtccacgcgctcccagggctcagccttccttaaggcagtccccgagtgtccgcactgctgtgcgcgctctctgcggatggagagttttggtaaccttgggattgaccgcagagacagagtgttggccatggctgtccccatggcgctgagtgcgtcggaggtcttggtccccttaccccgagtctgcccttggggacagggacggggtttggtgcagcgcgcgcctccccggcgcgtttcaaaccagccaagcccctgctgccaccctccgcaaatgtgggtgatctgcaggcggctggggtctcgtgctcctcggggcggcaggaaggtctcgcagcaggcgagcgccggggaggcctgccggggctcggcgctgcagaagacccgggaaagggtgtcctccttggggttctcagaacgatggtttctgagacttggagatgtggggggtgtggagtcattctaaactggggctggacccgggacggcccgggtgagatgccccggagcccagccttgggcgcgcgaggggcgcgggggacaaatgcccgccagagactctcctcccgcctccgctgcgtgacctgggggagcctcagtttccccacctagagagttgggtgatcatagcacagatctccaagggggctttgataattaggtgagataaaatataggaagccccgagccgccgtgctttcttaggaaaaatcattcaatttctttctaaaattcaaaacaaacctcgaaacttataaataggacaggctggaaactctggggctggattccctgtcttcccttcgttctttcaggacgtctattcatccatcccaagttcacaggcttttgccagagcctccttttctctggtgggaggcggcgctgcgctctggcgtggactccgcgacacgtatctgc

SEQ ID NO: 234698 - DNA, 111 bp, Homo sapiens
  chr10:38146150-38146261
  hyper
acacagactccgacggcttcaggatactgtgccatgattacacataatacataagcgaacgcgaaacgtgtaaataattacttgggataggagggcggtcagagccagcag

SEQ ID NO: 234699 - DNA, 101 bp, Homo sapiens; identical to SEQ ID NO: 202051
  chr10:38146491-38146592
  hyper

SEQ ID NO: 234700 - DNA, 427 bp, Homo sapiens
  chr10:38265525-38265952
  hyper
ccccaccctagggcgtaagaccaaaaaaacgccaatgccagaaagaagacactgcacatgcgcagaacgtttccctagccctactccagaactacgcttcccagaaggcccggctgcgactccatcttggatgacgtcgtgaggcgcggccgcctccagcggcctgagtgattgctgtcgggtttccgggagagggcgctgtccttgctcagtgatggccggagagctgcaccctgcacgtctgggcttgaagacagaaatccaccgtgaggtgctccaaggaacactgatgggcagttttgttaaagtgattgaactccgtgggtacaggagtacgtggagtaatgaaggataatgccctgtaaccgcttcctcttaggaatgctagctttcacaattgtgcaaacggtacgcgaaacgtaataaa

SEQ ID NO: 234701 - DNA, 278 bp, Homo sapiens
  chr10:38299277-38299555
  hyper
taaactgtatggacgagatctatttcctaacatttaaacggaaaatgacacgcagcggtcctttccttgagcgtctgcgtctaaactgcccacagacctcccccgcagtatatccctttggagtgccccggggaaagccagggctgcaggcagttccagcaccaactcagaccgcatctgcccactgcctagcggggcacttctctaccaatccgaagggctgctcgcccggcctcacgggaaaggtagtttccaggtagggcgccaacagcatcaag

SEQ ID NO: 234702 - DNA, 307 bp, Homo sapiens
  chr10:43133483-43133790
  hyper
gacatgactggagggcagttcgaaacctaaagaggatgaacgcagaacgggcaacagagtccgtatgtcgggcgggcgactgcacccgccctttcctacccaggtagggccgcgccctagcacatgggcgtaaacacgctcaaccagagaactgcccctcccgcaaggctcagcgctcggaccgcgcaagcgcacatgccctcctccgcggcccctacaaacagggcaacgcacagggcgtagcccgctccctacagaggctgcgccttagaggaactggcgtagcgtcctggtagacatgctgcag

SEQ ID NO: 234703 - DNA, 163 bp, Homo sapiens
  chr10:43134086-43134249
  hyper
ctggcgctgttggcgcccaacctggaaactacctttcccgtgaggacgcgagagcagcccttcgggattggcagagaggtgccccgctaggcagtggacagatgcggtctgagttggtgtgggaactgcccgcagccctggctctcccggggcgacccaaagg

SEQ ID NO: 234704 - DNA, 1080 bp, Homo sapiens
  chr10:43248638-43249718
  hyper
gagcccacctcctgcgccccgcccaacctcgggtccccaggcccagcctctgacacgccgctcccagcgcggccacgccacagctccgggctgcgctcccccaggcaaaggcgccgccggcgcgtccagcgcggcctcctcctccaggcggcgcttgtgagtcaatggaaaagtccttggcgaactgagcagccgcctagtatatctctgaagcctcctgcggagacttcacggcttgtcccaggagcttctacaacagcctggcattgagagtagagttgtaatattttccgccagtttttcccagcccggccccgaagcgtctgatcttaaagtccacgtatcagactccggggggcgtccctgcaagagcgccaggtccccgacacccaccagggaatgaatctgcgcccaggtccccgacacccgccagggaatgaatctccgtcccaggagaagggcgtggcgaggggagaagcaacaaccacaggacccgtgacagtggccaagccttagaggccccgcatgcctgccaggcgcccgagcccacgcagtccaggtttccccatccgggcgggaaccagctgtttcccctgcacgggcgagggcgctggggtcacctccgccgacgccaggcgtgagctccagaacccgctcccaaccgcccggtcccgtgagcgcggggagcctggctctcgcctgacaataaagaaatcatcacggacagaaggaaagaggagcgaggctgggaagggagcggctttaatccggggtccgcccccttcaattctccagcgcagcggccccgaaagtggggtggggacggggattgaggctgagctcgcttcttccttgttttccgggtctcgcgcctctgaagcgaactgggcctggaggggtgctggggatcgagggagcggcgttggtgggtgaccgagggaaaggtggggccagcccctgggcaccggtcggaggaggattacgaggcggagccgctgcctgcccgcgcctcacccgcttggtccacccaatagctccgctgtagactcgcggcggcaggagcggcgggccagatggtga

SEQ ID NO: 234705 - DNA, 74 bp, Homo sapiens
  chr10:43250858-43250932
  hyper
caggccgccggctcggtgagcgcagagaggggcccccggtttatgccaaacgcgtgtcttctccaacctcctcc
